United States Patent Application Publication US 2011/0183924 A1 - sequence listing, part 235

SEQ ID NO: 634440 - DNA, 1644 bp, Homo sapiens
ggtcaccgagttgatactgttgtctcttgtacgcaaacacgcaactctcaacttctagacgaggctgcttcgccgtcacattcgaaaagtacacaacgaacaaagatggaagaactagacaacagtacacttgacacacacgcaacagcaactccaacacccaagtccctcctaacacgggacgcacgctaagcaactgctctcctagcttcccagtctaacgctacgcgacgcttgctcccacgctactgctctgctaaactcaactgttgcctaccacaatacgccgacactgctccaggacgcgcactctcttagactgaaacgcttcactacgcacgcgcacctacacgcgcacgcgcgcaccttccacaaatctaacttctcatgcactactacgacacaactagacacggcccctggagccacaacccctactcgctctcccctgcgcaactcttcttactttgttcgtccccttacacaccacacacttcctcttatttcaacgcaacctccgaaaacaaacccacataacacagttcctctccatctccacacacgcggcttgcacactcaccacactttatacaccctgacacctgccaaaaacttgcctcttcccctttctgccacacgccacgccgcacacacctaactagacgctctccaacacaaacttaaacgtagcctttacacacaacgaatccactaactggcccacaacttcggcttcgcaccacaaaggaactaacaccttccttctcttcctgggagcaaaaccaaaaccttcctaaaccacacgcactgcacacacaccatgcgccccccttaaattacacttagcttggtcccaaacccaagctttccacgcaaagagcttaacacacggtttacacacacgctctcggaaaaccccaagccacggaattgcctacgcttaacgaaaattcctttctaacccccccccgttgtcccacttcaacccgcaattgttcttcccaaccaacgcgacgttgcgaccttcacacaccggggggacacccacagactcccacttaactctcccagaccctacagcgagaacgtcgcacacccactatcataccaacacaatctttctctctcgcgcgcccctgcttccatcagcaccacctatcagacagaacagtctcctctctcgcaaacacccaccacacgccggctcgcgaccagcccgcgcgcgccccacttacgagcagtcaaccacacacgtagtcgccacaacacgcgcagtcgcccaccacgcacaacaccccgcgcgccgacccgacccaagaggcgcggcgacactacccaccccgcaacaacaaacaccccgccgcagagaccacgcccaccgccctctctagaacacacacccacaacgggcgcgccagcggacacaccaccaccggagctcactaacacaggacagccccggagcgcctgttagcaacaccaacagcacacagacagcagagccgacacacgcacgcggacgcagacaagcctagacaaccacgcagcgccacaccggcgccgaccgacactcgtcagcacacgagcagcaccgccacacgacgactacaccccgaaccagcacacaatcaacgctaaccacgc

SEQ ID NO: 634441 - DNA, 277 bp, Homo sapiens
  misc_feature (23)..(23): n is a, c, g, or t
  misc_feature (47)..(47): n is a, c, g, or t
  misc_feature (58)..(58): n is a, c, g, or t
  misc_feature (96)..(96): n is a, c, g, or t
  misc_feature (103)..(103): n is a, c, g, or t
  misc_feature (115)..(115): n is a, c, g, or t
ttcatcacattttcaaaaattcngggtcaaactcccaaacccagggntgcatatttcngacttgtgtgctatgttgagtgaacttccttgcctaanctaaacnccagtgcatgtncaaggatctatatgttaaacatggtatatttttgaacaggaataaattaaagctttatcacacatatagaagacagcttcatttctttttagattctatggtggtggttactgttgtataaatcttaaatcacgaattttgatggtaataaatattaaaatt

SEQ ID NO: 634442 - DNA, 671 bp, Homo sapiens
  misc_feature (352)..(352): n is a, c, g, or t
caaggcgcaagcgcatattttgggcggatgtgtcagatgacccaaggggccttcgaggtgccttaagccgatcgcattgcatgtatacatattgacgccatgggtagttagtctcaggggattcagcagctgatgcaggccgagacgcgctcagaacgtgaaggagatcgaggcccgcaaaagaaagaaccggaggctgaagcaggccaaagaagaagctcaggctgaaattgaacagtaccgcctgcagagggagaaagaattcaaggccaatgaagctgcggcattgggatcccgtggcagttgcagcactgaagtggagaaggagacccaggagaagatgaccatcctncagacatacttgcggcagaacagggatgaagtccttggacaacgctttgttttttgactgtgacattcgggcagaaaatcatgaaaactaccgcataaatggatagaagagagacgcacctgccctggggagtcgcattttagatgcccttacgaatattgaagctatcacagctgtaagtacaatcttatgggacggcactaaattattttcataaattatataaaaagtcccttcactttttggagaggaagcaaaacaagcttttttggacagacttaaaaatatctaaagaattcatcttttttaccacattgct

SEQ ID NO: 634443 - DNA, 767 bp, Homo sapiens
agcggattggctggggctgtgtgtgtgcgtgtgcgtgtgtgtgtgtgtgtgtgtgtgtgtgtgtgtgagagagagagagagagagatgctcccctgcagtctggactataatgtctggcccatcaggtttcagttgaaaacagatcctgcaaaagttccgggtgcccacactggaaacgttggagtatcctgcttcacagaacacagtctgtggggaacgttggggtggagcacgagaagtttctgtatatcagctgcccaggcagaaggcgaagtggggtctccacagatctgaacgaagtgaagacacgacagaataagagactctatgtcatagatgacggacgtggagcgagaagaaacgaggcccctgggccccgggaaagaacgtgacgatcgacggggccagggactcccctggaggtggtcagcacgtacagcagagatggcaacagcatgagaacgtccagagcagacgagaacaaagagcggccgcgaagtaagaaggaacgcctcacaccaacaaaggtcaacaagcaggggtccagcgtgtagacggacgatctcagagagagagagtgaggagaccagtgcaaccaaaagagaccaaaagtgaggaactctctcggacagagtctccctccagatctaggataagcttggacgggcggagccttaatgatgatggcaggagagaccactagggatatcgcccagagacaaccgaaggcacgtcccccagtatatacagccctgaaagtgtagaa

SEQ ID NO: 634444 - DNA, 286 bp, Homo sapiens
catttctacacgatggaagcagattcagttttaggtctgtctgactgaaggtcatgctcttcatcacactgcctgcatcaggtgtgaatgtgtgtgtgggaaggtcttggagaggctggggtggagagttaagaaatatctaatactgtgaagttaaatttaatcagtacagcataatactttgcttttctcttcactttctctgtattacacagagtttgaaattaattgactcaaagcaactttcagaaattataatttttagagttgaaaccaatggtgcagt

SEQ ID NO: 634445 - DNA, 316 bp, Homo sapiens
taaaaaaaaccttttttttggaaaaaaaacttttgttagggcccctttttggggccattttgggccgggggcctttttgaaattaaaaaaccccccctttttctccccacttttttggcctttacccggtttctccaacttttttccctttttttcctaatttttttttaaaaaaaaaaaaaaaaaaaaaaaaaaaaaaaaaaaaatcttgggggggggggccgggcccccattcccccttttggggggggttttaaaattggggggggggttttttaaaagggggggggggggaaaacccggggggtccccaatt

SEQ ID NO: 634446 - DNA, 277 bp, Homo sapiens
ttctctttatcacaccctctgcagaggtaggaaggtatgaatatcttttttatgtcaagatgcaaaaacaaatcatgatgctttagtatgggagaatttttgtattcagtatttagtatgtacctttttttttttcaattggacagcccaattcggtataacatttagcttggcattgaatttttgtgtcagatgacgcttaccttgtcacagatcccctgacctgaagcagagtccttcaccatcactgaccagtgttgggggttgagagcccccc

SEQ ID NO: 634447 - DNA, 677 bp, Homo sapiens
taaaggttggaccagcgccggtcaagcgggggtctggcagctactgtccagctcgggactcaggagcccgagtgatagctgcttggtgctctaccgggagctactgaatcctaatggtcacccacttcttaaccaaggaggagctgctgcagaggtgtgctcagaagtcccccaggtagcccctgggagtgctcgacccggccagcctccgctccctccttcacaggaacctggtcctcagggacacaccagccagcaggtactcattgaccccagagtgcctggagctggcccatgaagttgtccgagtcagaaggcctgagcttgttgaatgtgggcatttgttcccaaggagccccctggggaggagacagtagtgaccaggagcaagcttcagcagagcttgccagtgaagcatttgtccatcagcagccaatgtatctgatgcctggagagtacagtgtgctgttgtgtgttgacattgtttataccttttttgctttcacaggccttagctgttccgatagctacagttggtgaatgttaccccacacggtgcgcaaactagcatgtttggagatttgtgtgtttgtccatgaaacaaatcctatagaaccagtaaaacctgggagttggtacttgtatacaacattgtggatcgcaagttaatttgatta

SEQ ID NO: 634448 - DNA, 184 bp, Homo sapiens
  misc_feature (171)..(171): n is a, c, g, or t
acactttaataagaagacagaattcacaccagaggcacactctggggaatgtaaataaccatcacaagttactctgctgggagaataaaatgaagctctctcagagcacacatacacaggagggaatgatttaaaataggctcatgacttacaatcacattatactgtatnaagcacttaaaac

SEQ ID NO: 634449 - DNA, 501 bp, Homo sapiens
cgccctgccctgcctgggccaccatgtttgtcgggttctcagagcctaaattcaatgattcagtgattgccccctataaccccctctgcggccctctatcatactcccctggatgggccactcatatttatcaggcatttactatgtgccagacacggctctaagccctttacatgcctcaacctactttatccacgcaaggtagacgttctcattattgccagttggctgacgaagagactgagacccaaaggccttagggaaattgtctaaattcacaccactgatgcgtggcagagctgcgactgagtcccgggagtctggctccagagtggtcataacttcaactaccacctacacctgctgccccacccatggcctcggcactccttgagggccaggaccaggaccacctctgtgtccctggagacagcacagagtctagcatgcagctgagcttaataactatttgcaaagtgaatacatgaaaaaagaacaaaa

SEQ ID NO: 634450 - DNA, 370 bp, Homo sapiens
cgtgggcatgcctgctccatacccctccttaccaccccaacccacagcgagacacctggagtggaggacggcagacgttctcattattgccagttggctgacgaagagactgagacccaaaggccttagggaaattgtctaaattcacaccactgatgcgtggcagagctgcgactgagtcccgggagtctggctccagagtggtcataacttcaactaccacctacacctgctgccccacccatggcctcggcactccttgagggccaggaccaggaccacctctgtgtccctggagacagcacagagtctagcatgcagctgagcttaataactatttgcaaagtgaatacatgaaaaaagaacaaaa

SEQ ID NO: 634451 - DNA, 384 bp, Homo sapiens
tctgacttggtccagtggccgcacaccagctagtgaagaaaaccacagactccaactgcactgtgtacgctctggtgtcctcatttccaaaaaaaaaaaaaaaaaatctacaagatagagtttaagaaatctcatttgagttgccctgctaatatttgcagctcgctggtgggtgccgtggaggccagtactcaccgtcaggctgtggcaggtacagtgaaaggaaaaactccatgagagaacggtggaaagttcacctgagagtgaaacgcatgccagttagagtggctgaaaaatagcatggacaacaccagctagtgaagaaaaccacagactccaactgcactgtgtacgctctggtgtcctcatttccaaaaaaaaaaa

SEQ ID NO: 634452 - DNA, 480 bp, Homo sapiens
  misc_feature (23)..(23): n is a, c, g, or t
  misc_feature (172)..(172): n is a, c, g, or t
  misc_feature (178)..(178): n is a, c, g, or t
  misc_feature (181)..(181): n is a, c, g, or t
  misc_feature (187)..(187): n is a, c, g, or t
  misc_feature (194)..(194): n is a, c, g, or t
  misc_feature (201)..(202): n is a, c, g, or t
  misc_feature (224)..(224): n is a, c, g, or t
  misc_feature (243)..(243): n is a, c, g, or t
  misc_feature (278)..(278): n is a, c, g, or t
  misc_feature (283)..(283): n is a, c, g, or t
  misc_feature (288)..(288): n is a, c, g, or t
  misc_feature (295)..(297): n is a, c, g, or t
  misc_feature (299)..(300): n is a, c, g, or t
  misc_feature (307)..(307): n is a, c, g, or t
  misc_feature (328)..(328): n is a, c, g, or t
  misc_feature (331)..(331): n is a, c, g, or t
  misc_feature (341)..(341): n is a, c, g, or t
  misc_feature (344)..(344): n is a, c, g, or t
  misc_feature (347)..(347): n is a, c, g, or t
  misc_feature (357)..(357): n is a, c, g, or t
  misc_feature (362)..(362): n is a, c, g, or t
  misc_feature (365)..(365): n is a, c, g, or t
  misc_feature (368)..(368): n is a, c, g, or t
  misc_feature (371)..(371): n is a, c, g, or t
  misc_feature (375)..(375): n is a, c, g, or t
  misc_feature (389)..(389): n is a, c, g, or t
  misc_feature (392)..(392): n is a, c, g, or t
  misc_feature (394)..(394): n is a, c, g, or t
  misc_feature (438)..(438): n is a, c, g, or t
gcagtttcgagtacagagcgccncagggcacttacaatccccacagaggccagcgacccaacatcagagtctgaccagctgggtggtcctgccctgcatccgagagggtgtcgggacactcatccagatggctctgagacagcagcggagctgacaagggggccccacaagngggagnccnttggcntcaaggncgcaagnnctgtccttgggccgccgggccngcggagccgcccaccggcnttaccctcagagattgctgcagaagcctgtgtgcnggaangggcngccacannncnngggaggnacccgggggcacatgtagccnggntattcaatgntancanagacgggaangacanccncgnggntgcngagagcctgaatgngangngcggcctgttccaggtcgggctcagccagctgcacctttgagtnggggatgaactctagtgcacaggacacagaacacaggcccag

SEQ ID NO: 634453 - DNA, 326 bp, Homo sapiens
gctcgaccattataggccccattactttatatcggttctccaaaaatcacatgaatgaagggaaagaaaggaagaaaaaaactggctacagttcagaacgtcaattatgtcctcttttaatccccttttcacgatttatttgacattttgaacagtggccaaaaaagctattataactataaaacatattcattggtataaatctcattcgttgaatgatttaattaaggtattgacatgcttaattgatatgctaagccaggaccatttttatatctcatttccatatgctttctgctttaagagaagagaggagctggatcttt

SEQ ID NO: 634454 - DNA, 133 bp, Homo sapiens
agtgatcttaatgtgtactgtctaatcgttcctgtctttcttttttgtatagacttgataatgtgtcagtgacttctgtgtatatttaccccatatcttgtaaattcctcactaaatgtccatagcagtaaaa

SEQ ID NO: 634455 - DNA, 108 bp, Homo sapiens
tctcatcttcaatcctcttgccaccttctttcaatcctgctgcggacgcgagggggtcccagggcccgtggtgcccgaggtcggtcctgttcgccctcctcctcagag

SEQ ID NO: 634456 - DNA, 429 bp, Homo sapiens
  misc_feature (1)..(1): n is a, c, g, or t
ncaggtgcccgcgcattgacctggttgaccacaatgacctccgcggtgatgccctcagacagcatgagccagaatgtcatcgacagagaagacagtgccagtgaagccaatggggaagcgtagatattggtgaggttcagctctttgaccttcttcccaatcaagttcagcgcttgtgtctacatgatgttgagagccttctatgtggcagttgtgcacgctctgggtgtaacacagggttgaaatgtagttcttggccacaaatgtttgcttcagaaaactcacatagcgcccctgcttgcacaattagccgaccgattaagtgctttggcacctcgatctcacagatgatgaggtcgaccttcatagggttggagcctgtctgcgcattgcgaaagctctcagtcttcttgagactgcaccctcgtg

SEQ ID NO: 634457 - DNA, 141 bp, Homo sapiens
cgttgtcagtgggttatgtttatattctacgtttattggtaggacaggaacagtgccaagacctccacacttccctgggaagaacagtcaggagaattagatacatctaaagtgtgggttacctgagctcgacattcgtaa

SEQ ID NO: 634458 - DNA, 202 bp, Homo sapiens
gcgagtttcaaacttacttccatatgaggctaagacacctcaaatttcaggaattggggaaaataaaattagcacttgcagaagtagcagcagatgggaaactgccttgcttgacattttctttcagcatttaaatttttggcattttacagcttcatgacaaacagttttgtgccataccttagaaatgtggtgctgagtt

SEQ ID NO: 634459 - DNA, 755 bp, Homo sapiens
tgggtaacagtggaatgtggttgatcagatttttcagttcaggtctggtagttgggttcaatggtcttgggagcttgcgcattcgtttcgcgatggctcttgcgaagactgctgacatgtgagcataaacgagtagtgcacgctcgggatcaataatgcacattggtgtaatcatcctcaggagtgtggccctgctattctgtatcctagttgttatttcccatgaactgtgagtctccctagatctcctgtccacgacttcgaccgtgccttgtgctactatggtactcacactggagccctcgtgtctctacccaaggtgccgatccctgtactgccagtcaactactcttttgtcggggcgctgtctgagcccacaacgcttattggttgctactcagtacgttgttacccagcgttcgtcaacatctcagggcccaatttgccctgcgctggagttcccccgtggctcgtaggacactcctaacatagctgctgtgccatcgggtgctccgcacattccgcagccaggccctgcagcacacccactccgtaacctctcacctgtagcctgtgccaagcctagcacttgtgatgccgtcatgccccgagggccctctcgtcagttctgggaggatgactccagtccatgacgcctggcacacccgtcacggtatgcataccaaggcggcaaagctccagaccgtgccagacccaggtgccccagttaacttgtctaggttctgcttcccatg

SEQ ID NO: 634460 - DNA, 742 bp, Homo sapiens
agcggggtgaagcaggacctcgggccatggattctactgaagaaaggtagccatggaagagaatatggaagagggacagacgacaagagaagggtgttttgaatgctgtatcacatgcctggggggcattcccttatgcctctctgattgccgacctatcctgctctatgcgggtgtagccctgtatctgtggctgcgcgtgcgatgaagcgctttctggaactgatcaacattctgttaaacgcatactttgtagatggcaagaactgctggagacactactggatgttatcaccgatgattgagatcgtttaagtatgtcgatctaaggcatcgcagctgcgtactgttgtgtatggcatgagcgtgatggtgggaaggttatcgttcagaacatggggccatcaagagatctctatggggcattgcacaaagtcgatcacattgtggacagatgtgtgagcgcatggaggcagttatgctgacatatctttgtccatgtaggcctggctgggagtcacggactttcgaccgtcacatgacagatttacaatgtacttcaattctgtggaggcatcctggacggaagcaccacgattgagtggagggagcagaatctctgacttggacctatcgacagtttaggaattagtgacaagttggagaggacacagagaaatttgtgactgtcatctcgagaatttgcttgaggatgtgtgaatctattgaggtgaaaatgacc

SEQ ID NO: 634461 - DNA, 428 bp, Homo sapiens
ggggtccatacggagttggtctgacttcccgccgtatctgatagggaatctttcacagtcgccgcagcgattgatgtcctgccaattaccgacgaagatggccttacgttccttgcagcaggatcccacttatgtcgcaccaatcttgacttccatatggaacagtccgtttatcaaacgaaacgtgatcgcatctatatcataaatttcagtacgacctgttagaagcgtctgatgtcagctagggccattgttggcatagtccctgctgatgtcagatgtacatccttcaggaatactggccacagtgctctgctgtagatcgctgctgccactgggaccactccgattggatgtcgcttgactcctggaacctttacttaccgcatacaggcaggcttgctggccacatgtctttgtcgctactg

SEQ ID NO: 634462 - DNA, 309 bp, Homo sapiens
gggtaaatgctgctggagagatggaatcagacctggggcccggaacagagaccctgagccagagactcacatcagagccctgagtcacagaggacgcaaaggcagagagagaccgagggacagcggctgaccaaaaataaggggagccaaagattagccgctagagacagagacgtagaaacggataagagataaagtcattgacgcagagtccgaggagcagtaagaggctgggagcctggagagtaacaggcccagaagcagaggaacaaaagacgatagtgagcgaaacgggcagagacaaagaaa

SEQ ID NO: 634463 - DNA, 102 bp, Homo sapiens
tatagtagtgaacggattttagtagtgatcggcatatttagtaatgagcggatctttactaatggacggatctttactaatgcgcggatctttactaatgag

SEQ ID NO: 634464 - DNA, 193 bp, Homo sapiens
  misc_feature (43)..(43): n is a, c, g, or t
  misc_feature (74)..(74): n is a, c, g, or t
  misc_feature (91)..(91): n is a, c, g, or t
  misc_feature (141)..(141): n is a, c, g, or t
  misc_feature (146)..(146): n is a, c, g, or t
ccaccatggtgctgtctcctgccgacaagaccaacgtcaaggncgcttggggtaaggtcggtgcgcacgctggngagtatggtgcggaggncctggagaggatgttcctgtccttccccaccaccaagacctacttcccgnacttngacctgagccacggctcttcccaggttaagggccacggcaagaaggt

SEQ ID NO: 634465 - DNA, 122 bp, Homo sapiens
cacgaggagtgatccccatcaaataccgtcggcatctttacatccattagtacccactatttagctcccacttgtcagttcaaacatgtagtaattggccctctgtttctgcatcaatttac

SEQ ID NO: 634466 - DNA, 271 bp, Homo sapiens
tgcggatctacaggtcaacgattctcccgtctcagcctcctgagtagctgggattacaggtggcaccaccacgcccagctaattttgtgcttttagtagagtcggagttttgccatgttggccaggctggtctcgaactcctgacctcaaatgatcctcctgcctcagcctcccaaaatgttgggattacaggtgtgagccaccactccgggtaaaaaaattcttcatgcttagcatgctgacgccctgaatgcgggatgacgctgctttg

SEQ ID NO: 634467 - DNA, 356 bp, Homo sapiens
ttggaagccccccagcaacttttgcacagcaccccagaatgcccccaccctggagctggaattggatgtaaaggggcaggcttggaaactctcaacctctgtccctggggtgagcaagtcggacttggggagtgcaaagccccctgaaattgcccgtgaagtggggggtatctgtgactgccttgaggggtgggggtgtgcccttcctcggaatctccagcacccagacccgcagctgatggagaagcatggcgcagagtcccggacgaggaacccagcacagactcccgttccttggcttgaattttgatttgtgctatttttctaggaaattgtccattacatccaaattttca

SEQ ID NO: 634468 - DNA, 851 bp, Homo sapiens
ggcagacacacccttaatctgggtgagcaccatctaatctgtgccagcgcagccgaataaaagcaggcagaaggaagtgaaaagaccaagatgtttggcctccaaactaatatttctcccctgctgatggttcgtgccctcgaacatcagacttaggttcttaagctgggggagtggaagtgcttccttttccctcagctgtgcaagatggctagggtgggacctgtgtgatcatgtgagtaatactattaagaaacccccttttatatctatcgtgtaattccgtgtccctctagagaacccgtgatgaatacaatggggtattgtgtagaaagggtacttaattaaatactaaggatcaggtttctattatagcttattttatgatttcacacttgagagtatctaaagtaaaaggaagctaatcttttatttaatcctattatctaatcaaagaatatgtgtatttaaattcaaaaaatgacttcattaaggtcacctttcttaggagtgaatgtgctaataatgaggaaatactcatgtgtcacttcatacagcaaacaaatgcctagtgggtatccagggctaaaagatttcccattctaacatcttacctcaatagatggtcttatgtgtctacaaattagtctccaaaatagaggcccattatttttttcaacaaaattttagaattcaggtcgggggggaaccatggctgtaccccccacttgtggggcagtcgggttcgaaccgctgcccatggtgacccttggttacaaaaaaaaccgggtgggcgggaacaactgaggggggagaacatacacgggggggtgttcacccggggagatacc

SEQ ID NO: 634469 - DNA, 134 bp, Homo sapiens
ggatttgctggtgcagtacaactaggcttaatagggacatgcacagacattcagacgagggaccagcgtgaaaacgtatgcactcactactgtaagtcactctggataagagcatcagctaaatgccaaaaaaa

SEQ ID NO: 634470 - DNA, 451 bp, Homo sapiens
tttaaccagaaagatttcgatcaaaggaggggctgccatgacagacagcctcccttggcttgctggctcaggccttggagttccaggagcctggcagatccctataggtaaagcctgaagaggtcagattagcaaaagaagtctatttaagcatccttttcaatgcaccttttattgctacctactttgatctgaccccaatgggcccattttctcctccccctttgaaaccccaagtgcttctccctatcaaccctgctgcaggaggctcctctaacatagccatttcctaaggagaaatctgtgaacgtccccaagcccttcctgcatgcagcccttcaacacatgcaaaagcagcttcggtaagtcagtccctgtatctttagatgtcaccggggatccgcaagggatattcaattacttatcaataatcaaccagagctttccagag

SEQ ID NO: 634471 - DNA, 285 bp, Homo sapiens
cagtgcccagactctcagattttccagccttgtggcaggttttcattctgcacttccatctgcattttggccatgtggcagcacactccgtgtcaagggcagaagttccaagccagtgtgggcagtcagcacaccacatctccattccccagcagtccagcaggcagccagcagcacatgtcaccttgcaccatcgtccgttcctctccaagctcagcccagcagggtgtggcagccgtcaaggcacagcgtggtggtcagccagcattggcagtcacattggtc

SEQ ID NO: 634472 - DNA, 302 bp, Homo sapiens
agggtttccaaagaggtacaaagatgctgcagaaagcatctggtctgtactaacagcttgctgtcttcagtacaggccttcataatagtcacgtgcacggctgtctccttgcaatagatcccattatatgcagaagagagttttcatgttgctgataggttggtgctatagatcgaatggtgatgggattcgaatccactatgcacattagaggcttcattatcattggtacaatgaattttgaacgaagttgttggcattgatatcgagaggtgcgcgcggggatcgctcataggatgtcg

SEQ ID NO: 634473 - DNA, 738 bp, Homo sapiens
gggagtacaggggtacgatcatagctcactgcagtcaacttctcagactcaagcgatcctcccacctcagcctcccgagtagctggaactacagacgctgcaccatcacacttggctaatttttaaaattttactttttaatttccgtagagacggcggggttgggggggcgggctggcgggctcttgctatgttgcccaggctggtctcgaactcctggccccaagcccaaagcgatcctcctgcctgggcctcccaaagtgctggcacattgcaggcatgagccactatacagcctaatatcagcggctacccgttaagccagggtggggctaatgaccttgctgtcgcgaaccacacactgcacccctactctcccctctactgctgacagtatacgcactttcctttcctgcactcgctggagcacgccttacgcagtgcctgaaacctgctcgaggagcgcacgtgtcaactgatagttccagatccacagcccccgctgcacgggcccaggacatggccggcatcacaaccacgccaaccctccagacgctccgcggcagtccgagcgcgaacgagggcataccccgtgcaagcgttcacggcacctcccccagcaccccggcccggcaccaagcatggcgcaacagaccccgcgcccccccacctggcaccacatatccccacacacgccccacggcaccaccctggccgcgctcacatcgccaccccagc

SEQ ID NO: 634474 - DNA, 612 bp, Homo sapiens
  misc_feature (401)..(402): n is a, c, g, or t
  misc_feature (408)..(408): n is a, c, g, or t
  misc_feature (420)..(420): n is a, c, g, or t
  misc_feature (436)..(436): n is a, c, g, or t
  misc_feature (447)..(447): n is a, c, g, or t
  misc_feature (456)..(456): n is a, c, g, or t
  misc_feature (467)..(467): n is a, c, g, or t
  misc_feature (470)..(470): n is a, c, g, or t
  misc_feature (492)..(492): n is a, c, g, or t
  misc_feature (541)..(541): n is a, c, g, or t
  misc_feature (564)..(565): n is a, c, g, or t
  misc_feature (577)..(577): n is a, c, g, or t
ggcacgaggggttttgctatattagccaggctggtcttgaactcctgacctcaagtgatcctccacctcagcctcccaaagtgttgggattacaggtgtgagccacagcccctggccttaaaaaatcctttttttagagacagagtctcactgtgttgccaaggctggtctcaaactactggcctgaagtgattctcctgtctcagcctccggagttgttgggattacagacataagccacaacacccagcctcctcttacttttaaatacattctttcccttattatcctagaagatgaacccagaatattttccatgggcttgtagatgttgttggactacttctgtagctcaatttatttgcaatttgcatttattttgagatggagtcttgctctgnnacccangctggagtgcantggcatgacctcgctnactgcaacctncacctctgngtttgcagctncanctccttggtcccgagtagctgngactacaggcatgtgccaccacagccagctaatttttgatttttagtanagatgaggtttcacatgttggcnngctggtctgctnctgacctcaggtgatccccgcctggccttcgtgtg

SEQ ID NO: 634475 - DNA, 100 bp, Homo sapiens
gatctgtgatgtatgccacatctgctatagtttgcgtgctttgtggcaccctcatgacaggctgcctctaggacgtctgtgttcactgatgatgaagaaa

SEQ ID NO: 634476 - DNA, 941 bp, Homo sapiens
  misc_feature (29)..(29): n is a, c, g, or t
  misc_feature (102)..(102): n is a, c, g, or t
  misc_feature (125)..(125): n is a, c, g, or t
  misc_feature (239)..(239): n is a, c, g, or t
  misc_feature (317)..(317): n is a, c, g, or t
  misc_feature (325)..(325): n is a, c, g, or t
  misc_feature (388)..(388): n is a, c, g, or t
  misc_feature (547)..(547): n is a, c, g, or t
  misc_feature (582)..(582): n is a, c, g, or t
  misc_feature (593)..(593): n is a, c, g, or t
  misc_feature (600)..(600): n is a, c, g, or t
  misc_feature (602)..(602): n is a, c, g, or t
  misc_feature (605)..(605): n is a, c, g, or t
  misc_feature (622)..(622): n is a, c, g, or t
  misc_feature (628)..(628): n is a, c, g, or t
  misc_feature (654)..(654): n is a, c, g, or t
  misc_feature (658)..(658): n is a, c, g, or t
  misc_feature (683)..(683): n is a, c, g, or t
  misc_feature (707)..(707): n is a, c, g, or t
  misc_feature (714)..(714): n is a, c, g, or t
  misc_feature (734)..(734): n is a, c, g, or t
  misc_feature (738)..(738): n is a, c, g, or t
  misc_feature (749)..(749): n is a, c, g, or t
  misc_feature (760)..(760): n is a, c, g, or t
  misc_feature (763)..(763): n is a, c, g, or t
  misc_feature (768)..(768): n is a, c, g, or t
  misc_feature (783)..(783): n is a, c, g, or t
  misc_feature (801)..(801): n is a, c, g, or t
  misc_feature (812)..(812): n is a, c, g, or t
  misc_feature (814)..(814): n is a, c, g, or t
  misc_feature (842)..(842): n is a, c, g, or t
  misc_feature (849)..(849): n is a, c, g, or t
  misc_feature (851)..(851): n is a, c, g, or t
  misc_feature (878)..(878): n is a, c, g, or t
  misc_feature (924)..(924): n is a, c, g, or t
atgacattcaaacaggattgagcaaaggntgcctctgcctgctcgcatctcagcagcctgggttgtacttcataaacagaaaagagaaaaatcccgggagcnggaagtgaacccttttctcaganaatgttctctaaatcccaacacgtcccatgcccccggctctcagcagggagtggggggacacttggttatagcagccgggtgccagaggcctgcctctcactgaggaatgtgtncagggaagaagtcaacactggccgggaaaaacatcaggctttcacctcactcatggcctccataaggcgagcgccgtntgtgactnccgtcgtcaggaaaatgaacctgtagcctttctctctgcccaggaaccggagggctgagatcncagagaatgtacaaccacccaagaacaccaccaagaagaggcgcagggactcactggaagccttgtcttccttagtcatatctgtgaatgccaagtcactgcagtggagcagccgtcccacctcaccaaggccctgccagcctcgccgccctagcaccngcccaatgattcggcagcccaggggcacaaaagcnccaccgaagangtaagcnangtntcggggcactttcagancaaacncgccgtccacacgtgggatcaaattnagcnttttgctgaaggcacgaaaattgcnccccttggccagagaactgaaggnatcagtnatctttcctgcagccttgtnggtnaccagcctgcncactttactcnccncggcngtgagggtgtccccnggggcctgccccgttagngcccagccctncncagaatggagaaggttagcaggtgcccngggccananccctccagaaactgtgttttcagagancggtaatccttggggatcaaaccattctcagttatggacaaaaggnacaagaggagcaggctt

SEQ ID NO: 634477 - DNA, 344 bp, Homo sapiens
  misc_feature (103)..(103): n is a, c, g, or t
tgccgagctggtcaacgccccattgggtactataaaaagccgccgtaaccgggcaaaagcacaccttattatcacggctgcgcaggaggtagccgaggacgtntcggacgaaatcgagggaagagcagatgggatagacactgccactgtcacgttggcgaaaagtgcctagtgcttagcgcctagtgcttgtgggaatatatgcggcggtatagtcgttctactaaaatagtacgggtaggctgccataatgcagtaatgaatgcccgccgctcacagaaggataatcgtggctgagaacactcccgacaacaccgcaggacgtcattatcgtaggctcttgg

SEQ ID NO: 634478 - DNA, 195 bp, Homo sapiens
gatgtgactgcgtggaaatggaactttctacacactgggatctggtggcaacacacttttcctaccataatgccccaacaattgcttgttttctactgttgcctggttgggggacgatatattctgagtgttcctccaaaccttgtagcactcaactttttctgggggagagggttgtcctaagactggtctgcc

SEQ ID NO: 634479 - DNA, 799 bp, Homo sapiens
  misc_feature (14)..(14): n is a, c, g, or t
  misc_feature (67)..(67): n is a, c, g, or t
  misc_feature (135)..(135): n is a, c, g, or t
  misc_feature (141)..(141): n is a, c, g, or t
  misc_feature (149)..(153): n is a, c, g, or t
  misc_feature (175)..(175): n is a, c, g, or t
  misc_feature (181)..(181): n is a, c, g, or t
  misc_feature (203)..(203): n is a, c, g, or t
  misc_feature (205)..(205): n is a, c, g, or t
  misc_feature (208)..(209): n is a, c, g, or t
  misc_feature (211)..(212): n is a, c, g, or t
  misc_feature (214)..(214): n is a, c, g, or t
  misc_feature (231)..(231): n is a, c, g, or t
  misc_feature (237)..(237): n is a, c, g, or t
  misc_feature (268)..(268): n is a, c, g, or t
  misc_feature (283)..(283): n is a, c, g, or t
  misc_feature (291)..(291): n is a, c, g, or t
  misc_feature (294)..(294): n is a, c, g, or t
  misc_feature (297)..(297): n is a, c, g, or t
  misc_feature (315)..(315): n is a, c, g, or t
  misc_feature (348)..(348): n is a, c, g, or t
  misc_feature (427)..(427): n is a, c, g, or t
  misc_feature (440)..(440): n is a, c, g, or t
  misc_feature (442)..(442): n is a, c, g, or t
  misc_feature (451)..(451): n is a, c, g, or t
  misc_feature (462)..(462): n is a, c, g, or t
  misc_feature (492)..(492): n is a, c, g, or t
  misc_feature (502)..(502): n is a, c, g, or t
  misc_feature (504)..(504): n is a, c, g, or t
  misc_feature (509)..(509): n is a, c, g, or t
  misc_feature (513)..(514): n is a, c, g, or t
  misc_feature (526)..(526): n is a, c, g, or t
  misc_feature (544)..(544): n is a, c, g, or t
  misc_feature (554)..(554): n is a, c, g, or t
  misc_feature (556)..(556): n is a, c, g, or t
  misc_feature (560)..(560): n is a, c, g, or t
  misc_feature (563)..(563): n is a, c, g, or t
  misc_feature (587)..(587): n is a, c, g, or t
  misc_feature (600)..(600): n is a, c, g, or t
  misc_feature (794)..(794): n is a, c, g, or t
gttttgtgtaaatnttacaaagtgtataaaaaatctgtgtttctctacattaacaaaaaccaaaggntaaaaaatcggttttatatacaaaacacggagatattgcttcactttcaaacaagttccaaaaaagangggganacaatatnnnnntttttttttttttttttttttntgtttntttttttttttttttttttttntnttnngnntnttttggggttggttttntctttntatcaatcaacaggcataggtgggattcttntttagtttctttgtncggatgancgngtnggcgctgaaagcccgggntgtccgcctgccccggcccccgctgcctggttnttcgggctttttcccagagcacggttctgggtggggacgacgggctggctgggccacccggtcacagatgtatggaggnaatcgctccctanantcggccaangaaaatggganaaggcggcgccgtccgcccgtcctcctcgnctctggtcancnccgtncatnnttccgccctccncaccccgccaatacgctntggggacccnantttnatnggtgcagcaaaccggggcttctanctttttcccgggnaggacggggtagcactggctcctgtccttcctgggccccggcccggccgtgcagagctcactgggagggctggaacgagccggccacagagggacagcagggaggggccagaggataccgtggcggggacgggcggaggacgtgcacgcacgctggggtggaggcgcaggggtcacaggttctggcagcactgnagctt

SEQ ID NO: 634480 - DNA, 760 bp, Homo sapiens
  misc_feature (42)..(42): n is a, c, g, or t
  misc_feature (95)..(95): n is a, c, g, or t
  misc_feature (97)..(98): n is a, c, g, or t
  misc_feature (104)..(105): n is a, c, g, or t
  misc_feature (124)..(125): n is a, c, g, or t
  misc_feature (167)..(167): n is a, c, g, or t
  misc_feature (170)..(170): n is a, c, g, or t
  misc_feature (173)..(173): n is a, c, g, or t
  misc_feature (188)..(189): n is a, c, g, or t
  misc_feature (201)..(201): n is a, c, g, or t
  misc_feature (215)..(220): n is a, c, g, or t
  misc_feature (224)..(224): n is a, c, g, or t
  misc_feature (231)..(231): n is a, c, g, or t
  misc_feature (235)..(235): n is a, c, g, or t
  misc_feature (241)..(241): n is a, c, g, or t
  misc_feature (248)..(248): n is a, c, g, or t
  misc_feature (273)..(273): n is a, c, g, or t
  misc_feature (281)..(282): n is a, c, g, or t
  misc_feature (368)..(368): n is a, c, g, or t
  misc_feature (371)..(371): n is a, c, g, or t
  misc_feature (375)..(375): n is a, c, g, or t
  misc_feature (378)..(378): n is a, c, g, or t
  misc_feature (412)..(412): n is a, c, g, or t
  misc_feature (420)..(420): n is a, c, g, or t
  misc_feature (484)..(484): n is a, c, g, or t
  misc_feature (514)..(514): n is a, c, g, or t
  misc_feature (518)..(518): n is a, c, g, or t
  misc_feature (522)..(522): n is a, c, g, or t
  misc_feature (557)..(557): n is a, c, g, or t
  misc_feature (561)..(562): n is a, c, g, or t
  misc_feature (567)..(568): n is a, c, g, or t
  misc_feature (572)..(572): n is a, c, g, or t
  misc_feature (578)..(578): n is a, c, g, or t
  misc_feature (617)..(617): n is a, c, g, or t
  misc_feature (629)..(629): n is a, c, g, or t
  misc_feature (634)..(636): n is a, c, g, or t
  misc_feature (646)..(646): n is a, c, g, or t
  misc_feature (648)..(649): n is a, c, g, or t
  misc_feature (654)..(654): n is a, c, g, or t
  misc_feature (658)..(658): n is a, c, g, or t
  misc_feature (662)..(662): n is a, c, g, or t
  misc_feature (664)..(664): n is a, c, g, or t
  misc_feature (668)..(668): n is a, c, g, or t
  misc_feature (738)..(738): n is a, c, g, or t
ttatcgttttttaaatgagtctctagcagttcatcatatgangactcctactttagtctgtcctctgttgatgaatttccaggttttctcttggngnngggggnnaggagagttggaataaacnngagtgaagggaacacatctgtacatacattttgtactcattnggnttnttctcatgataaatnnctataagagggntgttgaaatcagannnnnnaggngggtggntggnggatcngtttggnttgattctgtgcaatacagacgggnccccaggnncctttgctgagctgtggttgaagggcatcaaacagtctccttttctaatgacactcccttttatagattggcccggatcctcgttngcntgcnggnactcaggctgatgagctccaacataacagaagancttttttntactggtctcattggcaatgtttcgatagacagcataatcccctacatcctcaaggtggggacngcagggtataatggccagatcaccggggcnagtntatngcgcaaccacacacctgccaaggagcaacagaatncttnnagganngttnacatanaaagaaaagtagtggtattttggtatgtgcaaatatttncatatgttagcnatttnnngtctggtttntnnttatntgtnaatncnaganaatagcaattaaaagactagtaggatcctttcctgacataagaaatgttttaatgccttttgatgaagcngcagattttggaacaatctttt

SEQ ID NO: 634481 - DNA, 211 bp, Homo sapiens
agcttgatgctgcttgtctgactctagagtgatccccccttgctgtccccatgaattgacctgcacctttccctgcccacctgctgcagaacttgcctggccagcaacacctgctcgtgcagacctatgactgtcctgtgagcatgaaattctttgcctggtgttcaactgtgggtacctgatgctctgaattctgtaatcatttgtcata

SEQ ID NO: 634482 - DNA, 973 bp, Homo sapiens
  misc_feature (77)..(77): n is a, c, g, or t
  misc_feature (89)..(89): n is a, c, g, or t
  misc_feature (239)..(239): n is a, c, g, or t
  misc_feature (285)..(285): n is a, c, g, or t
  misc_feature (297)..(297): n is a, c, g, or t
  misc_feature (374)..(374): n is a, c, g, or t
  misc_feature (393)..(393): n is a, c, g, or t
  misc_feature (403)..(403): n is a, c, g, or t
  misc_feature (408)..(408): n is a, c, g, or t
  misc_feature (413)..(413): n is a, c, g, or t
  misc_feature (490)..(490): n is a, c, g, or t
  misc_feature (510)..(510): n is a, c, g, or t
  misc_feature (513)..(513): n is a, c, g, or t
  misc_feature (520)..(520): n is a, c, g, or t
  misc_feature (528)..(528): n is a, c, g, or t
  misc_feature (537)..(537): n is a, c, g, or t
  misc_feature (553)..(553): n is a, c, g, or t
  misc_feature (566)..(566): n is a, c, g, or t
  misc_feature (574)..(574): n is a, c, g, or t
  misc_feature (663)..(663): n is a, c, g, or t
  misc_feature (698)..(698): n is a, c, g, or t
agcggagcgtcagctgacctggggagtcgcgattcgtgccggccggtcctggttctccggtcccgccgctcccgcangcagccatgtcngttcttcccggagctttactttaacgtggacaatggctacttggagggactggtgcgcggcctgaaggccggggtgctcagccaggccgactacctcaacctggtgcagtgcgagacgctagaggacttgaaactgcatctgcagagcanctgattatggtaacttcctggccaaccgaggcatcacctctgacgngtgtcagtcatncgatgaccggcttcaaggagaagatggtggtggagttccgccacatgaggaaccattgcctatgatgccactcgccnagcttcctagacgttcatntacttacagnttacnatgantcgacaacgtgatcctgctcatcacaggcacgctgcagccagctgctccatcgctgagctcgtgcccaatgtgccancccactaggcagcttcgagncangatgganggccgtgnaacattgcntcagacacctgctgangctctacaaatgnccattctnggtggacacgcctcttgcggcgttttattccaggactgcatttcagagcaggaccttgacgagatgaacatcgagatcatccgcaacancctctacaaggcctacctggagtcttctacaagtnctgaccctactgggcgggactacggtgatgccatgtgccccatcctggagttttgaagcagaccgcgcgccttcatcatcaccatcaattctttcgggcacagagctgtccaaagaggaccgtgccaagctctttccacacttggggggcggtcttaccctgagggcctggggcagtgggtcgggtgaacgactttgaacgggtcaagaaagtgggcgatataaccgggggacaagtgtctccgaggtggggacaacccgggaaaagctggggcg

SEQ ID NO: 634483 - DNA, 483 bp, Homo sapiens
aaagtggtgatagatttcctgtagtgtgtgtaaccttttgcgtgtgtaggttaagcacaacccagaaatattaatgaattatctaaagataagtaggtagattgcaggagtagaaaactggtggctcggggccaaattcttccacagatgtgttcttttttgtcctgtgtggtatttaaaattgtttctgccagtacataaaaaagaaaaaagaatttccatagaaatctggacttctagtttctcttagaaacatagtaagatttgtggaatggaaatctacatttccatatgtcagtagtgtgctgcttttaggctgggcctgattctgtttttcctcagttctagccttgcttgccatacccaattacctgtgtaggatattcttcccttccatctgtgtagcataggactgcacttctttagcttctctaaattttacaatgttttctgtacagtcttatacatctttttaaaaaaaaa

SEQ ID NO: 634484 - DNA, 181 bp, Homo sapiens
  misc_feature (7)..(7): n is a, c, g, or t
ttacctnactattctaatagtctattctagtgctcgtgctgtgtgctctggtactcatctgccgtttactttggatgctgagtgcagaaaaattgcttcaacccgggaggcagaggttgcagtgagctgagatcgcgccattgcactccagcctgaggaacaagagggaatctcggttctc

SEQ ID NO: 634485 - DNA, 323 bp, Homo sapiens
ggtactccaccctaaccccagaggctgtttccatacatgaaactgacctcatctgccgcctggtcctggtggactccttggatatctgagcattgcagatttatctgcacgaggaggcgcttgaaccctgcctctaaatgctgtttcttctgaagctttagctgtacctgtgtatagtttagttacaaacacactagtccatgctccaggagaagaccgaccaccgccgtgtgttgcccgcgtctatgggctctggactcaaatagcgtgatggttttctattgtaaaagtgggagaatattaagcatttttgcctcgacacg

SEQ ID NO: 634486 - DNA, 523 bp, Homo sapiens
ctggcgtccagcgtagccgtctgtgtcgccgcggtgggggacctgcggtcggagtgggagggccagtctgcacccaagtaggtggaagacggacgtggctttaggctggaatcgccttagaggagccatttttccagcgtggggccccaggcgagaggctccgacagggagcctggccactagtcgcgcagccggggaggtggagcgcgtcccagtacctcgatgcctcccgtacctcatccaaacccagttccttctgtccttggaggccagaggggactctgagcatcggaaagcaggtagtgccttggtttgcgtttcagtgtagaaccagacagagctttacaacatcctgaatcaggccacaagaactctccagattaacagaccccaactatctctgtttattggactgtccgttccaaactgggcagtatgacgaaagccatgtgatcactgcccttcgaggtgaagaagaaaaagtagtgcacatatcttctcccggagtctgtggacctggagc

SEQ ID NO: 634487 - DNA, 479 bp, Homo sapiens
  misc_feature (234)..(234): n is a, c, g, or t
  misc_feature (272)..(272): n is a, c, g, or t
  misc_feature (334)..(334): n is a, c, g, or t
  misc_feature (343)..(343): n is a, c, g, or t
  misc_feature (412)..(412): n is a, c, g, or t
  misc_feature (441)..(441): n is a, c, g, or t
actactggcttgctgtattttctctccatcatgatttctgtttttcccctgggcatgcaactccgtccgtttcatggttgataagttgagggccttgatgtcactttaaaacgacagttccctgctggtatgccttgtcagtggacccaaacatatcacggtgttcctggacagctcctccccaccttgggacagctggtgcgggccgcgcaccctcagcttccatgcaccctnttgtactaagcagtaagtgtccctttctgtgtgtgccntggcaggaaacacgtgtcactaacacaaagagatgtgagggtgggagctccaggaaggagcngtccccagntcccagtgggtgcatttgctcacttcctgtcctgggttcccgggccgctttccaggagacaggacagtntctggagcctccatgtccaggtgaagatnagtctccagccaccctctaggagacagaaaaggacatg

SEQ ID NO: 634488 - DNA, 885 bp, Homo sapiens
  misc_feature (635)..(635): n is a, c, g, or t
  misc_feature (862)..(862): n is a, c, g, or t
gattggaaacacggcttcgggcgtgtccagcagtgagcagaagattgatggactgtcgaattccggccagcagaaaaaatcgatgctgcctgtgtcgttcaccagtgccgcgctgcgcatatcgccgatgatgccatgggcatcgatggcgctttggggttcgttcttgaaatcaaccattgccacgaaactccggataaaggctcatgccgccatcaataaacaaggtgctgcccaccacgtattcggaggcatcactggccagccagaccaccgcattggccacgtcttccacgtcgcctacgcggccgtagggaatcaacttgagcaattctttttcagccgcgccttcggtggccgcacggttgattgccgtgcgaatcgcccctggcgcgatgccattgatgcggatgcgctgttcactgacttcctgggcgagggtgcgcatcagcatctccacaccgcccttggaggctgcgtaattcacatgcccggcccacgggatgacctggtgcaccgaactcatatggatgattttgccggccgcccgccgaaacccgtcgcaaatgccttggcgattgaagatccgcacggcggcgcgggcgcacaggaaactggccggtgaagttgacccnatcacggtgttccaatcgtcgaaggtcatgtcaaccaaattggcgtcttttgcaggcccgaattggccaccaaaatgtccaggtgaccgaagggctcaagggtctgggcgaacaggcgctccacgttcggtttctttggaaacttcacgccgatggcaattgcccgcccccccctgctttaatttccccacaaaggcttcggctggcccccctgggaattttatttnaacaccccggccccaacccccct

SEQ ID NO: 634489 - DNA, 267 bp, Homo sapiens
gaactgtatggatcacacacgagctctgtgggaaaaaagaaaactgctccttcgctctgctggaagctggagggtgctaggccctgtgtagtagtgcatagaattctagcttttttcctcctttctctgtatattgggctcagagagtacactgtgtctctatgtgaatatggacagttagcatttaccaacatgtatctgtctactttctctggtttacaaaaagccaaaaaaaacttaaaaaaatggggttatagaaggtcagca

SEQ ID NO: 634490 - DNA, 235 bp, Homo sapiens
cattgactggctgtgacatgcttacgggtggtggttgctgaaggtggggtgacagtggtaattacagtgatttttgtatagttttggttatctattaagagacagggtctcattctgtcactcaggatggagtgcagtggtacgatcatagttcactgcagccttgatttcccgggctcacgcaatccttctgcctcagtcttcccagtagctcaggaatatcaagaatcggcac

SEQ ID NO: 634491 - DNA, 567 bp, Homo sapiens
gggattgcgggcatgtgccaccgcacctggctaattttttgttttgttttgtagagatgggattttgccacattgctcaggctggtctctaactcctgggctcaggtggtccatccacctcagcctccaaaagtgctgggattagaggtgtgagccactgcacctggctcataaagtaaactttaaaaaattaaattagccaggtgtggccaggtgcagtagctcacacctgtaattaatcccagcactttgagaggctgaggctggtggatcacctgaggccaggagttcgacatcagcctggccaacgtggtgaaaccccacctctacaaaaaatacaaaaaaattagctgggcgtggcgacatgtatctgcaatcccagctgctcaggaggctgaggcacgagaatcacttgaaccggaaaaggttgcagggagccgagatggtgccactgcactctagcctggtcggcagagttagactctgtctccaaaaaaattttttttctttaattataaagaatttttatttatttatttatataaataaataaagtagccaggtgtg

SEQ ID NO: 634492 - DNA, 420 bp, Homo sapiens
aggatcctctaaacgacgcgatatgcttcgggctttcaaaaaagagacttcttgatgtaatcaagattaatcaccagcgggtgagaccgtatgtgtataaggaacccaagaatttaacaactctggtttctagccttggggggaagttagctttctgccgatcaatctgtgagctctcttttccaggaggagcgctgcccagatgaagggaaggcggcttccgctacaagggggagaagccccacaatgacagcagatgccagggctccgagggggatgtgtaacgggggatacatccatcatgtggtatccagatgatccagaaacatgaagaggtgggcagagtcctccttgtggcaacagccaccgctcaggaaacggcttcaggtggctgggactcttcccatcagggcccccgga

SEQ ID NO: 634493 - DNA, 117 bp, Homo sapiens
taccaactccaggcttttgagattcttaaagatcactctgaagaaaattcatcagtttcctgcttaactctatatcttatgtgatcctgatattacaataaaattatggtaaacttt

SEQ ID NO: 634494 - DNA, 585 bp, Homo sapiens
tggcagtccctaaaacgggctttaaaaaacatcgtgttttcactgaaaagctgtgggtgtcccacccggggccgggccggggctattaaaaggagtacgggttctccagcggcgcgcgcgcggccgggcgcggccctccgggggcctccttcggcggcgggtggcggccacggcctccagaaggcgctcggcgctgtagctgcggcctccgagcgcttgagcgtggccctcgaaccggggcgcgggggggcgggccccaacgcggcagaggacaacaaggcggaaaacagaggaggccccgggggcgttcagcagggcgaggcacggcgggacagggcggccgagaaagaggctgtggacgaacgtatggtgcctcgagccgaggacaaaagtatcgcacccacgcaaggcacaggaggcacagccgagccagcagccaaagagcacggccgatgcgagcgccaagcaaatccaaaggaaggagggaacaccagagggcccgcaaacaacaaaacagagacaaaagcagtgaaaacgaacaagccaaaccccacccaacaacccaccgatgagcaaacggagaag

SEQ ID NO: 634495 - DNA, 2234 bp, Homo sapiens
  misc_feature (1617)..(1617): n is a, c, g, or t
  misc_feature (2147)..(2147): n is a, c, g, or t
ggtcaagacaatctgatcaaagccatcttgtcagtcaccaaatgagtacctgcctgaccccatgcctctggacatgcctcctgctgcccgcctgcctgcaatcattcgttgggccaactgcgacggcgcttcatctgcccaaaccaaggctcctcctgcgcggctcaccgcacacttctgaccgaccttacttgaaccagtctggcgcgctgcacgcaactgcacacttccacgccacccacagcctgtacacacgcgccactcttggacgcaaaccggcaacggttgcgcggccaggccgcacacacaacggaacggagccttggccgccccacttcgaacccgataagccccctcggcacgtgcgccctgacccccacttgcccgaagaccggagacccccctttggcacggcccaaggactcaacccggcaacggcccggtcacgccaatttctcactaacatttccctcatacgtgccttcccccattccgggccaccggatgacccctttctacccaccacgccatctggtggccccacgacgcgtgcaagcccctcgatcgtgacaacgcgccttggccgcaataccgggcaacaccaaacttaaacccaacacttccgggccataccctttaaagcccacaaacgtcgtgccaaggcgcaaggcgcccgcggattggccacggcgccttgggctcgcaagcgttaccggggccgaggcaacctttgggcactgacccacttacatcccgttgggtgcgcacacaaccaacctttcacacttgtgccatcgcagaggcctcccgaaagcgcgattccgcggaaaacgggctatttgtcccctcccccacagcccacatccggctcaaatgcccctccgacaccccacttgatgtaccaaaatgctccaaacattctcccagccaacaactctttcccccccttttcccccacaacactccaccaaagcattaaacattcacacaacccaaaaattacccccccaacaatatagtcaaagagtcgtctccccccggcacccccccttatctcccactacgcccccctcctttccacacacaactacattagggcggatctcaccccctttggaacagcgacccgcgccgcttttggttgacgccaacaaagagtccagcacaaaaacacaactggcagctgaccacccgtgaataccacagctttgggagccgctgtgacccccccacgtgaagacaggacacagctgggcacaaccaatacacccgagcattttccccacccctccacgttttagacaccaccgcaccccagatagttgtgacggcacgacccaaagagctgcctgtgttgcactactggcgcactggcctacaccacacgcccagtatgcgatcaaacacgcacccccctcaaactatattggggacgggcacgcccacatcaacccgccccatctcaccaacgacgaaacagcaccgacggtcagagcgaccccacactttgagaggcacatgagcaaaaaacgcgctttccaaacactgcgtgcgtgtccttttgtggtgtcgaccccccgcaatcgccaggcacgctttaccccgtggacgcagccnaacactgtagcggtggcaaaacaccgtcctcacaccgctcatgaggtatcagatcccccgccgcattctcacacccatgtcgatgacagaacagccacccaacaaccattgttgatgcggcaacaaaccgtgaccccacaccaacagcccacaatgacacgcctacctccaacactcaagacagtacaagcacccgtggcgtagaccgccaacaactcagacccaggcccccgccaccacacttttctgtgactgccccaaaacaccgccattaataacacactcctaattgatactaccaccattcactctacacaaaaggcgacacaaaatcgccccaccccagtgagcacactcttacttatcagccgaagtagcaccacacaaactcatttttgttggctggcatcacccctcaaacagacggctcacccccccccaccaaaacacattctcactccactcacactaaacagcattactgcaacacatcgcacgtctttcctcccccaacccatatatgtgcgagnggcacacaaaatacactgagttactacctctcactaaccccgctaaccatcaaacgactttactcatacacaacattctttcctacc

SEQ ID NO: 634496 - DNA, 252 bp, Homo sapiens
tccgacccttaataatgagaccccaggctggagtgctgcggctcaatcagaaatactcttctgacgtaacatcttcagtaaatggaatacctcgtggggttttataaaatgctgagtgggtgtctccatagccatttacaaggaattttagcataatatgatcacacttagcttctccaactaccctgtgtcagaggtactcctattattagcatttttggaatatgaagagcaaggatcagaaaggtcaag

SEQ ID NO: 634497 - DNA, 220 bp, Homo sapiens
atatctggaacaggtaataggcagatcctgtacagccagtgtaggggatatgatagagggccctgggccagaaccctaccaacgccgaggtagctcaaggtcctggggaaccccaagagtagatgaggtgaatagtgaaggtagctggacttatgagcactatatctgcccatgctagcagtcaggaggccagagaacaaggcaccaggggcaccatata

SEQ ID NO: 634498 - DNA, 84 bp, Homo sapiens
gcggccgcctactactactactactactgctcgaattcaagcttctaacgatgtacggggacatgcaataaactgaaaagagcc

SEQ ID NO: 634499 - DNA, 341 bp, Homo sapiens
  misc_feature (115)..(115): n is a, c, g, or t
cagtttacccacagtagaaatgttttatgaaattggagttaatctcaaaccctgccactgctttatcaactaagcttatgtcctattctaaatcctttgcttttattttgatatntttgatagcatcttcaccagaagtagattccatctcaaaaaggtgctttctttgcttgtccataacaagtacttcttcattattcaggatttatcatgagatttcagcaatttggttacatcttcaggctccacttctaattctgattctcttgctatttccaccacatctgcagtgacttcctccacttaagtcttaaaccccctcaaagccattcacgagggtt

SEQ ID NO: 634500 - DNA, 137 bp, Homo sapiens
ttcatttgcgtatcatattatcctactgttttttgttcttttgcatgtttctagaaaacagctgtgtacttattgagcgttattttggtgttactgtactaaacatgcataataaatattcttatttatctcatgtt

SEQ ID NO: 634501 - DNA, 268 bp, Homo sapiens
gggggaccccgttatcccgctgtcgtttaagcagagcctcatgcctccggcctctggccatgtcttttcccctgtgcccggaacccgaggtgttccctaccaggggacagcaaaactgaatggcctccgaaatgctcccccagcgggggccagctccatggcagcgtaggattgccccgcagtgcacttcttgtggcagagtgtgtgaccccctgccggggcgccgcctcggcggcccgaagcaaacggactgcagaacggggccctc

SEQ ID NO: 634502 - DNA, 123 bp, Homo sapiens
tgttgttattttggcatggcccttactatccaataacataatatataatttatttatctactgtctgctcacatatttatccacacacacaaacacacacacacacacacaactagtaatgcg

SEQ ID NO: 634503 - DNA, 216 bp, Homo sapiens
  misc_feature (35)..(35): n is a, c, g, or t
  misc_feature (57)..(57): n is a, c, g, or t
  misc_feature (60)..(60): n is a, c, g, or t
  misc_feature (64)..(64): n is a, c, g, or t
  misc_feature (96)..(96): n is a, c, g, or t
  misc_feature (118)..(118): n is a, c, g, or t
  misc_feature (194)..(195): n is a, c, g, or t
ctcaggcaaaaaggcaacagtaataatttgtaaanattatagaaacttggaggattncanaaanacatgaaaaagaggctttgcagaagctttggncacagatgttcattgagcttgntagggatgcagtcatagaaattcgcaataaaaattcctatatgaagctctgcctacagcagataacagaccaaaannaaaaatggcctttagttacag

SEQ ID NO: 634504 - DNA, 309 bp, Homo sapiens
gctgcggcactctcgacgactctcggtcttgtgctgggaagttggttactctattcgatttgaagactgcagtagtgcaaaaaccattcttaagtatatactgatgggatgttacttcgtgaagctatgaatgataccctcctggagcgatatggtgtactacttcttgacgaggctcctgacaggacactggctacccatattctaatggggtgtactgaacgacgttgtaagacagagatcagatttaccggttatagttctgagcgctactctagatgcaggaaaattccagacaagaaacacacg

SEQ ID NO: 634505 - DNA, 159 bp, Homo sapiens
tgacctattatttgtgcttgactactctgttggacaggatccttgcgctattgtttttacttgattataggcagccttgatacatctccagcagctgtggctgggagatagtctaactcccaaagagtccagaatctgagtaactggcattaaatgcag

SEQ ID NO: 634506 - DNA, 777 bp, Homo sapiens
cctctgttacctggcctcggatcaactggcgaggcctttggagatccgccgtgatatagggcacactggtttccgaaattaattgccttaagcccgatgttagagaaagacgacaaaattgggccggtgtttgaaaaaaaatagcgtctacagaattcttaggaattcttttcaccacgacggttgccgattagccttagagttaccaaagaggggtaccccgaccaaaggggggaaaataaattcgttgttagaactggaaatagttgaggacacccactcgtgtaggggaccgattgtgtgacgccaacacgggtttcctgaaaaataattaggaagtgtattcagtctgtgaaaattgggggccccggtgagttttccaaggtaggtgaaccacgtgtccagtggaaaatacccggtggaggacgtatatttgtgaaaaatggtttaaccttggattcctacgtctttatcgtgcgtaaagccggaccactcaacttccccacatgggttttttaaaaaggccctttttttacccaattgtttgaattatttacccacctttttttttttttttttttttaattgagcggagtctcacgctgtcccaagctgaagtgcagtggtgcgatcttggctcactgcaacctctgagtcccaggttcaagcgatactcatgcctcggcctcctgagtagctgggactacaggcgtgcaccaccacacctggctaattttttgtatttttagtggagacggggtttcgccatgttgccca

SEQ ID NO: 634507 - DNA, 372 bp, Homo sapiens
aggatcaataaattctaaccatccctggagtctttgtgtattaacaatgttaaaataaatgtagactcagtctataagatatcagacagttttttcagtccatgggattgtaaatataaacattaactttccctataataatatataggctttgtaatctatagcctcaaatagatatttataatggattcactggacatacagctgtatccttattgtctttattctttagtgtttctgattcgctataagtagctgttgataaagccgtccaaggaaaataattattttcagtatttgaagtcacttttgagcccccatcaagctctcattgtgatggcagggataccttttcgttgttaaaagcctatt

SEQ ID NO: 634508 - DNA, 907 bp, Homo sapiens
gactgagacccatcccagtaacccgagcgccgctggtctacgatgaacaccatgattcaatttgtacaaaccttcttctctcctgtcatcggcgggcagccctcccagctatgagatgctcatagcgtagtgagcaacgcaaggtgtggctgtgctgggtggcgcccctccacagacccccttggcttcccccgatgttccacctgtgtagtcgcacactgccgtccaggcggagagcctccggtgcccgcaccgagttgtccgtcctgtgtcccctggtggctagatcatccgcatcttctagtggacagccgcctggctgtgctggggtgtttcattagcgggtttctgcctaactcccgtgaccgtctgaagggggactggggagcagcactgggttgagcagaaccagttgactctgggggcccagggctctgattgccttgcccacccggtcgaagggtgtcctgaaacattcgtgtgggccccgtggattcctggggcagtcctcgggtgaatcccttcttgctcgactcggtcattcccccaggttgcttgcgtcttcccatggcctactggatggactcagggaggcactcgctgaacgtgcccagagatgcctccttgtccccagtgagccctggtagtcccgacgttacatccaaggctatcaacttgccctcgccctgccccccggtgccgagtccctggtattcaggcctttcatagcatcacagcgctttgcttacaacgtggggatttcactgaaaggtgcacgttgtggcctggttgctcatgacacaacagcagcgttaccaaagaacaactacgtgcaggagggcggcggacatatgctaaaactttggacacgcagacttatggaggcgaggagaaaggccatgaacaa

SEQ ID NO: 634509 - DNA, 221 bp, Homo sapiens
agctgctccatcagctctgctcccatcagcagtcttctccatcagcgcatcttgcttcccatcagactgctgttttataaccaacaagaggtcaatgtatagaaatccctgatgggacgaagatgcgtcccatcaggggatttctatatattgacctttgttggttacagagtcaacgacgttacaaaatgatgggagaaagtgctgatgggacggagatg

SEQ ID NO: 634510 - DNA, 318 bp, Homo sapiens
tgcaggagagaggtagaaacatttcaaataagaggacgttcctctcacttggggcccactcctcaacagcctgggtcagggaggagaggcaggggaggaattctgacacttctcctcttcctaacctcccttttccattccttgaagctgtagaaggtggagggcctttcctgggaaccaaaaaaaggacaggtcctggtggcaaggaagggccatggggactgaggggaaagggctgaccctgataaggggcagcggaaggtggcggcagttctggaacgcccaactcaagcagaacagcactctgttgcctgccta

SEQ ID NO: 634511 - DNA, 1092 bp, Homo sapiens
aaatactaattgggcctcatagggtggtctctggaaatggggtgattattccatctcatttatccatcccatgcagcaggcagccaacagcccacattggcaccaggcatatttgtaggccaacaggcagtgtctaggcataggtcaacccagggaggcccatgctgttcatccagacaccactgcatcagttcagacatgcagcatgataattgctgaccacacatcatgggagatcatgatcacttcttcacaccacgaaattcgatatatgagtgccacctggcaatgcatatcgagaatgacgattatcatgcaacggacgcgatgttgactacagaaccctatccgtgcaggacgcactcggtgggcaggaggaacccaacatacaagcccacagacaacagagtatccatccgggggactctggagacacacataaccggagaacaaatcaagtactcgaccgactgaacgaccctggttctatcaacctactattatgaactgacacgcttgacacactttccaacccgactaaacacgtactttgactgactacgcgacacacacccttgaacacgaacttgcttcaagaacacctcacgacccttggcctaacgtgccacaaacacgcgcatcactcacaaaggacgaactacggggggaccgccgttcgcacaccctatcattggatcttaaaccccagtaccgaaccggacataaacgggacaagaacaagacgaggacgacaggggaacacgggccatgagccggcgcagccgcaagccggcggactggggcccccagagagcgacacgcggcatggccgatcgcaagcggaaaaagccacggacacccagacgaaagccacaccccacagaggacacgggccccaggagaggagcaacgacataggggcacacgaacggcacacgaaccatacagaccgtcacggacactggcggaacaacggacgcttggaggcaatctcaaacaacccgaaccctggcgaaacgaggaccagcatcgaacaccaccacggacaggcaaagcaccgacacgacaggaaacacactctaaccatgccga

SEQ ID NO: 634512 - DNA, 136 bp, Homo sapiens
atattttagataattgaacctaaaactctaattttatttaaaaaaaaaaaactgggatacagaggggacggcagcctcactatccgggcacgcgtcacccgcatacagaacacgtccagcagaccttccggacgag

SEQ ID NO: 634513 - DNA, 118 bp, Homo sapiens
ctggtctcgatcagccgcccggaggacagcgacgccgaacaccagcgcatgacccgttgcgccgaagtggtgctggaaaagctgggcctgccgtaccgcaaggtgctgctgtgcaccg

SEQ ID NO: 634514 - DNA, 840 bp, Homo sapiens
gggccgggcgcggtggctcacgcctgtaatcccagctcgtcagggaggctaagaggcggaaggagagtttgagcccaggagtgcgatagctggccgtgggcgcagtatagcgagacccagtcttccagaaagggctcggtttgagagatggacaaacaaaaggggatagcctgcctgaaccggggagagcgtcaagataccatttgtgtgtcctggggcgaggagagtgcggcaccactatggcttacaacatcggacccatgcgcagggccagagtgcaaatgtgtgaaagatcagtgggcttcaataacttatgaagataggaggataagcaagaagctctttttccatgtgccagaagtgcaggcatgggattgagctggaggcaggagcatgaggtggcagtgctcagtgattcttaatcagcgccgggggggggtggagcgcctggtatgtttggcgagtctgtgagggccccaaggctgttgcagtcctcgacctgatcggttggtcaatcgctttgaagaatatccacttctggattgatggccagtggttcctcgcctaatggttcttccgtcagcaagggggaccagataaactcaatggggttctggtgccgacaagaaagatcccgtccaagctgggtgtcattgactaaccacatcaacaaaggcacaccattaatccactatgattcaagtggggggaaactggggcacaggttcttgaaattttccctttttatacctcccgaaatctggaatattatcctattggggcattcaccagttttacacctttctcggtgttgttcacacatcacttcttttgaaacct

SEQ ID NO: 634515 - DNA, 213 bp, Homo sapiens
agaggatccctatgtctcgacgttgttctgtgtatagttactcccacttataagtagaactgcatatgtgttctgcattaatttgctctgggtatggcatccttacagaatagtttggagttggattatgtgattcctcaggcttcttttttttttgggttaggatggtttggctattacttgactaattcttttttttttttttttttgggg

SEQ ID NO: 634516 - DNA, 100 bp, Homo sapiens
ttagagagtgatgcacctcaccattctaagaatgaaaggccagcacggccaccaccacctatcatgacagatggtgaagatacaaacaaatagaaaaaca

SEQ ID NO: 634517 - DNA, 353 bp, Homo sapiens
tagctattactctacttctgtcacttagaaaaggatcagtccttaatcatgggaggcttacagtgagtcataacacgcttcaggctggtcacttcctggattacatactttgtactgagtgttattgtacaaacaagttccttttggagttcctaggcattcataataactataaaataataggactgtagcaatcttttttcctacctcagtgacttgatgtatatactgggaacagccctcagtctgaggaagttcagctgaagtccttaatgtacaagtccaaattttaaggaaaatgagtcctgcgatgagtttcctcatgcttcagccgtgcgtggaccagtcagctt

SEQ ID NO: 634518 - DNA, 271 bp, Homo sapiens
ccgtttgtgacacaggtggatgtggctgtgcacacagtggctggatatccctgagaaatggcataatgatataaactagtggtcacccaatgaatgatgtagatgctggcctaccagtgagtgcgatgatgaacatggctgaggctcaccagtgaccgctgcagtgactcatgcacacgttcaattgcccatgccgccactgacatcacggtgcttcgggattttgtggccatgcgcagaacctggccaatcaccattatgaattacctat

SEQ ID NO: 634519 - DNA, 217 bp, Homo sapiens
gtattttaatgtaattctttaatacccaggaaccagagatccttggagaaataactgattctatgtatagaacagataataaagaaaatgagcttggactttcttttaatacccaggaaatcagaacgtgttcaaaaacaaaaggatgggatgtgttgtaaggatgcaggatccaaactaaatgagctcccggcacctaataaagctgtggttgagc

SEQ ID NO: 634520 - DNA, 203 bp, Homo sapiens
  misc_feature (5)..(5): n is a, c, g, or t
  misc_feature (14)..(14): n is a, c, g, or t
  misc_feature (29)..(29): n is a, c, g, or t
  misc_feature (95)..(95): n is a, c, g, or t
  misc_feature (123)..(124): n is a, c, g, or t
  misc_feature (148)..(148): n is a, c, g, or t
  misc_feature (165)..(165): n is a, c, g, or t
ggcanggccacaangttgccttgcatgtnacgcagatggcagaggtgggtgtgtgaggggtgaggaggcatcagcagttgagccccgaaggagantcaggcagccccacctgcaggagaacgnnaaccctccaggggaccagcccctnccagttccacccagctncaggtgccacacggcagggatggagaagggttgggagc

SEQ ID NO: 634521 - DNA, 263 bp, Homo sapiens
cgtgatatgtgattctagctacatgggaagctagaggcaggaggtcaaggctgcagtgagttatgttcacacctctgcactctagcctgggcaacagagctagactctctctctctctcctaaaaaaaaaaaaagggccttagcctgggaatgcttaagttttaatctgataatttatttttatcctttaaacattgtctataatacaccatcctgcgggtttctcattttaagatcctattccagatatgatcctttttttt

SEQ ID NO: 634522 - DNA, 194 bp, Homo sapiens
gttatccgcaagtattcccattggaaaagtgtggattattggaagatatctcatattttagacagaacaggataggaggtgctctctggggtgtcctcctaccaagacagcctgttgaaggcctcgtagtaactcagggagcacagacgcgacactcgcagatcgctaacgaccttcatacttgacggccacac

SEQ ID NO: 634523 - DNA, 105 bp, Homo sapiens
gtctatcccgctgacgccacagggctgcaccatccgcgcctgtccacgccaatgccgaggcggcgcctgtcgggctgcccccgctgtgttgtccacgccggaatt

SEQ ID NO: 634524 - DNA, 873 bp, Homo sapiens
gcgacgcgtcgggttatcatatagttaaagccagcccatgaccctaacaggcgtcctctcagccctcctagtgaactccgagactactccatagtggaatttccactgtgctcacctccagtgaatcgactcctcatacatagcgcacatactaaaccaagcacagctagatccatataccacatgcatgaggcagcgcatgtcaacaggagaaagcgacgatgacccaatggctcagccaccaatccacctacctgtccatatagaaggccttccgcatgacgggataatcacatattatatgtgaccctccagaacattttgtttgcatgtacgctagggattttgtctgagtcttttaccactccctagctcttagtccctgaccccctccaatatacggtagggccactggtcccccaaaaggcatcaacccgattaattcccctagcacatgtcccactcctaaagcatatccgctgattagctcgcatcaggcaggtatccattcatctggagctctaccgagtactgcctaaataggaaatactaaccgataacaaataattcgagtcactgtgttattacaattttactgggatctctatttcaccctcctaccgaagcctcagaatacttcgagtctcccttccagcattttccgagggcatctagcggcatcaacgagttctctgtacgccacgagggttccacaggacttcacgtaaatcattggctcaaatttcctcattatctgcttcatccgacaactaatatttcactttacatccgaacatcactttgggttcgaagccgcgctgatatggcatgcgtacaatgtggtttgactatcctgtatgtctcatctataga

SEQ ID NO: 634525 - DNA, 203 bp, Homo sapiens
tcgtcacctcggaccggacgcgttgaatggcatgggggtacacccagcacgctttgggcttggggtagaggatgccctttctggagccgaccgtttatggaatcgcagaacgggcggttagctgtctctgtcccacaccagctgggtgctctttcactgatagcccctctttgccaggagggccccctatcaccccatcttgt

SEQ ID NO: 634526 - DNA, 741 bp, Homo sapiens
  misc_feature (258)..(258): n is a, c, g, or t
actacacctttaccacccagcccccatgaatttatcataacatccgcgcaagcccaaaaccaccgcccccctctaagcggttagccataaacctataccagataaccgataaaatagtaacccacccacccccgccgccgaggcgaagcgcgagaaaggaggcacggaagaaaggggaggaggagagaggagacaaaacccccccccccaccccaaccccacgagaccaatcactagcccccgaggtagtgagaatantccccaagacaccccgatcaaagcgaggaatcaatattgtaatattgtcgttgttagtgaatgatttagttttttttattgcggttcttgtgtatcctttcgcgctggcgggggcagttcccttgcatccagttccggcggtccctctgctcatacgtcccgtggtctttcggtctagacacggggacgggacgtacccagcttccgttccccgggcgctgtgagattgtagtggttggatttgttgggcgcgtcatgtgaagcgacgagagttaagtaactaaggtaggcggccgggcacgcggtcgggagccgccgcgctaggtgatgtcatacgaactacgttctacctctcgccgcgttctttatgcgcggcggccggcgagggaccatccgcacaataccagagaagggagagacgacgaataataaatcggaattcacgcttccccccgtgctcaacaggtgaaatacctatatacg

SEQ ID NO: 634527 - DNA, 196 bp, Homo sapiens
ctttggggggggggtttgggccccccccccccccaaaagggcctttttttttttccgggggttttgggggggggggggggcccccccccccccccggggttttttggtggggggggggggtttgggggggccccccttttttttttttttcggggccccgggggggggtttgcgcccccccccccccccgggggga

SEQ ID NO: 634528 - DNA, 385 bp, Homo sapiens
gctgcgaggtgggtggtgtaggggatggtgtcttctaggaatgacctacaggagaagggggagacagggtggattggctttggagagggccacaggtgcggtggctggggagacaagaagggcagatggtgtggaaggatggtatcttccagaaacaacccacagggatacagggagacaggggtttagagagatggtatcttccaggaatgagccacatgggaagtggtagggagagacaggaaggatggacgttgtggggggtggtattcgggaatgacatagctgggaatgggggaaacaggaaacaggaatgctgtagcaagatacatcttccaggaatgagccacgagggcttgaggggagacattatgattggatagtg

SEQ ID NO: 634529 - DNA, 212 bp, Homo sapiens
actagaggatcccccggcgcacagcttctcggaataatgggggaagtttggacttgaatattattccgccgtattccagtgtactcgtaggttcagtaccattggtgtgccaatctgattgtgatggtaatgggagggatcgttgaactcgtctgtcatgtgcaggatgcgtagggattggagggtgattaggactaggatgatggcggccg

SEQ ID NO: 634530 - DNA, 174 bp, Homo sapiens
ttgtaagagaacctaatataaagtcagtcttagtcacttcgatgtatttccctaatgactagtgatgtagggcatctttatctgcttatcggctatatgtatatctttggagaaatgtctattccagtactttctccggattttaatttggctgcttagttttttggtggtgag

SEQ ID NO: 634531 - DNA, 132 bp, Homo sapiens
  misc_feature (66)..(66): n is a, c, g, or t
attattctagtcctttgaatttgtaagggaaaaaaaacaaaaccaaaaccttccgatgccctttcntccagcacatcagatttcaaattgaaaattaaagacatgctatggtaatgcacttgctagtactac

SEQ ID NO: 634532 - DNA, 857 bp, Homo sapiens
  misc_feature (857)..(857): n is a, c, g, or t
ggagccgccgcttggtcacagtgaccgccaccattgcccggggatgggtccctgagacttggcgaagtaggagccctgtgtgatcgtgcgtcagagtcggggctgagaccagccctggccagggcagttaccaggacggtctccggaggccgggattcgcggagggtccaccagcaggaagaaaccccaggaggaagaaaactcagacagatcgccggggaggcagcgcgggatcccagcctcaggcgtgcgcggacggtgtgcggagtctagctttgtaccaggctgcagtgcagtagtgccatctcagctcactgcaacctctgcctcccgggttcaagcgattgtcctgcctcagcctcccgagtagctgggattacagcacatgccaccacacccagctaatgtttgtatttttagtagatacggggtttcatcatgttgcccaggatggtcttaatttcctgacctcgtgatccgccatctcggctcccaaaatgctgggattacaggcatgagccacagaacggacatgctttccttaaaagctaatatttaggcttgtgtgcattaggctctgttacaactacttaattctgtttgtattctatagcacccatgggttatacttaacaatgagctgatgttgtctcagtaaattgggtcctaaccgggtcacctgaagtttagtgtgggcccgttaacgtccatgggtcccgagaaagggtctttttccggggaactccggttcgtgtctggacacacttggattaggcgaatcacaaggggggggagcggcgggaaacctcggaatgccccgcgctctgttctgggagaaaaggacgctcgtgtcacgn

SEQ ID NO: 634533 - DNA, 1240 bp, Homo sapiens
tctctctccctcccctaaacacggggggagtgagggggggggggggcgagagagagaggggggaggagagagttttctttcataaaaaaaacaccaaccacgccccggcgaggcgacgagagagagagagagaaaaaacaccggcggggcgacccgccgcgcgcgcggaggaccaccgcgagagagagaggggcggactctctcacaatatagagagagaggggaggagggagagacacggcgcgggggagcgggggcggcgcggcgcggggagagaaaacacgcaccacaaaagagagagagaggggaaaaacaaaacacagagagagagagaaggagacgggaggcggcagagccaccacccccgcgcgcgcgagcgcgaccgcacgagcgcggacgcgagaccacactcgggacgggacaagagcgagcggcgggccgagacaaaccagagaaaaagaacacacacgcacgcggcacacggagagccaccctcgccggtgcgccctctcatctcttcccgcacacccaccacagccggatatttaagcgccgcgcagcaccgatcgccgagagcgggcgccggcaacatgggtcgagaaaaaaaaaagactatgaccccacttcggagcccagcaggcgcgcggggcacccctccgcgtgccccgcgccggtatacactcgcgagcgccagagagacgagccccccccctcctacgacaggaagaggccgggccccactccggacaacacaagagagtagatcgcactcccgcgcacaggcgcgaggcggacccccacacgccacgccacccaccatcccccaccccaaactgcacaacgtctccacaacgagaaagaaacacactcagccaaacgaggaggaaaacataaagcgaaggcgacagcgcccgccgcacccgtgccgcgccgccccccccaactctcctccatctataactaatccccccaccacctccgcccccatcccacacacacatcaacaaactaatcagtcactcaacataaacagaacctcactttacaatcacacactaacctcctcttctctttcctccccctgcccccctctatctccccacaaccacttccatctatacactaaccccatacacccataacacactatccctccaccccctcacctaccgcacaacaacaccatcccctctctctactcacaatccaaaattaaatccccctctaacaacaatgcatg

SEQ ID NO: 634534 - DNA, 547 bp, Homo sapiens
agtcgatttaattaattaattcatcatttttttaaaaaaaatgtactgattacttcctgggtgcctgaacatattccaaagtaacactgctacacaagctgtgtgtgctagcaggctaaaaacagccatagctgtcttcatagggatatgtccatgaacgtatacttaggttaaacattattctggtagacagcgcaggtggttgttagcaaggaccatactgtttgattacttgttaatgttaaacaaaaatggttttgaaaactgttttctgttcaacagatcttagtcagtgcttggaagccgcaaagcactctcaaagtatttctgagggaattgatatgggtggcaaaagagaacttacagctatgcattgcttgtagcagttccctttctcagaaacattatttttgttgctctaaataaagcattgcctgtcttgtttgagattttacagccatactctgctatgtaatgttatagttccttttctatgaaatgttattttgggtgatctaaataaagctttgccagttttgtttgaaag

SEQ ID NO: 634535 - DNA, 301 bp, Homo sapiens
  misc_feature (240)..(241): n is a, c, g, or t
  misc_feature (281)..(281): n is a, c, g, or t
gcttaacctagggtcagttttgcacgtggtatgccatttaccaagatagttgtaggtaaagaagggcagatttattagagaaattgtgaaaatatgttgcagtgggcagctcagcagagaaggggctacctgcaaaggaggcaagggctggagcgaaagttttatatgggtcctgctgaagcggtgctactgtgtggaactgaggtcattgctgcccgcagggtggtattgtgattagcnntgtctctaacaagttgttcatacacataattgttcattanttgttctcagacttggggct

SEQ ID NO: 634536 - DNA, 101 bp, Homo sapiens
acgtgagtgtctcttttcccctgatgatgaaatgatcacgcgaagggagagagatccgtgcccaaaggatgtgtggacagtcctttgagacttggagccag

SEQ ID NO: 634537 - DNA, 879 bp, Homo sapiens
tagtttctctgtcattatgaaacctaaaagcattgaattagcccacagagtcttattcaggcatagacttgcgctaaagcccatattgattaacagtctacagttacagtgtaaacagtttagccctgtggatagtgagttactctaaggaggactgtgatatttgtatcgaaaagttaagagacatacaaaagactattgtgcaatatatgcccagatggttctcaacgtgactacaatctttagcacctccagtgctctcactgcatggacatttgacaatatctggagacattttaggttgttgcaactggctagcatctagtggatagaagccaggaatcttgcgtaaagtatcctacagtgataaggacagtcccccacaatagagaattatctagttcaaaaggcaataatgccaaggtttaaaaagaccctgttatatacctctgtgttgaacgatgttgtgatttggattactaaacagtacaagtaagtaatttcatatatttgctcctatgctgttcaactttgttaggtgacagtatttgattgtaagcgaaatgcagaatatgttaatgagcgttgaataagattgtttcttaaaatggagaatatttattaaaccacttaagttcagaaaggcaattaaaaaacacaaggtttaggcgaaatagaaatgagtgatatttatatctgaagctttctgtggcaaagcgaccaggcattaagctaaactggaaggatattgagaagattaatttgatatgcttgtgaaatagtttcttaactcctcttggaacagctggccccatgtaggggatatacaggtgatgatctcaggactattcctaaaagcagagagtgtacttaggtgaa

SEQ ID NO: 634538 - DNA, 106 bp, Homo sapiens
cactaagtacacccacaaaacaatatggatatggagatcttccttatacccctcaactttaatttggcccagttatacctcagtgtggtagcagtactggtgatac

SEQ ID NO: 634539 - DNA, 413 bp, Homo sapiens
tgtattgcccaggctggagtgtggtggcacaatcacagctcattgcatcctcaatcaccgaggcctaagcaatccttccaccttgtagctgggcatacagctcacagcacacctggctaaaatttttcttttgttgagacggattctctatgttgcccaggctggtcatcaggttcctgggctcagatggtcctcgtgcgttggattccaaaggcacaggccaagttgtagctttgtcccttgccatcatgcccaacaatgagattgtataccttttaatgaattgactgttcataaattggttatgttggtgggcaagttctttaagctggaaattgtaaattcctcatgaaatgttttttgatgcagttaccatgaattagtactacaataaaggatggtggtgggtgtca

SEQ ID NO: 634540 - DNA, 162 bp, Homo sapiens
  misc_feature (103)..(103): n is a, c, g, or t
  misc_feature (128)..(128): n is a, c, g, or t
  misc_feature (145)..(145): n is a, c, g, or t
tgcccccccctgctcctcggttccggcctggccccctcccctcctttggacctctggccctttttccccgggggccttccccttttggggtcctccgggctcntctttcccctcacccccctcctccnccttggctttttttttncttttgttggggggggc

SEQ ID NO: 634541 - DNA, 311 bp, Homo sapiens
  misc_feature (232)..(232): n is a, c, g, or t
  misc_feature (244)..(244): n is a, c, g, or t
  misc_feature (246)..(249): n is a, c, g, or t
  misc_feature (251)..(251): n is a, c, g, or t
ctgacacgacggaactggaacaaggtcactcacacccaaagcacccagaataagagtggctcaaaactgacctccccttacatggcctctttggggactctctcttggagattttcccagtgactctcagcgtgttttaagtaaatgtatttgacctgtggtctcagcattcagagagcagcggtgtaagaatctgctgttctccctggatcttctgacattactgctgtcngagatttgtatntnnnnanatacaagttccttgataccctaaaaccttggattaaacagaatgtgcattgtacatcttt

SEQ ID NO: 634542 - DNA, 281 bp, Homo sapiens
tcacaagtcccactgggcttcaatgccagatgctccaggtgctctttctcccagtgccaaatccccacacgtgagggttcgctgtggggctcagaactctcactcctataggtgagtctctatgaaccagttagttttcagtctgtggagcttctcacccgggagctatggggttgtttatattgtgaaatcgcccctcctacctcttgatgtggcctcctcttttccttctggagtagggtatcttttttaaggtttccagtccatttgggtggagattg

SEQ ID NO: 634543 - DNA, 874 bp, Homo sapiens
ggagagagaactagtctcgagttttatttttctttttataagaggaaaacccggtaataatgtcggggttgagggataggaggaaaatgggggataggtgtatgaacatgagggtgtttatcgtgtagaatgagggtcttatgttgtcaatgtgggtggagtgagtgagccccatctgtgtcgtggataaactatgtcgagggagatatagggctgcagactagctatgtagagtcctgataagatagcaaacgatactatggaatcagcgagaacaatgggacaacaagacaaaaaagtcaccccacaagacaagaaaaacacacaggaggaagaaaacgagcacagaaacaaagaacaataagacagcaaaacaaacacacgaaaagacagaaacaagaggcgaacacaaaaacaaaacgccaacccacaaagaagaacaacagagaacaaacaagcacagacacaaacaagcagcacagaaaacagacgacaaaagcaacaaaaacaacacaacaaaacaagaagacaagagaacagaggaacaacaaacaaaaaacaaacgaggccaaacaaaaaaaacacacaggaagcccaagaagacaacaacacaacaaaagaaaaaacagacaaacaccacagaaaacaaaaaagaagaggtgagtgagactagagaggcagagagagcgagatcgagggacaggagaagagaccagtgaacgctagagaggagagcgagaaagcatcgaggtgaggagaaatgaaaagagggcagaggagaaagaaggagagaggagaaagaggtggaagagggaaggagaagttgaaggagagaaggaaaagagacgagagagtagaagacaaaggaaggaaa

SEQ ID NO: 634544 - DNA, 1452 bp, Homo sapiens
  misc_feature (560)..(560): n is a, c, g, or t
  misc_feature (1014)..(1014): n is a, c, g, or t
gtagttgtatgttgtgtgtgcccttctgttctcccgcgctgagggcgtgtggccctcctattcgtgtgtgttcttggggtgggtcgtacctacatgttcccggtggtgggttggtgtcgctgctcatatatttgtaccgtcttctttggggctgccccactcccctgtgggtgcgcctggcgggtcgactgttttcgctcctactacaacacgtgtttctgttaacgtcatctgtgtggttgtcttgcgtgtgccctccctacctagttgctcgcactcgcgctgttcttggggggcgcccagcccaacattttcctgctagctatcatgtggtttccccatcgccctctcctgtctgtgtcgcatcgtcgggaggggttctcgcagaattgttgtgccgcccgtgaagtaacttttctgccgaaggtagtgcgtgtgtggcacgtagaaaattccctcttgtctggtggcgtgaacacaacaagtatacccccccccctttgccctttgtttctgggtgaggtgtagatcgccccccccccgtaggagatgtgtattgnttgggtcgtacaccacatagttttttcccaatagaaggagtgtcaggagttatgtctcccttcactatcaccccaggagtgtgtttcctccccgtcgtgctgtcgggtggtgctgttgtcgcacctcctttctgtcggtagtgtttccaccagtgcgtcccgtaggtggtggttgggtggcctcaccctcctatgtgtgcgctgcggacgttgtgctgttctctcccgcgctggtgctgtgtccttcacaaggctgctttgtatgcactgccgtctttttctctccatgcctcgctcccctttgtcgcgcgttggagatgtattatctcgatccacgaggtggcctccctcgtacggagtctgttataacacaagacaagcgcgtgtattttcttctttgtcactagagatccgtgagtacccagtgctgggtgaaacaacacaccaaacgcgngatctcttttctcgaccatgtcgtttgcttcccataataaccaggggttttttgtcagcgtgctagactcagcacccgtcaacggggggcatcttcgagggttctctcacaagcttgcctcccttctcgcttgtagatccctcctcggttagccgtcgccttgggcgccaagaactctggtggtctcctgagggggagtttcctgcgaggctcggcctctacattgctgcccacagaacttgtggcgttcggagccaccaggggcacttttatgggcccccatgacccctcttcggcccccttgtggtcccgtgggcgcgccccttcggcccccctccccggtttcgggcggttgtaaggttttccgcgggggtgcctgcctttctcccaaagggggttttcataggaaactggtaatcaggtgggcccctcttttta

SEQ ID NO: 634545 - DNA, 100 bp, Homo sapiens
cagcgaggcccttttctctgtgcgctcggctctggtccggctcccggttaccgggcgcgagaatgaccacattggcggccgccacccttcctggcgcgca

SEQ ID NO: 634546 - DNA, 584 bp, Homo sapiens
caaggccacccccctagcttcctagtgagacaatggtcaggtaatccgttagttcagactacccgggtcaatagccattaatgtgatttctggacattgcccatgtataatcttcactgatgatttcaagctaaagcaaaccaccttatacagagatctagaatctctttatgttctccagaggaaggtggaagcaaccatgggcaggagtaggaattgagtgatagacaattgggctaatgaagcaaacttctcctattgttcagttcatccagattataacttccatgggacactttagcccattagaccattgacactggattaaacaaattcacataatgcctaatacccaatgtatttacagcaacgtatgatttgcaaagatcccccttacaagctgctgtgtaattagagtgtcctaactccattacttatgacttagaaggttaaagcttatgatagtcctctggaattcttgacattcacgccagaaatctttctgagttcccccagaagagaatatgcatccttttttaacatttttgacccatccaacaatgctctggtgtttacatcgcaga

SEQ ID NO: 634547 - DNA, 398 bp, Homo sapiens
atgagaaccaactcatctttattaaatgcatcgtgtgtgtgtgtgtgtgtgtgtgtgtgtgtgtgtataacacatacttcaggcttgcggcaccaccccataaagctggtgaggaagtaacttctgcttctcattgcaactgtacatccatcggggaccaactaatgccagggaggggttgtccatcacggcctcctcaaagctgggatcccattcctgtgctgcgatcacaaactgaacccggtcactcatatattcctcgagctccccattgaaggctgtgacgtatcggatgactttacgccgctcggccccagggaactccccgtaaacaaataagtgcttgccctgcaagaaatctgggacctcaaggactggcagaccaggaggctcctggc

SEQ ID NO: 634548 - DNA, 656 bp, Homo sapiens
  misc_feature (97)..(97): n is a, c, g, or t
  misc_feature (148)..(148): n is a, c, g, or t
cggggaaccccatggcgcgtgcctctcttcaatgtggcgctctcctgggtacccctgcaatgtcgggaagcgccggggttggcctcatacctctttntgtaacaaccctgtgttttccctttggtccattgatttctccccaactccntggcctttaaggcacaaagttcttctaatgtggggttgttcttggtggcttgcccctggccccaaccaccaggtccctcctcctggttcctggttcacgggttcttctaaaaccgaagttccccagtttccaaccactggcttttcaagggaatctcctgctttccagttttgtatggaatttgcttagtggaattcctcaaccccctgcttcctctctcctacatagtttcctttttgctgtcactgaatttatttaaattaaaccacatattgttttcctttgtttcaaggtgatgcagttgattatcagaaacagctgaagcagatgattaaggatttagccaaagaaaaagataaacttgagaaagaattgcccaaaatgagccaggtatggcctttcttcagtgcagagaattaacttttttttttttttttgagatggagtctcgctctgtcgcccaggctggagtacagtggcgcgatctcagcccactgcaacctagtgc

SEQ ID NO: 634549 - DNA, 303 bp, Homo sapiens
gggcagtaggccctctggggctgtggtgagccagataatgacccaaagatgtccatgtcctgatcctgcaaacctgcaaatgtgttaacctacatggcaaaagggactttgcagatgtgatggagttaggaatctggagatgggaagaaattccacctacggccagcggcttcagtccctgcctgagccccagcccgcccctcccgctggcctgcctgcacctgtcagcctttcccagccagccccacaatcacatgtgccaattccttgcaatctatctgtccatctttatctctgcctcta

SEQ ID NO: 634550 - DNA, 179 bp, Homo sapiens
  misc_feature (51)..(51): n is a, c, g, or t
  misc_feature (62)..(67): n is a, c, g, or t
  misc_feature (114)..(115): n is a, c, g, or t
gttatcgccttaatgcgcctcagggattccctactgcttgcactgcccctntggttattggnnnnnntcctaatacgcccttggacgtaggctcttccgatcgcggccatccannttgccgagctcctgcttagccatcgcgcgcgccgatatgattctgcagatggagttccctccgg

SEQ ID NO: 634551 - DNA, 931 bp, Homo sapiens
ggcggcgtgacgtcaggcgcccggtgctcctcacttgctctgagacaggtgcggcaagtctactgcgggctggtccgggctcctcaggttcagacccgaccgttatccagtcggttcgtgagaggagaggtgcactttacaggtccccgatgaaccagagagaacccttccaacatatccaatgggccctgtgtccaactggccccaatacccaccttatccaccacaacaagtggtgtccagggacctatgggggggaccactacccaactcctcaatggtgtaaccccttaccaagggatacccacaagtacggctggcgcaggggttggccctcagggaagcctcctaaaaccacaagtgtatttgtggtagaagaccaaaagaaaggagatgacgctagggacccatcacacgtgcctacaaaagcctgctggaccggctctctgttgctccgtggtctcgttggggaacatgctcacctgaaccagacagccccaaggcggtccttgtcctgcaagcttctggttgccaacctctgacaggttgtgccttgcccccatctcttctgattggctgttaacaaattgacttaggcttgggaaagcacaccttctaacttctcagcaactatgggaatcctagataaatggggggtgtactgttaattcaaggtgatgtgatctttataatgtccaaaatcattcattatgatcttaaagattgtcctaaatgactttttgaccaagggctagttgtgacactctatttcaatatcattcaggttggcgcaatgacaccttatatgaggattctgtaacagcgcgttgtaataatggccagtaacaaaaaaaaaaaattggccgcgggagtaaatgggcgcagagagaaggtaaccaggggcacaaggggtacattggtagaataccgg

SEQ ID NO: 634552 - DNA, 177 bp, Homo sapiens
acatggagaagctgcaggatgtgggtggctcaggctgtcctagagagctcccatcttgtatctacagctcactgcagcagagcagttgaaataagtaacaactagagttacattggggtaatttaggagaaagggcattagccccttggaactcggcattacctcgatttctttcag

SEQ ID NO: 634553 - DNA, 114 bp, Homo sapiens
cagaggatccccactgctcatcactagcgggactttgtgcgatccatacagattcgtagttgcttagattgcttattgttttcatccaattttgtgggggtgtgcgtgtgtgtg

SEQ ID NO: 634554 - DNA, 309 bp, Homo sapiens
gctaatactagtacgtcctgggagctcgggcggcagctatgtgtaatgctgaacagtggtcactacgcctggttcccgtaggaaagtcctgagtggatgagctagtgcatgtgcgacttcttacagcgcagagtagagacacacggcgccgcgcgggcaaaagcgacggcggtgcatgagagcacatactccaggactgagatgtttctcgatgggtcactggacttcggcatctgactcacagcgaggaggttcctacaagggaggttggagtatgatatagttagctgctcctcgctggcgtgattt

SEQ ID NO: 634555 - DNA, 811 bp, Homo sapiens
ggcgtgggcagccaggcgggcggcgcggcgcgggccggcaggaagcgtattctgggcacggggcgccgggcgggccggctgcgccgagcggagtggtgggataccacccaaggcctcgcgcggtgccgccgtcgaggggcgtggcggcgggtacccacttgtggccgtcgaagagcgcaggaggccgggtgggcactgggccgggccgctgcggttgcagccatgccttgtggctttacgtgctgcgtgccagtgctgctacaatgaactcgcaccgggacagggcgctgcacttcgtacacgtttccaaaggacgctgagtgcgggcgcctctggctcaagaaccgtgtccgaagtgcggccggcgtcacgtggtggttgcttttcttcgcaccttacaaggtcccgaccacaaggtccaccgtctctgcaaggagttgcactttccagggctggcctgcaaagacctatcacggtacgcagtccccaacatcttcccgctggctgcggaggctcaatgatgcggcaaaagtagcgcgcaagacgccggtgggggtcgggagcacgagccccgtccggcagaggggcaagacagcgaggcaacagcgatgcagcaagcaggaaacgcagcagggaacgaggccgccgcagctagcaatcagggaggccgcatggagcagccagcacagagccatcaccctctggcctccagatggccacgactgcccagctgcaaggcgaacctggctcttgttcccgaggccgggctccgcaaccgcagggcactggagacaggagtagggccgggatc

SEQ ID NO: 634556 - DNA, 132 bp, Homo sapiens
cggagccatatgatattctcgtcctctcatcatcgtctatagagttgctcctccttccatcctgcactggaactcatgatctggttatcactcgtcgcgtccatactggcatcatctcttttgagaatgcag

SEQ ID NO: 634557 - DNA, 207 bp, Homo sapiens
ggtaggtgctgtactgtgaaagatcgtcggagagtgtaggatctgccatgttagcagccgattgagccttcagggtactgtacgctctgtaacggcgaataggaaaatggtctcacatacgtaagtctaccccctttcaatgtagatcaggtgttctcctattatctggggcctgtctcaaactcccgggaacatggcggaggggaa

SEQ ID NO: 634558 - DNA, 934 bp, Homo sapiens
  misc_feature (184)..(184): n is a, c, g, or t
  misc_feature (392)..(392): n is a, c, g, or t
  misc_feature (395)..(395): n is a, c, g, or t
  misc_feature (403)..(403): n is a, c, g, or t
  misc_feature (405)..(405): n is a, c, g, or t
  misc_feature (426)..(426): n is a, c, g, or t
  misc_feature (430)..(430): n is a, c, g, or t
  misc_feature (446)..(446): n is a, c, g, or t
  misc_feature (452)..(452): n is a, c, g, or t
  misc_feature (455)..(455): n is a, c, g, or t
  misc_feature (480)..(480): n is a, c, g, or t
  misc_feature (482)..(482): n is a, c, g, or t
  misc_feature (501)..(501): n is a, c, g, or t
  misc_feature (510)..(510): n is a, c, g, or t
  misc_feature (516)..(516): n is a, c, g, or t
  misc_feature (522)..(522): n is a, c, g, or t
  misc_feature (527)..(528): n is a, c, g, or t
  misc_feature (534)..(534): n is a, c, g, or t
  misc_feature (545)..(545): n is a, c, g, or t
  misc_feature (552)..(552): n is a, c, g, or t
  misc_feature (563)..(563): n is a, c, g, or t
gtgtttcaatcaaaactgaccatgagataaaggaaagagatgtggctttgtgatattctatcacaaacacttatgtatctctgtaaaatacaatgtatgtatgcatgtaagtgtttttgtcctaatgttgctactcccatggcaaagaaaaaaaaagaatgaaaaaaagaaaaaaatttggaanaaaaaatcaggctcatagcagctactgtgtagaaaattccccctacttctaatttgctgaatgaagaaaatttacaataataaaacacttaaaagcaaaaaatatttaactggtgtttgggctttaaaccactgcgtttttcatcttcgtgtattttgacagaaatttagttatttattggttgttgacataacaagctcactttaanttngaaggagntngagggaggtggagtgtatatnattnagctctgggccagtanggtatnctncaaattacttaaccacgccattatngncaggggtacaaagtagttnctaacaggntccttnctatangtcannaatatnctgtaacagcntttcgtnacacttctatntcacagtaagtctatagtgtctataaatacttgagtgtccactatttggtcaattctttttctcaatagccaacaaagcctgggtattgctgaacagtttgtttaccaaaataggggaaacaatctggtccctaaggagttatagctttgcaggagtacaattctaagtcaatctttcattttgaagctcctagtttggacccaagccttccagggacctggagggaatccatcggtgaccataactggtacgacaggatatgccgccaacctaaagcgcccgatttgggcaacacaatcctcaaaaatttttgaataaagtgcgtacgtcgtgcggtgttgtcatcttgatattatcttctcgcctccct

SEQ ID NO: 634559 - DNA, 976 bp, Homo sapiens
  misc_feature (184)..(184): n is a, c, g, or t
  misc_feature (434)..(434): n is a, c, g, or t
  misc_feature (437)..(437): n is a, c, g, or t
  misc_feature (445)..(445): n is a, c, g, or t
  misc_feature (447)..(447): n is a, c, g, or t
  misc_feature (468)..(468): n is a, c, g, or t
  misc_feature (472)..(472): n is a, c, g, or t
  misc_feature (488)..(488): n is a, c, g, or t
  misc_feature (494)..(494): n is a, c, g, or t
  misc_feature (497)..(497): n is a, c, g, or t
  misc_feature (522)..(522): n is a, c, g, or t
  misc_feature (524)..(524): n is a, c, g, or t
  misc_feature (543)..(543): n is a, c, g, or t
  misc_feature (552)..(552): n is a, c, g, or t
  misc_feature (558)..(558): n is a, c, g, or t
  misc_feature (564)..(564): n is a, c, g, or t
  misc_feature (569)..(570): n is a, c, g, or t
  misc_feature (576)..(576): n is a, c, g, or t
  misc_feature (587)..(587): n is a, c, g, or t
  misc_feature (594)..(594): n is a, c, g, or t
  misc_feature (605)..(605): n is a, c, g, or t
gtgtttcaatcaaaactgaccatgagataaaggaaagagatgtggctttgtgatattctatcacaaacacttatgtatctctgtaaaatacaatgtatgtatgcatgtaagtgtttttgtcctaatgttgctactcccatggcaaagaaaaaaaaagaatgaaaaaaagaaaaaaatttggaanaaaaaatcaggctcatagcagctactgtgtagaaaattccccctacttctaatttgctgaatgaagaaaaaaaaaaatctttaattggggatatttccaaagactttggctcaagtagggggttttaattattaaaatttaaaagaaaaattatttagggtgttggggttaaaacatggcttttcctctccggaatttggaaaaaattaagcttctcaatggtggtggaattaaccaagctcactttaanttngaaggagntngagggaggtggagtgtatatnattnagctctgggccagtanggtatnctncaaattacttaaccacgccattatngncaggggtacaaagtagttnctaacaggntccttnctatangtcannaatatnctgtaacagcntttcgtnacacttctatntcacagtaagtctatagtgtctataaatacttgagtgtccactatttggtcaattctttttctcaatagccaacaaagcctgggtattgctgaacagtttgtttaccaaaataggggaaacaatctggtccctaaggagttatagctttgcaggagtacaattctaagtcaatctttcattttgaagctcctagtttggacccaagccttccagggacctggagggaatccatcggtgaccataactggtacgacaggatatgccgccaacctaaagcgcccgatttgggcaacacaatcctcaaaaatttttgaataaagtgcgtacgtcgtgcggtgttgtcatcttgatattatcttctcgcctccct

SEQ ID NO: 634560 - DNA, 138 bp, Homo sapiens
  misc_feature (56)..(56): n is a, c, g, or t
  misc_feature (131)..(131): n is a, c, g, or t
ccaggcgtagttgtcaagaagctagactgcaagatcaaatgtatgctgtcttcaangaaacccatcccacaaatagtgacacccatagactcaaagtaaagggatgaagaaaaatctaccaagcaaactcngcctgat

SEQ ID NO: 634561 - DNA, 1148 bp, Homo sapiens
tctgctggagaggggagtggtccagcaggtgaagggccactaccgccaggccatgctgcgcaaggccatggccgcgctagagggccaggatccctcaggcctgcagctgggtctcacggaggccctgcactttgtggctgccgcctggcaggcagtggagccttcggacatagccgctgctttcgtgaggctggctttgggggtggccctaatgccaccatcaccacttccctcaagagtgagggagaggaagaggaggaggaggaggaagaagaggcaggaggacagcagggtgaagcgagaggaagagcgaggcacggcaacggggaggcaggcaggcaggcagcgaaggggggcggacaggccagagcggaattgggcggaggacagcaggcaggtggagcgaggagggtgatgttgcataagctgcatgacagcaagaggaggaagatgaggagagctcctcggagggcttggaggctgaggactgggcccagggagtagtggaggccggtggcagcttcggggcttatggtgcccaggaggaagcccagtgccctactctgcatttcctggaaggtggggaggactctgattcagacagtgaggaagaggacgatgaggaagaggatgatgaagatgaagacgacgatgatgatgaggaggatggtgatgaggtgcctgtacccagacttaggggaggaccatggcttactatagccatggatcaaagaggtacctgaccatccttccccatatgatgaccgacgtgcagagcacaaatcctccacattggaacaacgatctggttcatgtgagcaaggaagaaccacgccaggcaggacgcggagtacgaggtcttggacatcaaagctgagctcactggacctaggatgtagacaccacaaactagattggcagacaaacaacacccagggcagaggactctctgggacacccgctgtgcatggagccagagtgaagagaccaagatccatttaataatgcttcacccttggtccatgaaacaagagcccgggtaaactcggccggggaccggaggcatgaggtcaagaatcactgcatgcttatagacctcttacgtagaatactattcacaaaaaaatgggcctgaggacaagagaaag

SEQ ID NO: 634562 - DNA, 535 bp, Homo sapiens
gtcagagcgggttctccattcctcccacatggaaggacggtcgcatgaacagcaatgtcataccttccctgagaatgtcggggaggtcacctagatgccctggcatcctggagcagaccctatctcgcctccctttccagctctatttccaagccctatagcagatgctctcactatacaagccgacttctaacacgaggcccagtgcggaaaataaagcccaggctcctcaatgcttctcccatgtggctcccctgccttgctgggacttccctcatcaaggtggtgtctgctctcctggagctcactctccaggcatttgtttccctctctccttccaagcaggggtggaggtgataaatgtattatcagctccatcacatggagttccctggaggccaacttggggtcataaagaccaagctggagccttttatctaaggagcctaaagtctgaagatgtcaaagttaaaaacagagtgtggggaaacttccagcaatgggaaacacaggtcacaaaggacttgacggtgct

SEQ ID NO: 634563 - DNA, 204 bp, Homo sapiens
aacttgaggacgcatcaggcagaagaaggatgaggacatagctcgcttttgcgagaaaaggagttacaggaagagaaaaagagaaagaaacactttccagagttccctgcataccgtgctttatgcagatagtttactatatatgaagactggaggaactgaagccaaagagtgatgacaagaagctgtatctactaccaatca

SEQ ID NO: 634564 - DNA, 1217 bp, Homo sapiens
agcggagggggggcagcaggcaggcggtgggcgcctcggacgagcttctccttcctcctcttgacttcctccatggctcgctgcgtcgcttcgtgctggtgtggccgggccgcgcgtggttcctgctgccagacgccgacgggcgagggcctcgacttgactgccttccatccctgctcccccgccagggtcatctcaggcagcgagcgaggccgcagtcgcggcatggaccgccgggttagtcgccggcattcggaccgcggcgtggccgtacggctggagccttcggtgcattgcgatgcacgaccaccggttcgggggcgctgctgcacgcgctatgcttctgcgatgagtgcgaccctggcaggccctccggtggcctgtcggcttgtcgagggctagtcgcgacgattgcaccgccttcgagcgtgcgcgtgtcctaccgatctgcttgtgctgcctgcgttgccatgcttggtagactctgcggggtgagacttgggcggtctgcacgagggccgttgctaggttgtcttccgctcatgacttcacccctatggattcgcctgtcatgcaaagcgtaccgcgaatctaatccgatgattcctgggcgccatagggtgggatggggggacatgaagacttggtataaaggggaggcgtgccccttccgcggaccgcatgagtcgtagaccgagtcatagttcgatagtgaaagattgtagcccgaggcttttcaaccaaaaggctgccccgatggtgccatgtacgatgcccatgacggcaagcattccggatacgctcgtctgctggggcttagcgcgtgggaggtcccagaacgtacgcggcgtagcctggcgttgactaggtcgcggtctaatgagtgggcaggattgtacccagggggctgtggctcacttcggtggattagggttggggaaccgggtgtaccctctcgcctgagccagggtggctggaggacttcatctgggtattcacctggggtttggtccctggccaggattccaggtcctgggtagatacctgggccttgggttgggggaactttcccacgaaccgcaagtgtttcctgggacccgacttgctctcccgatttcggggttcccctgggtaaacccgcttcctggacagctaggcctggcttcgggcacaaggggcggggtactgctggcttgtacccaccggaggggcccccg

SEQ ID NO: 634565 - DNA, 189 bp, Homo sapiens
atgatgaaatcccatctctactaaaaaataccaaaattagctggcctggtcggtacggacgttctaatcccagctacttggcagctaggcaaggacaatcatttcaaccctgggacacggattccataggtccgcatcacggccattcacatcacctggtacaaccaaattctgtctcaaaagcacaaa

SEQ ID NO: 634566 - DNA, 175 bp, Homo sapiens
cacacacctgagtcgttgtttggtctgttgggtatcagctctttttggtactttctagtccatggctaatgcagtaaccagagagtactctgattaatgtctctatttccattctagttttgcctatcagttgtatgtgatagtctaattattgcggtttctctgaaaagctcat

SEQ ID NO: 634567 - DNA, 158 bp, Homo sapiens
agctgatggctcagcaagccatcggtacagcgattaagaatgccaaggcaaagagtggcgagatcgtcatgatggacgtgactaatggtgaggtcctggcaatggcgtcaatgcccacttttgactcaaataagcccggaaaagccaaagagagccag

SEQ ID NO: 634568 - DNA, 277 bp, Homo sapiens
ttacaaccccacgatcacatacaccttcattctcaccgaaatgagagtgagttctggcacatcatgttccgggatcaagctcaaccacgattctcaatcgtctgttgatcatcaccgccctctgacatcccactgtgagcaatgcatgtgagttatgacgaatgaccagactcgaatgcttcccacatgccaactgtggcacgccttattgtgtacgtgactagcgcgcccgctcctttggttgtcctcggcaagatgtctgagatgtctagggata

SEQ ID NO: 634569 - DNA, 646 bp, Homo sapiens
ggtcttaggagatgcaaagaccattgtttacattcacttcttcgtttaatatcaaggttgttaacaatggtcttaggagatgcaaagaccattgtaaaacttgatataaacgaagaagtgaatgtaagaactcctttgaacatatttataaagaaatatttgtaattggagtaagtagtagtgtatgaaatcatgtgtaatgtaaatgtaaactgcaatgtctatttagtgtgtaacaatgttgccataaaatagcttgctaaatgtgaaatgactttaatccctttgtcttcaatatacttcataaaggaggaaatgatgatttacacaattgtcatgaagcttccgtgtttatgagaaattccaagaagtaagagccaagaggacagatattatcagaatatgggacataagaaatcgcatatagtgtcaagggtatctatataacaacttcaattcattccctctgcatatatagtaggggtcaacatcttcgctcaatgttaaacgcgggacataatggacatccaaaccatgcatagctctccatctcaccactgagctaaaggtgtgcgtatacacatgcacttcatcaacataacactcatctatgcatataccacccagaacaacaaaacaacaaacg

SEQ ID NO: 634570 - DNA, 425 bp, Homo sapiens
tgttggtaacggcgtgcgtatagctctcccggcagtttccgctgcgaatgcgagacgggcttactattttgatcggcatcagccaggatgttgtgttctatttcttcgacgtgcccgggtcttccccgggcgcctgtgtggccacatgtgcgagaacacgctgggctcctacctctgcagctgttccgtgtgcttccggctctctgttgatagcaggtcatgtgaagacatcaagtgagtgcagcagcagcccctgtagccaggagtgtgccaacgtctacggctcctaccagtgttactgccggcgaggctaccagctcagcgatgtggattgagtcacctgtgaagacatcgacgagtgcgccctgcccaccgggggccacatctgctcctaccgctgcatcaacatccctggaagcttccag

SEQ ID NO: 634571 - DNA, 227 bp, Homo sapiens
atactgcaccacagctgtagtcgttgtataagcgctcttcccaaactcctgttcagtggctccgcagcccggtgccataggtgccgagtgacacatctctacttctgaaactacccagtcctgctcatcggcatactggctgctgtacctaccatggtggtccctctatccccaaatcctggccctgctcagaggcatcttggctggcctaagcccccagagcatct

SEQ ID NO: 634572 - DNA, 680 bp, Homo sapiens
  misc_feature (113)..(113): n is a, c, g, or t
  misc_feature (116)..(116): n is a, c, g, or t
  misc_feature (122)..(122): n is a, c, g, or t
  misc_feature (124)..(124): n is a, c, g, or t
  misc_feature (138)..(138): n is a, c, g, or t
  misc_feature (146)..(146): n is a, c, g, or t
  misc_feature (158)..(158): n is a, c, g, or t
  misc_feature (160)..(160): n is a, c, g, or t
  misc_feature (205)..(205): n is a, c, g, or t
cctgctggttcggacagacacctgataccagcaaagagtatggtctatgatagccagcgtctactgatttttagtaggatggacctctgtcgactgctgggatgaagactgcntangatgcntnctatgcttggcccntgcctggnggtcttaccaangngttggaagcctgaatgcccgttgtggacccccaaagtggctttgnttttaccccaatttgaaaattggggggggggggaaattattttctataaaaaacttgcgtgggtatatattgggggggcccaaaaatatatgggagccttttaagaggggtttttttttttttaaaaaaaaagtgtggtccctcttagaaaaaacacttttttaaaggctgtggtgttttttttatagaagaaaaaaatttttataaacacccccctttcggggggggccccccatatttttttttttttttggggggggggtggttaaaaaaaaacctcttttttgtttaaaaaaaaaaaaaaaagggtggtttttttttgagagagggcggaaaacccgcttgggttattataaaaaaaaaaagaggggggggggggggggcttttttttttttgttttttttcccccgcccgccaccaattgggggggcggctattttttataaaaaaccacccctcccctctcccggccag

SEQ ID NO: 634573 - DNA, 1467 bp, Homo sapiens
  misc_feature (1467)..(1467): n is a, c, g, or t
aaccgtgtactattagccatggctcaaccccaccgtgttcttcgacattgccgctcgacggcgagcccttgggccgcgtctcctttgcagctgtttgcacgacaaggtcccaaagcacagcagaaacattttcgtgctctgagcactggacgagcacaaggatttggcttataagggcttcctgtctttcacagcaacttatctccacgggccttctatgctgctcagcggctgcgctgaccttcatcaccgtccactaacctggccactggctgcgccaacgctccactcctactgcggcgcacgcaacacttctgcacacgcactgcacgacaccctctccacgtcctctaacacgcccatctcacggcggtcccttggtcattctgttggatccgactggcccacaactgcctgcgctctcgcgagaccactacaaactgcgcttctcccaacgccttcgtctctccgctcctttggcacccctgtccccacccgcagccttgcacgccctgcgcctcctgccgcccctgcgcctacgcgcgccctctcgcttgcgcctcgcctctctcgcgcccccacagcgctggacccaccgcacacgggccactgcaaagttacatgtggctaggcgcaaggaggcctcgaacgtttgcgccaatagtcccagcccctactctagacgcggcttccgccaaacgggcacacgcttggcgcccacacacgaaaccccctacgcccaactgacgcaacatcgctaattccaaacgcccatcttcttggcccttcgcctgcccattggttttacggaaccccccaagtccattaccgggcaacacatttacaacggcccttctcgtcgggcaaccctgtctcggccagggcctacactgatgaacgaataccgtagtaaacaacctccaagccaccagacggagacctttcaaacgtgtttccccgctatttccgttggcataacccgacccttcaaccgccggcacaccacaccgtccaccccgcgcccccgtttctcttccatacctctccgcccacagtttcacatgggcccctatccctcgctctacgtgtcctacagctctcctccttcgtcggccgaccagcccgtcctgtttcgtccgggcaatggcgcctactgtccctattccggcgcctcactgtcggccccttagtcgtccgtactctctcgccgccgcattcctcttcgcgaccgcagcgtccttctctccccgagcactcgtgccattctctcctccactacgccgtcgtggtgcgctatcagtcgccgccccctctcccactccagcctgtcggtcccctcttagcgtccactctgcgtcgcccgctttctcggtgctcccccgctcgcccttctcgaccacgccgccgtccctgtactctcggccgtccttctccctatccggccgcacgacgtatcagctgcaccgn

SEQ ID NO: 634574 - DNA, 160 bp, Homo sapiens
ccatggcccgcgggaaacccaaggaggagggcagctggaagaaattcatctggaactccagagaagaaggagtttctgggcaggaccggtggcagttggtttaagatccttctcttctacgtaatattttatggctgcctggctggcataaaatgttcca

SEQ ID NO: 634575 - DNA, 780 bp, Homo sapiens
ggagcccccagatgaccgcgatgccgttcagcccgggccccctcgccgtccacgtgtcaagctgggagcgggtgttacggctcatggaggaggaccctgccttccgtcgtggatcgtcttctccctgtggcatcgtgcagcgagacagctacggctgtcggggatctgtcgagggtgtctgggggccgtggggcgggggtgctgtcgtcgatggtcccccagcccgtctttgtgtcgcccacttcgacgaagggccaaagcgtatcgactttgcgcacacgtgtgcacatgaggcgaaatccccacgaggcaaaacgtgggaagtactttgaggcacaagggaactaggggggacgccgagtgtggagggcttgcctagaccatctcgttgtccctaatggccccctggaatcgaatgagatccaacgccagctccaaatgggcaaaggcgcaaagaccacactagagaaccaggcacaggagggacataccccgaaacgatacacacaacgcgtaataaggaggtccacccaaggacgagaggcaccactagtccaaagggaatatcagtgcccccagtaggggaaattttgggtcgacgagagcgatctcggaaacacgcaccggaggggaagtaaacccagggacgactacggctaggtcaaccttagtagcccccgacgagaagcgcacaaccaatccttcactagtaggcacaacgccacagtccaaagataacgaagggcaatctccatcggtcgggagtaacattgggcccaa

SEQ ID NO: 634576 - DNA, 204 bp, Homo sapiens
  misc_feature (70)..(70): n is a, c, g, or t
  misc_feature (123)..(123): n is a, c, g, or t
taaaaacttctgcctgtgagctgaaatgagagcaggagagagccctgtattctcaggctggcatgcctancgtagagcatggctctgtgagtggagggtgggtagaagaagaaagccccctanctctagagcacacttgcttggattttagcctcagaaacactgatcttgggtgggagataagaaatacaggggacccacagt

SEQ ID NO: 634577 - DNA, 138 bp, Homo sapiens
cactggtttagcggtgctctaatactgtgtttgcagcggatgtttatggtaaacaggcggggataagatttgccgagttccttttacttatattaacctttccttatgagcatgcctgtgcaggggtctctggtgaag

SEQ ID NO: 634578 - DNA, 296 bp, Homo sapiens
gtgactctacaggatccctcaggagtggcttcaggactctgcgatcttcttgaggcaggaggtcaggacatggatgtggggcaggaagccgtcctgacgcgatgtgtcagcttggccagcagcttgtttaactcctcgtcgttgcggatggcgagctgcaggtggcggggaattatcctggtcttcttgttgtcacgcgcggcgttgccagccagctccaggatctccgccgtaaggtactccaacaccgccgccaggtacaccggcgccccggcggagtctgaaggcagtctgga

SEQ ID NO: 634579 - DNA, 356 bp, Homo sapiens
aaatggaactattttcttgctcagaatcttccacaaagcattgagccgttaggaatttctaagaaggatctggaatgaaaaaaaatctttgaaaaggtatttgtatagcttcagttcagcaagattcatggtgggtgttagagtaagtgctggtgttaagccaagccatgtttttcaaagactcatctggcctcaacgttggcaggatcagagtggcctcccaggatctatcacatcctcagaagagttggttcaactggcatgtacccagatctctttgagctagtatgatactcccttaagtcaaaggctgccacatcacatctcctttaagtccccctaagttcagagccagg

SEQ ID NO: 634580 - DNA, 554 bp, Homo sapiens
caagtattacatgtatatcaataaaagtaggcactataacaataatcctaaaccacatatatgataaatgctattagatattgtctagttattaatataaatatataatatgctattaaatacttaaatgttccttgagaccttagaacttaaatcctgatgagggttttactatatttaaaatactgaagtttattatttatgcatgttatacagaaaaatgagtggcttataaaagatcaaaattataggcttaaacatggaatctctaggacatataaaatatgagtagaactgtgtatatataagatgttaatgtaagactacaggcttgtaatatcttaaaggaaccacttcactgtaagggagcagttagtctttctacctttccaattgtattgagattttgcccagtatgtctttttacttaaacaccttggtgaaagctatccagcatcctgtttataatctccttagtagcacttaccataattactttcagatctgtttccattctcagaaactgaaactgtcagctcatgtgagtggggcat

SEQ ID NO: 634581 - DNA, 1031 bp, Homo sapiens
actttgtgactatacacattctgtcgctctttatacttattgtcttcattggttgctcttcctctctgaccttcgtctgctcacatccatgagtctaccgcgtcctcctcttctgtgtagttatcctggtggtcttgctcggcttgttgatacgatggattctatcctcgttgatcgtatccttgatgttggttccgctttccgtcattggagtggttttgcgtcattttgtttcgtctggcgtagtgctactatgtcactggctcatccgcacgtatccttggttcccgagcggtaattcactttctatggtggagtggactgtctcgctttcggcgcaagtagtctgtcactaactttgatgtatcctgtgtcactgtgtacccctttccgccttcctttgcgtcgcctacctggccatgcctgggccgcgtggtggacccagatgtccatcattcaactgccggctggtcctctggctttgtcctaccctccgggagctgccctccgggcaccaacggtctcgccaatgtctcttgacattcgtattggtccggatggtctagtctattcatgttgagttctctccaccgctctcgtgccgtgacctcattaacttggccaagttagaggacacaacatcattcctcgtgaatcgaggatgctgtgacacccacacaaataacacgcatgtctcatcgctatggtggatggtgatcttttgctgatgtggcccagccagacctagacaccggattgtggccactgaatgcaccacacacttcttgcgtatatggagggacactttgctgtatttccattaaggtcctaactgcattgtactccacagcctcagctgaggcgtgtttgcctccgaagtgaaaaagatgcaacaggagaacatgaagccgtcaggagcagtgactccatgagaacagtatgaaagagaccatgcagcggtcgtgggagtgtacaggccaccccccataggtgaagaactgaagttcagcgctttacggcatggggatatt

SEQ ID NO: 634582 - DNA, 1028 bp, Homo sapiens
tgcgcgcggtcgcggatcaatggagtggagggaatgaaggaagtagagggatgcggagattagtcagtgatggtgcgcgcaaggtctgcggattgtgcgcagttagtgggtggcgagagcccttgcttcgcttttgtccttgattgcttgcgccgcgttattgtcaaggggccgggctcgccttatatcggcatgtgtagtaagctatacgaccataggtagtcgagctgactggcctcctgaagggacggggaagctgctacagcgtaatacgtggggaagatcctcagaagcacgagattgtactcctgagaagctaagtcacatatatcgacaacgctttactcggattggtagggactccgattcggaggccgatctcatcttgattatccgagggttcacgaatccaccagatcccacaacggaaaattaattgggactacgaagaaagagagacgtccctaaaggcgggcatccataggacattcgtgactccccgagccagtgtttgccccttgactggacacaagcatgaccaatcagcccaggtgtgacacagaactgttcaggcaagaccaaacatccaaaacaaccagtagatagatgccgccagaacagcaacaaccgggcaaccgtaagaaccgaaaggccgcaggaaacgtatcagcgtccatccaaaggaatgggcacatcgccccgacgccacacctccagcaccagagcgccgacgcgcgcagtgcatcacgcgagctccagctagggagtccacctcagatgatgacagtagcccatcgacgcagcccagcgggcaaacctcaggaggcgagcccatcgagaatgagcagagtcacggaaccacggagacgacacagtatgcaaagcgcggaggaacatggagctataggcaggcagcgcggaacgatgcgcgacgagggcagcaccagtccaaaaccggagagcacgcaggcgccgacagcacggcagagcgcggagcgtcccgctgcacacgatgtcagcgtcaagag

SEQ ID NO: 634583 - DNA, 478 bp, Homo sapiens
tcagctcgaagtaatcaatataccaaactgacatatttggggtggcgtttcctgaactccttcaatggctagctttgtttaatgagctattcaagcatacttgttaagaatgagaaaatttggtgaatgtaaatggaataaatgtttataaataaactttttatattttcaaaaatctttttgaaatcttaaatttatgttaaattaaataaatattcataaaattagtcatttctaagtaaaatactgaaaaattaattgctaaacataaatttaaatatatattttggcatcttatttttatgtaatatagagaatctctatactcaaatatatttggctttggtaatgaacataaaaaattggccagggcggtggctcatgccaccgtgaggcatgggaggctgaggtaggcagattgcttgagcccagaagttcatgatcagcttgagcagcatggcaaaatcccaatctctac

SEQ ID NO: 634584 - DNA, 554 bp, Homo sapiens
cagagcatcagtagtccttattagccggcagccgagagacagctagcgctcaaaattctctggccccgaagaaggagctagattttcttttatactttggtttagacaggggagagggggagtctagttgaaacaatcttacagaagtaaagtaggcaaaaagttaaaaggataaacggttacaggaaagtaaacagttccaggtgcagaggctttaagtctatcctaaggtgatggacgccgggctttgggcgttatcaaccggacacaaacgcaggggctctgggtgctattaaccgggcgaattcctgggaactgcggatatagcttgccacagtatcttatcagttaattgcattcttgatgcgctgggagtcagcttgcacaagttaagtccttgaggaagggggtgggtaaggggctgcgagtgaaggagtcacgatggagtccgtctggctctcttagctaaggaagagtcacttcaggttaaaacaaggtagggtatcacactagaagcctcacatcattaagcttcagtcaggcaggcgttcctt

SEQ ID NO: 634585 - DNA, 886 bp, Homo sapiens
ggtctgaatgaccataggatgaccggttgcagagtgcacgacgccagtctcccttctgggagggccggtgcctgggggttgccattgcccccagccacctgtcatgtgcgggcagatcgagcggaagatgagaagcccctggtgctggagatgcttgaaggccggctgtgcaaggacactggaaaaacgcgtggccctccattgccttgtactctggcctgcctggccctgctcctcctggcggctggcaagcctgcggtctgcgcttttgtcctggtcttccttcgtcctggccctcctcctgccggtgttccttggctgtggccgaccgtgaacgctggtgcctagcgggcccgatgtgggctcgcttgcctccggcgggtggcctggggaggcccctgggtggccgtgcggggctccggtgacgtgtgtgcgggtcctggctctggccccatggtcacaatatgcagggggacggggcccgggtcagccgcctgtctgtctctcgctggcaccgacgccggggcagtgggcacggaggctgctggccttcgctggaggcccgggcatcgggcctgggctgggggcactggggggacccccgggacccggctacgtggtcccacgtggctgatgagcccgaccttgcaggtggatgggggaacgcggggaacttaccttccgaaagcgcgacatgtagcgcctcacccgccacgtgcccacccaaccgtcgatcgtctactgtcgcgcacctatgaccagtgtagtccattacggccaccctgacctaacagccaggcagattctaacatccgcaacgtaaccccttaaggaaagcgacatcccatagatcgcacccacacccacaactccaagtgccaacgca

SEQ ID NO: 634586 - DNA, 431 bp, Homo sapiens
acagtcatgctcggtacccctggtctgaacttagggatcatctcacattttgcagtaggttttttttaggccggtggctacatagtggctcatgcctgtaatcccagcacttagggaggcctaggagagtggatcacttgagcacagaagttcgagattagcctgggcaacttgggaaaaccccgtctctacaaagggtacaaaaattagccaggtgtgatgggacgcgcctgtagtcccagccgcttgtaaggctgaggtgggaggattgcttgagccctggaggtctagggtgatcacaccactgcactccaacctgggtgacagagcgaggctccatctcaaaaaaaacaaaaaagatttttctaatgtcattcctcaaggatagcttatactgctattttggctgtgcctaagttcagagccaggcg

SEQ ID NO: 634587 - DNA, 734 bp, Homo sapiens
tcagtctaggtctcctggttcggggtgatcatttgcaccttgttgcagcagacgcggatgacttgcgaaggcggtctaattagcgtgacattggctactccgatgttgtctgtacaggaccaaccggattgtcgccgttctggcgcgcttcttgaaaccacacctaaccaacgctagttggtcgtctaacggtgcgagaatagttggtgtctagtggcctatgtagctatacttcacgtcgggacatgcacttcagcttaatcttgttggcacgcgaccatgattgcttcgcacgtcgagcacacgatagacaagtagagaaggaaggtatgttgaatacctcattaatcatagtacttgtggacatgcgagatcctcgggcccatggaagagctcgcgtctacaactggttccactgaaaatattgctgtgtcaacatcttttggcatgcatgatgtgaaactatcattgacctcaatgacttgtactgacatcatgggactgactgaatgagataaatgagagcacttgcattgcaatggcactctattcgattcggaatggaagcgacacaatcctgagagaacaagaccaggccgacccacggtctgagccgaacacctacctcactcagcgagacgcagtactgtaccacggccctcatatacattgtgtccaaaacaccttctgacagtgccagggaaatggggatagaaggaactcaaggacaaacc

SEQ ID NO: 634588 - DNA, 228 bp, Homo sapiens
cggaacccataggcattgaccatcacggttcgtagaagattcaaggagtccagtatcttgtattgcccaacattgcgttattgcgcatatgcaactaataaaacaaagcacatcctgcccacgtggcttccggcaagttcctggtccacaacgtccaggagctggaagtgctgctgatttgcaacatatcttacggtgccgatgaatagcgaggtgccgatgacacta

SEQ ID NO: 634589 - DNA, 758 bp, Homo sapiens
tggtcagcaaaaatcttttaaataaaaaatgtaggaacccaggtttagtttttggtaccctcggttgggcccgtcggcctcgggcacgctcaaatcctcccggcccttggagcggacgtagggttgggtgtggctgtgcggggtccctgggggccttgccagaaaatgccgggtaccaccttcttctggccctttgcgagagaccggaaagcaggacagtcgccaacagccctataggggagctccaagggccatgctgtctcgaaatgtgagagattcttgcccccttgcccttgagagattagcggctatgcgagcgccctggctttggctcaccgccgcatgtgcacattaccttatcagttggggtaccctccttgaacccgcacattcattcagttattaggcttccccaaaaccacagaccgtctttgtttccccggccaggaagctacatctcccggggactcactccgggaaagggacagagtgcggccggtgtggtgcgacctcataaacaaacctctttcaacacaacctgggttgatttgtggagataggtatcttcatggccagaaacctgtaataacttgaccaacagcctcaggtaagatatccgtggactctagggctccttgagccgaacctttcggcccttgttcatggcggatgtccacctaaaagacccctcccctgttgttagctcaggagtcgaagccccgacaacattgggggggccctgtattaggcccaccgct

SEQ ID NO: 634590 - DNA, 753 bp, Homo sapiens
tactgggtttttttgttgtttgttttgtttggagacagagttttgctcttgttgcctgagctggggtgcaatggcgcaatctcagctcactgcaacctccgcctcccaggttcaagcgattctcctgcctcaccctcccgagtagctgagattacgggcgtggtggcgggcacctgtagtcccagctacttgggaggctgaggcaggagaatggcgtgaaccgaggaggcagagcttgcagtgagccaagatcgcaccactgcactccagcctgggcgacagagcaagactccatctcaaaaaaaaaaaaaaaaaaaacagagaaggtttttaaatttttaaggggcgggcgcgagggtggcgttcacccctggtattcccaggcatttggggaacgcgccggggccaaacaggattttcggaacccggcggcgcaaactgtggcgtccttaaaattccaaaaacttagcgctgggccttgtgtgggctttggccccttgtattcccgagcatccctgggaaggcggaagggccgaggaagaactctctggacccgggacagattgttgcctcgcctatgacaaaagaagcggaaagactcccttttctaacaaaagggtctgctcactattttcggcctacaatttggcacttcgtgtaagcatttggcctctggcggattagaccctttggcagactcgtaaacaaacctcgggagacaattagaatctcccgggctaaggggagaggagg

SEQ ID NO: 634591 - DNA, 809 bp, Homo sapiens
gcggcggtggcgcgcgctgcgggcagtgagtgtggaggcgcggacgcgcggcggagctggaactgctgcagctgctgccgccgccggaggaacttgatccccgtgctccggacaccccgggcctcgccatggctgaccagctgactgaggagcagattgcagagttcaaggaggccttctccctctttgacaaggatggagatgcactatcaccaccaaggagttgtgggacagttgaatgagatccctgggacagaaccccactgaagcagagctgcaggatatgatcaatgaggtggattgccgatgggaactgggaacacttgaggtttccctgcggagtttctgagcatgaatggtccgcgcaagagatgatgagacgccaacagatgaagtgacggacgagtacgacaccagagcagtgcgttcctctgtcttagacatgggatggggaaactggctacatcacgccgccgccagagctgcgttcacgataaatgacgaacctgggggagaaagctgaccgatgaggaggtggatgagatgatcacgggatgctgacatcgactggacgattggccaggtcaattattgaagagtttgtaccagatgatgactgcaaaagtgaaggcccaccgggcagtgacggatggccgtctcttgatctctctcttctcagagcgcgcactctctctttcaaactcccctgagtaacccaggttctaacaaaaccatttgatttgactggacaatctgataaagcaccacaagatttgtcccaagcttgatgattggttttctctttttcc

SEQ ID NO: 634592 - DNA, 342 bp, Homo sapiens
tcctgctacaacggactgatacacagcaagactgtgctgcgtggagttggcagccaaatggaaaagtgtgtctgtggtggacataaagcggagatcctggccagcggaaagcctgccacctcctactgtgcggaccaccatcaacaagaatgctcgcgccaagctcagcagcatcagacacatgatccgcaagaacaagtaacgccccgacctgcgcatggcagccatccgcatgggccagcgccatcctgcgcagccagaagcctgagatggtgaagaggaagcgtgacccgacacacaccaagagctcctgagcccacctgacccacagtgctacagagt

SEQ ID NO: 634593 - DNA, 209 bp, Homo sapiens
taatacaattgattgtctctttctctccctcctctccttctctcccatccctcctttttccttcccccttcattttgtcttcccttcctccaccttctctttccttttttttttttttttttttttttttttttttttttttttttttttatttttttttttttttttttttttaattatataatattatattaaagtgagaaacaaaa

SEQ ID NO: 634594 - DNA, 138 bp, Homo sapiens
atttgggaccggaacagacagatcttcaagaccaacacacagacttacccgagagagcctgccggaacctgcgcggctactacaaccagagccgagggccgggtcttaaaatcattcccgaggggtgtatgtgcctgg

SEQ ID NO: 634595 - DNA, 1678 bp, Homo sapiens
taacaagtaatattttcaaggaaaggaaaatggacattatgatggctgtcttttgtccttttgtaaatggtggttcttctagagctgtgctatctaatatgatagccactagtcacatgtagctatttaaattaaattaaaaatttagttcttcagtcaaaataaccccatttcaaggttcagtagctacaaatggctagtggctagcatattggaccacacagatacagactgttttcatcattgcaaaaagttgtattaaactctattgtatagaatattttgctgaaatatagtatatgtggctgggcatggtgtctcacacctataatcctagcactttgggaggccgaggcgggcagatcacctgaggtcaggagttcaagaccagcctggccaacatggggaaaccgcaactctactaaaaagacaaaaatttgcctggtgtggtgacgggcacctgtaatcccagctacttgggaggctgaggcaggagaattgctggaacccaggagggcggaggttgcagtgagctgagatcataccactttactccagcctgggtgaaagagcgaaactccatcccatctcaaaaaaaaaaaaaaaaagaaatataatatatgtaacatcataaatacataagtgaaattaaaatggatataatataagacacttgaggtggggtgtagtggctcacgtctataatcccagcactttgggaggtgaagacaggaggatcacttgagcccaggaggtcgaaaccaacctgggcagcaaagtgagactccgtctctataaaaaagaagaaacttaaaaaaaaaaaagacacttgaaacaggaattgacttcatcagaaagcaaagcaatagtacaaattaatattaagctctcaatagatattttattgggcttcaaggaagaggaatttaatatctgagtataaaaaatgcgtacaagcagtttgagcagctagcctgctgaagcaatgccttatcaaaaataacaaagtttcagttttgaatcagtgtcaattatgtatatgaataataaatataattacaggagttttattgtgtaataagaaaccataatggaagtatatatgtgctttcagttatgaagttatgctcgtcagccagaattttttgaaacaaatatcatttttgttattgtgatgaatacctttattaatgttacactattgactaagaagttgttatctttttaccctaatgtgcaccttgctagcagatagaaactagtgtgaaacaggtagcctgtgattctttgaattgtcacattttaagtacaattggctaacttcatttttctgtcccaagcctacttagttgtacttgttaacactttaaggttatttagatcagaagaaatctggatgtctcaggccaggtgcagtggcttacacctataatcccagcactttgggaggccaagacgggcagatcacttgaggtcaggagttcgagaccaggctggccaacatgtctctactaaaaatacaaaaattagctggtcgtggtggtgcacgcttgtaatcccagctacttgggaggctgaggcaggaggatcacttgaacctgggaagaggaggttgcaggttgccaagccaagataatgccactgcattccagcctgggtgacagaatgagactgtctc

SEQ ID NO: 634596 - DNA, 1075 bp, Homo sapiens
tagaggatcccccttgatatactggtccaaacccttcaacaacagattgaagcagatgtgtacagaagattaacactgatattggtggggtgcggtggctcatcccagcactttgggaggtgaagacaggaggatcacttgagcccaggaggtcgaaaccaacctgggcagcaaagtgagactccgtctctataaaaaagaagaaacttaaaaaaaaaaaagacacttgaaacaggaattgacttcatcagaaagcaaagcaatagtacaaattaatattaagctctcaatagatattttattgggcttcaaggaagaggaatttaatatctgagtataaaaaatgcgtacaagcagtttgagcagctagcctgctgaagcaatgccttatcaaaaataacaaagtttcagttttgaatcagtgtcaattatgtatatgaataataaatataattacaggagttttattgtgtaataagaaaccataatggaagtatatatgtgctttcagttatgaagttatgctcgtcagccagaattttttgaaacaaatatcatttttgttattgtgatgaatacctttattaatgttacactattgactaagaagttgttatctttttaccctaatgtgcaccttgctagcagatagaaactagtgtgaaacaggtagcctgtgattctttgaattgtcacattttaagtacaattggctaacttcatttttctgtcccaagcctacttagttgtacttgttaacactttaaggttatttagatcagaagaaatctggatgtctcaggccaggtgcagtggcttacacctataatcccagcactttgggaggccaagacgggcagatcacttgaggtcaggagttcgagaccaggctggccaacatgtctctactaaaaatacaaaaattagctggtcgtggtggtgcacgcttgtaatcccagctacttgggaggctgaggcaggaggatcacttgaacctgggaagaggaggttgcaggttgccaagccaagataatgccactgcattccagcctgggtgacagaatgagactgtctc

SEQ ID NO: 634597 - DNA, 265 bp, Homo sapiens
ctagaggatccccaagcagtatacagattcaggttgtgattgatgcaggagcactcgctgtctttcccagcctgctcaccacccccaaaactaacattcagaaggaagctacgtgtacggtgtcaaacatcacagccggtcgtcataactagatacggcaagtagtgaatcatggattagacccatttccattgtcagcgtacgtctctaaggcagattataaggacacaaaaggaagctgtgtgggccgtgaccaatttatacc

SEQ ID NO: 634598 - DNA, 306 bp, Homo sapiens
agtaatgttaattcttatctaagttattgatgttttaagtttatctttcatggtactagtgttttttagatacagagacttggggaaattgcttttcctcttgaaccacagttctacccttgggatgtattaatgattcttgcaaagaccctcaaaacatcccaggggtagaactgtggttcaagagggtctttgcaagaatcattaatacaaagaattttttttaacattccaatgcattgctaaaatattattgtggaaatgaatattttgtaactattacaccaaataaatatatttttgtac

SEQ ID NO: 634599 - DNA, 612 bp, Homo sapiens
  misc_feature (513)..(513): n is a, c, g, or t
taaaatcgtttttggtgtaaaaatctcttcttcctcaggagtcagctgggctcccttctgggggcccaggggcagcgcatagggggactcgtaccactggtcgggtacgggggtggctggtgcagatagacgcacagatggcatatttcttcaccaggggttctgggtgacagaacccagctccgtttattaagatggctttggtgagcacaacactcgatagactcctgggttaacgagtgtcacaacacttctttggagcgccccagggagagaaatttccccaacggtgccaaccctctaggggcgccgggtgattctctgggtgtacctctccccggcgaccacgggcactggtggtgggatcgcgggggggggccaactctgtgggcgtgtgtggcagctgtgtggcgcgcccccaactctcatatacttctccggcgtctcttgggggggtaggggcgattctcctctgtgtgcgccccgggtttggggggcggcttgtggtgccangtgtgctcccggagagaagattgcgccattcggctctcgggccggcgcaaacatgtggggccggggtttcggcccacaaaaccgggtgaaagaagggcg

SEQ ID NO: 634600 - DNA, 380 bp, Homo sapiens
tttagtagaagagatccttcctatgccatggcactttcccacatgaggcctcccatggagtgccgttaccatttgctgaacaggttctcctcgactcctggcagctctatactacatttaaaggttatccgcctatctcataaagcctctcactgcatggacttcacggatggatcagatttccctatttataaaccattcatagacagactgtacatttcatttcactagcgtttaccaaacagattatgatggcaaagatgcgtcagaggcgtgggcctatctccaatcaactagcgttcctatgcaccccaaggagctcaaatccgtgttatcctaaaataaatacttaacatattcgcttagatcgtatattttag

SEQ ID NO: 634601 - DNA, 242 bp, Homo sapiens
  misc_feature (39)..(39): n is a, c, g, or t
  misc_feature (44)..(44): n is a, c, g, or t
  misc_feature (50)..(50): n is a, c, g, or t
  misc_feature (54)..(54): n is a, c, g, or t
  misc_feature (65)..(65): n is a, c, g, or t
  misc_feature (73)..(73): n is a, c, g, or t
  misc_feature (99)..(99): n is a, c, g, or t
  misc_feature (115)..(115): n is a, c, g, or t
  misc_feature (122)..(122): n is a, c, g, or t
  misc_feature (124)..(124): n is a, c, g, or t
  misc_feature (129)..(129): n is a, c, g, or t
  misc_feature (147)..(147): n is a, c, g, or t
  misc_feature (149)..(149): n is a, c, g, or t
  misc_feature (154)..(154): n is a, c, g, or t
  misc_feature (158)..(158): n is a, c, g, or t
  misc_feature (195)..(195): n is a, c, g, or t
  misc_feature (238)..(238): n is a, c, g, or t
cccagtctcagggctggtacgaggaagaagagtgcacanaccanaggtcngctntatagggtctntctatatntggaggtaatgctgtcattccttgantcgaccactcagcatngtctgtntnggaanatctcacattcactggcngnctgangacnagcttgttgagggagagaccttcctttttagtccatntaaacttattcatagcatccatgaaagaaaggatttgcccatngcag

SEQ ID NO: 634602 - DNA, 933 bp, Homo sapiens
  misc_feature (31)..(31): n is a, c, g, or t
  misc_feature (108)..(108): n is a, c, g, or t
  misc_feature (116)..(117): n is a, c, g, or t
  misc_feature (120)..(120): n is a, c, g, or t
  misc_feature (124)..(124): n is a, c, g, or t
  misc_feature (140)..(140): n is a, c, g, or t
  misc_feature (142)..(142): n is a, c, g, or t
  misc_feature (147)..(147): n is a, c, g, or t
  misc_feature (194)..(194): n is a, c, g, or t
  misc_feature (219)..(219): n is a, c, g, or t
  misc_feature (222)..(222): n is a, c, g, or t
  misc_feature (224)..(224): n is a, c, g, or t
  misc_feature (226)..(226): n is a, c, g, or t
  misc_feature (232)..(232): n is a, c, g, or t
  misc_feature (243)..(243): n is a, c, g, or t
  misc_feature (256)..(256): n is a, c, g, or t
  misc_feature (262)..(262): n is a, c, g, or t
  misc_feature (286)..(286): n is a, c, g, or t
  misc_feature (303)..(303): n is a, c, g, or t
  misc_feature (315)..(315): n is a, c, g, or t
  misc_feature (319)..(320): n is a, c, g, or t
  misc_feature (503)..(503): n is a, c, g, or t
  misc_feature (515)..(515): n is a, c, g, or t
  misc_feature (520)..(520): n is a, c, g, or t
  misc_feature (529)..(529): n is a, c, g, or t
  misc_feature (532)..(532): n is a, c, g, or t
  misc_feature (534)..(536): n is a, c, g, or t
  misc_feature (821)..(821): n is a, c, g, or t
  misc_feature (887)..(887): n is a, c, g, or t
gctgctgcccatgctgtgtgagagcacattntgattcctctgcgggtctgtccccactacgagtgttgtgcgctgaggggctgagaatctgtcagagaaaatggaganaagctgannagncccncccccccccccccccncnacaantcctccgcttctgggcagcgtggccctgccagagtccacctgttggncaggagccttccgagcactccgggnagncntngctgcntgcgcggcgtnggggccccccccngcgatnccccgggtcttcggcacagccacntgccccagtgtctgcangagagggtggtntggnntgttattctctgccccaccccccacctccccccagaggccacctcgcccctccctctgggacctctccggatggggagtccttggccagggtctctgactctgtgtcacctgacatttgcccatgagagccgctgggccttagagaggccttggcccagctgaccggttctgaagtatgggcntccggggttagnagatnccagcagtnccngnnngtgtccccatgtcccggcatgaaggacactgctagagagttaccatgcacaccgatggtttcctgtatcacagcccaaagaggttctctggtggccacagctgtgtgctcagtcagtgcactgggcaagctagaagtgttggggggttaatgtccccaggagcagcaaccctgagtcaataaggagcaggacctcagcttcattgtccttgagcaggacaattctgaagtgtattctacataaactctcagaggatgcccagcaggatggagtcccagttgcccncagcagtaacccactcattcatgtacttctgcgggggctttcccttccctcttttccccactcccngcccttgggcttcctgggatggctcccaaataaacctcttgcaccc

SEQ ID NO: 634603 - DNA, 226 bp, Homo sapiens
ggtctttgaacataacctctcaggtaaaaagaagataccgacaggcacagtggatcacacctgtaatcccagcacttagggattacaggcatgagccactgcagagtactatcttgaggaatggtggtctattaggagaaaaaccaaaagataagacctgagaccaaggaaatagtagtctcaatgcaaagatacaatcagaacattgcacaagggagaaagaaat

SEQ ID NO: 634604 - DNA, 867 bp, Homo sapiens
  misc_feature (66)..(66): n is a, c, g, or t
ccttgtgaggagctcctccgcttgggggcaaaacgaatagtttcttttcgagttgggaagagtggngaattttactccacaaggggtgattttcgttatgtaaaaggaaccctcggagtgggaggacattgggtctatctctacagtgccccgccttagatagaatgatccgtggtaacccccgccggtgtggtaggtcacagacgaagatttcttttcgccccccgcccctacagtggcggcgttatacaatcttcgtagcgatagatcccccacagacaagtgctgtgcggtcacccacgacaaagtgggagcttctgttttgttcaagaacacgtccatcatggggaggcgcaatccctctctgtgaagccgacctcacaaactctgtgtggatgagaaacatcgtgtagatgaacgtgatcgcctcgctaaggcatttgtctgaggtgcgcccgacccatacacataaatatttgacacacgtgggtgagtgtcgagcaatgattcgcggagcactgttgaagatcgcctccgagcctcatggcccccactgactacctctctattatgagtcatctatctttactcctctatccttttcataattggggggtgtgaggatgagcagaggcaatcctcaccaggggagatgtagcacattggcctccttctaatatagtctcccttgccacccaatttctctctggcgagttatttgcccccgttcttggagaaaacatgttggcagacttccccacggtagcaaatgcataccttggctacatttatctattctctgtctgatgctgacatgggtctcccaccgttgattttcctccccctataaaatcgcccacataacaa

SEQ ID NO: 634605 - DNA, 578 bp, Homo sapiens
  misc_feature (73)..(73): n is a, c, g, or t
ggacccggcgcctcggaggacccatggggattcctcgccgactgtccctgcggaaaggcggccccggcgcggncctcggcccctcgcgccgcggtcgcgctcggggtcccgattccgaggaggccgagtttgtcgttgagccttgcccgggaacaaagaccccgtctcgtacggcggcactccggcaagggttgcgggcccccggtgggcgcccgggtcactcgggggcgccttttgtggcgccccgggttccccgcggcgggcacacccgctggcggggcattcggccaccaagtggggttgcccggttggcccctgttttaggcgcggccacattaacgttgttcccccagcgtgtggtggtttttttctctgaaagacccttttggcacctccccagtttattttcaagaaaacctttgggctggctaaggggaccttacctcccgttggttctcccacgacacgtgaaaccggctggacaaaccgttttccacgggaagagggaccaggtggtggccggagaagacttcctctccaagcctcaggatctgtgtcagctgtcgctggaatgttcc

SEQ ID NO: 634606 - DNA, 1621 bp, Homo sapiens
gttaatccaggcgactgctctgtggggctctggctgctcctggactttgcctgggatcattgtgctgcgtctcgtgagctactggcagtgtgatgcagcgcatccaatggcgaacgagctattaccgcacaaggacaattgagcggagcatatgggttaatccgtggacaagctagccggggtgttcaggtagtgacatcgttcacacaatgatggcgtcccatgtgacgtcaatgaacggaaagtcaaaagcatactacatcgagcttctgctccgagccgtgctactgtcccgattatcgcgtgaagtctgtggattggcggagaatcctgtgggaccttctcccgtgtgataatcctaggtgttcgcggtgacaagcgagggatgccaatgggcacgtagcgaacagcagaggttctacaagtgaggttactgtgcggcgggtgcctaacttaaacggtacaatacactctctgagtagtgattgcatggcgaacgtactctttgctattgaaagcaggggggaaaccgaacgacgcacatctcgcaggcgtggtgggagagactagggagtcgtagcagaatcgcagagcccatagaagggtcatagaggcgaagtccctttggtgcaaacctggccgatctaaagattgtcaaagcatttgagccgaaggatttgccatacatacgagcgaattcaagcgaggaatagcgatggctcgaatggctggcttacggagaacgcccaattggtagtgatggcccccattggagttgaactatggaggaatagtggtaccaccttgggcacacaccaaacgtaaataattacgtaaaggcagttccaaacgaattggtagattggattggggcccgcccgacatcagaaagccttccttatatggccaaatagcgcccggtctgggattagccttttccaaccggggggcacctacaattgaaccgcggccgatgtcgattggggacaaactttggattgggttggggagggaagatgccaagaaaaaagccccatgctggtgccaaccccccggttcgtgattagaaaggtgtttcccaatggtgccatgtccgagagcttgggattgggccgaccctgtaaagccctgttgactcacccttgtttgggaaataatactcataactgaaataattatataagaaatatcacaaggacaactgtacgacaacgagaaggtatataaatacacaaacaaaccacaacttagatatatgtaatataacacaggagacgaggacaggacacagaaatattatatttcaatagactagaaaagaataccaaattcattaatatccataagagaaaccagacaaagagagagtaaacaaacaacagagagcgaaaaaagaggtcgggaaaaagaaaaatacacaccgagataatatataaaagaaataattataatgggaccgagcataataatgcatagtatagaaagatagtatgtatgatgcgaagatagagaactctctggccatctgcgtccgtcggtatgacgagacggacacggagtaaataagaatgaatgtaatagtaataaaaaagaagaaaagagaaaacgaagaaaggaaggg

SEQ ID NO: 634607 - DNA, 1206 bp, Homo sapiens
gggcgcagggcggctggcacaaacgtgccgccggtggccggaggaaaaagctcgccaccctgaagggtcccttcccaagcccttagggacctgcagaggacttggggaccagcaagcaacccccagggcacgagaagatgctcttgctgtctgccctgcctcaccctgccccacaccaggcccggtggcccccagctgcatcaagtggaggcggagtgaggaggcaggaggagggtggcaccatgggcccgggctggtgccctccatgccctgggggatgaagacactgctgccatggacagaccagtgccagaccgcagccccataagatcaggactcatccactcagattaccagggtctacgagcagagacccattggagacctgagcctggccgggccaggatgggagtggacgagttacctgcccatgtcccactgatcccactcactacacaacatgtacagagagatgccatagatgagagcactcgagaaagaggaagtgaggaacaccacaagagaccacaagcaaactactaccaagtgccagaacctcattaggtaccggaaaatgcgccgcgcaaggactgagagagaagaagctgacagcgcgctagcagaggtagaaacgccgcaagaacggactgagaacagcaaaagcggtgacaagacgaaaagcgcagccccagggaccgccacagcactgaggacccaccagaacgggcagagttggggccgcaaggacatgggagggggcaatgcgcaatcagcacacaagacacagagagacgctgaggccaaggaagcaaagaaaccacggagggccaggccacgcaaaggcgtgcaaagaacactagaaacgagcacagaagaaaagagagcacgggcaacgcgaggagaatgggagaagtgggggacaggccaaagacacgaaaggagcggtccagagagagcgcgggcacggagcggggagacaagcagagggagcaagaaggacggagagaagccgagcggggagcaggaacgagagggacaacacaggagagaacgagaaaaaaggaagcaggaaacgaacagagcgggagaaagatgaacaacaaaaggagacggagagcgagagaagaaagaagacggagaatcggagcgaacacagaccagagcggagagaacgaggacggaacgcaaaaggacgagagaagaaga

SEQ ID NO: 634608 - DNA, 533 bp, Homo sapiens
  misc_feature (65)..(65): n is a, c, g, or t
  misc_feature (75)..(75): n is a, c, g, or t
  misc_feature (98)..(98): n is a, c, g, or t
gtggctggggatgtacacgggaccagctcacgtaatgcatgcctgtaacaatgtaataaaaagcntctttctttnaaaaaaaaaaaaaaaaaaaaaanaaaaaagatgttgttgtgcgcgcgcgacttggcggccctgagaaaaacgttataaacacaactgcgttggggcggcgggggccccaaggggtatatggtgaccaaccggtcgctatacggtggttcccctaaaggaaacccgtgggcacagggacttagggcgctggggatctcccccaagaaaaaaaaaacggaccgggggcgagagaccccgagcgcgtttcgggaaacaatctcccaagagggggcggtctgggagggagcacacaaggggagctctaaccaaccagaggagggttccaaagcggagcgcccggaaatatacaaatttaggccccgatcggtgagagcacaaaaagtcgacagcaagccagacacgcagtaaacgaagagctaaccaaaacagtcagcacgacacatagacagagaccagca

SEQ ID NO: 634609 - DNA, 269 bp, Homo sapiens
  misc_feature (256)..(256): n is a, c, g, or t
ccgcggttcactgtcttacgcttccttgtgggctaaccaggataggatgtttctttcacattctacaagtgatggggacaaaccaccatagttatcttcgactccggaggttggcatcgccttccaccactaggggtccatcaacaggcaccacttgtgcgcccccatcacctcagaaggcaaaacagaggatggcattgtgacgctagctatcacctgttgttgctctcactccccttacgaactcacaccgtangacataaccgcgg

SEQ ID NO: 634610 - DNA, 340 bp, Homo sapiens
tcggaataaagacacagggtctcactctgttgcccagacaggaatgcagtcatgtgatcatagctcccttgcagcctcgaactcctgggctccagggatcctccatctcagcctcctgagcctctgggaccacagttgcatgccaccatgtctggctaatatttttaatttttgtgtaaatgcggggcgggtctcactttgctgcccaggctgatctcaatctcctagttttaagcactcctcccaccccagcctcccaaagtgctgggattccaggcatgagccaccgtgcccggccaataaaaaagaagcttgctttactttcaatgaggatagttct

SEQ ID NO: 634611 - DNA, 908 bp, Homo sapiens
gcccctgaccctgcggcgtgttgaacacgatgaagcgcaggaaggagatcaatggatgtgcctggcacctgtgtcccatgaggaatgctgcaaggatgtgctgtgagtccaactctgcgcaatggtgccaatgcatgggttactgttgcatgctgcttgcgatgtgaaccactgacaatggctcgctttcctctgttggccaatggctgtgagtgatgtgatgcatgtgcttgtgcatgcggctgccctgtgggatgcattgtggcagcaactggtgccaccaaatgatcccttggacaaaggctgtgctgtgctgtgctttggcgatgtgaatgtgatggggccacagtgaaaacagatggggctgggatggtgaaattgcctaatttgtggcacaaacctttaagcccggctcagcccttttgcctgtttgggcccaggactcgcttgaaagagggaacctgcccagtgaaactcggccagtggtgagaccgcctttggggagactgcggaacttccccccaacaagcggtggttttgcaccctcgtggacatgccatttgctcatgggccacgggcatctcccccagtgcgggaacgtggttcacaatttcccgggtggcagcagtgagatgacgtgaaacccccaaaacagacgcccctaatttccgaaacggactttccgggggacaccgaagcgtaaaactttcttttccgactttaaacttattacaccacccgagtgacaactttgcctactttcgtcccaactttttatgttgcgccacgtgacacaccggtgtggtgacacgtgcccgccgtgagctgattgggcccccacggtggttgtgcccacacattatttccccccgacataaaattatgtggccctttgggacttgattggc

SEQ ID NO: 634612 - DNA, 909 bp, Homo sapiens
  misc_feature (1)..(1): n is a, c, g, or t
  misc_feature (162)..(162): n is a, c, g, or t
  misc_feature (878)..(879): n is a, c, g, or t
  misc_feature (884)..(884): n is a, c, g, or t
  misc_feature (887)..(887): n is a, c, g, or t
  misc_feature (889)..(890): n is a, c, g, or t
naacggtggttccaaatttgcaaagcccccagatttttgtaactttatcccctggtcgacgatgtagtcccagttaggaagtccgggacaacaacccaggttagtatcgccctttaggcggcggggaacaaaagatcttgattttcaagagtaaagattccnctgttttcacctgacccatcttttcccaagccaagggaagtgctattaacttcatgaccgggccattcccgtcagagcgggaccaggtaaggcctgattcccagatgagaattcaagatacagacaactacacatgtctttcaagaacagtttgctgggtgttgaccaacatcaaactgcttatccaggaaccactagaagtgaatctcttcttgagtattccatactgctgcccctgctattcacttggggtcccagtcagttgttactatatatttgtcatctattgtgagagtcgtgatatcaccttccacatcagtgatactgagaaggaacaaatctgccaaagatgcttcacagttagttgttacctttttaagaagactgtgcttgaaaattatggtaaaacacatttagaagaaggatgtgcattttcacatcagtctatgaagtataacttgacatttaaattaaaatgctgttcttcaaaattaatttttcctgttttaattccaagttttcttgtacaggggagaagaggtaaggggtagctctaatgtgttggcttcattcacagaagaaacatttttataaacagttaagtgatgccagctttctgttgatgccatcagatcttgcaagcaaaaaataagttaatttcaatatcagttgatattatttcattcaacctatgtaataaagactctgtctccatnnttggnctnannggtggagctctgcagccgg

SEQ ID NO: 634613 - DNA, 102 bp, Homo sapiens
gccctctcccttctccggtctctcgcccctgtctcctttcttcttcttttttcagcgtccgtctctcacaccccctccgttcccctgtcgggctagtcgggg

SEQ ID NO: 634614 - DNA, 310 bp, Homo sapiens
ttatcgcccaacactttgggaagccaaggtgcaaggatcacttgaggccaggcatttgagaccagcctgggcaacataggagaccctatccctacaaaaatttttttttaattagctaggcatggtggtgcgcacatatggtcccagctactcaggaggctgagatgtaaggattgcttgaacccaagaagttgaggttggactgagccatgattgtgccactgcgctccagcctgggagacaaagtgagatcctgtcaaaaaaaaataaaaagttttaaaaaaggaacatctactatgtgctaattgtg

SEQ ID NO: 634615 - DNA, 837 bp, Homo sapiens
  misc_feature (1)..(1): n is a, c, g, or t
  misc_feature (162)..(162): n is a, c, g, or t
  misc_feature (806)..(807): n is a, c, g, or t
  misc_feature (812)..(812): n is a, c, g, or t
  misc_feature (815)..(815): n is a, c, g, or t
  misc_feature (817)..(818): n is a, c, g, or t
naacggtggttccaaatttgcaaagcccccagatttttgtaactttatcccctggtcgacgatgtagtcccagttaggaagtccgggacaacaacccaggttagtatcgccctttaggcggcggggaacaaaagatcttgattttcaagagtaaagattccnctgttttcacctgacccatcttttcccaagccaagggaagtgctattaacttcatgaccgggccattcccgtcagagcgggaccaggtaaggcctgattcccagatgagaattcaagatacagacaactacacatgtctttcaagaacagtttgctgggtgttgaccaacatcaaactgcttatccaggaaccactagaaatatttgtcatctattgtgagagtcgtgatatcaccttccacatcagtgatactgagaaggaacaaatctgccaaagatgcttcacagttagttgttacctttttaagaagactgtgcttgaaaattatggtaaaacacatttagaagaaggatgtgcattttcacatcagtctatgaagtataacttgacatttaaattaaaatgctgttcttcaaaattaatttttcctgttttaattccaagttttcttgtacaggggagaagaggtaaggggtagctctaatgtgttggcttcattcacagaagaaacatttttataaacagttaagtgatgccagctttctgttgatgccatcagatcttgcaagcaaaaaataagttaatttcaatatcagttgatattatttcattcaacctatgtaataaagactctgtctccatnnttggnctnannggtggagctctgcagccgg

SEQ ID NO: 634616 - DNA, 818 bp, Homo sapiens
  misc_feature (3)..(3): n is a, c, g, or t
  misc_feature (13)..(14): n is a, c, g, or t
  misc_feature (37)..(37): n is a, c, g, or t
  misc_feature (118)..(118): n is a, c, g, or t
  misc_feature (155)..(155): n is a, c, g, or t
  misc_feature (199)..(199): n is a, c, g, or t
  misc_feature (204)..(204): n is a, c, g, or t
  misc_feature (209)..(209): n is a, c, g, or t
  misc_feature (221)..(221): n is a, c, g, or t
  misc_feature (264)..(264): n is a, c, g, or t
  misc_feature (287)..(287): n is a, c, g, or t
  misc_feature (315)..(315): n is a, c, g, or t
  misc_feature (317)..(317): n is a, c, g, or t
  misc_feature (327)..(327): n is a, c, g, or t
  misc_feature (342)..(342): n is a, c, g, or t
  misc_feature (373)..(373): n is a, c, g, or t
  misc_feature (383)..(383): n is a, c, g, or t
  misc_feature (408)..(408): n is a, c, g, or t
  misc_feature (420)..(420): n is a, c, g, or t
  misc_feature (446)..(446): n is a, c, g, or t
  misc_feature (516)..(516): n is a, c, g, or t
  misc_feature (532)..(532): n is a, c, g, or t
  misc_feature (534)..(535): n is a, c, g, or t
  misc_feature (566)..(566): n is a, c, g, or t
  misc_feature (678)..(678): n is a, c, g, or t
  misc_feature (715)..(715): n is a, c, g, or t
  misc_feature (724)..(724): n is a, c, g, or t
  misc_feature (744)..(744): n is a, c, g, or t
  misc_feature (800)..(800): n is a, c, g, or t
gcngctgctactnncgccgctgcttcttagtgccgcnttcgcacgcgctgcggttgtcaccggcgccgccgccgaggaatgccactgcaaccaggaccggagtgcgaggcggcgcganatagaagcggcgcaggcccgctccatagcagcacgtngggtacggtccgggtcggggccggggcgagaaggaaaatgcaanatggnagcancaatggaaacanaacagtctgggtgttgagatatttagaaactgcggactgtgangagaatattgaatcacaggatcngcctaaattggagcctttttatgttgancngtattcctanaatcaacttaaaaanctgcttgccgataccatgataaatatcatgnctacatgatngctaaggcaccacatagatttcatntttgtcgaagangaatgatccagatggacctcattcanacagaatctattcaccttgccatgatctggtgatgcacacagtagaaaatacactgtatttacttctganattcccaaacactatnanntagcagcagcagctcttaattgctctcttgngaagcctcttgttggatcttatttcaggcaacactggactatggaatgtattctcgagaagaagaactattaagagaaagaaaacgcattggaacagtcggaattgcttctnacgattatcaccaaggaagtggaacatttctgtttcnagccggtantggaatttatcacgtaaaanatggagggccacaaggatttacgcaacaacctttaaggcccaatctagtggaaacnagttgtcccaacatacgg

SEQ ID NO: 634617 - DNA, 592 bp, Homo sapiens
gctacgaggtgctttattatatggttgttacactcgtgcaccagtggaactcagaaactagtccagaatatcacaggtccggcgcaaaggaccaccatgcagtttgggttatgagcaaggtgagtctcagaggtggtcttggtgaccagatggagatgaagttctagatgcactgaaacaagctctagacagtagcatgctgcccaataactgtacgaggatccccagcatctggattccatgtttctgctcctgtagcctccatgggtgcataagcttgtggtttacttggacctctgcctcatctttcttcttttgcgcttcagcctgcgcattcgcttcctccactaggctctcatggtgcagaggtttccaagaagatggtgtgaaggccgagatcatttggttatattataaaatagaatgcaaattcacacaagttttagttttatatttatttatttttttagagatgaggtcttgctatgttgtttagtctggtctcgaactcctggcctcgtgatcctcccaccttgacctcccagagtgctgggattacagagctgagggctgagccactacacccaaatga

SEQ ID NO: 634618 - DNA, 1350 bp, Homo sapiens
  misc_feature (615)..(615): n is a, c, g, or t
gatcatgtgctccctcccacttgccaggtgaggaaatgttatccaggtcatggatgccatgtttggtcaatgattcgaagactgtaatggttggccagattcaggatgcacatgcgtttctggacgctcctccagcactattccctcacatggagttccattgccctctctacgtgaggatatgtcaggtgtagtacgttactcggtctgatggactacttgagacgtcagtggacacaggcaccagtacgcctgtggtgctagcgagaactgggtgcctttgagcgcgaaggcgtgccgaggtattccaatgtaatagcagcagctggcccgttcatgctcatcagtagtccaggccacggaggaggttcactatgtatactggggtccgacctcctgacatactagtgcagactcaggtgtgtcggccgatggtgagaggttagactgctgacccgtgggaggacatatgcatatcccattgtcggcattctgtagtaaacgcttgcatcgcgttgtgttcttggacattattatctctggcaaagcgtgtgacagatgttctgccagcgcgtctcgcaatcgagcaccatgtgagataactatcttgtacanctcaatcgttagaacgatctcgtcggtgatcgtacctatcatctggtacaatattgctgtggctggccacccggtcgtgagagccgagcaagtaaccatagatcggggacccttggatcaccgatgcaggtaactccattggtggcggacaggccaaagtgcctgtgaggttccctgggaacatgcaagaagaattcagtcgctgctttcacaggtcctcaaccgggttgatgaaatgaacctcaagaaagctgaaggggcattctcatggtcagggtgtggccggcgacccaccacggtaattgaaattggtccatgcgtgtcctagcttggttccgtggaggccacctttcttgttgcacacgtggggctgcaatcgggcggggcccccaaaaggggggtcgggataaccttccgataacgcccaggtaaccgtacaaaacatacgagcgaagaagtatcacgaacctaacaccgcgaggccccacactggcggggcggttcacaccccacactagtaggcgggcgcaattggagcgtaagactcacccaacaatccctcgcgacggagcacaaccgaatggacgcacgcgccgcaaacaacaaccagaacgacgctacaagtgagcgcagacaagaaggacacgcaccacccacaatacaaagaccggcccacacatactaccacaccaaacatcacgccatcagtggccacgcgcagcagcgacaactctt

SEQ ID NO: 634619 - DNA, 672 bp, Homo sapiens
  misc_feature (55)..(55): n is a, c, g, or t
  misc_feature (77)..(77): n is a, c, g, or t
  misc_feature (93)..(93): n is a, c, g, or t
  misc_feature (97)..(97): n is a, c, g, or t
  misc_feature (100)..(101): n is a, c, g, or t
  misc_feature (118)..(118): n is a, c, g, or t
  misc_feature (120)..(120): n is a, c, g, or t
  misc_feature (181)..(181): n is a, c, g, or t
  misc_feature (189)..(189): n is a, c, g, or t
  misc_feature (196)..(196): n is a, c, g, or t
  misc_feature (210)..(210): n is a, c, g, or t
  misc_feature (227)..(227): n is a, c, g, or t
  misc_feature (250)..(250): n is a, c, g, or t
  misc_feature (258)..(258): n is a, c, g, or t
  misc_feature (267)..(267): n is a, c, g, or t
ccccctggcaccaggttgccaaggaagcggcccacctgaaagaatttagattganaagaaaaactgcaccttcctgncaaaggtcgggggtcncggnggnngggggggtggtggggtngngggggcggcggcttcttctagcggctcggccataccagccactgaggtcctaactgcggcnggggggcngttctgngcatgtggctcacnctctgtgctctgttccncacggggcaaacgcacatgggancgttggtncgctcaggnactggttctgtggtggaacggtggatgtctgcgctgtgacatcagctgagtaagtgacaacgactgagggtgcgggtggcccgggggtgggggggggggtgccaggtcgggcagggttgggtgtggtttgctttgggaggagagtgaacatcacagggaatggctcatgtcagccccaggagggtgggctggcccctggtccccgggctccttctggccctgcaggcgatagagagcctcaacctgctgccgcttctccttggcccgggtgatggccgtctggaagagcctgcagtagaggtgcacagccagcggagagtcgtcattgccgggtacagggtaggtgatgaggcaggggttgcagttggtgtccacgatgcccactgtggggatgttcatcttggc

SEQ ID NO: 634620 - DNA, 1041 bp, Homo sapiens
  misc_feature (1041)..(1041): n is a, c, g, or t
tggttttgaccaaaatgctgatagtgatatggaaaataaagtccaggttgaggaggtctcagatggagatgaagagcaaaggtaactcttgtcatgctttagcaaaaagactggcagcattttgcttctgccatagagatctgtggaacttggaacttgagaaagatgatttaggcatccggtggaagaaatttttaaatagcaaggcattcaagatgtgacttgggtgttgttaaaagcattcagttttctgtattcacaaagatatggtttggaatcagaacttatgcttaaaagggaagcagagcataaaaatttagaaaatttgcaggctgatgatgcaatagaaaagaaaaacccattttctgaggagaaattcaagcctgctgcagaaatttgcgtaaataatgaggagaaaaatgttaatcaccaagaaaatgcagaaaatgtctccaggtatcgcagagagatttgcagcagcccctcccatcacaggcctagaggcctaggaggaaaaaatggtttcgtgggctgggccatggcctcgctgctctgtgcagcctagggacttggtgctctgtgtcccagccactctagctgtggctaaaagaggacaggtacagtcaggctgtggctttcagaggtgcaagccccagcccttggagcttccaatgtggtggttgaacctttgtgggttgcccagcaggtcaggaatgacggttggcaaaccctctgccgtagttcacgacagaaggaggggaagcaccggatgtcccaggcagaagctgccgtaaggggtacgggccccaatgcacacccactgcagggctggtgaaaaggcaggggggggggcccaaagaccatttgggacgccacggagcggtaagacaccaaccgaaacacaagggatccacaacctgcggcgcggaaacgcacatctgcacaaaaacaggagagacaacaagagcaagaaactcttacagtcagacacgcacaggcgcatagcgcgagcgcaagcacaaacatcacatgtatggacgn

SEQ ID NO: 634621 - DNA, 243 bp, Homo sapiens
tgaagtactcacaaacattataaaaatactattcaagacagtgcaagagagtagattagcaaaaggtaagtttttttccctagcctgtctcattttgccatcattacacagactatttggaatgtcttagatgtcctcggtattgtaattttctgtgtaggtagaaataaatgtagctttcttattttacacaaataggaacttactgtatatactgttctgcacttggcttttattaaagat

SEQ ID NO: 634622 - DNA, 219 bp, Homo sapiens
ggcttcatcgtgttgaccgcggtgttggcacgaaagttgaccaaacccagtgggcttcgtattagcttaggtttaacgagtcgctaattgctaaaggttattcttagctgttcccctgtgtgaaagtggctaggctaagcgttttgagctgcattgctgcgagcttgatgcttgtcccttttgatcgtggtgatttagagggtggcgtggccagaagga

SEQ ID NO: 634623 - DNA, 633 bp, Homo sapiens
  misc_feature (475)..(475): n is a, c, g, or t
  misc_feature (572)..(572): n is a, c, g, or t
  misc_feature (632)..(632): n is a, c, g, or t
ggacatccatatcacaaaaatgaaccttgacttaaatgactttatacaaaaattaactcaaaatgggtcataaacttaaatgtaaaatgtaagactatgtaacttttagaaaaaacataggagaaagtcttccagatctgggctaagcaaagagtttttagatttgctaccaaaagtacagtctacaaaagggacaattagcaaacattaaaattaaaaatatttactctctgaaagcccatatgataaagagaatctccagacatatttgcaagctgtctatctgacaaaggactcatatctagaatatataaagtactctcaagacatcagtttagaaaaattcatctagacaattggcaaaagacataacatttcattaaagaggatatacaaatgtcaaatacagaaaagatactcaacattgctggctattagggaaatgcaaattcaaaccataatgaatatattattntttacctgccagatggctacaaataatgacagcatggaaatctggtgactatgtggagaaactgtatcacacatcactgctggtgggaatgtgatgntatgggtaggttcttattgacacgtgcaggtacccatctctagccattggactattgggnc

SEQ ID NO: 634624 - DNA, 212 bp, Homo sapiens
ttaggatgggtctgtgtccgtgtgtgtgtgtttgcatcctcagggaggactcagcccaaccagccaggtgtgtgtgtgtgtgtgtgtgtgtgtgtgtgtgtgtgtgtgtgtgtgtgtgtgtggatcctcggggagaactcagcccaaacagccagctagagagcagctgacaccctcactatgtcccctcaaggggtctctagagataaata

SEQ ID NO: 634625 - DNA, 1661 bp, Homo sapiens
  misc_feature (1454)..(1454): n is a, c, g, or t
ctggttatgttgtgtcgctcgctggcgcgccgttggttgtggaggcgccggccctccccccgggctggaggatattgtgttgtgtttgtgtgcgccccccggctgtgtgtgcttctgtgtgtggatgcccccccccgcgctgtgtagtatgaagtgagggtgtgctgtcgcgtctcagccgcgtgcgttattaggtagtggtggggcaacgccgcccctgcgttgtccccgccggcggggtggtgttttgtgtggtgacggatgaaggagtgaagagggggaggggttgctttggccttattaaagggcggccgtcgtgttgtgtgtgcttattaggcgccgtctggggtagccgcccccccgtcgtgtgttgtgcccgccggctggattgagggtgggctctataagagggttcccccccgcctccttgttttttagtatagaacctcgttgtgaggattgtgctctgtaatgagcattagggggcccaccagaaggaagaatagggggtcccccccccccacagatggggggattagtaacctctgtgtgtttccccacgtctggtggtgtttgtagtaggggcttcacacaagcggagataaaaaaaataaattttcggcgtcctccaccgggggtccttctctacaagtagcaccccaccgccttcttgttcttctacatcgcagccgcaccacgcgtgttttttgatgaataatgggaggaagcatcacccgccgtcatggattagtagtgctcccccaaccagttgtgggttgttttaatcacccacccaatggtaaggcagtaagaagtttgatggaagtatttatgagaaaggtgtaggtgggcacgaccagcacacacaacagggtgctcttctttgggcgagtgacgataatatgagcagatgagatgatgcggtggatgagaatatttatactacaacaggccgcggggctgataattatccccaccaccaacataggaagattgggtgtaccccaccagcatgacacattaggaagatgtgttctctcctcgggtgccctcgtgggcgccacaccacaccgttcttgggttgtggtggcccccaacagctggtgggagagagcgtgtgtatttgagctgtgtgggaccctctcagaggagactctgctgggcctcttttttgtctctgttttctgtgtggtggtctcacacactcgtctgggacgcgctccacccctctcggagagatagagagatgaccccacaccccacgaggatagagcgcgccagtctgtgtacgaccagagattgggtgagagaacacactgtctctgagagagagatatagatattgtgcgcgcacagaaacactctgtgtgacacgccccctgtggagaagtgtgctctggtggtctctggtgtgtttgtgtgcgacactgatattacctggcctgttgtctttngggtggcgccagaaaacatctgacacacttgcctaaggtaatattggtgttcttagattatatccagaagagagattaagaatggtgatagttccacccgcgcccatccagctggaattgagactttggaataagcaccccggtgtttcctagccccgtttttgtttttaaagttatgaagaaaaaaatcccataaaatttctaaaa

SEQ ID NO: 634626 - DNA, 501 bp, Homo sapiens
ccttagcaagatgtgaaccacaggccgtccttatctagacttgactcttaacaaagaggtgtctgtgtctaacctgttatgcattacactatgggacacactgcctcttgcacatgtaaataaagtcacagagttacatggcggtaacgattgtacaaaatttgtcccacataacttatgttgtatggcaggttcggtgttgcaaaaatcaactctacatctctcttgatggaacatgtggcctctagatactgccactccaccccttcctaatgctagagacttgcattacctgttttggctcctgaaagcattaagagttagtaatccctgctttacttacatacgttaatctgattcattctttaatataacttattgaacgggagtatcggagtacagtgaccagatctcggctcactgcacgctccgactcccgggatcatgccattctcctgcctcagcctcccaagtcgctgggaatacaggcgcccaccacca

SEQ ID NO: 634627 - DNA, 331 bp, Homo sapiens
  misc_feature (57)..(57): n is a, c, g, or t
  misc_feature (72)..(72): n is a, c, g, or t
  misc_feature (82)..(82): n is a, c, g, or t
  misc_feature (113)..(113): n is a, c, g, or t
attatccatagcatagtgctaccagttgaactttctccacatatcaaaatttaagtnagaattacgtgattnctgaattttnatttcttgtttcaagccagggtggattaganatgaaaaaaaaagcatgcatttcctttaacttttgttgcagaaactcagctgtattaggaatagtgatcatctgtttgaagctgtgaattgagagataaaggtgcaagctaggagtccgtggaactgggtcatgacacatgatatggtttataacaaggaagggggagcaaggatcagaaagccttgtgagtttcatacgtacaggatggaagggttt

SEQ ID NO: 634628 - DNA, 807 bp, Homo sapiens
  misc_feature (444)..(444): n is a, c, g, or t
  misc_feature (737)..(737): n is a, c, g, or t
tccaacaaaaaagtttttatggagcgcctactatgtgccaggcatgtgttcttaaacccccccccaaaaaaaacaaaccaaaacaaccacgactatagagggatcgtaaacaaccaacatttctaggggagccgacgaaacgcggggccacagttgactataacgacgcggtataagagagacactcgtgaacacatgacccgtgcaggtagtgatgtgggagcgtctctgctataaaggcccccttttagggcctcctaccgaaatacctccctcctcttcattttggggggggagtatcctctggagtacctgcgcttgagaatcactctgacgaaagagcaaatctagcgagtgtcacgtcacatgtgtggggctctcttacgagacttctacaggagaaaaactttacactattctccgtacacaggtcctctccgcttntgttgtcccccatgtggagacgaaaggcgcccttcacggcggggagcactcttggagccaggtgaacccttggtctcccgaaagatggcgctctctagacaaagacgtctcttcgggagaatggggcatgaagtgcctaatgtcgccaacataggaaagtcgtggagcattgcgccaattctttaagggggccccacaaagagttgcagggactcttgtcccaaccaacgcaagcggcatttggatctctcgagcaaacaattcgaagatagaggagcgaagtaactacaccnagtaatcccaacaaacaaaaatgattcatctcatcgcatgagatcacccattatgggtatccatcagcgg

SEQ ID NO: 634629 - DNA, 133 bp, Homo sapiens
  misc_feature (1)..(1): n is a, c, g, or t
ntctagaggtcctgatatgtgtctcacctggcataactgttacagcttggctggcccagtgggggagctgtctcagttcaccgtgatctgtatcgggtatggattctcaacagagactgtgtccccttcctgg

SEQ ID NO: 634630 - DNA, 500 bp, Homo sapiens
gactgggtcgaagaccggtctgtgaatttctgttttcatatcacctgtgtgtctgtgaattttcgtgttttcatgcccacctgcgtgtctgtgaatttccgtgttttcacgcccacctgcgtgtctgtgaatttccgtgtattcacgcccacctgtgcgtgtccgagaatcagcgtgtttacacacccacctgtgcgtctgtgaatttccgtgttttcacgcccacctgtgtctgtgagtatccgtgtgtccacgcgcacctgcgagtgtctgtgaatttccgtgttttcacgcccacctgcgagtgtctgtgaatttgcgtgttttcacgcccatctgcgtgtctatgaatttccgtgttttcatgcccacctgcgggtctgtgaatttccgtgtttacatgcccacctgcgtgtctgtgaatttccgtgtttacacgcccacctgcaagtctatgaatatccgtgtattcatgcccacctgcgggtctcgcggacaca

SEQ ID NO: 634631 - DNA, 954 bp, Homo sapiens
ggtcctgagcctggcgcggaggctatgggcagccgaaggaggtgctgggtccacgcggccggttgtctcctccggtctcctcctgcacggtgtcgtatcggcagatcacctttgtctagaatgcatttattcttcgcttcctgtcaaaggaaatcgtgggcgtagtagaatgtacagactaacgactgctttattcaaccaccctcttcctggactcagtagaggctctcccgacagagcatgtcgtcagtgtgggtcacccaaagcggaggacatgggaggccatgaacactgccaaccttgctgtgagctaaatcagtccgccctggggtgtgtttaggtccttattcctgggcatggatctggttgcagctgcttgaaggtgcctgatcctaatgttgtccctcactattgcaactatggagtggtgctgtataggtctcatcgcgcagttggtggagcttctaggagagccctgtaggcgtcttggcacaaggcacatatgtctgtgagagctcacggtgattgcagagagcctgtcggtaattcttaagagcgtctgacagtttttctcgtgctgtggtatgcctcactgggggattgtacattttctctttggaccagctttttctataccacagtctggtgctctgctcatgttattatttgcaccaaaggttactgggttcccagaatcaagcaagcttcaaagtcttcctgtcttccagaatacaagatctgttacccaatatgacaagaatggagcgtttataactggaaaggaggctaacctgaattggaagtttgcaaacagggttctgaaacaggtttgacggaagggagcgatagtgataacttttgaatgcttgaactggggagacgggggggtgagaaaggaaaaatgagggaccttcggacaaactcatcacaagacgcgaagggaatttaggaagg

SEQ ID NO: 634632 - DNA, 157 bp, Homo sapiens
cggtccggcgcgtggtgtagttgagggaactgtgcaggcacagtcacatcgctgggattcgtgtagtgcttcactgtggcatgtcactggacttgcctggctagtgcacttgtgtgtgcctggcatgggtcagcgtggctgctctgtggttgtacag

SEQ ID NO: 634633 - DNA, 194 bp, Homo sapiens
aggtaatttttgtattttttggtagagacagagtttcaccatgttggccaggctggtctcgaacaactgaactctagtgatctgcccaccttggcctcccgaagtgttgggattacaggcaggagccaccacgcccggccagagccagagttttaaattttgccaaactcctatccatccatcattcctttcca

SEQ ID NO: 634634 - DNA, 179 bp, Homo sapiens
  misc_feature (1)..(3): n is a, c, g, or t
nnngcagagcactgagcttattacaaacttccacagaatccctcaccctccaccccagggtcctccctctctggaactcatggcatgcagacaatgcttgggtccacccacctgcccaacctaacggacatgcttgggcctgagctgggagtgcaggggattccatctcctgggtgcgc

SEQ ID NO: 634635 - DNA, 139 bp, Homo sapiens
gcggccgcctactactactactactgctcgaattcaagcttctaacgatgtacggggacatgtatcttgcttaaatttctgtttattaatttatatccacccaagtacataaagcaaatttggaggaaacaataaaaaa

SEQ ID NO: 634636 - DNA, 490 bp, Homo sapiens
acctgataacatctatggatcaaagaggtggtgtttgatatgggatgaaaaacaccacttaaaggaggcatttgcttatcagcgacaataagcaaaagcttgaagggtatgttattctctcagtactacttctccacttcgcaggcatatctattcaggagggcatcttgaaagaggagcagggtcacccacgacttcttatatctcctgcagtgcactggccaagtgtgtgtgtattgatatgcttgaagcccctagggttctcaacatgccaaatcacaaaggggttcaatttgtggcctgcaacattgcccccaagcaagactgtcatccagtccctaaaagacttgaagcctggcattgctttggtctacctcatggatcaaagtcctttcaggcatctgtttccagaatagaaaggtttcatccatattgaaaatttgttctggcaagtgattttcctccagactcagcttatctagagtttccc

SEQ ID NO: 634637 - DNA, 585 bp, Homo sapiens
  misc_feature (496)..(496): n is a, c, g, or t
cctccgaaccagatgtgccggagatcagcatcgtgataccaacgtagatctacgaagctgcatcgtgtgatggttaggaagtgatcgatacccaacagggtacttcgaatatggaactcattcaaatccatttcctccaagatccaatcggtcccgtacaaggcatcctcctggctgtgcgtaggagggactgaccaacctatccacagccagccattcggaggagcccgccttagccttgtcgctgaagaacgcatgaggtcggacagtgttaggcacctcaaggtaatcatctaagagacctaggctttcttcagcccccaaacccgacgggtcgaagggggacatcaagtcccccaccaacacctcgctgctcaggaagctcatttcggtcatgttgcggtgctttgctggaatcgaggaatgtgcttaattcgaaggtgtctttgtcggttacagcaacgctgctgctgaatgccgtgagaagcgccatggnttaagccgctgggggttgccgctgcagagcctggtgctgctagcgccgctgcaaaggccaatggctgcgcaggcactgttgccctaata

SEQ ID NO: 634638 - DNA, 174 bp, Homo sapiens
  misc_feature (28)..(28): n is a, c, g, or t
  misc_feature (98)..(98): n is a, c, g, or t
  misc_feature (168)..(168): n is a, c, g, or t
cattaggactacgggcatgaaccacctngcccagccttaattttggttggtggagaaagtttttatttctcttgggttttggaaggataatttggcanggttcaggattctaagtgggggggttttttcttctcaatatgatatttggtcactctcttctggctggtnccgcgg

SEQ ID NO: 634639 - DNA, 191 bp, Homo sapiens
acctggtagccggccatgtacgcctggatgaagcattaccatgtacgcccacgtatctgtatggctgaccaggactcgtataacgagctgacctgtcccgtgaattcttcgtgcatctatgtgtcgcggcctgcgtgccggcgaccacgatgcgtgctggcgcgtgttccgtggccacgcctgagcttcgc

SEQ ID NO: 634640 - DNA, 414 bp, Homo sapiens
tatccactaatgacctcagggaatattttttttgtttggactgtgcaacaacctgccttgttactacatatatgatactttaccttgagtgagggtgtttttcagatctgtcttcccattcttactaatactggttaattaagctgaaagcaatggccaaaaatggtttcccgacacgctctttttttgagacttggcatatcctataatttttgctagtgaaaccacacaaacacctccatgggaatgccggcttgcctcactttgagggtgctaggggaagaattacacatacactttatgccactgacatgcactttatactacaacaaccgggccaggcatggtggcttacgcctgtaatcccaccactttgagaggccgaggtgggcggatcacgaggtcggaagttcg

SEQ ID NO: 634641 - DNA, 180 bp, Homo sapiens
  misc_feature (7)..(7): n is a, c, g, or t
  misc_feature (14)..(14): n is a, c, g, or t
  misc_feature (79)..(79): n is a, c, g, or t
acacatnacccacngccagtatatctcgaacaaagtctcagacgatactccctgaaattgtaaagcttaatacaggttntggaaatcatttaacacccgagaatgtcccatcacagtcttccgtcaaaatttagcctcacaacaacaacaacgcctacgaaattctaaattcagaaggaa

SEQ ID NO: 634642 - DNA, 356 bp, Homo sapiens
cttcgtgcagtttgcttcaaaggagatagcagaaaatgctctggggacacacaaggacagaatagggcacaggttggggattggagagtttgggattggtgttaaatttttcaatttttgggggttgtgggtcactattgcttaaatgggggggtagccatacatttttctggggtagttaaaagattataattatctaaatctaactgggaacctacagatttggggtgggaattaatgctaatagataactaaactgagattgtcccatctctctataggatgttgttgataaacgtcttagtatactacctatccctatacacactctatgtctagagcgcacgtaaactatc

SEQ ID NO: 634643 - DNA, 768 bp, Homo sapiens
  misc_feature (288)..(288): n is a, c, g, or t
  misc_feature (308)..(308): n is a, c, g, or t
  misc_feature (325)..(325): n is a, c, g, or t
  misc_feature (396)..(396): n is a, c, g, or t
  misc_feature (403)..(403): n is a, c, g, or t
  misc_feature (723)..(723): n is a, c, g, or t
catctgacttacagaaggagaagcatttgtgaacagtttctgaacagaacactttggaaatatttatgcttttctttgtgtggcatgactgacatacatactcaaatataggctgtctctagtaaatcttaaaatcttgaagctaaaattcatccttttatgaggtgtggaagtcagtgacttggtgacgttcttcctagcagtgttaatacatgcaagaagtaagagcatttgtggcttgaacttgccagatgcaaataccacagactccaagaaaacccgagttgnggtttggtttggtttgattntttttttttaaagcggntaaaagagaaaacactgaaaattgaattcttatcttccagaggctacaattattataatggacaatacttntaccttngtctctaaagatcagattagttttatttggtcacttacgtgctttgattatcccctcttgattatagacccgagcttggtgttagcctaagagaagatttatgtagtattttcttctcaggtattggaccaacgtcataactaacatgttggccagaatatgaccaatggttaacatatttaatcaccattaagtgaccttatcaatattccggattagacaacaaataacctttctggggggtctcttggaaaccatacttccggttgaatggtaactttgggtgcttaaggtaaatttaaagaggtttgggtcaagtnatagtctttgaccttcaattcccacccttttcattttagcacact

SEQ ID NO: 634644 - DNA, 189 bp, Homo sapiens
  misc_feature (64)..(64): n is a, c, g, or t
  misc_feature (81)..(81): n is a, c, g, or t
  misc_feature (167)..(167): n is a, c, g, or t
tcgcaggagttacagactggcgcacctcctcctgacgccttgtaggtttcagttcatctcttgnaacaatatcgatgaganaatcaaactgatcaaattttgtaattgccatggcgatatcatttctctgtagagtccggcgcttgttatcttctgtgtgaatccanggcccgagagtagcgtaccgag

SEQ ID NO: 634645 - DNA, 329 bp, Homo sapiens
aaaagatttattggcgatggaatatggacacgaggtcattcaatggttatacctagttaatggaatacctagttaataatagtactaaaacttactgtattgcaatctttgccaagaacctgatgacggaaaccacgaggtaactggaaattcccaaatagcgcttaagaaaaatactacgagacttgacaattttttaacgtaacttcctaagtgtacgatgacaaaatttgacttacgggatattctggcgttaatattcccgtccgcctaaatgtggggcaaaaatacacagctacgttatattaagcaaatattaaccgtgccta

SEQ ID NO: 634646 - DNA, 146 bp, Homo sapiens
tctcttgtgctcctagtcattgtttgtcaccatttcctaatccagaaaatttggtcatcatattgtctactgatgtcgtggtgttgtagccaattttcttattgttagtgctgacttccttaacaatttcctcatatctcttctgg

SEQ ID NO: 634647 - DNA, 809 bp, Homo sapiens
  misc_feature (114)..(114): n is a, c, g, or t
  misc_feature (177)..(177): n is a, c, g, or t
  misc_feature (376)..(376): n is a, c, g, or t
  misc_feature (381)..(381): n is a, c, g, or t
  misc_feature (398)..(399): n is a, c, g, or t
  misc_feature (437)..(437): n is a, c, g, or t
attaaattaacaagatgcaaatcttccacctatccacttaactaagttgagcaataacactgcataaaagttcattttagtaggtgctatgcaaataaacaggacatggatcangccatgacttcctcagagatggaaagttcgcttgggctacctgccttgaaggaccgaatatgncagatattcaaaactgtcagcacccaaaggcaccggccttgataaggctatggaatggatagttgaaacattaaaaagcagacagtaattcagtccattcttccgccctgaaatgaggactacatcacctctctcccttcggaaacagccaagtcgtacttcacactactagatgtgaaaactatatgactatgcgccnagacncacttactgcaatgttnngagtaaacacgcaacctccgttttaggttgagggctanaagaccaaatcacttgaaagtgcttagtaacgaaaaacattcttcccttgcctggtcgggtagaggtacgtactcgattcgtgcccaaagctccatccaaatacaccaccattcagaccagcatactccctctcggacgataaaaaccctactttttaattcgcaatcctctactctctttgtttccattcttccctatatgctaaccagttccccctgcccctctacttctaaccatcttcccgcggattagattatagttgtcattgatctatgaacctaaaatggttaaaaaatcatcatctaatataatagatcactcccactaatatgttttctgtactagccctgggctcaagattgatcattgtg

SEQ ID NO: 634648 - DNA, 327 bp, Homo sapiens
cgatgctacatcaagattatgctctgggggcaagaataaaaaaaagagaggctaggtgtggtggctcatgcctgtaatcccagcactttgggaggacgaggagagtggatcacgaggtcaggagattgagaccatcctgacccatatggtgaaaccccgtctctactaaaaatacaaaaattagctgggcgtggtggtgcatgcctgtaatcccagctactcgggaggctgaggcaggagaatcgcttgaacccaggaggtggaggttgcagtgagctgagatagcaccacttcactccagcctgggcaaaagaacgaaactctgtc

SEQ ID NO: 634649 - DNA, 369 bp, Homo sapiens
  misc_feature (17)..(17): n is a, c, g, or t
gttgcacagcttctcanactaaacaggtactgacagtggatactgtattatttaaataaggcattcaccctgcatttatttgttacgtgtacatatgacgcttaaaattctccactacaataatgcatcataatctcacttaagatcctaatcatttcttaaaactgatgaagttactgatgttcttggtagacaaatttatttctctttaggatatgttatttttatgatacgcgggttttatgtaatcacacttcaccagtctgaaaagccacaaaccaaaaccaaaagaaagaaaagtcctgttggatgaaataatttcttgctgagcacaatcccttagtctagaactctgagtatatttttcag

SEQ ID NO: 634650 - DNA, 323 bp, Homo sapiens
tagagatagatggactttggccatgttgcccaggctggtcttgaatgcctgggctcaagcaatttgcctgccttggccttccaaagttctggggttacaggcgtgagccactgcacccgacatataaaatcatggtctatagttttcttgttcatatcataatcttaagggccagacattgcaactgtgtattctaaggctttttttaatctatggatggtcactgcttgtaataaatggggagggaattcattcttaaaggagggattattcttgcaaacaggccaaagagagggaaacagaaatctaaaattatgcgactg

SEQ ID NO: 634651 - DNA, 360 bp, Homo sapiens
  misc_feature (192)..(192): n is a, c, g, or t
  misc_feature (231)..(231): n is a, c, g, or t
  misc_feature (323)..(323): n is a, c, g, or t
ccccgactagcccgacaccggtgggtaccagcaatgaccaggtgcccatcgctgagggccctgccccccctgcgggggcctctctccctgtgactggcagctgtgaggccctggtcatcggccagggctccatcttcctgtctggggattcagtggcatgcctgggggcaaaggcttcccggtggccattgnagaccccctcttctacggccccgcctcctcggcagcagnatccagaccttcgagctcaagggcttcctcttcaaaggccggggctccctctgcagcccggttggcgtggcccagggctggggccccatctncctcaacaatggcctcgtccctgtggggaaacacacg

SEQ ID NO: 634652 - DNA, 252 bp, Homo sapiens
ttcgactgtggtgactcagagtgtccacgtcctgatggagaccaggcaggacctacccgaggctgcgccccggtgcccatgcgttttgtgatcccaagtgactctgtgggaagggtggggacgaggcgtcgggagggtatacagggagcccctcccgtgcatggttgcccccccgttacattttctccaccacaggccgctttgcacgtactagactacctgtggggtccccttttcttttaactactacta

SEQ ID NO: 634653 - DNA, 184 bp, Homo sapiens
tgataagcggatacggggttgtaggaggtctttctaaatccagaaaatctagtggtctttcactcagtggtaagtacacgaggtgctgttttcagtgccaggggtttaaagggagttgactgaataaggtcaggatctgctggtcttgaagattggctagatcttgcattatttcctgctacaa

SEQ ID NO: 634654 - DNA, 186 bp, Homo sapiens
gaacaggcccgcattaagttatctattgctaatttatcactttcacgaattattcccgcttcagttagcagtcagtaggtaccccattttggggtatttgtggcatggctattgcataggcatctagcagcagactttcccacgaaatgtgatagcttgattgacgtgccctgaagaattaagtct

SEQ ID NO: 634655 - DNA, 299 bp, Homo sapiens
aagcttggcacgaggctcacgcagaggatgccaggcagggtgaggatgggggagtagataccgcttatgcagtggctcgcactgctgtggccactcttgaccactgaggctcccagcggaaggtgttcacagtcagatcccggtccacgaagctcccttactcgaagttctccttcagcatagattacacgtgatccactttgctttcttgcttctcacctcgcccccttgaacattgcctgacaccctcatattggccagtctgtaatctcgtgactatgggactgaggctcaatctt

SEQ ID NO: 634656 - DNA, 440 bp, Homo sapiens
tatataagagactgggatgtaaagaaaatgcaagagagacacaaaaccctagagtagtgacacagttccctgcactaagcaaaaatatagaggatagcatcagactaaaatatggaatcagaaatatagaggaatgtatcacgggtacacctctaaaatcccttaagactaacaattaaattcacccaaaatttaccttgcattagtctcaggccagacacagcttacaaaatgttacgaaattaaactaccacacagttcaggcacagcgataacacacctgtaatcctggaaatatggaaggctgaggctggaccgatcactataaaggtcaggagataagagaccagaacagcttggacaacatggtgaaaaacctataactactaaaagtacaacaattagaagtgtgtgtgagtcgcacacttgtaatcccagca

SEQ ID NO: 634657 - DNA, 104 bp, Homo sapiens
catacccaggctttctctcttgagacgcggcggacgggtgaagtaactgcctaggaatctgcctggtagtggtgggataactgtcctggaaacggacgctaata

SEQ ID NO: 634658 - DNA, 133 bp, Homo sapiens
ccggatgtatgccacactatcagtatactctctatcattgaatggctctacaggtatcatatcttagttgtaatatattatctactctatagcagagatgagctactgctgaaagggctttgaatccttttca

SEQ ID NO: 634659 - DNA, 111 bp, Homo sapiens
ggccgaaaggaaagaaggccaagggaaagaaggtggctcccgccccagcttgtcgtgtaagaagcaggaggctaagaaagtggtgaatcccctgttttgaaaggctaagaa

SEQ ID NO: 634660 - DNA, 880 bp, Homo sapiens
cgtctttccgtggcgccttcatctgctgcgggggtgtatgcgttgccccaatgggttcgtttataagggaccgcgcttggcgtcgccagggctattctctcaccccggggtgccacgctatgtttttttgagcgccttttcctggagcggcattattagcctttggcctagcggaccccaacagtgttgttggttttcacgcccgcgtgcctacaaaggggggttccgcccgccgcgcagcgcctctttggggcaccgcacattgggggggtgccccgccggcctcgcagttgttttaccaaaaaaaggagagtgcccttttaaacctggcccccgaccaaaaaaagggtggtcggaaccttttacaagatgtcacccagggcggactttccggtatcatggcgacaccaaggaggcaaggcgaggcttcttgcgtataaggggccgccccccctgttcgtgtctggagaacaagagtcccacgtctattgttaacgatttatctataggcccttttcattgtaggacaattatatgagaccgggcgcgccccgctccccagcgctgttattatcccacctgcggtcggtcggcagtgttctaaacaggagtcctcgttagttataaggcgcacacttctttccgcacagcgcgcttttggggaggctccgactgcctttctttgccctggtagtatcctggtcgcaagtatgaaccaaaggggggggggtctttcgaataataacacgtgagacaaacattcttccttctttctgggctggccatccaatgaggtcccagaatccacaccaccgtggtgagctgaagagttcttgcctgtgggtttttttttaaaaaacaccccttcgaaatcataaca

SEQ ID NO: 634661 - DNA, 167 bp, Homo sapiens
cgtatttatcaccttccacccttactacacaatcaaagacgccctctgcttacttctcttccttctctcctttatgacattaacactattctcaccagtacctcctaggcgacccagactattataccctagtcaaccccttaaatacccctccctacattcatcaa

SEQ ID NO: 634662 - DNA, 268 bp, Homo sapiens
ccaagctagagtacagtggcataatctcaactcactgcaactgcaacctccacctcccggggtcaagcaattctccagcatcagcctcccaagtagctaggactacaggcgcacgtcaccacacctggataattttttttgtattttttgtagagatggggtttcgctatgttgctcagactggtctcaaactactgagctcaaagtgatcctcccacctcagcctcctaaagtagtgctgcgattacagtcatgagccatcacacct

SEQ ID NO: 634663 - DNA, 428 bp, Homo sapiens
ttccagattcaagcgattcttgtgcctcaggctcccaagtagctgggactacaggcattcgccacaatgcccagctaaatttttacatttttagtagatatggggtattaccatgttggccaggctggtcttcaactcctgacctcaagtgatccactcagcttggcatcccaaagtgctgggattatagacatgagccaccatgcccagccttgtgagtctttttgatcatagccattatagttggtatgtagaagtatcttgttaggactttggtttgcattttgttaataataattaatgatgttgaacagcttttcatgtgtttattagacagtcacatttttctttgataaaatgactattcaaatctcatactcatttttaaattgggttgtttgtcatttattgatttgtaagcattggtt

SEQ ID NO: 634664 - DNA, 433 bp, Homo sapiens
  misc_feature (6)..(6): n is a, c, g, or t
  misc_feature (9)..(9): n is a, c, g, or t
  misc_feature (38)..(38): n is a, c, g, or t
  misc_feature (42)..(42): n is a, c, g, or t
  misc_feature (45)..(45): n is a, c, g, or t
  misc_feature (60)..(60): n is a, c, g, or t
  misc_feature (71)..(71): n is a, c, g, or t
  misc_feature (107)..(107): n is a, c, g, or t
  misc_feature (112)..(112): n is a, c, g, or t
  misc_feature (186)..(186): n is a, c, g, or t
  misc_feature (197)..(197): n is a, c, g, or t
  misc_feature (206)..(206): n is a, c, g, or t
  misc_feature (297)..(297): n is a, c, g, or t
  misc_feature (332)..(332): n is a, c, g, or t
  misc_feature (337)..(337): n is a, c, g, or t
  misc_feature (339)..(339): n is a, c, g, or t
  misc_feature (342)..(342): n is a, c, g, or t
aagganggncctcagcggttctctcttaggaaatcatncagngcnaggtttttaattaangaatctcctcngatgcggctcagttcttcctggtgtgtgtatgtgtnttttnaaaactcaccaaagcttgggtttttctctcttcctctttctacttaaataccttaatattttattaggattctnaaatatccagngaaatattnaagtagtgaaatatcaagcccacgactttctaaatctcatcttcaatattatctcaaacatggctttcccggtctctctccatatctcttntcattcactagcactcactctcccaatctcctacnaagcngnggncctcgtgccaccactaactcagtaattcctgaaccccggtgatcaataactcttccaaattgggtcttggatatgtgcccaatcttacctt

SEQ ID NO: 634665 - DNA, 318 bp, Homo sapiens
  misc_feature (99)..(99): n is a, c, g, or t
ttttattggggctaacccaaacctgaatcccagaaatgtatgcttaccctacaggcatttaaaaatatgtacctgggaggccgaggctggcgggtcccnaggtcaggagatcgagatcatcctggctaacccagtgaaaccccctctttactaaaaatacagaaaaattagccgggcatggtggcgggtgcctgtagtcccagctactcgggaggcttaggcaggagaatggcgtgaacccggagggcggagcttgcagtgagctgagatcgcgcccctgccctccagcctgggtgacagagtgagactctgtttcca

SEQ ID NO: 634666 - DNA, 326 bp, Homo sapiens
  misc_feature (132)..(132): n is a, c, g, or t
gtccaattttttggccgggccccaaaaaaaaaccccccagtttgggttttggggggctaaaatttttccccccccccccccatagggggtcctttggggaaaacccggttgggggggttttcccccaaaaanttttttaaaaaaaaggggggggggagcgcccctaaaaggggggccgggggggggcctttttttttttcccggggggggtttttccgggggcccaccccccaacccgttttttctttcccagccccctctttttttttccaaaggggccccaattttttttgggccgccaaaaaaaccccctttttggggcccta

SEQ ID NO: 634667 - DNA, 304 bp, Homo sapiens
  misc_feature (5)..(5): n is a, c, g, or t
  misc_feature (51)..(51): n is a, c, g, or t
  misc_feature (68)..(68): n is a, c, g, or t
  misc_feature (107)..(107): n is a, c, g, or t
  misc_feature (132)..(132): n is a, c, g, or t
  misc_feature (185)..(185): n is a, c, g, or t
  misc_feature (250)..(250): n is a, c, g, or t
  misc_feature (260)..(260): n is a, c, g, or t
aaatntggaacaatagaaactgtacagatttgatcaatctttttggtttgnttttaaactaaaatctntaaacacaccaatgtcctattccaaaatattgcacaacnttctgaatacaaaacccttgattgnattcctccttcactgaagaaaaaagttcatgaccctgctcccgggctcctctncaggcttgcgtcaaagcccccttccatccctagggagacttgagaatctataacttactggattnagagacatcnttctggactaacagtttccattctttagaagattccaccttttg

SEQ ID NO: 634668 - DNA, 146 bp, Homo sapiens
cataaaatatccgtactataccatgtccaattctctggcttaaatgggtcactttctacatgatacatgaataacggaagataattcgggatacatagtcattcactaagcttcatggtgaaaactaagtggcaagctgtgtccgt

SEQ ID NO: 634669 - DNA, 102 bp, Homo sapiens
aagaggaagggcagagaagtaccacttcaatatataaaagaattttcttcttttcttttctttccttctttctttctttctcttttttctttctctttcttt

SEQ ID NO: 634670 - DNA, 132 bp, Homo sapiens
atgtgatcgaccaacaccattgagacacattacctgaatgagcaggtgacagccatctaagacttgggtgtaccacgttgactaaattgcgcaagatgggagcgccccgactctggcttgggggaatatctc

SEQ ID NO: 634671 - DNA, 738 bp, Homo sapiens
gattaggaggtcctcgtgctcgtagatcaaacatgcactttactagcagttctatggtggacttcttcttctcagagtcatattctccaagcatagggaagcatggatcctatagctgagctttatctcagttatcaggagtgagacgtctgcaggaggacagcttaattcctctggcccttccgcttctcagttacaacaactgcagatgcagctgcagtagaacggcagcatgcccaggcagcacggaacaattggagaccgacgcaacgcaacccgggtactaacacaagcagtgtcaccactacaatcacacaatccacagagaaaccaaatagctaatacagaaagcagtcagagactctacagaattcccagtttcttttaacaaggttgaatgatccttaaaatgtctgaaaggagcgcagtccatggaaagcgagcgtgcagaaccggaagcctgttgtgttccaaagagctccttttctgtccaatttagggggttgaagagagttcatcctcagatgaggaatgatcggggggggagatggcagatttgtggtgctaatgggctgggtagaatattatgcctttagatggttcgttttagaaaaacctaatttaaaagaagagtaataacggaaatgagctccaacactcctttttgatgacatcccaattcgcaaaatgtccttggtgctgatttgccatgaaggggcaccactattgggttgttgc

SEQ ID NO: 634672 - DNA, 277 bp, Homo sapiens
tttccaaaaaaccaaaaaaaaaaaaaaactggggcctgtgtaacccgtgggggctattttgtgaaactaatcataaactgcctaggcaaccagctacaggctttagcttttaattcatggttttaaaactaaacggaatttccccttggggctagatccccactgaaaataaccaaagattttagtttttagggccttttatccggaggaaaggtttggaaaaccaaccccgggggatttattgtttaaaccaaaaaaaagttttatttttgcttga

SEQ ID NO: 634673 - DNA, 827 bp, Homo sapiens
agcggaggtgtgaaccggccacacacaaccccaattttctgtttcaaagatttgcagtccacacttaaccaaaactttgtattcatgaagaaagttcatattaatatctagcgcaagatattcatatcacgtttcaacacacgttttctacagtaaattcagtcacacgatatccaattcgagtttattagcatcaaatttgcatgaagccagtgcataaatggaacacaaaacagttctatcaactcacacatcatatcattcttcagattttgcttattttttgcagccatttattacatttgaaagattttgtgcatattgtctcattctgaacacaatgtgagcttattctgttttatttgtattagtgaagagtgtttgctattgtaagaaatattcttttacctgtctagccaggtcacaagtttttcccatttgaggagcttcaaatttagcttgtgcatatgcagcgtgatacttagggagaaaatgtgaatcacagtgctactttttgtctttgattgaatattttggtaagcatttcttcttgtcttcaaggaaatcttgcaattaggattttctagtacaggacaatccttatcacaattctctttgtaacgtcatccaggtaacattggtcaaagaaacaagatcattagatacatcgtcttgtttatccagaaagtttcataaactgtcaacattctatagccttgttgtgcatatgtacctgaagcaattataacacattgtatccgtgacctcgtgtcttggagctcgtgcttcagacacaacttgatcacgaatatttccagtcatgtctc

SEQ ID NO: 634674 - DNA, 373 bp, Homo sapiens
  misc_feature (17)..(17): n is a, c, g, or t
  misc_feature (59)..(59): n is a, c, g, or t
  misc_feature (65)..(65): n is a, c, g, or t
  misc_feature (306)..(306): n is a, c, g, or t
  misc_feature (358)..(358): n is a, c, g, or t
actagaaattgggaggnccaaaaggcttgcccaaactttaagataccctgcttccctantacccnggttatgttggaaatttgtaccttctttgcctatatatttaaaaatattggctgggtatgatggctcatgtaatgtcagcactttgaaaggccaaggcaggaagattgcttgaggcccaggagttcaagaccagcctgggcaacatagggaaaccctgtctctaccaaaaaataaaaaattagctgagcatggtctcatgtacctgtggtcccagccactcaggaggctgaggtgggaggntcacttgagcctgaaaggtcgaggctgcagtgagccctgatggcatcactgnactccagcctgggcg

SEQ ID NO: 634675 - DNA, 107 bp, Homo sapiens
ctgtgctcccaaagcactgggattacggtgtgagccataggcctggcctagtgcaactgttttgatgttgaatatgacaagtatcttttgaaataactagtctctcc

SEQ ID NO: 634676 - DNA, 357 bp, Homo sapiens
aacttcgtggtagatggatgatggtaatggcaggacaacaatgagaatgtactttatccactgaattgcatatatcaaaatgtgtacgctggtcagttttatgtaatatactatttgacctcattgagaatcaaatagtaacttacatattcactgaagaagccaatgcttagctcttatcagacttcccagtaattactacggggtcacatgtttgttcagctttgccctgtgctgtcattcataatagatgattgaaacgtctcataaacctgttctgtatgggaaggttatcttttgttccaggcttcggaggtaaatatgcttggcccattattcagcagtctctctgtctct

SEQ ID NO: 634677 - DNA, 517 bp, Homo sapiens
tcgtagtggaggaacgggtttggcgtgtgggacacagtctgcctctgatactggtggagtcacggagtgtggccggtgctccagggacatggctggctgtgcctctgccgagtgtcaggttgctgcatggtgtgcggcggacgacggaacccggtgcgcatcgctctcaccgatgccttgctccctgccctgtccgactggaccatggcgctcgtggacggccaacatcgtaaccattgaacgtacaactaagcaggcacacacggacacgacacaccactttagccaatggttcctcattgtgcaacaccatgacggagaacacttggccatcgcaggcggctgactcgcggcaccaatgctcgaaactaaacaaacctggccgctggctccttacgaaacttggctggggccggcgcatcttcattacgtcgaacgggccttgaatcagtaaacactttcacagctgcaatttgttacgacttacttgcgcacgatttgaacgccattatttcca

SEQ ID NO: 634678 - DNA, 1100 bp, Homo sapiens
  misc_feature (1100)..(1100): n is a, c, g, or t
ggccggccagcctgaggcagctcgagcccaagtccaggcaggccccaagaagcgatgctgccggagatgcatgcccacagtatgcagctgccattgtgcgcgtggtggaacagccttaacatcgactagagctcattggacggacaggaacctgtgtcaggactgcgtgtcgatcaggtggagcttacgaaggactcgccccgtctctgtctggtgcacgactggtcctccgaggaaaaacaccgttcagtcaacaagtcacgccagctgtaggtgggtgaccgtgagtgggcacaagaccaggtcaagtggtttaacgtgaaatgggcgtgacagcttgggggccacagatgtccggatgatccggggactcaactgcgtgcagggatcggggaaactttaaggcagtggcattctatcgttaccaaagagctaaccgtctgggggcccccaacctttcaattgtcgacttgttcacgcaagactggacaagtaacgctaggtccgtgctggactgggacaaagaacggtgtccaccggcgggctggagtcataggaagaaaactgtcatgaattgggccatcgcaggctttcggcgttccccagatactgacctcgtagtgaccccttcgccttcagcggttcaccaacagatttgcaagcacccattttctttccgcaatacgaaccagaggaaaaaccaattcaaatcgttcaaggggccaattaagcacgcagttaccccattacttggcttggcaaaataccaacattgggagctggatgaggccaagcggacgataaattggacacaaggaataaaacgtacagcaagttaaagccaaagtaaatcaccggtaccacgttggatggatggaattagggaagaaacggttaatagagtcgcagcagaaagagaaggattttataagtatatagccgtgagaaattataaaggagagaggacatccttctaaggatatttacaaataataggacaaacagaagaaacagtatacaaagaaatagatatgagtagtgaggagacgtcgatcagtatcgagaccagtagtaatgagaggaaatttagtagtaaaagn

SEQ ID NO: 634679 - DNA, 714 bp, Homo sapiens
ctgttttggtgtttcacagagttaaagaatattgggcgccttttaataaggggtaaaatataaaaaaaggcaattttttggtataataatcaaatgttgaaatccttttattttggtggaccagtgggtaatatcatgattagtgtgccacagtttattgtgcataatatgaaaacaattatgccacccttcattcgggccaggttaaaactgctttataccacttcttccgtcaaaggaacaaggtggttccaacaaggcgtgaggctgcacagggcgctctaacaatgggcccagctacccatcattacgctcagcagagaccgttgtcagggaatcccgcacagatgctgatgcactggctaattttgtagtattgaacgtaaaggtgcacagtgtcttgctgttattttatgatggaaactgattttgaaaccaaaaatagctaactacctttatttaaggaaaggatattaatttgtactaacagagggtgaaagctgttcacatttgtcaacaaaatctgcttgctgcagtagtaacctcaagtggttaaaacttgatttcccgagaaaactaaaacctttgtgcctaaaactgatgacttgagttcaagtgggatgagcaagaagatgtgttatcttgttgttcaccagtattgagtgtgaaggaaattttgatgaaaaaataaaattccacagcgcctgttataaa

SEQ ID NO: 634680 - DNA, 270 bp, Homo sapiens
gcggccgcctactactactaaattcgcggccgcgtcgaccacttttgtttaagtctaatcactaacttccctttcttattcattgtagttacggcagtcccagtcctactgcacagacacagagtgtcttcaggaatgtaagtaccactgagacaggaggaaggatggcattgggggcagaattagaggccagatgcctgtgaatatttgtcagaatttattcttacattgcctattctagtggttaccagaaaaaaaaaaaagtcgacg

SEQ ID NO: 634681 - DNA, 253 bp, Homo sapiens
tagcatctcctgctctgactactcttctgctgacatctgtcacttctaatgacccttctgatatacactggggccacccagatactccaggataatcccctcatctctaggtcattaatttaatcacatctgcaaagtcccttttgccatgtaaggtgacatattcacaggtccaggggattaggacctggccatcttaggggggccattattctggctaccaaatgcacaaaacattttcgatgctggacga

SEQ ID NO: 634682 - DNA, 910 bp, Homo sapiens
gcacagacgcattagcagactcacctgtcctgtttcatccctcgccctccacaatttcttattttctttctttctctttttatttttgagacagagtttcactcttgttacccaggctggagtgcaaggatgcgatcttggttcaccgaaacctccgcctcccgggttcaagcgattctcctgctgcagcctctcggtagctgggattacaggcatgtgccaccatgcccggctaatgttttgtatttttagtagagacggggtttctccatgttggtcaggctggtctggaactcctgacctcaggtgatccacctgcctcggctcccaaagtgccgggattacaggtatgagccactggcccagcccacaatatcttattttcatgttttttgtgtgttagtttatttttcgagatggagtctctctgttgcccaagctggagtgcaatggcgcgatcttggtcacttcctgggttcaagcgattctcctgcttagcctcccaagtaactgggattgcaggcacccgcatcatgccctgctaaatttgtactttgtagagatgggggttcaccatgttggtcaggctgatcttgaactgtgaactcaggtgatctggccaacctggagctacccaaaggtgcctgggataccggttgtgaagccaacatggctggactccgtgtgctgcaggatctcaaattaagtggggagcccacgacacactttttctaattagaggaaaagccccacgctttggaaaggtacactcctccgagtgcagcggggccctctgggggaggacaggcggccagcatccgggcaggaagaaaaagaggaggggagcgcgcaacataaaacacataagacgacacatcgaaccagagtaagacgaccacgcacaaaatat

SEQ ID NO: 634683 - DNA, 377 bp, Homo sapiens
tccatagtttgaaaccttgccttagaaacagagacaggggctgggtgcggtagctcacacctgtaatcctcagcctccaaagtgtgggattacaggcgtgagccaccgcacccggccaaaacatgatctttctaataattatggtccacttttgtttaagtctaatcactaacttccctttcttattcattgtagttacggcagtcccagtcctactgcacagacacagagtgtcttcaggaatgtaagtaccactgagacaggaggaaggatggcattgggggcagaattagaggccagatgcctgtgaatatttgtcagaatttattcttacattgcctattctagtggttaccagaaaaaaaaaaaagtcgacg

SEQ ID NO: 634684 - DNA, 408 bp, Homo sapiens
  misc_feature (406)..(406): n is a, c, g, or t
tctcttccacatactgacttgctttcttttggatatatacccaatagtgggatggctgggtcatatgggtagttctatttgtagcttttttaaggaacctctatactgttttccataatggttgtactaatttacattcccaccaacaatgtgtgagttttctttttcccacatcctcaccagtaagttttttgtctttttgataatagccattctaactagggtgaaatggtatctcattgtggttttgatttgcaagcaaatcacaatttaggataacagcattcaggtttagagaatattttaactatgacatgggatatgtgtaaataaaacattctatttaaaacatattggatgcttcaggtcattaaatctgtcccctgtaggatcagttatggagggntg

SEQ ID NO: 634685 - DNA, 85 bp, Homo sapiens
cagctgcaagaggaggcccacctcaacacctcctttaagcactttattttctttgttcaggagtttaatctgattgataggcgtg

SEQ ID NO: 634686 - DNA, 147 bp, Homo sapiens
  misc_feature (37)..(37): n is a, c, g, or t
cagtcggggcagggacatttttaaggctcttgtttantttgctgacatgccttccagagaagggggcctttatcttctgtttctgtgcacccgtgaattactgttttttataggcggtaaaaaagacgactgcttggattacaagga

SEQ ID NO: 634687 - DNA, 148 bp, Homo sapiens
agatctacgggtgcatgcatgtgccagaggaggagaactgtttaacacctagccaacaatccgggaaatcatcaaccaacagaggaagaggctgaatcacctggtggatagtcttcaagcagctccgcctttaacaaacagacttcct

SEQ ID NO: 634688 - DNA, 454 bp, Homo sapiens
  misc_feature (303)..(303): n is a, c, g, or t
  misc_feature (349)..(349): n is a, c, g, or t
  misc_feature (428)..(428): n is a, c, g, or t
ggtaatccacccacctcggcctcccaaagtgctgggattacaggtgtgagacaccaccccctgcctgaagaatctcttgtttgtaaatttattctcaggatttgtcctgattcccatagttaggtggaatagtggctaactgggatattctataaacagagaatctaaatgcttttcatattaaatggtcaaaaaaaaaaatcagctgggcatggacaactgtaatcccagctactcaggaggctgaggtaggaggattgcttgagccccgggaggtggaggttgcaatgagctgagattgcnccagtgcactgcagccttgagcgacagagggagaccctgtctcacnaaacaaaaaacagaactacacaaaaaaagaaaaactccaaaactttagctttgagttacaagggtcctatagcacccanactccttcttccttgccggggcccca

SEQ ID NO: 634689 - DNA, 401 bp, Homo sapiens
cgtggaaagcacaccccccgtgcctggcgagggggacaggccttccagttatagttggatattctggcggactcctcactgattgcgatatgcaagagaaccttcaaccatagtcattaaacacctctgtaatcacgcaccttgcgttagcaatttgaaaagccactgacaagttctgatttcattggaaaaaacggcacccatggtgagtaagtgccgctcggcaagttagccgatagaaatgttaaccgagctcactgtccttgatgttagcgaccgggccgaggatagagggatcgaaatcaaccagcgaatcaccatgggcgaaacggttagggaagtccgggttcgccaacgcgcctttacccagcgcgatgatatctgcgccatctttgatgacg

SEQ ID NO: 634690 - DNA, 1104 bp, Homo sapiens
gggaagaggcctgctggacccgttcccgtatgccatgcggacaccggccgtcattcagagcccctcgcctggcgctaaatttaaaaacgtaacacgagcagcaggttggatctcggaaaccgaaacgaaattcggtccctgggccctcctcccgggcgcatcccggatccctcagcgcgccgagcaacccggaacagaccccttctcccgccaatttacggccggggactggcaagcaacttgaggaccctgcggcagccctgaagacctgcggagggacccacgtgaaagcaggccgggcacggccaatggcaccgcatggcagatgcaactggagacgaaacgggcgaatggcacgcccgggaaaacaacggtgtatcccatggctttccaggaactagttaacacacgaattggttcagcaagaggcatgcacaatcatgggggctacaatgtcgcagctacacaccagggcatacaccccctggtccaagggagaccggacaccaatccaacctctggttcaccacttcatggagccataacaaggcagcttgttctcgcccctcacaccgtttgttccacgcgcgaaaagacagccaacacctagagctcattctcacattccactacagctcccaccccccgggaagggatctccctacaatagttggccccaacctggcgcgcccaccctacaaacagagggcaccacccagtacgcaccaataagcgccgaaacggacggcgcaggcacccagcccctggaccacagtaggagcaggaacaaccgggagcccacaaggccccttggaggagcaacaaccggcacccgcaagccccacaaccatgcgaccgagaaacggcaaccaacacaaccacccactattcagacacgcaaaacacaacaacgcgcgcccaggggactacagggccgaaagagcacagggcagcaatcaggacagaagggccaacgtgccaacctccgcaccccgcgaccaccggcgcgaaccaccgccacagaagctcacagcaccacgcagcgcacacgcacaaaaccgatgacgagacacacacagtagaatattaccgagcccctccccc

SEQ ID NO: 634691 - DNA, 413 bp, Homo sapiens
atcccaaaagtatgctggggctatttgaaatggaaatgtaaggttcccaggaaccctgaagtgtgatctaaatttgtgatctgaaagtgtgatctagaggtggagtgtagcccccaagtgggcaagtgcagccttctttttgttgtaaaaacacagctagagaaaatgtttagtgaaaatttttatagtgtagggcacaatgtgtcttcttgcccaagcctaaaatcattactgccccagaccatcacccaggaatgaagaaagccatgagtcttcagattgagaaggcccattaagtaattgtcaacaaggataactaaaagcaatctgcacataaatatatcacagaaaaagtcacataacaataaaagaaaatataaacttcagaagaaaaaataaattttattacctaa

SEQ ID NO: 634692 - DNA, 127 bp, Homo sapiens
tgaatgagaagaaagacattacattccgaaatacaactcttctagacataacctcaagacctagaaacattttatacatttatgtttagtattcctctatctatacaaacttcagcttgtcgaaatg

SEQ ID NO: 634693 - DNA, 640 bp, Homo sapiens
  misc_feature (190)..(190): n is a, c, g, or t
  misc_feature (236)..(236): n is a, c, g, or t
  misc_feature (289)..(289): n is a, c, g, or t
  misc_feature (310)..(310): n is a, c, g, or t
  misc_feature (357)..(357): n is a, c, g, or t
  misc_feature (439)..(439): n is a, c, g, or t
gatgttatcttaaaaggggcgacgcgggccagttattctcaggtttgccccagaacccttttttctaagccccactataaaaggtatgattcaacaaacaacgcaccatgagtgaaatctgcgagagctacagctcctgccttgcagcccttaactgctaacaatatttttgtacggcgggtgggtcacnccatcccaaccctatcattgaaatattctccaacttggtccagggnggccgcctctgtccacggtcacccaggatgccataagcaccccccccccgcanccactctcgtaagacttcccngccccctcccaagccctaagagatttctatctctttcactgtctccncctcccccgacccgcttccccattacgtcccccacccgaaacctcccttgctctgccccctttcattacccctccctttatnacctcccctcttttcccctctgtggctctctctccaccccatcccctctcctctcccccacccccccccgttaccctcccctactcactctccctctctccccccttccatccccttcccctttacttcacccccctcctccttcctttttctccgtagtgcatccctctccttcttcttttctttctcttctacctccta

SEQ ID NO: 634694 - DNA, 1584 bp, Homo sapiens
  misc_feature (561)..(561): n is a, c, g, or t
ctcgtggtgtgttgtgtgtgtcgggaagggggtttcctttaatctatatactcagaatctggccacaatagaacggggactttccgtgtcgtatttataacgagagtcgtagaagaaccgcgcgggtttcacatgagaattgtttcccgtgctcatcaattgtaggggatgttgaatactgtgtcgcactaagtttttcctccaatactcttggccgttgggaatgttttcctatcggggaggactacccgtttctctccaatctgtaagtggcgatgaaatgtaattctaatctctcccggtggcgtatatccgccgtgaacgattcctcacgaaatggctacgtcgcttttcctccggagtgaaaaactcgtttccgctattgaccgttcacacgcttagtgggtggtgctgtcgtgggtcctcatagggcagaatttccccgtcggatacgttttataagatgcccacaaatgttgctggttgccaaaagcactatgtgccgagtgtggggatcctcgaatctcaaaaggcgctgttatggttggacgcactcccacncttctcaaggggagccgcgccttactactttcttaaacgggattttgaatcccatataccgcttaatcttaatcggtactaataccacgagaggggtgctacgttgggctaagtcctctactagctagaataatagggacctatctggtgggagccttggcgggtttagatcccgtcctgctgttggcttccgccgcaatatgctttttgctcctgcttggggcgtatatatataatgccgggttcccgatccgtcccacctcggacgggtatacaccggccccggggatccacggaacgattggagagttcgcccagcggagcgtccgcctcccacttgcgcgtggtcgcagacagcacacagtcgccgtgacctcatgctcggacagctgtaagagagctctcaggggcacgcaatggcgggcgcgatggctcactgcgctcgtatgcgtgcctcagagtcttctggagacgagcgagatacggacaaagagcactattgacaagtgtgtcccttgcttgttcttataagggtccgttagctccattgtgcaagggaggtcacatgtgttgtgctccgtcgcgggaatcaaagagcgtatcttctcagttcaaaggttgccagcgctctggacgcaccgaaggaaactatcagtagcatctctcgcagacgtcgtgtcacaagtcgtgcgtccactccagtgacagaacagagtctcctgtgatccgttactctgaacgtagccacgagccaaacacagagcacaagacatgatcgaggctgaccactatgtttctgataccatgagctgttggaacaaggcacgcttcaggccagaacgagctgagcaaaagtcacctctccgtctagcgcagagcgtgcagcttgtgatcctaagaagtaagctatcatatccgggctgtgcccctatggggtggaaggggcaggaatctgcgagctgctagttgcattatctccttacgctaaatttcattgtgttgatttattaacgggccccataa

SEQ ID NO: 634695 - DNA, 253 bp, Homo sapiens
atgctgaggtactctaagatcccgcgcagaggctgagcgcgaggaaatcatcagtgctggtcgcctccttgatgtgacagagcgcgcatcttgcgcaggctctccagcagccggtgtggttttcgattgttggccacacttgtcggtaaatagccctcggaggtcaagccgcactgggtgatgtagtccacacaggggtacacgatcaccgggatatccgaagtcccccaaaagctggcttgttcccggagaa

SEQ ID NO: 634696 - DNA, 421 bp, Homo sapiens
gataaaaacatagtctcaaatcaatcaactcaacctctatggaaaagaaaaaactagaggaagaagaagttaaaccaacagcaagtagaagaaaagaaataatgattaaagacgaacgaattcaaagtaatagaaaacagaaaaaataatagatgaatttaataaggttacatcctactaaatatttaaacaggaaataatactaaccctacaaaagctctttcagaaaacggaagcagaaagaacgttttttttcaatgtgtcctgtgaggtcagcattacccagacacaaaaaccggagaaagacattgtaagtaatgaacacaacagacctaaaattctcatgaatgtagatgcaaaaaattctaaatataattttagcaaattgaatccagcaatatataaaaagaataatatagcc

SEQ ID NO: 634697 - DNA, 461 bp, Homo sapiens
  misc_feature (46)..(46): n is a, c, g, or t
  misc_feature (82)..(83): n is a, c, g, or t
ggggaaaggggcctattccggggcctggaaaaccccttcccccctnggggggcctctttgggaaacctggaaaatttttccnnaaaaaaaagggccctggttgggccccctttccctgcccaaggggggggcccccccccttcaaaggcccttcccgggggggggcccccccacccaagttcccccaaaatttgggggggaagggcccggcctggtcccccccggtttgggggccccctttttttttaaaaaaccccgggccctggggggactttaaaggcccccgtccccccctggggcccccccccccccccccgtccctgggggggggggggggggtaaaaaagaccccccccccccctttccccaaaaaagggggggggggcccccgggttcccttgggggttcaaaaaccaggaaaggttgggggcccggtttttccctttttaaaggggggaagg

SEQ ID NO: 634698 - DNA, 1481 bp, Homo sapiens
gggagtaggaatgcggccgcgatgtcttttgtgtcctacaagcatgccggcggcgccgccgagtgaggggacgcggttgcggtggggcggctgcgtgccgaggagtgcggcggagtgaggggccgccgcggtccccggctcactccggcactcctgggccgctctggcccccatgcctgccctgatctgctgcatgctggtgtcccaggtgaccagcgccatgtccagacaggtggtgggcatttgagcctctctacatcaaggcagagccggcagccctgacagtccaaagggttcctcggagacagagacctgagcctccatgtggccctggcccctggtccagctcccacatcgcttgctcccaggccacaaggaagaggaggatggggagggggctgggctggtgagcaagggcggatgggaagcttggtgctcgagctacacatggacaaggcactcatgggcgtggataatgtggaaggacgataggagcagtaatgagtttaacaagtgatggttgatgggatcactgtgaggcctgaatagaagactttctttcaagagtgaacaatccaaggggagcatcagagtagaggattgtctggaacttccaaagaggtgtagagatttaagccaagaggaaggaacggcaaagtgagccttgagcaagtggcccttgacacaggattatcacaccaaaagtagacacatgcagagaattgcgagcagattgatcacaaaggaagtggaagttagctagcctggacacctgactggtacacgaagagattgggcacgcgaatgataggataacaacgagcaagtgctctggagcagggaaggtgagaaccaccaaatagcaacctatccctcagtgacaccactttacctcatagacttggcggcaccatgggaaagacaagaatggaagaggagcacccaggcaaaaggaaaaagaagggcacccaagagagaaagcgaagggcatgcatacaaaatagaaggagatggtaggagaccatgacaaaaggacgaatagcagaaggcatagaacacacggaggacacagagggaaacaacaccataacagagagataaccgaaaaggataaccaaatgaccgagagaagcaagggtacaacaaaaaggggacaaagaggacaacacacggagataaaaaggagaggacgagaagaataggacaacaaaagtaagaacagggcgcaaagagcggtacagacgaggacacacagaaagagataagagacggacagagccaagcaaaagaggagagaagagggcaagaagtagagaagcacgagagagaaaagaggcgagcaggagaaacagcaggtgagacaggaggacaagaagaagaaaagagagaacgaacaagcagcaaagcgagcagaaaaggcacaagagagacacagcgaggagcgaggaagaggggaggagaagcggaacgagaagcaacaa

SEQ ID NO: 634699 - DNA, 951 bp, Homo sapiens
aggactcgtgaagtgccatctgtcccgtcgaccggcgcgtgatgtgcgcactagtgttactcagggtgggtgccatgcagcgtgagtaccgtagtagtacctgccggtgcaactgtagcattactgacgttggcggttgcacctataatgacggtcgtcggatgaaggatgaacagaaatgaatgcattgatgtcatggaatatcgatcactggccaatagctggcagagcagctatagctgaggacaatcgtgttgagcgaatgaaggtatcgctgccctgcgcagtcagaatgatcgcagaggtggtgctcgaatgggtacaggatgcacgagagaatagcaatggaacagatatataggttgcttgccttcatgccatgtaagagaaaagttgagtgcgggtaaagaaccaaattattcatcgtgggataatctcggaatgggaagggtagaacgttatacgttttggggacgaatttcccaaaatgggcgaggccaaggtgggattcgcgaaattttttatatcggtatgggccttttaaaagaggttgcagcgcgcatattgtgtttggagacagggcagaagcggacgtgttctccaaaccaattaaatacgggggagcggaaatgggccattggaatgttacataataggccaaagattctcggaaaaagccaattattgggttcaaaactcaaagagcggattacattatggaggagtggctcagggcatcaggagttgtgggatgggaatatataggggtccataagtggacttttaagagctttttttaaagggataggaacataggaggattccgttaagggaatggttctttgggccaccaaatagaatggacactccaatgtttagaggagacttgtggcccacaaaaggcaaaacccaaacatattggacttttgtagttgggaacagatagggtca

SEQ ID NO: 634700 - DNA, 201 bp, Homo sapiens
tctacctggtattcactatgcacgggcaggcattgctgaagccggtgccccagtgtgcgatgtggggattgtgaccgggtgagcgtgaacagggcgtgaggtgcgcgtagcgggtggccgtgtgaccgtgcccggccctcagaagaggaagcagctgctccgtggggtgggccactgtggtcctgccgtgggtcccaatgt

SEQ ID NO: 634701 - DNA, 327 bp, Homo sapiens
cactccacggagtagcgaaggtcctagggtggcgtggcccttggggctttgtgctgccttgtgccctatggcttatgggttcagaactctggatcttgtccattgtcctcgtgtgtctatctcagtgtaaacctcttctcagaccagttttctaaacatatattgaggaaacataaggcgattggtttggcttaaggtatcccatgtgtattgattagtgtattctgtacttcagacatcagtgaaagcttgctttgactaattgctttgtgagctgtaatgaatagcatgtaaattactggcattatggcttgggcaagacctttt

SEQ ID NO: 634702 - DNA, 467 bp, Homo sapiens
agtttcggcactagtatatatatatatatatatatatatatatttatatatatatagagagtgatatttatatagagatatattttccccctgtttgttttcccctttatctttttctctttctttctttttcttctttctctttttcttttttttccttttttttcttttttttttttcttcttattttcttctctctttctttttttttttttttttttttttttttttctttttttttttttttattctctttctttttctttttttttctttcttcttctttttttttttcttttttttttttttttctctttttttttctttctttttttcttttttttctttttttttctttcttcttttcttttttttcttttttttctcttttttcttttttttttcttttttttttcttttctttttttttttttttttttttttttttttttttttttttttcttct

SEQ ID NO: 634703 - DNA, 625 bp, Homo sapiens
gacagggacggatctaagcctgtcccacgtaatggtatataaaccctccccaccgaatgcgaagtggcatctccactgtctggtgttcatcttaacatagagtatccctgccctgtaccaacaagtgttgcagccaacacgacagtgtgctatagacgacctgtgcgcaagatgcaaacaatgactgtgcatagaatgaattccagtattgcctctccgaagatcgtgccgagatgtatcagcacatcacctagtgactaactcatgacatgtgcaggtcctgtgcctacagcagtggagctcttgttagacagggtgatacacttcaggtaagtaaaccatatctggatgagccaacgagcccgcatgcatggctgtcatatatggacgacacaaaccagtatctattcaaaggagactgccgacagcgaggtgacagatgacagatggaacaaacactaccttgcggccaagaatgaactacatggtattaaggcaacataaaactgactcaaggccggtgaaaccgacgactatgagaccattaaaatgactcaactcctgaggtgaaaactatacagaaccaaacgtgagcggaacacgcgaggggcagcgacacctgaca

SEQ ID NO: 634704 - DNA, 714 bp, Homo sapiens
ctctatgactcatgcctgatttcacagcgctctgggagaccaaggctaggatggcattcgagtccaagcgtttgacaacggcctggccgacacgttgaaacgcgatcattactatcaaatccatgactttgacagaagtctagttcatcgcctgtattcccatacactctgtgactgacgcagtaggtcatgattagtcctgtgaagcagtaggatgcggagcgccatgatgacgccattaccagtccaggctagtgcaccagtaacagggtccatactaggctacaaagattacaacggccgtgatgatcttggcctcggcatatccacgtcacacgagcatggccaagacgtagacagattatgctgcgcaaagatatactgaggtcagcaagctcgagactctgactgtccagacatattgaaagcagtgtgactacttaacctacaagggtgtagctgctgtgccattatgtgcttgtagcccaattacttgccaaagtagggcaagatactcactcgtacccatgtatcagaggttgagtgaaccaagatctaacatcggtctcaaccttgtcgcatagcgagacccccctcgacatattctcaggactacttctataacatgcctaacgcctgaaaccaacctgtttctaaccccatttcattttctcaagctcacgtccgcgttaagtggccaattggcctttggcg

SEQ ID NO: 634705 - DNA, 135 bp, Homo sapiens
tatgctatgacttggctgctgtgggtgagatcagtatgatggggtcggtggactggtgaaaacctgtcggtagtgtaggaagctgaataatttatgaaggagaggggtcaggtttgattcgggaggatcctattg

SEQ ID NO: 634706 - DNA, 786 bp, Homo sapiens
aacagcaaaaaaaaaaaaaaaaaaaaaattcaaaataaaaggcttctacttttcaggggcccctttgaaaaaggggaaaggacaccccaaaaatgggggcaaaacaaatttattgggtgaaatcttcactattattggggtaaggggacattaatatacctaagaataatatttaaggggacactccggtatggctcggaaaaacaataagggacaacaccattttaaacatggggcgcacaaggggcatttaaaatatagaactatttcctctaatatggaagtatttcacaatggggcgcgcggaaaaacgccacttgtggtggtaaggagccaacttcaaacacctctcaaatatccagaggctcatattatatggccaatatcaggagggggcttacacaaagagacaggagacaatccccaatatttttccacacccacctattattagagcatagggcacgacaatttagaggcaccctagagggaactcttaaaaacaccttacacgggggaaaaaaaacacagtgtggcatataatatagagcgagacaaaatcttcaaatggttgacaacagcgagggaagtgtgtggaagaacactttgtggaaaaaaccttttacattggcgagtggaatgggggtggcacaaatgtgttaatcaggtggggtgtattagcccagtggtggtgaaaaaacaagagtttggggcaagagtttccctaaaatataaggttttaaacaaaaaagggaattttcccattttgttacccaaagtaaggtc

SEQ ID NO: 634707 - DNA, 134 bp, Homo sapiens
cggtacccgtttgagtaagggatcgaacctagtgaatctggctcagtcctcctcctccatctctttcttgatccagtccacgtagttgagcactttggtgtagaagccatagcccctgctcccaggacacgatg

SEQ ID NO: 634708 - DNA, 228 bp, Homo sapiens
  misc_feature (25)..(25): n is a, c, g, or t
tctcgaagaccagaatgacattggnccaacagaggtgggaagattaagtgaagaaaagataccaaagacacacaggggaacgcgtgggaaatctgtttgggttttggggtaattggggtctgccccataacatttccttggaagtattttggggccccctataattattttttttcctggctaactgtagaaaagtttcctgattaacctttaaccccgttattttta

SEQ ID NO: 634709 - DNA, 880 bp, Homo sapiens
acacgagttgagatctccttgagatggtatgaaatcggcatgtagtatcgttgagatcatagttgccccctgtggcgtagacttatcaaagacttgatttgcagttgctcatcacagtgatgagagcagtttgaatcgtgatgtgccggtctggacttggtagaagtggaattgggaatgccataatcttctcgacatgaataggtgtgacccgtaaagcattggcgctatctagtgtatactaactacttgagtatggttcaagcacaatctccattgtcatatgtttacaccataatatcgcagtgtgccgaactgtaaactgccttaacagtccgaaaagacgtatgagggaacatttgtcgtacgagacctgtgcggaagtatcgttcacagttactgaagatacctctgcgcgtacaaaccaccggaaatctaggttagcattaatagtgccaatttttgcttgtttgagaagcttgtttggaccaacctatttggcggacactgtcaaagttgctcaacaatgccctagggttcaaaggtggtttggaaaaggtccaccccggttggcgcaattgttcacatggccttttgagaaaacgggctatgcttggtatgaggagtaccttgtgactggcaatccttacccaacaaaactttggtcgcatctttgattaaaaccctttgtgctttgaatacacccgggattgtgctacgaaacactttggtggcactggtacctggtccgtgttagcccgtgttgaggatttgttgtcataaaccgcggaatgcgtaaacacgtttgtccaagttgacgtactcacgtttgtctcagcctgttaaattcgctttccgcttaaaggaaccctctgggaaa

SEQ ID NO: 634710 - DNA, 168 bp, Homo sapiens
aggttatgtgaaaaaagccagtcacagaagaccacatattgtattatatcatttacataaaatgtctagaataagcagatctatagagaaagagagttgattcgtgtttgctttgggctggggaaagaggagggggtttgtgtgggggccttgtacttcgggggaccg

SEQ ID NO: 634711 - DNA, 512 bp, Homo sapiens
gcggagtagcttctcggctctaggttctggagtgccgggagcagtgaggtgccggacccgggggacgaggaacacggtgccgtaggggagggccgggtgcgctcggggtgtctgggccggggtctgagggatgaggaggggccgtggtcggcgacggggccaggaagcgagttctggaagacggcaggcgagagaaagctccctgggctagtatcacagtcgacgtgtatggtgccccagcacaccctccctttgaatccgaatctgttacatggtcactttggtcaggtccgacggccaagatgcgcgagcagactgagtgaagcgtcaagagggtcggcgaccttcccgaggagttcgagagcaattaccagctgatgcctgggacggcgtaggggaggactgacgatgagctcctggaccagtggggcggctggagtagcctgaatgtccgcaggtgggtcaatggagacgcgcaagcgcgtgtgctgcgtaaccacagccagcggcag

SEQ ID NO: 634712 - DNA, 765 bp, Homo sapiens
gagatatcatagatgagtatgatcgggaagttcagaaaactaaaagttgatttgttacagccactccaactatagaatcattgagaatttagtcatttatggataaattaaaatgaacaccgtggactcttgttaaaatcgaggaaagtccaagaccgaaagataggcacttcccattcaccattctgttgttaaagcagttagaaattgaggtgccctggtatatccacatagcctaaattgagtacacccttgaaccagagcccctcagttaatggggtgaccgacatggggtagctgatcccagggggcattcccctctctgagctaggccctgcactgggtggcctggggattgtagcttccttgcacagtggtgcacatttctatgtgtggatgagatttacttgtcaacttttcctgccaagacactaaatgcttttcagtgctaatactgacctgatagtagagatttctttccctgagtcggatggtagcaggatttacttggtaacccgtagggtttaaaataccggtttacaatgtctgtgtaaagagttcttgagttgattaaggaaataagatcaataggcggagggaaattgtctctatcatgcgacttattcaaataattccaagttaacaaccctgccctgggcataaaccgtgaatggaagtacatgactgacgtaacagtaatctaattcttcagccctgatcgttgtatcggggacttgtatatgctttcttgactgacaatagaag

SEQ ID NO: 634713 - DNA, 275 bp, Homo sapiens
  misc_feature (150)..(150): n is a, c, g, or t
aggacgagatagggactgagcctgcccgtcggactgcccccagaaagcctcctgccccctgcctggtgaagtccttcagtgagcccctccccagccagcccttccctggccccgccggatgtataaatgtaaaaatgaaggaattacatntttatattttaacgaacaagccgggaagcggaaacacaggttattatttttttcaattccccaacaattgcctcgttgaccaaggcaattgtggggaaaaccaggccaagggtttgggacttgcc

SEQ ID NO: 634714 - DNA, 166 bp, Homo sapiens
gccactccacctggctgctcccaggtcacccagagcacctagaaggggggatgctagtagcgcgccccacgctacactccagagcatgtgccccaacagaggagggtgctggagccctcacatgcttggctcagcacaccacacctaagactcagcgcagcccgag

SEQ ID NO: 634715 - DNA, 279 bp, Homo sapiens
tcggtaaatcccttaagactttcttacctctgtatttcccaaatgggcaccatatatatcatacgctgtctgtgtacataattaatttcctgaaataacattctaatctagtacatatttcatttgttattttccagaatataaagtgaaatttggcctttaaagtctcctcactgagaaggtttgggcttccttggcgcgctattgtgtgagcatgttcagtctagaccaatccatcccctgttctctcagcactacttgggtactacgctttggcat

SEQ ID NO: 634716 - DNA, 356 bp, Homo sapiens
  misc_feature (8)..(8): n is a, c, g, or t
  misc_feature (15)..(15): n is a, c, g, or t
  misc_feature (92)..(92): n is a, c, g, or t
  misc_feature (128)..(128): n is a, c, g, or t
cttgattnggggatngatacattggtacggttctgggccttgcgttacttcttccgatttttcccttggggtgggctgtcggcatgctcagnggcctgccggcacttgggaggggcggcatgtgcagngtgtttactgaagttgtgcacatactcactagagacattcctcccttaccagtcttgttcctagaggaagctcatataccagttctctaccattttgcctcttagtgagcatgtttgagcccactctccctcttgtccacaagctgctgatcaccagattctagtgttttccatctattgggagaatgcctttccctgacgccggttgagacgtgattattttagatg

SEQ ID NO: 634717 - DNA, 191 bp, Homo sapiens
  misc_feature (185)..(185): n is a, c, g, or t
gcagaggacccgtactgggtgtaccgtctcactatcagcacccctactagtctaaccacatgactcctcccccttatactaatagctagccaatctcacctatcaaaagaaacacaacccgaaaaaaactatatattaccatactaatcctcactacacactattccataatatataaccttcanccgcca

SEQ ID NO: 634718 - DNA, 488 bp, Homo sapiens
tacagagtgaatgtccacttgatgcgaggcatggaggtgatcgcgacctacctcagcggccttgagagcgccgaaaaaaaccccactcagtaggttttttcgcttttgcccttgatccttaggtgatgtagcaactttcttatcagggattgttgctccatcagaaaaaacaaagaaccaaatcataattagagccgactcagcgcgcagcaaaatcccacgtatagctgggcaatcaccacacacataaatatcgggaaaaacatctaatacatttgtataccggttcaaacattcaaccagcttattatcttttcccagcaagacacacctttccatccactgcgtctgcctagtgcaagggcctcgccgtgcgcgtgagcgcgctcaagttactctcgcactcacaactataatatttcaacactgcttttagagcactcgcaacaactcataggcgtcaaccatgtacccacattcactctgta

SEQ ID NO: 634719 - DNA, 339 bp, Homo sapiens
ggtcgacaatagaactagtagacagaaattactagtggtatagaatgcttgaaggtggtctgggcgttgtagctcatgcctgtaatcccagcactttgggaggcctaggcaggtggatcacttgaggtcaggagttctagaccagcctggacaacatggtgaaacccctctttactaaaaatacaaaaattagttgggtgtggtagcacgtggttgtagtcccagctactagggaagctgaggcacgagaattgcttgaacccaggaggtggagactgcagtgagccaagattgtgccactgcactccagccttggtgacaggggtgaaactctgtctc

SEQ ID NO: 634720 - DNA, 330 bp, Homo sapiens
tcaggaaactaactggggggggactctggataactagacggagttttctgagcctattaaaagaagcagcagtagtagtagttgaggggtagtattagtagtggcactgctatccggtgagcacttactacaccagcagaaggcctcatcagcgccctgaaagttatcccagatttacagatgacgacgagaagtctcagagaggtagaaatttacctgctgtgcacagctgctcagcaagtagccagggccaagtgctgcaagagaattcttttcaccatatccattgtcatgaaaccccccagatcacttagtttttctttgcctaga

SEQ ID NO: 634721 - DNA, 475 bp, Homo sapiens
aggggcaaagttagagtggggaactgattgcagctataacaaattattaactgggaacaagactaaatccggtgggcatggtagctcctggctgtaatcccagcatgttaggaggctgaagtgaaaggatcacttgaactcctgggctcaagatatcgtccctgcttgttctcttcaagtgccgagattacaggcatgagctaccatgcctggctgaaaatttatgatgccagatcaaattgcccttctttctgtattgagacttcatataacatccctctccaagaaaaataaattttgtacaaacatacacacacgcacaaacacacacgcctaaacagctgttgattcttaggataatggattcatcactgcgacgacagagttccatggtccagctggccgcgaacgctggcccaggcaggttccagcttcgtttcaaccctggcttccctggtgctgtctcttctgcacc

SEQ ID NO: 634722 - DNA, 135 bp, Homo sapiens
gcctttcgcgacgtggaagccgtcgatgaagaccgctgataccgttctcgacgtcgatcggttggcgcgtgcagcagttaacctgggtcgtcatctcaccttggtccgtgtccggggtggactccatgatgtggt

SEQ ID NO: 634723 - DNA, 167 bp, Homo sapiens
ggtagagacagggtttcgccatgttggccaggctggtctcgaactcctgacctcaggtgatctgcctgccttgccctcccaaagtgctgggattactgtggcgagccactgtatccggccacaaataccttttaaatatatgaaagactcaacctcatccataataa

SEQ ID NO: 634724 - DNA, 347 bp, Homo sapiens
ggctccctcaaaagaaactttcaaaattgaaaagcagctagacatgatgggtcccccctgtaatcccagcccttcaggaggctgggaggattgcttgagcccaggggttcgagaccagcctgggcaacatagtgagaccctgcctttacaaaaaaatgttttttgaatcagccaggcatgggggggcccgcttggggtcccagctactcaagggggtgagatgagggggtcccttgggcctgggggactgggggtgcaatgagctggggtcccccccttcccctccggtttgggcaacggggcaagcccctttttcaaaaataaaacggaccccaaactgaaaagca

SEQ ID NO: 634725 - DNA, 556 bp, Homo sapiens
ggacagaacgaggggacgtaacggagggcaggttggagccgctgcgtcgcatgacccgcgttaaccagcgtgagctcgcccgcagaagattatgaaaaagcagagggatcggtaagggaaagcgccgagatgacgggtttctgtgccgcccgaagcagagggcactcggagatcatgcagcagaagcagaaaaggggcaaacgagaagaaggaggaacccaagtagtcttgtgtggcttcgtgtcaaaccttcttgccctttcgctctgtgttgcctgagccagtcccaccacgctcgcgtccctcctgtaggtgctcacaggtccagcaccgatggattcctcttttgcccctgagtctgcacgcgcgtcccttcttgtgtgcttccttccccttcaggtagccttctctccccctggggccactcccgggggggtgacgggggttacccctttcccagtgttatttatcccgtgtgggggctcaccccaaaagtattaaaaaggtagggtttgcgaaaaaaaccacccacatcatcaaaatacacaaaacgtgt

SEQ ID NO: 634726 - DNA, 106 bp, Homo sapiens
ccccccccccccccccttttttaaccagtgtttcttgggcccgggaaatttttccgtttttggtatttttaaacctttaaattaattgggaaaggggggaacttta

SEQ ID NO: 634727 - DNA, 1268 bp, Homo sapiens
aatcaaacctgcagtagtagttggtactaacgttgttaaattatgctacactatttagagatcattgcaaactcaacacaattgtaagtaatgatacagagggatcttgtgtacccttcacccagacctcccccaatggcaacatcttgcaaaactacaatgtagtctcataaccaggatattgacattgatacagtgaagatacaggacattctcatcaccacagggatccccaggatgcccactatccatccaacccaagaccccagacgtgtccctaaacacactggaaaacaggaatccaattctcacattatactatacactgttgtacataatcaagaactgtctatacacactggaccatcatatacgatatgtaaaccaagtactacgaagctcaaacaaaaaaaatgatatcaccatgacctttcactaggcggaaacacatacaaaatgcacaaatagcacacacaacaaaacaaaaaaaagaaaaaaagcacaacaaaacacagacaacacagaaaaacacaaagcaacacacacccgcacacaaaaaaaaaaaaaacacctaacaaagaaacagggcaagcgagaggggagacagggagaaaggagaagagcagggaaggagaagaagaggagggagggaggggggggaagagagggaggggcccgcggaagaggaaggagaggggacgcgaggacaggaggcgagcaaagtaaagataaggacacaaaagagagaaaagacaaatactggaaagagaagagcgaagcgtaaaagccatacaaaagaagacgagacagagcgaaaagagacgagaagaagatagacaagaggaaacctctataaaataaatcacacaagaaggagcatgaaagaacaagggcaaggagcacgagaggaacgagaggacaacagaagacgaggagagcagcgagggggcagaaggaggaacgacgaaggacgcgaaaagagagcaggaggagaggcgaggaggaacgacgaagaaagggaggcgcgcaggatgagcaggcgcaaccgacgtgcggcaggaaaaaggaccagcgaatcaggacgccaggacgcgtgacagcagctaagaacagacgaacgaacaatagcgacagaggaccacaggaagagagcgcaagcgccagacacacagctcgagggggagcaaagacaacgagcggagagacaagaaagacgatacagaagagagaactgaagagggcctagaacagtgacgacgcgaggacaa

SEQ ID NO: 634728 - DNA, 432 bp, Homo sapiens
gggtgggtagcacagtccagtgcttcggagatacaacgagaaggatcctcagtcgtgatgccaagatggtaaaggctgccgaggagtgcaagcccacgcccgaagatcagaaggccttcgaggactataagtgtgcgaagtcggttgattcgccaggtgataagccactcgtgacctgtgatcgtgaacgcaccatgaaatatttgtagtccccggtcgccattaccggcacccaggtcgtcagtgctgattcaggcatcccgcaggggcagttgtcctacgtggttaacttgaaattcaattccattggcaccacctcgttcagtgacgctacgacatacctgtgttctaagattgagcccacagaatcagtttgcggtcgtcctcgattggtcagttatctcttccccgcagctcaacgggcaggggatc

SEQ ID NO: 634729 - DNA, 283 bp, Homo sapiens
gttcctcccaggccccggggcccctttgccttgccccaagcacaaagttacctaaggggttgacctttgcccccctggagctcccctcccgggggcctttggcctacccttttccctgccagctgaaaagactgccggcagcctggacgtcctggttagctgaaggcagcttaaatgtgggcccccctatgtggggtttaggactgaattatgggtttggggttttgcttctttttgtagacccccaaatatttttttttgaatagtaaaaagctgggcccca

SEQ ID NO: 634730 - DNA, 864 bp, Homo sapiens
agtttgtcagaggcaatacgcatgttttgcccgcgagtgccaatggaccagtggccgagttcaaaggttctgtccctgccacggtaatgtgcctctgatgattgcttccgaggttgaaagagactttcctgaggcgctcgaggagccgttggatcgatccccattttctgtgagggatgcctccggaacatggtagagtagattcgatacgagcgcctagtgatcgtaactaggcgggatccatggaggccggtggagattccactaacggttgctcataagactcgcgaaaaccctcggcccgtgaagtaatttgtgctttcgagttcaaaagtccaagcgccgcatgagatggaggattacaataatcaatggttaggttccgtggtggtgtggaccgaggtacccgagactgtacaaggatgatttctttcagacagtactcatgagagggctgtgggaccatttgtcgcttggcacactgatctcctgggaccttcgaggaccgtgaggtcagaaagactgttgagatgtcggagacctatggtagaagtggacacgactgcactgggcaactctatgtgcttaaatgctagtcctggatagcatttgaggtaccagggatcttagagggtggcggcctaggctatgtgtatgcttgaagttggattcccgacttcgagagaccggattgttgttcccaagagtgcattatcataaagatttgagagatgaatggactgtacccctcattctaggatacgtatggggtgacgccactgattccaggttacccaggggggtctgcccgatctaaaggcccagccaaatcttttgcagaggctccctggacattactactct

SEQ ID NO: 634731 - DNA, 634 bp, Homo sapiens
  misc_feature (26)..(26): n is a, c, g, or t
  misc_feature (105)..(106): n is a, c, g, or t
cacggggtccaatcacctagacagtnaaagatgagcatttgagctaccactgaatctagcgctatcccaaacagactactgtcctctcagcaaattaagtactcnnaagtacttaacaggaagtacttaatagaaatgtgaaactaccagtcaagttaaaagaaaaaaattaaggcacccagctcaggtaagtgcatttttcacgtagttttcaacctagccagtgttccagaaacaatttcaacactctcctgaggatactcacctgaaacagcctcaagtttagcatccctctaagagcttcagtaaataacgtccttgcaagggatctatataacatgtttttcttacatagaaggaaaacaagatcacacagataaacttggtaacaccaaaaataattaaagctctgtggatatttatctggcattagtatcctcctcaaagacacactacaaatgaactatcatggtctcatctctgaaaaatgataagtcttaaattctgctcatatatttcaaagccactccctaaaacctagataggccggcgttgtggctcacgcctgtaatcccagcactttgggaggccgaggaggcagatcacgaggtcaggagatcgaaccatcctggta

SEQ ID NO: 634732 - DNA, 92 bp, Homo sapiens
gacttcacgaactacacaggtcttaccattgacctaagatcaatctgaacattcttagcccagtcagggagctctgcttcctagaaaggcat

SEQ ID NO: 634733 - DNA, 381 bp, Homo sapiens
  misc_feature (107)..(107): n is a, c, g, or t
  misc_feature (135)..(135): n is a, c, g, or t
tgtgaaagcacaccttctcggcattgcccgggccgtgggcgctgaagttcaacgaatcaccgccacgggcgtagtacatgtagatatggccaccatccagaaacaangccttacgcttttctgtgtagccgagtnaggcgtggctgcctttttcggccacgtaataggcttcggtttcaataattcgcgccgaaagccagagatcgcccacacgatgacgaatgacttttccgagtaattcacgcgcaagcagttgggcatcgcggtcgaagaagctatcgggcagcgggctggcggggaacagtgggggaaagtcgggcatggcggtcaagggttgatacggctaaatgtgaccgaatcataacaactctcaccttaatt

SEQ ID NO: 634734 - DNA, 641 bp, Homo sapiens
  misc_feature (13)..(13): n is a, c, g, or t
  misc_feature (63)..(63): n is a, c, g, or t
  misc_feature (79)..(79): n is a, c, g, or t
  misc_feature (107)..(107): n is a, c, g, or t
  misc_feature (112)..(112): n is a, c, g, or t
  misc_feature (133)..(134): n is a, c, g, or t
  misc_feature (239)..(239): n is a, c, g, or t
  misc_feature (254)..(254): n is a, c, g, or t
  misc_feature (305)..(305): n is a, c, g, or t
  misc_feature (416)..(416): n is a, c, g, or t
  misc_feature (521)..(521): n is a, c, g, or t
  misc_feature (530)..(530): n is a, c, g, or t
  misc_feature (632)..(632): n is a, c, g, or t
caatcacaaacanaccaaaataaaacaaacaaaaaaaacataaacaaaacaaaaacaaaatcncaaggggcctgaaaanattggcaaaaaaatatccaaacctcacncatcnaaatacaaatagcaacaaaannaaaaacctcaacacaataaaaccactaaaaaaataaaaaaacctcaaaaacataaaccttttcaattacaaagaaaccaaccaaaacaactaccgaaaaaatatntacaaacacctcccncaactcacatatctcgacggcaatagaccggaacagacaaggaggcccctnactcggatgctgagggctacgtggagggcctggatgatgaggaggaggatgaggatgaggaggagtatgatgaagatgctcaggtagtggaagacgaggaggacgaggatnaggaggaggaaggtgaagaggaggacgttagttgagaggaggaggaggatgaagaaggttataacgatggagaggtagatgacgaggaagatgaagaagagcttngtgaagaanaaaggggtcagaagcgaaaacgagaaccttaagatgagggagaagatgatgactaagttgaataactatttttaaaattcctattttgattttacttttttnccatatccc

SEQ ID NO: 634735 - DNA, 903 bp, Homo sapiens
ccttgttcacgcgttggtttgccggttgtgaaaacgtctctccaagaagaaccgtcgtgggtaagacttggccgttgggcgttcgacttgggtttttgccaaggcatccccccttggtgttataagctcccctgtcggccccctaactcctcgggtgtccccctttggtacagcggggggagcccccatctggttaacacaccgggattgtcgagcccgcctctaaacaatggtggtgttactataacgctctttggtgaatctttccgcgcgcccactgtgtactccctcggtttgccgctgggatagtttttctctacacgagggtgttaacaccgtatatgccttcctatctcccccccccattcttctccctcgatctccacttgccaaacaacaagtttttatacaccaaatgcaattaactaggctactctttctcccctccatgtcttacaacgtgacgaagatcacaccatgtctcaaagagctagagaacatttttccaatgagaatatcctgtagattcaattccccccaaaagcgcggaaacccctcaccacccctccttcaagagacactctggcgcccctttttattctctctatgctatcatagatgcgtcttagggggcaccatcaatggtgtattgctctttgtgaaattctccccccccatatggcccagcaagtttccccgatgccccacatgttatctcttgaggacagtaaggcagctggaatcgagatgaggaggttgcactcccttagaagcatgtaaaccacacggcgacctccccgtttatgcggcgattggcgaatacatcttgtgtgtgcagcaaacggagataaataaaaactttggggttttttcaacttaaaatttcaaacgccacacaaaaca

SEQ ID NO: 634736 - DNA, 626 bp, Homo sapiens
tttcccactttgccgagtctcttctcaggttggcgaaatatgaggcccatggtgatgtcatcacctttaaaggcaactcagagcacgtgggtctttcagccacgcgccgatagcggaactcgccttcgtggtacatcatagatgctgaacacgtctctccatcagctttgtagaacagttccttccttgtgttctcagggttgatctttgacttccacaggcccttagagtatatggtgttacccagcaccagaacagtgagctcattgatggcttccgagggaatgacatcggtgattcggccttccttagagtccaggggctggagcttggctccatataccaactcactgatgtcgtggtaggtctcattgaagtgtaagggatttgtctccaaaaaggcgattggttgatactaacttgagaggatttgttggcttttcgatagagtcgccagttcagtttgccaaagaagaagtgtatctgatcagatgttttctcagatatggtgtcaaacttaaatacctccatcagttgttgagagggtgtcatcacaggcacacagtttgtgtcatagcaaaagctgtggatatactcaggggtcacaggaaaatgatatcagtgtc

SEQ ID NO: 634737 - DNA, 108 bp, Homo sapiens
gtcattctccctgcccattaaggaatcagagatcattgtcatcatcctgtggcctgcatctctcaaggatgaggttttgaacgattatgccacgtgcagaacgcagac

SEQ ID NO: 634738 - DNA, 104 bp, Homo sapiens
aggagtattacaccctgaggggagtcatagtaccccgacgagtaccattcaggagtcaacaactctagtgtacaccaacgtcctaggtccagaacagcctgcgc

SEQ ID NO: 634739 - DNA, 219 bp, Homo sapiens
cgcccaccggcgggcgtgggtctgggttacaggaacccggtctgcttcatgattatcttatacttgggtggagatatctgggtaaaggaaaacgcagtcatatgtcaacaccgagcgctgcacagactctggggaatgaatggggtgtgcggcgtccctcatcccctcaggtgagggccttcacgacgatggcatattcacctggggccgacaacggct

SEQ ID NO: 634740 - DNA, 357 bp, Homo sapiens
  misc_feature (75)..(75): n is a, c, g, or t
  misc_feature (180)..(180): n is a, c, g, or t
  misc_feature (203)..(203): n is a, c, g, or t
  misc_feature (227)..(227): n is a, c, g, or t
  misc_feature (276)..(276): n is a, c, g, or t
  misc_feature (285)..(285): n is a, c, g, or t
taagtcaccccatcatttatgcctcaccttcctcatctgtaaaaatgtgaggagagccaggcaccgtggcgcacnctggtagtcccagcatactcaggaggccgaggcgggaggatcgcttgagcctgggagttaaaggctgcaatgagctatgattgcaccactgcactccagcctggncaacagagtgaaaactcatctcntaaaaaaaaaaatcaggcccgggncgggcacaagtggctcacgcctgtaatccagcactttgggaggccgagnaggcagatnacgaggtcaagagatcgagaccatcctggccaacatggtgacgacctcatctctactaaaaatacaaaaatt

SEQ ID NO: 634741 - DNA, 717 bp, Homo sapiens
accgggtcctagtgtagatatgtcgaccacgcttcgcttgaagtaatctcttggtagtacttggtcactctatgggtgctgctataggctacatcctcagtggatatgtccatcaggaggactgacaaatggtagtgggcgatatatctctgacagcaccatggagcagaagcgaaatatcgaagtgcttcaagcgtttccagatctatgtagctccagtcagccagtcttttctccttcccggctatcggtataataggtctgatattatgccttctggccgcagtagattattggaagatttcagaaacaaccgcttcccaaaccttcagcttagagacttgattggacatatagttgagttatctcaagaccagcatggttctagattcatacagcaaaaactagagagagctactccagctgagcgacagcatggtcttccaatgaaattctgcaagcagcctatcaattacatgactgagtggtaaaggcaacgtatgtcataacagaagtgttcctgagtaaggagagtctggatcaaaaataagccctggctactcgtattacgtggacatagttctacccttagccttgcgatgtatggctcgccgcgttactcacgaaagcattagaatctatatcctttctggacagcagagtgacatggtaaaggcgctggatggacatgtgctcaaatgtgtgcaagctccgaag

SEQ ID NO: 634742 - DNA, 927 bp, Homo sapiens
agcgggcgaacattttgacgggtttggcttgcccggcgtggattactgagtgtcccctatgctcgactcgcttttatctctctcccccttctccgagctcgttcccttactactcgcctactactctacctactataactatctttactactatttgctttacctactatactgtaaagactatttctataaacctatatacctacctatatataccttggtagaccaccactgcgactatttctgcagtactactactactactacgcccattactagacactacagatcaacgtcaacatgtacacatcgccgtgaaggcactcatacaaagcagcaaggggactcaccaaaaagagaatacacggaacagaaaagaggacgagacgacaacgccggcgggtcacaccgagagaaagaagcagagaagagggagagacaacccgagaagggaaaaccacagaaatatgcagagagcagccacgcatgaaagacaccgtaagcgggagacacgcagagacacggcaacacacaagcacgaaacaaaccgacagggggacaacagagcgacgcgcggtagcccacgcagtgaaaacagcacacacgagaacgacaccccgaagaaccacaacctgatagcagaaaaacggaaaacaagagcgcaaaccaaggcagcagacgacgcagccaaaaaacaaagaagaagaacgcaaaaggacgcaaaagaccaccaaacgaaaacaggaacacaaccgtaacacaagaaggagatgacgacaagacacacaaccgagacacaacaacaagacgcagaatagcgatgagaaacacagaacaaaacacagagagaaaacaaagacgaaaagaaaaacaaagaaggcgcaaaagacgaacgcacaggagaaaacacaaaagagagaacaaaaa

SEQ ID NO: 634743 - DNA, 120 bp, Homo sapiens
cgttaacatagtctgatgacagcacactcaatgccatgttttcttcgcctatatctgctctgaaatcaagctgtgtctgtctagccaggggcctagagaacataggaaaatagagtttat

SEQ ID NO: 634744 - DNA, 303 bp, Homo sapiens
  misc_feature (270)..(270): n is a, c, g, or t
tgaaaaattttggatttcacatttttggatttggatgcacaatctatatctcacttttttgcctgatctgaactattagacacctacaccagcttcctataagacagtgagctggcttttcatgtcccaagaagtagcaaggctgtaaatatgactaaacaggttacatgaatttagataaatatcattaatccaaagtagtcaataagtagttgttgggttttgcattgcccaccccctccaataaataaatagttttaaaatagattnccaacatcttgtcttgcagttttcaaaaatatt

SEQ ID NO: 634745 - DNA, 399 bp, Homo sapiens
taacagattgcatatatctctaattcgtctctaataaaagtaagtgctaaaaaaaagaaaaaaaagtaactgctatttaaatttatcttaacatttccatatagtaaagattcatttgtactaaaaattggcaaacagaggattgttgtgtcactgagtatcaaaggcaagtctatattaacatatgttaaaagtaaacatgttgtaagataagatgagatatagaaactaggaaacactgatcccaaaagtttaattccatgaagtggtggtcatctggctgaatatagtgaaagggacatcagaacagatgcataagactcaagaattaaaatgggggcagatacatgttaaggcgatcttttagttccaaaacatgttagcagtcaaggactgagg

SEQ ID NO: 634746 - DNA, 349 bp, Homo sapiens
gcctcggccccgttgacgatcctcagactcaagaacatgcaaggaaacaggatcagacagcgtttctttgcattaatactaactttctatctcagccagaaccgttaattctccttagttcctgcatgccgtggtggtcacgctgcaaggagattcatagtgtcactgggccaactctaaatgtccccaacgatgtataaagcacagccagatagcatggtaacttgcagcattcggatttgctttaattgccttgaggaataaagcttcagattccttgtatttctgggatttccccagcacgtttgccaacgagaacatgagagagtgatcattaggtattaattcc

SEQ ID NO: 634747 - DNA, 944 bp, Homo sapiens
  misc_feature (172)..(172): n is a, c, g, or t
  misc_feature (176)..(176): n is a, c, g, or t
  misc_feature (196)..(197): n is a, c, g, or t
  misc_feature (201)..(201): n is a, c, g, or t
  misc_feature (244)..(244): n is a, c, g, or t
  misc_feature (581)..(581): n is a, c, g, or t
  misc_feature (583)..(583): n is a, c, g, or t
  misc_feature (611)..(611): n is a, c, g, or t
  misc_feature (726)..(726): n is a, c, g, or t
  misc_feature (746)..(746): n is a, c, g, or t
  misc_feature (748)..(748): n is a, c, g, or t
  misc_feature (769)..(769): n is a, c, g, or t
cctggtacgcccccgggattacgggatcttcaagcgccggcggacgcagcagtccggacccaggcgcgcccctcccgccccagaccaccccggactgaccgcccgtgagggcgaacatgccgcgctccttcctgcgtgaaatactgcactccagccacagggtcccaactancggnggctggagacgcagagaganntcantggtgcctgctctgcctgtggggggctggtggtgcccctcctnccccgagacaaggaggccccttctgtgcccggtgaccttccccagccctgggaccgctcctcggccgtcgcctgcatctccctgcccctcctgccacggatcgaggaagctctgggggcctctgggctggacgccttggaagtcagcgaggtcgaccctcgggccagccgggccgccattgtacccctcaaagacagcctgaaccacctcaacctgcccccactgctggtgctgcccacacggtggtccccgaccttgggcccagaccggcacggggctccggaaaaactgcttggggctgagcggatgccccgagccccgggcggctttgagtgcntncactgcacaaaccctaccacacgctggncgggctggccaggcaccggcagctgcactgccacctgcaggtggggcgtgtcttcacctgcaagtactgcgacaaggagtacaccagcctgggtgccctcaagatgcacatccgnactcacacgctgccctgcancntgcaagatctgtggcaaggcnttctccaggcctggttactgcagggccatgtccgaaccacacaggggagaagccctatgcctgctcgcactgcagcagggcctttgccgaccgtccaaccttcgggcccatctgcaaacgcactcagacgcaagaagtaccggtgccgggctgaccaagacttttcccgatgtca

SEQ ID NO: 634748 - DNA, 106 bp, Homo sapiens
attgttgttcctttaacagatggggtgtggggctatagtactcagattatgccctaaaataacgtgtatacaaacgccctgaagtattgctgtggatgatgatacg

SEQ ID NO: 634749 - DNA, 333 bp, Homo sapiens
cgaaaacctactgtactagattgaaagatttacatttgcagaggaaaatggacctttccttgggactagaatgaacagaatagatgctctaatagatctgccggggtgttgaaaagaaaggcagaaatggggttcctctgtactagtggaaagggacaaaaacattgagtgtgaggcggtggggaaggcctgtaaggttggaatacgacgacgggaaaggagggtcagtgaccacggcaccgctgagtagaactaagggcctcccctgagactggcggtcattgttgtgtaagagctccttttctgtcggatggatttccttcagcagtgctg

SEQ ID NO: 634750 - DNA, 170 bp, Homo sapiens
aagcgttaactacagatcaacgacagataactaatgtacacctgacacagatattatgcttttcagtctgctgcgggtccaggcagcttacagactcccaggagagtgccatacaccagttgcaactggaggctgtactcgctggccttcgcgggcatttacttcagcac

SEQ ID NO: 634751 - DNA, 232 bp, Homo sapiens
tgcactgtctacctcagaattaagaagtatggtaatccttacctgtatacagtgcagagccttctcagcaatcacagaatatttacgagatttcctattatgtgaatttttaagctgcaaatctgatggccttaatctcctttttgacactgacagttttgtacaaagaaatcatgtccatacactattgtcgcacgcatgggaagtctaagaggtgctttatcgacactac

SEQ ID NO: 634752 - DNA, 133 bp, Homo sapiens
  misc_feature (80)..(80): n is a, c, g, or t
  misc_feature (96)..(96): n is a, c, g, or t
gtaaaaataagtgtttattaacaaatgggctcagagtagaaaatgcagacagatgggttcactttaccataattcggtancatcatgttattgcgnacagcactgtaggcttgtaaacgaaaccaaaggctgg

SEQ ID NO: 634753 - DNA, 108 bp, Homo sapiens
  misc_feature (41)..(41): n is a, c, g, or t
tgggtggctgtttactgactggatttcttacccttttaagnaaggaatccccctctaaaatgaagattgttctatatccagttggtgttggtattaggagatctgcac

SEQ ID NO: 634754 - DNA, 253 bp, Homo sapiens
ctgtggtgtaccgtcacacttgaagttatagcacccttttattattctaaaactgaaatgcatagattgaaacctgcctatgttgagttttgcgtctttttttttttaatgggccacaaccacggcatatggaggttcccaggctagggatcgaagtgggagctgtagccaccggtctacactacagccacagcaatgtgaaatccaagccaaagtcttcgacctacaccatggttaccgagctcgaacttcg

SEQ ID NO: 634755 - DNA, 298 bp, Homo sapiens
ttaccacagcccatttcaaacactatttttttacatcacctcccactcgggcactggccgctctcaaatctgtgtattggagggcttcggcgctggaaaatttctcttgcagttatgcttacatcctaaccacagtttttagctatgttgcctattattataaatagcaatcatttatatagataaaatttgtacttaatgtaagattgagattatcaaaagtgctcaatataaaaagtatatggatacacatacagtacatacatgtacacaaacacatacacatatatacagtcta

SEQ ID NO: 634756 - DNA, 208 bp, Homo sapiens
atttttttggcaaaaggggggggggggtttttccccggggggggggggaaaatttttttgcccaaaggggtttttcggggttgggaatgggaaaattgggttttttttccggatttttttccaggggggggaaaaagggtttttttttaatggggttctttccccggggggttttcggggggaaaaagggtttttttcccctttccca

SEQ ID NO: 634757 - DNA, 168 bp, Homo sapiens
agaggatcccgatagctgagaggcacgaagcacctggctcattctactatcaacattactaataagtggctcctttaacctctccaccctatatcacaagcagcaagaacacctcgtcaagctatcatcatgccctcgtcaagctagcatgcagggtaccgagactcg

SEQ ID NO: 634758 - DNA, 86 bp, Homo sapiens
ggacccaaaaatggggggttgccccttttggcccccgggttccccgaaatttacccccaataaaaaacaggcctttccccggcgga

SEQ ID NO: 634759 - DNA, 1240 bp, Homo sapiens
gcagctgtttctggtaactgctttgccgcccgtgctcccgcagtgaggatgctggtgtgtgtgagtgtggctgaactgtgcctgctccctgtgtgttgtgggatgcctgagggctggtgcatgtgccctcctgtggagctgcctggtgtgttggggtggcctgcactggtaggtgctgcccatgcccctgctggtgcccctgccagaactctgcgcctggtgcctccctgctgcttgctgattgccctgaagatggctgctggctcttgtgcctgagatctggctgcctgtgactcttggtcagctgcccctgctgtccatggactctctgtgcaccacatgccatgtgcccttgacattcctttcaatgctgccagcaatgatgtgagagcttccagtgatgcagagctgccttggcagctgagtgcccgggaggaccctgtcgtcagtgagctccttggatgaatgattcactggcagtggccaggcttgctaaggaagcagaaaactagaacaggcttcagggggccatgctcaatgccaggattgcctgtgctcgagccatggcttgccaaaagaggatgagaccagtgatggccaggcttcgggagaagcagtgaggaacgcttggccctcgtcttcccaagcaggacctcaaatggggtaggccccttgcccagatctgctctcctttgtccagcttggcactggcaggcctcgaccgggtcaaggcaggcccttggattggtgtgtccagtctaaaagattggccccaccgcagggccgcccttgcccaaagagggtaggctaagagtatcttacttagaaccttgttggaagctagggttcttccctcagtggcggcttggaaagttccggagttagcattccctgggccaatccttgtgcccccttccggattccgggccaataattcgccaatggctggccccttgtagaaacatccctctacagagcctgtgttcttgttggggcgcttgaaccacggttaagagccgtgctcacgttcaaccgagcagagtgatggttgttataccccctaatgggtagcgcgtaggacccaacacaagtggagttgttgttgtgagcgctcttgtccgcctctgtaggaagagccaagagagggagagagcagaaaaagcattccagagaggggggtaagccagaagcaccgtttctattactctttaacgtttttgaagcagatcgaagtgagaaa

SEQ ID NO: 634760 - DNA, 153 bp, Homo sapiens
cgccggttgaacttctcaactcgtccggcggtgtcacatcttggccttgcctgtatagaacgggtggctggccgaggtgatgtcgacgtcgatgacggggtaagtattgccgtcctgccacttgatctcggtggaactggtgaccgttgacct

SEQ ID NO: 634761 - DNA, 316 bp, Homo sapiens
atgctgtcctagagaacctcctcctcaaccagcctgggcaacagcgagactccatctcaaaaaaaaaaaaaaaacaaagataaaaagaatgtagcggccgggcgcggtggctcacgcttgtaatcccagcactttgggaggccaaagcgggcgattcacggggtcagaagatcaagaccatcctggctaacacagtgaaaccctgtccccactaaaaatacaaaaaattggccgggcatggtggtgggcacctgtagtcccagctactcgggaggctaaggcaggagaatggcgtgaacccataaggtccgtctca

SEQ ID NO: 634762 - DNA, 316 bp, Homo sapiens
ggaggcagtgaatcgagctcggtaccatctcgtgacggcgattatcactagtcttacaggttttgggataggcggtggagttagggacaatgttttgcgggcagggatggatctcacaaagtacattctcaagggtggggagaatgacaaagaaccttcttaagggtgggggagattgcaaagtacattgatcagctagggtgggacagaaacaaatcacaatggtggaatgtcatcagttaaggctcttttcacttattttgtggatcttcagttgcttcaggccatctggatgtataatcgccggtcacgagat

SEQ ID NO: 634763 - DNA, 194 bp, Homo sapiens
gtgtagtgtctagaggatcccttttttctgcacgctggcagtgtggcaagggacacgctgatggaccgtaggaagaaggcactgatccgactactagaaacgctgcgtggccttctttcgtggaggaggaggagcatttcctgcaggaggctgagcaaggagcgaggggctccgctgagtgacgagctgggctg

SEQ ID NO: 634764 - DNA, 281 bp, Homo sapiens
gtcatgagccggagttatgaaactactagaagaaagcattggaaaaatgccctaagacattggcctgggctgggtgcggtggctcaggtctgtaatcccagcactttgggaggccaaggtgggcaggtcacgaggtcaggagatcgagaccatcctggctaacacggtgaaaccccatctgtattaaaaatacaaaaaagtagctgggcgtggtggcgggcacctgtattcccagctactggggaggctgagccaggagaatggcatgaacccaggaggcg

SEQ ID NO: 634765 - DNA, 215 bp, Homo sapiens
acccacagtgttgggattacgggcatgagccaccatgcctggcccacctcagatctttaagagggattcacatacacctgaggatagatgcggggaaactgccaattcacggaaaaaggctttcctcttttttttcaacataccataatgacttcttacttgatttcatctcatctcagatgtgtgaggttcagggagacagggtgtgagtgagg

SEQ ID NO: 634766 - DNA, 198 bp, Homo sapiens
gtattggagtaaggacttcaggcccagaagggtgtggagtatggggacagaaatggacagacatataagaggggcggggcccgggagcttatagtggctaaagggagcagacacacacgcccaggttattcaagaatcgctggagttggtcccagcaccccctttctacttctcggcctcggtcattctagggtggtg

SEQ ID NO: 634767 - DNA, 701 bp, Homo sapiens
  misc_feature (621)..(621): n is a, c, g, or t
gtgcgtctgcggctgatcgcggagctggccctgccgcgtgcgcgccctgctgggagcaacctgaacatgtgcctgcgcgactcccagatctacgcggtggactacgagaccttgactgcggcctgttctctggacgcctggctgcctggtcctgggcctggtgcctgactgtgctgcctgctgatgagcctgcctcttgcagctgctcggcctgcctccctgctcttcgtgcctgggcctgcctggtcacgcgcaagtcctggcttgtggcagcacgacgagccgtgctactggctgcctcactgctgggtgctggcccgactacacgtgtgcagaacttggaccacgtggaatggcctggtggcatcctgaccttcaaagggaagactgagagcgaggcgctgggagatcgaacacgtcatgtaccatgactggcggctggtgcccaagcacgatggaggaggccttcaccgtgttcacgcctggcgccggaagacatgcctggcctccgtgccgtacccgcctctcctccggggccatgattatcgcagaacgacagaaaaatggagacacaagcaccgaggagcccatgctgaatgtgcagaggatacgcatggaacnctgggattaccctgcaaaacaggaagacaaaggaaggcgcaaggcacccccatctaaatgccggactgtcggctatcggg

SEQ ID NO: 634768 - DNA, 834 bp, Homo sapiens
gattcaatgtcctgctatcaagactggtgggccttgagcgtggagatcgctaaccgaacatcatacttggtgggtcaagttgttaccctatcatgaccagggcactgcccacgtgggctgcatctttcctaccccagttctacctgcgcggaggccaggaccatctggtaaaaacctgggccgaggtatacacagcccgctcgttaagctcaacagctatgtgcctgtcactgctacactggaccctcgttgaggacttccttagtggtttccaggtggtgttgctcaccaagaccctgcctgtgaggaccagcatgctgagtggctgagtactgtcaattcatcgtggcatcaaactggtggtggcagagcactgcggggcctgttgggcagggtccttctgtgacttccggagaggaaatgctcctcatcagattccacttggggagcagtcacctcagtgctatggtttctatggttaccaaggaccacccccggtgttggttacctgcctgtactgaaggacccgacgatggggtactaagacgaggcgggggactattgtgctcctctttcagaagtcccaggggcatggtgaggaatggtcaaccggaagagtcagcccagtggcaggatcaacagctcctgcgtccttataccttttagacatctgtgacagtctccgccattctccgattagattcgtggaggcaatcgtcgagtcagggtcgagacgtacctacagacgattctgctttaaactccttgggtggtcctcacagtcgggagcctgaccttgtgtgccggacttgcgccaaggttgttgccctgcta

SEQ ID NO: 634769 - DNA, 1109 bp, Homo sapiens
ggagaagctaggggtgaggaagccctggggcgctgtcgccgctttccttaaccacaaatcaggtcggacaggagagggatggggtgggggacagtggggtgggcattcagactgacagcactttgctatctagcagccggggctcccgatggcggctacgaatagttccggccactctctgccgcttggtgttgggcgaagccaggaccgtgccgcgccaccgatcaggatatggagctagctgtcgccgaccggctccgcggacgtagatcctgacgggcgcaccggaaggactctctcgtgcctcctttgaccaaaatcggacgatgtatctagtgacgagccggtggtttacgattcccctggaaccttgcgctatctttctgaaagaccgtggagcctctggggccttgagtgcaacagctgggcgtcgctcgcttgaaaaccgcggaaagagcacgtcggcactttgccctgcgggcggtgtgcatcccggaccccgtggcgcacgtgaggacgtagcagtgtgtcgcgcgcccagcggtgcagcaccaggcgggaccgcgtgcataatgtgggcctgcaaggcgtgcaagcgcaagaacatcagggccgaccggcggcaaggccggacgaccgatgcagcgagctggagccagcttgagcaaagtaaagtgaggccttaggatgacagtcaagcagctgcactgtcgagcgaatcagaccaagcggtagccaaggtgggagatcttgcgaaaggcatccgaaaatcgagggcctgcaggtctgctgagcgaccaggaggcgaagacctgcgcggagcgctctataggcggggcgtgcccgggccggaggggcaaaaaggggactacaggccaacacgggccaaaggcctgagacgaggacacagggcccgaaaggtgcgggggggagcgctcaaagggcaaaaaacggagcaagacaacagcgataaagggagggacaaaagggttagtgagggcctagaagagcgccattgaaaatcatcacacaagacgccgatagacccaccgctgcgacaattgtggcgtccttctcacagttgtcgctagcctacacaggcgaagaga

SEQ ID NO: 634770 - DNA, 163 bp, Homo sapiens
gaattcgggggaagggaaactcatgctttaaatagactctgaaaatcacagagtcagtcaaggaagagtccaagatctgcccttacgaatctcaataaaaatatgaagtgatcctttttactatggtaattcttcataatataaaaggctttggtcctggaat

SEQ ID NO: 634771 - DNA, 103 bp, Homo sapiens
ggtatctcgcctcgctgctggtgatcgtgctgctggacgtgccgtggcagatctggagccacctgaagaagctgcgcatgtccaaggaagacgtacgccaggt

SEQ ID NO: 634772 - DNA, 110 bp, Homo sapiens
cccttttccccctttttccccctttgggttttaatcctttgggtaccttttaaaacaagtttttcctacaacctttttttttggggaaatttaaatttttccccccttga

SEQ ID NO: 634773 - DNA, 436 bp, Homo sapiens
atgctagaattgcgacatgactcagtgatatgaagttcatcatcaataattggtgtacttctgcagaacatgtgcgttcgaacaaaggtgcgagcttcggactcagtggttgggcggcgttgtcatagctacagccagcgggatcaccttggggatgctgatgaagaaacatgtacacatccattcatcagtggtgtggtggaggttgacgccgctgtcaccccagaggagcgccacctgtccaagatgcagcagaacggctacgaaaatccaacctacaagttctttgagcagatgctgaactagacccccgccacagcagcctctgaagttggacagcaaaaccattgcttcactacccatcggtgtccatttatagaataatgtgggaagaaacaaacccgttttatgatttactcattatcgcacttagaca

SEQ ID NO: 634774 - DNA, 127 bp, Homo sapiens
cacgatatgtacttattgtctatgatgaatataacatataaaaatacagaatacgcatataaaaactacgctctcattaatgtacgatactataatttagggagagcaaaaaggaatgatgatatta

SEQ ID NO: 634775 - DNA, 924 bp, Homo sapiens
tgcgacactgcttctccctcaagaatctacaatactagcataatacacatttatttaactcttatgagcttgctagagagatggcagtgtacgttattccctttaatgcttacgaatttactgtgaaaattactagtcttactaatagaagatgagaaaagtaggccagacttggaagacagcttaatagtgagttgcgtatgttgtggtagttgatctgctgtctctcactaggtccagtcttctgaggtgtcatttattgtatactcaatggcctggaaggtcaagtgtgtgtgagacagtattgtaagtccctttgattctgcatctgagaataataactgtgcaatttgattgctcaaagaactcttaccagggaagtggtaatgtcttgaagtcgagaagcattatctatctttcaagtgggctatgggagaattaatgtccagcaactgtatgtcacaacgtatgaggcaagaatacactttatagcatgctgtagacaagcggaggcataagccaccggcatgaagaaaggttgacactcgcctttgtaacacccaatgctgatctatgtttgggtatctacagttgtgagtcccatgaattcttattgggggagaactagtgttattgtgaggcaatctgcttttagactgaatactgttgaatgagaagctatttactactgtattcactacaaataattacggttctcggacacactattgacgtcccaatctcccccaggcattccttagtacagccctgattaacttgtcaggggcatggacaccgattgtgatttactccggaaaaaccaaaatataccagtttgtccccttaccgtgtcaccatactgtggtgttctcacaaaaatgcatgtactttctatggaaccaatacgaggttagccccatataa

SEQ ID NO: 634776 - DNA, 375 bp, Homo sapiens
gtgattcccatgcctcaacttcttgagtagctggattacacgtgtgcgccactacacccagctaatcgttgtatttgtagacaacacggtgtttcatcatgtcggccaggctgatctcaaactcctgacctctaatgattcacccacctcggtctttcaaactgctggcattacctgtgataatcaccatgccatggctgtattgaagtaatttcctcaacaattactagaatagcgttattcctatactctgatacatggtgtaccttctttattgatatgcaactgacatacaatgtgcacaatatatattaggtcccttccttctctattgttacttgacatgtggcatttccatgcatgatgctatccttc

SEQ ID NO: 634777 - DNA, 94 bp, Homo sapiens
gtaggaaaagagaaccgaggaagcacgtgaacttactaattctattcgaggattttacaatggcatatttttcagtattaaacgaaaatgtttc

SEQ ID NO: 634778 - DNA, 452 bp, Homo sapiens
aaatgagtgagacctgtatggatggagagacgccactgagtggtccacacagactgtggggactggggcttgagtgtggggaaccttctgctcaagaaaagcaggataggccaggcacggtggctcacgtctgtaatcccagcactttgggaggccaaggtgggcagatcacttgaagccaggagttgagacccgcctggccaacatggtgaaacctcatctctactaaaattacaaaaattagccaggcatggtggcaggtacctggccaacatggcgaaaccctgtctctactacaaatacaaaaattagtcgggtgtggtgtccagatgcctgtaattccagctactcgtaaggctgaggcttggagaatcgcttgaacccgggaagtcggaggttgcagtgagccgagattgcgccatactgaactttcagcccggtgatagagcgag

SEQ ID NO: 634779 - DNA, 360 bp, Homo sapiens
  misc_feature (1)..(1): n is a, c, g, or t
  misc_feature (126)..(126): n is a, c, g, or t
  misc_feature (230)..(230): n is a, c, g, or t
  misc_feature (354)..(354): n is a, c, g, or t
ngttaccaatctgaagtgggagcggcggatcacagcgcgtgcccttgcgggggtggacccgtccctcttggagttgacggctctccgagtccctgcggtcctggcatcgggcaggggtcctggggnttgcccacacacctcgtgtctagcctccttttcttccccggcccctgctgcttgctcagcaggaccccggagcctgacttctccagaccaccaggccaggggtncctgttcccgaactcctggcccttagcagccctagtgagcgccggattccagccccctcctcagcctctcctgggaggcccagagaaaagggtcaggccttgtgaccatgtgcaggacaagttnccccac

SEQ ID NO: 634780 - DNA, 331 bp, Homo sapiens
catcttctacaatgtttctgggaaaaatcaatttataaaatgaaagttcagtcaggcatggtgcccacacctgtaatcccagcactttggcaggccaaggtgggtagatcacttgaggccatgagtttgagactagtctgtccaacatgctgaaaccccgactctactaaaaatataaaaattagcccagcaaggtggcacgtgcctgtagtcccagctactcgggaggctgaggcaggagaatggcgtgaacccgacaggcggagcttgtggtgagccgagatcacgccactgcactccaggctgggcgatagagtgagactccgtctcg

SEQ ID NO: 634781 - DNA, 199 bp, Homo sapiens
agaaccttgtagagagagtgaaaaatttaacacccatagtaggcctgatagcagccaccaattaagatagcgttcaagctcaacacccactacctgagatatcccaaacatataactgaactgctcacaccccattggaccaatctatcaccctatagaagactgatgttagtataagtgacatgaaacattctcctcc

SEQ ID NO: 634782 - DNA, 792 bp, Homo sapiens
  misc_feature (38)..(38): n is a, c, g, or t
  misc_feature (54)..(58): n is a, c, g, or t
  misc_feature (63)..(63): n is a, c, g, or t
  misc_feature (70)..(70): n is a, c, g, or t
  misc_feature (72)..(72): n is a, c, g, or t
  misc_feature (77)..(79): n is a, c, g, or t
  misc_feature (84)..(85): n is a, c, g, or t
  misc_feature (88)..(88): n is a, c, g, or t
  misc_feature (100)..(100): n is a, c, g, or t
  misc_feature (109)..(109): n is a, c, g, or t
ccttcctctgggccatgactccgccgccgccgccgccncctcccccgggccctnnnnnctggncgacccntncgggnnnccctnnccnctggcctggatnatggtcgtnctcttcggggctacggcgggtgcgctgggacgggacctgggctcggacgagaccgacttaatcctcctagtttggcaagtggttgagccgcggagccgccaggtggggacgctgcacaaatcgcgtggttcgtgccgaggcggcctcacctgagtacgcagtgccagcgaggcgatgcggactgagcgccgagagcgcatggaagcgggcaagagacaggtggacaaggatgctgcaaggcagtatcatcacagctggtgaacggggagtgtggctattgcatggggagggaggggaggggtaagaattgctagtccgtgcggaggcataggcagagagagcaggcaaagcgaaattttagatagagagaagagtcgagtgggcaggccacagagagaggaaaataccatgagaagaagaacagagggtgaagagataccactagagacagttgtcaacagtaacgatcgccgttgcgtagttaggagcgcattcactggaaagagaagaactatacccaaataaatggcaaaaggaggtcccaaaagttagagaaatatgtagcgcttagacaagtagagaggcgacacacaatgaaagagacgagaacagcgagagaaacgaagaggaattataaagtgaaagattgagattaacagagagtagagcaagaaaagaagaga

SEQ ID NO: 634783 - DNA, 481 bp, Homo sapiens
  misc_feature (173)..(173): n is a, c, g, or t
tatggcacattctcactcactcactactcctgcattccagcctgggcgacaagaacgaaactccatctcaaaatatgtatgtatgtgtgtgtgtgtatatatatatatatatgtatatatatatgtatatatatgtatttatgtatatataaatcaaaatgaaaaaccttttnggatactaagagcaacaaaatttagggaagtaatttcttaagtatagattaaaacaaatatttatgcagcctggtgactagaaggctgttgtgtaactaaacaccatgaaacttaatattgcgatagtcctccccacatgaagagagagtgtgagtgatgaagggccatgttcttatatctattaaaactcaagagggaatttggttgcatatgaaaggacttaggtattataaagggttagatacttggaagaactgcaagtttaataagatgctgaaataagttgccaacagaaatgttggttatt

SEQ ID NO: 634784 - DNA, 133 bp, Homo sapiens
tgggatgcaccatatgttccatagatttttgtcaaacagatatgcgccactgttttacactctaaacttgtgcgtgaatgtgcagatacaatgtccatgttacagagcgtgtaaaataactgtttgccgctga

SEQ ID NO: 634785 - DNA, 279 bp, Homo sapiens
caaggtaaaaaattctgtcccttaacacatgcacagtaagggaaataaatcaatgtggagtgcctcagactaagggcttgcctgtgcactgggagattgggatagacccaccaggaattcttgcatcatggggatggggcggggtaggagggatacactggcctatgcagccaatgtggtccatggtgttcaatctgtgagctaggaacacacagcgtgaccccctcttcttttgatgagaactttcgtgtaataaattccactttcctcacctttgta

SEQ ID NO: 634786 - DNA, 853 bp, Homo sapiens
ccctgctgcctgccaaacaccccaccattggcctgtcaagccacccatgggctgtctgctgagtgctaacaacagactctcatcactccttcacttggtctgtctgtctctgtcttggtagttgccggtggacagcatggtcgtgccagcctcccaccactgaggccaggtctaccccccatcataccagcccccaggaccactaccccacggccagccagggtccagagtctagcccagtgctggggatctcgacgtcagacaagaatggtgacaatgccttgagtctgaggcatcctctgcctgctttcctgcctgcccacctgcctcatattgtgtgggcctttttctgttgtctcattcattgtcttttattggtgtaattattttaaatgagattttggtctcgtttaaatgcaatatctctgtatacagactggctgggcccaccccctggtgtggtcctcccacagtattttgtgcaattgaagccctgctcgcaggcttgcagagacagggacacaggccctatttggaaccctgatcatcaccagagcccctgggattggctatgggaaagcatgccacgggcattcgccttcctacccccgggccgcatccccagttgcacagggggatctgcggactcaccggagactctgcgaaatggcccaggtggggggcccccactccttctcctcctggagttcccgagcttgggctcctttcttctcaggcttccccaggccaagtccctttgtcgcattccaatctggtgcgttgggtaagggcctcgagacactgtccctcggggggccaatgggtcttcccaccgcgttgcgcaccggttcag

SEQ ID NO: 634787 - DNA, 652 bp, Homo sapiens
  misc_feature (532)..(533): n is a, c, g, or t
  misc_feature (547)..(547): n is a, c, g, or t
gcaggtccctggccacgtcgcgggcgatctcgccatcttgcgccgcttcctctcaggggccgccgcctcgctgagccgtccagtgcccggggccagccgcgcgtgcgccgagtcgccatccgaccgcctgcctggaattgaacacttttccaggcgtgagctgtggtgactctgtcccatgctggcggccagtcggtcatccgtgactggctgaaggatcttggaacgaacgcgctccttgcgcccgggtagttccttggtgacaacagccagtgtatctgtattgcgacctggatctggcagcaagatccgttaccgtggaatctcttattaccttcactgtatactttccatgtgtaaataaacaacattcgtactgacacggtatattcttacctttggcgctgcttcgactatgccacgacagggtgatagccttggaattctacctcgtgacacatttctacatagcgacagacaccctacacagacgtgcgaccgacctccatctgagaacttaccacttgtgccnngacgcgttggcacngtttcgacattgggactcgcgatcccccttgtttgaggcgaacgaggcccattcttccaatactgtcttcacgctgatacattccacccagagattttacatccc

SEQ ID NO: 634788 - DNA, 327 bp, Homo sapiens
ttcatttctattcctacccagtatgcttctttctttctttttttgagacagcatcttgtctaatcaaccaggctggagtgtagtggtgtgatcatagctcattgcagcctcagactcctaggctcaagcaatcctcccacctcaacctcccaaagcaggtggatcacttgaggtcgggagttcaagaccagcctgggcaacatggtgagaccccgtctctaccaaaaatacaaaaatcagccgggcatggtggcattgtgcccgtagtcccagctactcaggaggcggaggcaggagaatcacttcaacccgggaggtggaggctgc

SEQ ID NO: 634789 - DNA, 199 bp, Homo sapiens
taaatttgttaggaagcatttgaaggcgaaacttgctagctgttttgaaaggcacacataacttaccctagttaagagctacatggttttgttcactctcttaggggggcacagagtttctcagattcctgcatatctcacttgtaaatgtgtttaaacacctctgtgatatgtgacccatctatactctgcagcatat

SEQ ID NO: 634790 - DNA, 527 bp, Homo sapiens
cacacgcactccacacgtaagctcattctatacccgaagagcagtctcagaaagcaagattacttttgtgtattttaaaaaatgattctttcagtgtatttatataagacattctgtattggaacgtagtggacttcctaacatgattccaaacgtcaccgtgtaattcttcgtgtttttgtttatgtctctgtactttatcttcattattggactttgggctggggggcaggggcatggtgacacaagaggattttttttttttattttaattcttggaaattctttcccaattaaccagactaaaagttttgcacgtgaaatacaacgttgtatgcctttttgcatttattaaaggccgtgctccctggaattataagcagagtagatcgtgttcaagagagccagcttcagccgtgtaacattatttgaaaacagatatgtctgcacttagaggtcccttttgaatgccatacactagacctctcaagcattatgtatcatggctacatccaagcgcctcacaa

SEQ ID NO: 634791 - DNA, 223 bp, Homo sapiens
acctctccactggtgcatgctgctagccgtctcgcccggagctcaatgcacccggctacagcttgtggcactggcctccacccatttcacgttatacctgtcaaaactctatagagcacctaagtgagcttcaaaagcaccagttctagcttagattcttcagcagcctctgaatgctcttgagatgaaatctaaatcttcagcatgggttatactccctgca

SEQ ID NO: 634792 - DNA, 944 bp, Homo sapiens
catcgccgcgtgcgtgtgtgtctccgctcgaccctttgggaccgtcccccttcgggtgtaccccgccgagtttttttcaccctatatcgcggtttctcccctctgtataccggccctccatatcttgtggggagaccgcccgcatttcttttgttgcggacccctaaactatgtgttccgtggccggccccgaatattccccggttttgccctatctctccgggctcatcttccgcgtttcaatgcctcatagctctccctttgcgggtccccagccgtctgtagtaaatagatcattggcaccacgccttgcttcctcaacacgaggcagaaataagggggcgtttcctcctccttcaggtgaccacttttcctctgggggcccccctcctcatgaggccccccttctttggagtccctccctggagagtgttcctcttctcccctgccctgcccctccgtgggctgatcatctgtgtattcccgacggctttgttacggcgtctcaggcccccatttttgtaggcgcgaccaacccctggggcctccccaggtgttgttcctcaggggggaagcctccccgcgcgcgcttgctttctcccctcggtgaccgcccgggtgtcgcacccagagggtcccgtgcgccctcgcctcttgtgccccgtgtgggcacgcacatcactgggacaacttcaagcattacttcggcgccctgggggcccggcagagtaggacacctcttttctaggcccttctttcacttaccctcgcctcttccgcgccctcccccagtgatgatcgccccccagtagcgccccgccgccctttcttcccgccgtggaagaaccttcttgcgtgtcccccggtgctttatttttctttcgcccctcgcgccggcgcgttcgactttgtgcccgaaaaggggccccaacccccacaaaaca

SEQ ID NO: 634793 - DNA, 976 bp, Homo sapiens
cgaactactgaggacacgggcctttgccgagtgctgtactcctgcgtcttcggtgctgagaagtcacctgatgacccacggccgcatggtgccgagagggacatggcttctcctgtgcaaggaaaagattttagtctagtggccacgtgcaggtagagtcaatagtgtcagggctgcatgcatgctagtgacatctgagttctggcccactcgcatggagcgctgcagtgctgctaatctctcagatgaggcaagtgccgctgcacgaggccccacgtggggctttccgcctggcagcagagaaccctttccaggagccacggacggtggatgtggcatgagggcgtgctactcgataacggcgtattgcccatggtgctggatgcccagtgagaacctgctacttggcttagagggcatcgcttccggttgctgacacgcctccgtccgttgaccaccgtccggtctgcgtggcagcccaggcgaccagctcttctgctgcgtggctgacctgcagttgagggcatcctcatccgctatccatgccacattggtcagtctgctcttgtcctcaacgaccagtttgtccagggcctggcaggaaggagttcagatgccgcattggccccgtgtgattcctcgttgggatggtgcttctgatggcacggcagagggtacgacactacaggcatgactgaacgctttggcatctcctctcctatcgcaggaggctctgatgtgctgctataccaggacaagtgggtgacgagaagccttgcccaaagggggctggcagcatggtggaggaggtcctgctgtcctcaggttagtggaaccacagaacttcctgagcctaaaagctgctgtgttctctagaccgctgccgtgcggcagcaccgcttggtccttgaaacccacttctccaatccctgccagccgatagtgctagagttggaggagttgcttgagctcaccc

SEQ ID NO: 634794 - DNA, 1510 bp, Homo sapiens
  misc_feature (1138)..(1138): n is a, c, g, or t
gagaattctacaagagcctcactaatggactgggaagaccactatggcagtcaagcactatattctgtagaaggtcagttggaattcagggcatatgctatattattcctacgtcgggctccctattgcacctatatttgagaacaagaagaacaaagaacaacatcacaactctatagtcctgccgctgctagtacatacatggcacagctagtagatagcagtatgcataacccaccagtcatctcgaatatttcatctcgtggctagtaggttgccacctcttagcaggatcctagccccccctaccaaacccactacctccccgcaaccaaccacttagccttcccccaccccagccacccccaccccctcccctcctgcccccccgctctcccatcctcccgccaccccaccccccctctgccctcctccccccacagcctccccctcctccacccccccctcctcccatcaccaccccctcccccccccccccccacccccacccgccacccaccctcccccccccccaccccctcccctcccctcccacccccccctccccctccctacccccccctctccccccccctctccccacactcccccaccccaccccaaccctccccacctaacacccccctccccccgccctccccccctcgctccctagcaacccctgcccttaccccccctccccccccacacaccccctcccccccaccctccctctgcccacccactccgcacccactccgccccccacatcaccctcccctcgcctcccaccccacgctcacctcgttcccccccctccccgccccccttctccacaccctgccaacccaccccccccaccgccacacacctccccccactctccctcaattctcaaccacatctacccaaccctccggcctcacacccacacccccacacacccacgccccacgctctctgcccccacaaccttacccaccccctcctccctcgctaccgccccccccgcacgctccctggcaccaccacacccccctgcctcccccacccgcccgccctcctccctcctcccccccgccactcccccactccgccccgcacgccaccctcgcctgctccccgccccccccctccngcccgcccgctccctgcctcgccccccccacccccctcggctctcccacccccccccccgggccccgccccctgcccccccccccctcccgcccctccccgccccccccccccccccccccctccccccccccccccgcccccctcccgccccctctcccccctcctccccgaccccctcccctccccacccctccccccgcccacctcccctccctcccattaccctcccccccctctccccccgccccacccccacacccccaccagccgcccctaccaccccctccaccactcacctccccccgccccccccccccccccccccccactccctcctcacacacaccccccccccccccccccccccccc

SEQ ID NO: 634795 - DNA, 436 bp, Homo sapiens
  misc_feature (300)..(300): n is a, c, g, or t
  misc_feature (353)..(353): n is a, c, g, or t
  misc_feature (371)..(371): n is a, c, g, or t
  misc_feature (428)..(428): n is a, c, g, or t
ggcgacctgccccatccttggctctcagcttgccatgtgacgtgctttggtgtagggaataaggtggaagggatgatgtcctggttttaggccggagtgggctgggctcctgtgtttctgtatcattatgagagcatggctgggttcacctgcttttccagggggaggagccagtgggaacactgagatagccatggacttcttctctattacactatacccttttctaatctgtattttgactttgttgacaggtcctcaggtcaataaatatcttccataatatattttttggagatnttgccactacacttctgggaaacaaatgaacaaattacatttctatgtatatnttctgcttattacattanattaaaaaatcacaaacaaggatcgctatgcagagtggtagcaatgaatcctttccnaaatcatg

SEQ ID NO: 634796 - DNA, 443 bp, Homo sapiens
caggatcccttttgagagcccctctccttggaatacctgaatgaagacgtatgttgagttgtcttcattctggtttcaaatctcacctacagtgctctctcaccatcctgttcctcgctctaggaccatttcatttctggtcacagttcttgcattccgctattcctgggctatcatctatcttggcttcagggcaggaggactggatttctccttctctaatcctcctacgaggactgaacgatctggtaccctatagaaggctaggaaatgctgagatcgctaaaggaagccaggctaatgggccttgaccccctttttcctggggctcctgacatggttatcgccggagaatggcggggttttgaataggcttgcgaatgtagatttatgtctggtcgtttacacgaacgattagttacgttccattctgtttcttttac

SEQ ID NO: 634797 - DNA, 698 bp, Homo sapiens
  misc_feature (485)..(485): n is a, c, g, or t
tcaaaattaaacccgttttttttttaaaaaacaacttctaaaaaaaaaaaccacccccccccccccaaagcggggggacccccccctgtcccaccggggggaccgctcccccgccccttcgcaaaaacgcttgcaggcgctgttggggaggacgcgcagaggcaagagaggtgcgcctcggtggggagcggtcgccccgtcggcggtgtccagcgcaagacgcctgtgggcgagcgcccgtggtgtggagaaggcgccacgcgctattagcgcgccagaaatctggcggggccgagggtccccggcgggtggggcgacaagaagcgcaatctactagggggagagcgtctccccgcggtctgctgtggcccacggcggggacaagtgcgcgccgtgtgttaggaacgctatctccactctacagagagcgccgaggagaggaagcccacaaaagagaggtctcccgagaaacacccctctcttgnggaaagcgcgctccggcacccccagaaaaagtgtgatagacacgcctggcgaaaaaattccccaccccgccacaccgaacagacgggcggcgcatacacaaaggcgcctgtggcgcggcgaccccaacaataaaaaaaggaccacgagggcaaagaccactgaatatacacacccaggaacaacaaaagaaaagaacacccacaccgccaaca

SEQ ID NO: 634798 - DNA, 401 bp, Homo sapiens
ctctgcctttggatgtaaagtgctctgttgtaccctggtggggttgtgttaattctgccatcacattctcacatggcagaaacagcatctcccacaccacttaatgaggtttgaggccaccaaaagatcaacagacaaatgctccagaaatctatgctgactgtgacacaagagcctcacatgagaaattaccagtatccaacttcgatactgatagacttgttgatattattattatatgtaatccaattatgaactgtgtgtgtatagagagataataaattcaaaattatgttctcatttttttccctggaactcaataactcatttcactggctctttatcgagagtactagaagttaaattaataaataatgcatttaatgaggcaaaaaaaaaaa

SEQ ID NO: 634799 - DNA, 418 bp, Homo sapiens
atcgagccgataacatttgccctgagataggaacacattgctaagaagagctgtaaaagcagttgtacagcaaactagggataaatttatcatcccacaattagtgtctacttagtttcaatgtccagggtaggcaaacaagcctgtgggccaaatgctatcctgttgtcaactcttgtaaatgaagtatgatacgaaatagagccctgcgtattcctttacatacacaggggcttgttcctataaatatttcgagaattgctacagaaaccatacatctacctatttaccatctagccctgcacagaacagatttgccaatctctctcttaagctgtgcaaaattatgctgccttccatagcagtatcacatctgtcttcacctttaggaaataagcatacaagggcaatcaagctt

SEQ ID NO: 634800 - DNA, 292 bp, Homo sapiens
gctcgacgtggtggcgcatgctgtaatcccagctactcaggaggctgaggtaggaggattgcttaaacctgggaagcggaggtgacagtgagctgagatcacgccactgcactccagactgggcgacagactgggcgagactccgtctcaaaaaaggagaaagagaaaaaaggtggccgggagtggtggttcacgcctgtaatcctagctggttcacacctgtagtcctagctttctttgggaggctggggcgggtggatcacctgaggtcagagtttgagaccagcctggc

SEQ ID NO: 634801 - DNA, 750 bp, Homo sapiens
gagagagagagagagagagacaccgacggcgtggtggtgaaagactaatgatcatcatagtgatccctgaaagaagttccagctatattttgcgatgtactcaacaccaacatcgatgggcggcggaaaatagcctttgccatcagctgccattataaggggtgtgggccgaagtatatgctcagtgtggtgtatgaggaagaagcagactattgactctcaccaagagggcgagagaatctcatctgaggagtgaggtggaagctgtgtgatcaccatttatgcaagaatccagcgccatgtacaagatcccagacgtgtgttcttgaacacgacatgaagagtgatagtaaaggtgagtggaaatatacagccagggtcctagccaagttgtcgtaggacacacaactctccgtgaaggaccttggatgctgacgttgaaagaatattcgggccctataagaggggcgtgccgtcacttcgtggggcctgcgtgtccgaggccagcacaccaagaccacgtggcgcggctgtggatcgcagcgtgtgtgtgtccaagaagaataatagtgctctgatagggagttggtgctgttgaataatcatagtagtatattaccctacaaaacaaaacaaaaaaaatcccccgggggcattatactcgggggcgcgaacaacacgggtcaagaacgggccctggtcacaacgtgtcttctacccgtttttgtgaaccggggaaaatccgcggcc

SEQ ID NO: 634802 - DNA, 874 bp, Homo sapiens
catgtattcagcctcccgagtagcagtgattacctggtgtgcaccaccatgcctggataactttttatttatttctattagacaaatggggttcaccatgctggccaggcttgtatagaactgacctcaagtgatctgcctgcctacagcttctcagtgtgtgacctactgtgcttgtgcctaatgtacaactttttaagcaatgccacactatgacttaagaatgaaattattgctcattatgtatatctatctaccatcagtgtccaaagaatttcttgttgtatcttaccaagagggagtatggttagtattatgaaatttagttaattattataataagttggttaataacattattgagatcaacgatgtgtcttatgtttttggcatttattatgtattatgaggacaacagttctcgctctgtatcccagtgctagagtacctgtggcaacaatctcagcatcattgcaaacctctgcatacctggagctacaagcactacagggcccacacatcagaacatccccgaagataaggcttggaaattccatcggtagtggaacgcaaaccacaacctagaagataactatgaaatttcttgacaagaagggtcaaacctatcaatgccagaactggatcgccaacctacctgtgcaccagggcaaaccaagaccaaggccaacagatctcgtgaaacagggttgagacacccggcaggtgcgcccagaaggctgaaaaaaacgactaaacaagtaaccaacaaaactaaacaaatgaaaccacactatgggccaaacacacaaaagagcgacaagacaggaaaagaaaaaaagagagaggaaaaaccgcgacaggtcacgacgcgcac

SEQ ID NO: 634803 - DNA, 603 bp, Homo sapiens
  misc_feature (43)..(43): n is a, c, g, or t
  misc_feature (73)..(73): n is a, c, g, or t
  misc_feature (481)..(482): n is a, c, g, or t
atttcttttttctccggagcgcgccattgtgtggtacaggggnattcggccattatgggcgggccccattaanccctgggggaaggggggcccctttttaaccttttttttggggctaagggcttttttcgggtgggggaaacccccacaccgggggggcctttcccctctaaaggacactttgggggaggggaaccccttcggggggggggggggcccccccggggaaaaaaaaggggccccctttcccccgggggggggcgcccggggaaaaaaaaaaacccccccggggggggtctcttcccgggaaaaaaaaactttcttcttcccaaaaaaaacgggggaggggggggctttttttttgtgggggggggttttttaaaaattattttttcccccccggggggaaaacaaaacccccccccccccttggggggggggtgttttttttttttcccggaggaggaaaaaaaaaaaaaanntttgtggggggtttaactctcaccctttttttttggggggggggggagaaattttttttttttcaaaaaaatattttggggggggagagaaaaaaaaaaatttggggcgcccccccccccc

SEQ ID NO: 634804 - DNA, 173 bp, Homo sapiens
tcatgctcggtaccagcaatgggtggccgcagtggacgcagtcaaggctgtgcactcagtgagggctgagctgcccacgagtggagggctgctgaccagtgtctgagtgagtagattggtgacctgccagctgaacagggccctgcagggtgctgtgcttgggggttcctggg

SEQ ID NO: 634805 - DNA, 472 bp, Homo sapiens
tggctgcgccttcagccccgtgctagaatgagaacatatgagccaacttgagttcggaagggctgtggccacctcgtttcgcccatctacttttcaccttgccgtatctgattcttcaccaccgtattctcagtcacttccactaaacagtgccagtgttttaaggttctgtcacactcagtaacccacttctggttcctcattccgtgtcagtgatcagcagtagactgaagaatctaccttagatttgctccatactattaattagcttacaaaatgtctaagaggagctaagctgggatgccacataggcagaagccaggaaaaatgaccaaccacagaaccaagtggttccagtggaaactcagcagctgctggtgcctgctactggactgccaccccccattgaagagactggaccaccaggaaggtcgtttcacattctgtagtaaaaatacccctacaataaaaa

SEQ ID NO: 634806 - DNA, 221 bp, Homo sapiens
ccccccccccggggggggtttggttttttgccctttccaaccgggccttattacccaaaagggggggggggggttcttttccaccccgagcccattttccttttggggggggggggttttttccccccttttgggggggttttttttttccaataatggtgttttggcctttttttaaaaggccccccccttccccttttaaaaaagggttttttgggtta

SEQ ID NO: 634807 - DNA, 480 bp, Homo sapiens
cttttatccgtatgatctatttatgtgtgtacttgaaaatacctcggccaggcactgtggctcacgcctgtaatcccagcacttcgggaggctgagccgaaagctccagccagccagccagccaaggaagtgcttacatcacccctcctccaatcccaggcagtgcagcttacagctccaggggaaactcctttccgcttgaggaggggagaaaggagagtaaaggggactttgtcttgcaacttggataccagctcagccacagtaggataggggacaaggtagagtcccaaggccctcattccaagccctagctcccagatcacatttttagacatacccagggccagaagggaatgcgctgcccttaaagggaaggacccagtcctggaagaatttatcaaatccttccgaaggcggattgctttgagcccaggagtttgagatcagcctgggcaatatggcgaaacccagtctcca

SEQ ID NO: 634808 - DNA, 243 bp, Homo sapiens
ctaccggatgcttatgctcagtgatcctcgatagccagccatgtacgacatggcatgctaggctcttaagaaaactggatcaatgaaaatccaaacttaaataagataaatatttggacgcacaagttctcacggttcattatgagaactgtagtcatttcacataaaagctttgttttgcacatttctccaatcaacgtcacatttgtcatgtcaacagcacagcccagtctggcagttggg

SEQ ID NO: 634809 - DNA, 288 bp, Homo sapiens
  misc_feature (11)..(12): n is a, c, g, or t
  misc_feature (14)..(14): n is a, c, g, or t
  misc_feature (17)..(18): n is a, c, g, or t
ataggcagtgnncncgnntattgtatgtgtcccgaatgtaagcatcccaccccctgctgatatgatcgacggagcggggactcgatatggagacctggaactgctgctgcccgggaatctgaagtgctggtgcgtgggtctgcgcagcttcccgctacgcgagatgggctccgaaggtggaaccagcagcatgagaacctggagaagctgaacatgcgagccatcctcgatgccacagtcagcaggacgagcccattcagagctgctggtcacccatgggaaggtcct

SEQ ID NO: 634810 - DNA, 350 bp, Homo sapiens
caattttaaaattgtctttttatataaaattaaggctccggggtcatgatttttccaagctgttatattagttgtacccagtagtattcccattaaatctggcttttttcccccttaaaaaaagaaaaaaattcccaaccaataaacttggctagcccttgttttgaggattttccaagcccttggaagcgataaaattttttttctccattgaaaatagaaacggctcccttttttctttccagtcagctattggtctttccagctgttataatctaaagtattcttatgatctgggtaagctctgaatgaacttctttacccaataaaattaattttttggcttctta

SEQ ID NO: 634811 - DNA, 123 bp, Homo sapiens
accggtcccatgcgcagtgtatcaaaacttcaggcagctcaggagaccccatttcattcctgtacagctgggcaaaccaacctagggaggccactgtctcctaagccgtcatccccgggatca

SEQ ID NO: 634812 - DNA, 292 bp, Homo sapiens
  misc_feature (25)..(25): n is a, c, g, or t
  misc_feature (128)..(128): n is a, c, g, or t
  misc_feature (155)..(155): n is a, c, g, or t
  misc_feature (175)..(175): n is a, c, g, or t
  misc_feature (209)..(209): n is a, c, g, or t
  misc_feature (232)..(232): n is a, c, g, or t
  misc_feature (238)..(238): n is a, c, g, or t
  misc_feature (263)..(263): n is a, c, g, or t
gcaatgaatgactggcaccctgaanccgaaaccctggaatgggcctgcgcagaaaccacccaacccgatactatacacgacccgattctatgcccatcgacagcttcaccataagcagcaacggtaanacctgcaatggccagcgtgggaaggangcatggataaggcctgtggntctttcacccatgcattgttgtatttgctgtatnacagttagtgaggggtggggganactggnaaggtctgccttccattctccacgnaattattcaagtaaacttactttcctgtt

SEQ ID NO: 634813 - DNA, 236 bp, Homo sapiens
gggggagcaggggttgccccggggcttgggcccagggggccgggggggcgggcccaaaattggggtttcgagtgggggggcccaaggccttgtggcttcctatgggggattgatgcctgggggccccctattgctttttgggcccctccccccaggggggggtggccccccggggcccttggggctttcccctttggggtttggggtttcccaataacctttttggccccccctta

SEQ ID NO: 634814 - DNA, 248 bp, Homo sapiens
gatggagaagatcagccgaagcaagtttatgtaagatgaggtgggtgaataacgagtaagtgactcttgagagcagaggtatccagaacccttgttgaagcttcctctgaggagctcaaatctgggaggaattctcaagtacagacagactgaaaatgatgtgtgatgaactaaaataaaccctttatgacttaggctcattatcattctcacttttagaaccttgtaataacaaaatgatttttctg

SEQ ID NO: 634815 - DNA, 657 bp, Homo sapiens
gtagaatcgagctcggtaccggctcgcgagcagatccaagaataattggtgtcctgaggaagaagataaatctaaaagttgggaaacataattgaggaaaccttgcctggctcaccagagaactaaacatccaaatacaagaagctcaaaaaacacctggtaaattcatcacaaaaaaatcattacccagtcacatagttgtcatcaggttatataaagtcaagaacaaaggaaagaatctcaagagctgtgaggcgaaagcatcaggtgacctataaaggaaaacctatcagattaacagcagatttctcagcagaaaccctataagccagaagtgaatgggggtctatccttagcctcctcaaacacagtatatttcagccaagaatttggtatccagcaaaactgagcttcataaatgaaggagagataaggtcatctttcagacaaacaaatgttgagtgaattcatcactaccaagtcagcaccacaagaaatgctaaaacgagatctaaatcctgtaacaaaacctcgaaatacaccacaatagaacctcgttaaagtgtaaatctcacaggggctactaaacactaacaaaaagaaaaaacccagatgttctggcacagctagcacggggataaaacagtactcacatct

SEQ ID NO: 634816 - DNA, 1736 bp, Homo sapiens
tgacggtggtgtgtgatcacctgaggtcaggagttcaagaccagactgactaacatggtaaacaccccatctctagctaaaacatacaaacaacaattagctcaggcggggtgtgctgtggcatctcaattccagcatagcttcatgaggctgcagcacaggagaatcatatgaactctgggcaggcagaggttgcagtgagcctgagatctacaccattatgcacatccgagccttgtggctgatgagcagaagactgtctcaaaagcaaacacaaaaaaagtcgggagtgtcatcgaatgagtagattggaccatgtgcttgggtctcgaaaactcctttgagcctcatctgtgcatcacttcccaatactgtgagcacatcaacaaagaagatggtagggagaatataccagtgagcagattgaggaccaagccaagcaacacacgtgaactgtgtgattgtgattgatagctacatattatacgaacatacataagacgagtattatacatgggtttaagagagatggaaatggagttgttataagagagttaaccaaagcgttgattagaagaaaaagtaaagcaagcgcataaatacgaatctaggactgctgtgtaagtaaaacgatataaaagacaacaagacttatggcagagctttatggtagagccaaaagagaacgactattagataagaaataagcataagacgaggcacaagataacattatcgcagaggagagttttcaaagaatatagatagggggaaatagcattaaagatagatgagattcgagatgtatctttatagcaagttagtaaaaagtaacaacatcaattggtagaagaaagtgggaaaagcagaggatataacgtttattaccaagatatatagtacacagtatgaaaggtggattggatgaacataaagatggtttgcatcatattaggagaatgagaagagggaataaaataatggtgccaccaaagaagaagacaggtattggatgcaactattgtagaacgagtatcagtagaaaatagtaaaggtccaatatatttggagaagataaaaaagagggtatagggttaggaaaagggaaaaaaaagcaggagaatatatagataagaagtatggtggccagaaagagtagttgggtaacatcaaaggatgtgattagacaatgagagctatatagaaactatagcagagagagtaaaaacagaaataataagagagtataagaatagacgatagcgaattataatagaaaatctatcaaaaatatgggaattatatgaaagagatatattagtcaccctatgtaagaaagaagaagggaataatatgataaaagataggagacatagtgaatggtgaagaaagaaaaggagggaggagataatgtggcatatggaacaaatgtagatagtaagaagaatgattaagggactgaaatagatagtggagatagagaaggtaacgaagcaagcaaggtagaagaggctaagatgatgaagcagacaatagagtcaggaggataggataaataaggaagaaataagagatgagaataacagaatgaagacgaaagaagaagagagtatagagagaagaataaaaagaataagtaagtataagaagtaaagaaggactgagaagagaagcgagaaataacaaatgagtaagaagagagaaaaatgtgagtaagcttttagggaagaagaaag

SEQ ID NO: 634817 - DNA, 129 bp, Homo sapiens
cattgtctccctggtttattgtacagcagaacttttctgtttgtcatctgagcataatcctatcaggtgtctgtggttattcatggggcagataaacaaaccctgaaaagtagggtatcgaggctcgaa

SEQ ID NO: 634818 - DNA, 197 bp, Homo sapiens
ggctggtctcaaactgctgacctcaagtgacctgcctgcctcagcctcccagaatgctgggattagaggtgtgagccaccatgctgggccctgtgtttctcttgtgtgtgtgtgcactcgtgcacacgcgcgtgcctatgcacacacctgcttgggagtcaaattaatcaggaatgctctcctttgagggagaaagg

SEQ ID NO: 634819 - DNA, 236 bp, Homo sapiens
ggaagatcatcaaatagcagtagggcaaaaggcagaatttctctctttctcatagtatttgctgtagtaccacacatgggtagactagaacacctggagcagaggccccgtaagcacactagaataaggcctcatatatatacatggaagcaatgatacttctaatacactagtataactacctatatatagttggtagaatgactatacttataaatagtactagagaaaggaca

SEQ ID NO: 634820 - DNA, 103 bp, Homo sapiens
tcatcagttaacatgacaacgtcttgataaagatgcacctaactccaagatttagattaaaatatctaatccatataactagttacaggctcatgtctcacta

SEQ ID NO: 634821 - DNA, 338 bp, Homo sapiens
ttcgagctggtacccttatgttctgacccaccctagtacatagggagacctccatctccacaaaaatattttccaaattaggcaagtgtggtggcatgcacctgtagtcccagccacttaggaagctgaggtgggaggattgctagaacccaggaggttgaggctgcagtgagccatgattgcaccactgcactccagcctctgtaacaaagcaagaccctatgtcaaaaaaaaaaaacccaaaaaacaagaaaaggaaacactcatatttccccaattttctttagtgtgccgggttatgtggcaagtttctcttcatgtgctcaacttccagttcc

SEQ ID NO: 634822 - DNA, 471 bp, Homo sapiens
tgtgctgtgctgtgtgtgctgtctgtgctgtgatgtgctgtctgtgctgtgctgtctgtgctgtgctgtctctgatgtgctgtgtcgtctgtgctgtgctgtgctgtgctgtctgtgctgtgctgtctgtgctgtctgtgctgtctgtgctgtgatttgctgtgctgtctgtgctgtgctgtgctgtgctttatgtgttgtgctgtgctgtgctgtctgtggtatgctgtctgtgctgtctgtgctgtgctgtctgtattggttgactgtgtgaattctgctgcttgttttcatccctccacatctgaacatttgtttgcagcttaaatggactattgttatttctactgttttccccaggcatccaagcatctggcttccctgtgtgtagactgatacatcaccctgtgtctccttgtctcagtgttgtactgtaaatttttagtcgacccggccgcgaatttagtagta

SEQ ID NO: 634823 - DNA, 230 bp, Homo sapiens
gcacgaggagagagagagagagagagagagagagagagagacacaagaacatattatatagtttcaaatagctggaaggaggatattgaatgttcccagcataaagaaatgataaacgtttgagatgatgaatgtgttaattaccctgatctgatcaccacacatcatatgtattgaaaccccctaaacgtgttgataattatgtgctaataaagaaattagaataaata

SEQ ID NO: 634824 - DNA, 384 bp, Homo sapiens
ggctgtaaattacagacccactcttgtgctaactagtccccgtatctctgaataacccatgaatctgagaatggactcaagcactgtcctaaaggtctcgcctacttatcacgccctgtcattgggcaccaagtgatccaacagatgaacgtctgggggacacattcaaatcgttgcggggtattaacgcgaagtacaaagaagagagattagctgtcaggtagtttgcattatacttggaaatgatatatgaattggtatggttacctattaaacaagtgtgttagagtagcctagcagttttcaaagtgtagtctgtggaatcctagagaatagactcctttcatggagtctgtgagatcggcatagtgtcatactaatact

SEQ ID NO: 634825 - DNA, 320 bp, Homo sapiens
gcaactagtacggaagggtccccgaggttggggagagccccaagttgagaactatgtataaccacttattgtctgaaccacttgtttcgatactcgttgatcatgaacgacctgtgtgtaatatttcttccctacaaacgtagcacccttcagcaggaacctataaaactttcctccagcccttggctctttgcaggtagccccttctctgctgagctgcccactgcaacatattttcacaatttctctaataaatctgcccttctttacctacaactatcttggtaaatggctttaccacctgcaaaactgaccctagg

SEQ ID NO: 634826 - DNA, 152 bp, Homo sapiens
gggtccagcccggtgttgccctgttgcccccctttgccaggggctaaacaagtacaaaggtttttttggggttgtaaatggtcctatttccccccctttttcctgtcccatgccccccccccctgtttttttaaagggggggctggtggtga

SEQ ID NO: 634827 - DNA, 1303 bp, Homo sapiens
cacagcagtcaggaagagaaagaggaggaagaagaagaggaggaggtgcgaggatgagtctctgtgggcatggccagcgagctcagtagcgcgggtccttgaggcctcatctccccactgaggcaacagcccaggagaagtcactctcccaggcgcctagtaagggcagtccgtgctaagcctggttgcaatcaatcgccgacgttcctgatggatgacgtcggaagcttcgagtgcctccaagggtccatggaacaccttactgagactctgcccacgtcccagtggagaggaaccttagcatccccattagcttgcccactctggtatgaggcaagaagcaggtggggtgagtgccaagattggtaggtcgctgagcttatcgtagggagtacccgtcgaaggcagaaggagcagaggcagaagaggaagctcctgtaggtgttgtctccctatcccatgacttgcaagcccgactacgggtgccccctggaagggtgtaccagggggagcctgagaagggcactccacttcctgagagataacttgctggaagaacgtgccactcagctagggggagcctcagatgcatggctcgcagcacagatgctgcgccaacgtgacaaagctgcacaggtcgcggcatgggtggacggtggccagtgcgtctccacgtcgattcacgggctgaactcgtgtgtcccactagatgcgctgtgggcaacaatagtgggtgcggacattgcattagtgaggggaagcgaggaacagggagttcccgggtgccgtaattgttcgtggcgcgtggaccctattgggcggagggagacagtggtgcacgagatgttagtgcatcccggcattcaatgggaacccccgggcctgggggaaccggccctttcctaaggggacgccaccttgtaattccaaaaagacgacatttgggacccaaagagggaaaaggaggacagccttgggaaaacacggaaaagggggaacgaaggacaccggcatcagatgggccggggacatgttataacgggggcgaccggcaaattttatgtgggccaccgacataatcaagggacacacacgacacgaatggggaaacaacggggaaaccgtgtagtcacttcacaagacgaaacgcctagcgagatagcccgggagggaatcgtagccaccaacggaggaaactgcgggacataccaacagaaacaaggggagcacacaaattggaaaagagggagaaacgatacatggtgaggtggaccacaggaatgtgaagataaccacgcaagtt

SEQ ID NO: 634828 - DNA, 839 bp, Homo sapiens
taaagatctgtgaccggcagccccagacctgcctgcttcctgacttctgttccagatggcaaaggtcattcatccgctctgaagtcagccttttccccccacccggtccccaacttgtgttttacccgataacggaaggtcagcattcaaagtctagagaagtcgccatttatcttcccgtgcgctctacaaatagtgccgtgagaatagatggccgggaagctcgatcctgctggtctgctgtctctattcctcttcgggctctgtcagaccagagttatattgctttgcaaagttggaaaggcatatgattacaacttatcacacatgttactgcccccagcagatcactgggtcaccagagtttgacagagtatcccgggcacaacaaaactgtgtggagtttgactcctatacttcagtaattacacttgtggatggctgggtggtatttcaccctggttttggctacttgtctgggtctggtgtacatattggccgtcacctatagcttctggggggatattcacgcacatgctgctacgaatgacggctcatcggtttccgactgagtctgcggattttggccttgttgaccctcctagcgtgccctgtagaattgcaaacagctttctgggatgaatatctgggacctcgaatatttgccaacgaaacttgagcgtcgggcaattctagcttttatctctttcccctttaatgcttgcagaaagcttgttccccacccattgaatcgtacctattggtcatgcttctcgttcaactcccaaccgtaccgttctttattcctgtctcctcttggaccactatacacaaccccg

SEQ ID NO: 634829 - DNA, 803 bp, Homo sapiens
  misc_feature (162)..(162): n is a, c, g, or t
agacaaaaaggagtgaaaataccttctagtagtattgacctcgtctttcattatttcactagagccggcaaaaaagttaatgtcccaattgctaaagcacatgtttggttaatagtcaaagtcattagtcaaagtagaaacaaaacattacctcaagcaaantggtggctcatactcctagaatcttttcgctccgacagacttgtctatactatgcatatgtcatacttgtgaccaacgtggcagtaagcaaataaacatttagagtgaacacaactttagaagggaggtttatgacgaagatactatatgtgtattatctgataacacctgagttcatgttaacatcatattgtcggtactcacggtcaagtaatgtagaatttcgcatagaatatccttgttctatagtgtgcacaacactgtcgaatgcgaaaggaagtgaacaaatctcatactgcctctttagtgcaatcgtgtataagagtgccagacgaggaagattgttgcagtgcataatctaatgtgggccattagtcacatttttttaggctggtggcagttcttagcacttgcaaggtaacaattcgtgtcagtgtcctcctttctgtaggagcatcatttgagtataacaagaatagcaagtgggatcatgtcagaaattttagcctaaagtcccaagctcccagatttgactgtgagtggtaaagaggaggcaaatggcaaccttgaggacctggcagtttccctgctgatttgtgttggcagtttaataattccatcaaaggagcttgcatcatcag

SEQ ID NO: 634830 - DNA, 410 bp, Homo sapiens
cgagggtgacgacgaggggatcagcgtcattcatgctgtcttggtccactgtagccactatgagggcttcctagtgctcacgtgggcactatctggacaggctttaggttgcagatatgtgtaagtgaaaacattcctccttggttctccttccctctgggtgcaggggagtgctttctctttgtctacttgggcgagagctgagtagtggaaaccaggcctctccatgcttgtggggctagctctgcagttgggagactgcggagggtatgctcagcagttcccagactctggttgtctgcgttggtagaacgaaaggtccatcatgacgatatcttgcttcgtcctctttggtcctgtcgccgtggatcttgatgccgtagtgcttagcagtggatccactactctgg

SEQ ID NO: 634831 - DNA, 1234 bp, Homo sapiens
  misc_feature (433)..(433): n is a, c, g, or t
  misc_feature (447)..(447): n is a, c, g, or t
  misc_feature (467)..(467): n is a, c, g, or t
  misc_feature (491)..(491): n is a, c, g, or t
  misc_feature (567)..(567): n is a, c, g, or t
  misc_feature (1180)..(1180): n is a, c, g, or t
cgcggtggctcacgcctgtaatcccagcactttggggggccaaggtgggcagatcacgaggtcaggagatcaagaccatcctgactaacgtggtgaaaccccgtctctactaaaaatactaaaaattagctgggcatggtggcaggcgcctgtagtcccagctactcgggaggctgaggcaggagaatcacttgaacctagcaggcaccccactgcactccaactggggcgacaagcaagactgtgcctcaaaacgcgcgcgcgcgcgcacacacacacacacacacacacacacacacacagcctgaggaaagtgaagaatggtatcttagagaagggagagtttggttgctgtgcaggatgaaaaatcaagtttgaatagatagactggaggtcatggaggatctcttgtcatgctgaaaacattaaattntattgtcttaacanatgggcaacaatagcagttntaagcaggggagaatcattatcanatgtgtatgtgtttcaatctagaggcacctgcgtagtgtgtatgtgggtttagagtctgaggagaagactggttgncacgatgttataataaccctgaataggcccggcgcggtggctcaagccctgtaatcccagaactcgggaaggcgagggggatgatcatctgaggccggaggtcgggaccacctggcaacatgggaaacccgttctaatttaaaacaaagttacaaaaaaacaagcccaagaaaaaacatgtggccgctttggcccaggactttgaatcggcaagttatgatggggcccgaattgagtcatttggcaaatccgctaaggggggggaccaaattaagggccgctgttaaaacgtgggactggaaaaacctggggtacccacttaaagcttgggaaaaacccttttccgtgtgggataccgaaaggcccccctagcgctttccaaattggcccctctatggcatggaaattgggcggtaatttgtaaatccgggaaaattggtaacagcttttttaacaagggccaagcggaaactcttatactgaggggaaaccctttaagcggggctctcgggaacaccctgattttttcgcgggcgcaagactaggccctatggacctctcttatattgcgggagcgcacctgcgcacagggtatctagtcctcatccggctncttatattctgaccgcgttatcaccccctcttctctcctcgctgcgtgcgctcg

SEQ ID NO: 634832 - DNA, 154 bp, Homo sapiens
cagtattatatctaatatgacggtctcccagtatggtgatcatagtatttaataactccattaactattggccagctaaatagtagtattgaaactatagtccttactatggctaagggaggcaatgaattttttttaacatggtatgtttact

SEQ ID NO: 634833 - DNA, 590 bp, Homo sapiens
  misc_feature (46)..(46): n is a, c, g, or t
  misc_feature (53)..(53): n is a, c, g, or t
  misc_feature (117)..(117): n is a, c, g, or t
  misc_feature (120)..(120): n is a, c, g, or t
  misc_feature (155)..(155): n is a, c, g, or t
  misc_feature (176)..(176): n is a, c, g, or t
  misc_feature (190)..(190): n is a, c, g, or t
  misc_feature (195)..(195): n is a, c, g, or t
  misc_feature (198)..(198): n is a, c, g, or t
  misc_feature (217)..(217): n is a, c, g, or t
  misc_feature (223)..(223): n is a, c, g, or t
  misc_feature (228)..(228): n is a, c, g, or t
  misc_feature (251)..(251): n is a, c, g, or t
  misc_feature (260)..(260): n is a, c, g, or t
  misc_feature (287)..(287): n is a, c, g, or t
  misc_feature (289)..(289): n is a, c, g, or t
  misc_feature (293)..(293): n is a, c, g, or t
  misc_feature (314)..(314): n is a, c, g, or t
  misc_feature (324)..(324): n is a, c, g, or t
  misc_feature (343)..(343): n is a, c, g, or t
  misc_feature (351)..(351): n is a, c, g, or t
  misc_feature (363)..(363): n is a, c, g, or t
  misc_feature (367)..(367): n is a, c, g, or t
  misc_feature (376)..(376): n is a, c, g, or t
  misc_feature (383)..(383): n is a, c, g, or t
  misc_feature (403)..(403): n is a, c, g, or t
  misc_feature (451)..(451): n is a, c, g, or t
  misc_feature (475)..(475): n is a, c, g, or t
  misc_feature (480)..(481): n is a, c, g, or t
  misc_feature (483)..(483): n is a, c, g, or t
  misc_feature (485)..(485): n is a, c, g, or t
  misc_feature (495)..(495): n is a, c, g, or t
  misc_feature (498)..(498): n is a, c, g, or t
  misc_feature (503)..(503): n is a, c, g, or t
  misc_feature (506)..(506): n is a, c, g, or t
  misc_feature (510)..(511): n is a, c, g, or t
  misc_feature (514)..(514): n is a, c, g, or t
  misc_feature (524)..(524): n is a, c, g, or t
  misc_feature (527)..(527): n is a, c, g, or t
  misc_feature (560)..(560): n is a, c, g, or t
tccccggcgccgcccggggccctgagggctgactaaggtccagacnggggggnacgggacagacgaaccagcacccgtgtaggaagcgcgcacaatgccccgctacagaacatcacnccncaaaatctgccccaggtccggccgggagcaagganaaaacgggaccgccggagccnccggactcctttgnatagnccnggcgctggcgctggcgctngcgctngcacnggcgctggctctatctgactctngggttctcnaggctccggcaaaggctcaccctcttncncccnaaagccaacctgacaagttanatcacaaaangccccagctccgaaaaatntttgggtnggggaacctcanctanccaatctanaaaagtntattcaccgccatcaacctngggctgaagaaggaacccaaatgtggctcgcgtgggctccgtggccancaacctgtgcaatctactaaaaanaacannancnaccgtatgcnaanccatnatncaannctntgaggataanatngtagaggtgtgaagacgctcaatgctgacccanctaaagcctgtggctagctcctgggctcca

SEQ ID NO: 634834 - DNA, 349 bp, Homo sapiens
atttaatctttttgtcggaaaacctcccatctatctgtctagctaatagattctcagtctcataccggtgtaaaacgttccatgggaatatgagcatagttttattcactgctgtatacctggtgctttgaatagggcctgccacaccatagcatgtgctttataaatatattattgaatttcaggggaatacatttagaactccagactgttagatcagcctagaaacacctcagataatcttacttagtagtatcagtgaggctctacgagctcctctgataaggaaactggcactgaaggtgggcgtagcggccttcagatgtaccaggcagctcttgccgtaacc

SEQ ID NO: 634835 - DNA, 847 bp, Homo sapiens
ggggctttcaggaatttagtaaaaggtggagtatggcctttccagtatcttccatcttcctttgtatacttgtccttcctcccatttcctccctttgggtccgaggtaggagtgatggagggagagctgctactctaccacttcctgtgtgcctctactgtgggctcaaccctgagcagattatagctactcccatcccttacctgggcatgtgtgagcccttctcactgcattttatacccttgtgtctgtgtacttgcataatatatatacatataatatatacaactatacaaactttgtacaaggaaggcaacgcctcctccttgatggcagactgttgcccattgtgttagtgtagggatcttgtgtcgttgtgtctgacaacttctcattagcccagcttatgatgttctagggatataagacattagtaacatcgcaaaaatacaataagtcattccaccagaaacgaatgaagtcgtgccggcgctacggacattcctcgccaggggtacctactatcttctgatcaccgccctttctctggctatggctggggcaccgcctacattggaggacccttatactagcgcaatccgcgcttgccctggcctgctcatcgcccccaccaggaggctagacatggacccaggcgttgtcctgccgacaggaatgacccaccgacctctaggagggttggcccatactcggctggcctctccccacggaggattgatagacttgtggggcctgatctcacctccccgcgctcgtcacgctcgctccccaggccactgttcctggtccgttcaaccgattcgctcgcgctcctcttacgaatctc

SEQ ID NO: 634836 - DNA, 80 bp, Homo sapiens
gcgtggtcgcggccgaggtacgcgggattacaaataagattgttatgtcagtattgttattggcttttcgtattcctctt

SEQ ID NO: 634837 - DNA, 111 bp, Homo sapiens
gattcccccgcacatcatgcacaagtcagcgccataccggcgcctgctcctcgggagcctgctgtttatcgccgtcatcgcgctgctcggttgggacaccctcaagtcgcg

SEQ ID NO: 634838 - DNA, 364 bp, Homo sapiens
  misc_feature (242)..(242): n is a, c, g, or t
gaaagaagggggttcctcggtcatacaccagtactaccaaggccagctttttttcctgcaaagatactgttaacctaaggcggtaaaaaattggccagaggatcagtgtccgatgaggaattgttggagctcagagaggcttttgccaaagttgtatattgatggcattggtatacatcagcttccattgagttgagtgactcgttcagggctgctcgctcgcctttgcctggatatagagngcgagatatcacagagaccctgatggctacaggtgatctggcccacgatggagggctcagctttgatgagtttatcaagatttcccatggcctaaaaagcacagatgtcgccaagcccttta

SEQ ID NO: 634839 - DNA, 225 bp, Homo sapiens
  misc_feature (61)..(61): n is a, c, g, or t
  misc_feature (71)..(71): n is a, c, g, or t
  misc_feature (73)..(73): n is a, c, g, or t
  misc_feature (83)..(83): n is a, c, g, or t
  misc_feature (100)..(100): n is a, c, g, or t
  misc_feature (102)..(102): n is a, c, g, or t
ccgggttcacacctggcaaagaaaaggaacaggaacaggaaaaagggatggaacaagttanaacagggcananccgggtgtcnggggacatgggttggtnanaccacctgccacttactagttctatgaccttgatcaacaaattcaccctcctaggcctaggttccacatccatgaaacaggattgtaatggatcgtacctcacagtcttggaaggaccaaatg

SEQ ID NO: 634840 - DNA, 359 bp, Homo sapiens
aacatagacaaattaaagtaagaccttgattaggtgtatatccgctatgcttccgccttgagtaagtatacacagaattgatcgaacttgcctgaacgcacttcacaactcatgaaagattaagtatccagcctaggcatggtgggtggtgaggcatgagcaacctgctgatttatgcctgtgaatgatggagaagtctgcaacactgtatccgtgtgcaatggggatacatgaagaagtagctagaaagttagacaagtgagattgtaccatgttcatcttgaatgcattggagatccatgtctttgagcaaatcgctcaggtccgtggaacaataaatctatgtattatccaaagag

SEQ ID NO: 634841 - DNA, 296 bp, Homo sapiens
gatcccccatttgggcatcactggattctgtgggggggctttgctatgggacggagggtgcacagaggtaggctggggttggagtaggcggcttcctcgcagatccgctggcggagcgcttgatgtggcggagcggggcaatccacttggaggggtagatgtcggtggggttggagcggctatgatgcacctgtgaggccatatttccgtgcagcgccattctggggggccacggaaggggcagggttgcgggcagacactgatcttggccacgcttggtgtccacaatggccctt

SEQ ID NO: 634842 - DNA, 814 bp, Homo sapiens
  misc_feature (35)..(35): n is a, c, g, or t
  misc_feature (247)..(247): n is a, c, g, or t
  misc_feature (249)..(249): n is a, c, g, or t
  misc_feature (263)..(263): n is a, c, g, or t
ctaaacgcccccttctcaaacatttgggtaggtgntaagcggtcataaaacctcagctggggggacttccaggtaaagatgacagattaaactatgcatttacttctgttctttcccgaaaccctactaaaacatcagtgaatggactgaaattttttaaaaggcataaacccacaaagagaaagagatgttgtctctgtgttgtccaggctgctcttgaactcctgggctcaagggatcctcctancntagcctcccaaagngctgggattacatgcatgagctaacacacctagcctctgtgagtaattttaagactttccttgactctgccctggcagaagggtaaatagaggatctgtggactagggagcatcaggtatagttgataataaggctacccttcagaaaacacagggttctttataggccaaatactgacacctccctcccccagaccttttttcccactggttcctaaaaaactggccgccagactagtaccctgcaagaagatggtaagatgatccttctctggagaatctgaccagcccaaggagaaggagctaaagacactgacatcagagtcccccaatggtccacccaattcactccatagtgaaccccatactagcaagcatagccacaagtttgtaatcagctagttaaggctttgcttttagctatgatcagacactcagggatcaccaaacacctgaagaatgcccctaacataaaagatggagaccaaaacaagcaagaacaaggcaattcagaggacataagagaatccacagggagaagaaaacttaaa

SEQ ID NO: 634843 - DNA, 235 bp, Homo sapiens
atgtgatctggaggatcctccagaggcacaagaggttgggcggggcgttgctgggggaaaacgagaatgggtacttgagtctgaagcttaagtggccagtgccacagggggcggggagggggtgtcaggccctggacccatgcccaggacagaaaagcaggagcagaacactatcccaagaaagaccctacggaggagctctggaggcgcaggttgcaggcaggaacgttacacc

SEQ ID NO: 634844 - DNA, 496 bp, Homo sapiens
ttgcctgtgaaaggcatgattgttcttcttgaagtcacatgcttttgatttctaaaccatttccattttcatttgttcaacctgttctccctgtttcattcctcttgcttcacgatgttacaataagaatgcattcctagttgtagacctaaggagcagtgtaaggcagggaggcattcccacaacttccttgagcctatcttaggcttaattaagcctatcataggcttaattggtcacagggacagaggttagtcccaaatgataagaaggaatctgtttctacaaatggagtggcccttggggagagcttctgtctcatctttccaccagcatcactgtgtgaaccaggcatgtctgttctctgcaagttaaatttgtttgtctgagtagtagggaggagtattatctcctagccgtctagaggtgccgatgaagctgttcgataaaagcagagttacacgtttaaaaaaataactcaacatcgctgatcact

SEQ ID NO: 634845 - DNA, 142 bp, Homo sapiens
ttttttcaccctcttaagcggacccatctctactacaggtaaattaatgagcagggcttgtgcgcgcgttgtactcccagctactcgggaggctgaggtgggaggatcgcttgacgccaggagttctgggctgtagtgcgct

SEQ ID NO: 634846 - DNA, 382 bp, Homo sapiens
  misc_feature (168)..(168): n is a, c, g, or t
gggaaggtgatcagaaacaatgcctcccctgattttgccttttttccaaaggcacacccctttggggggctttggcctatagggaaaatgccacaaacttttttcattctgaaaggctgtgtggtgggaaccaaaaaacggggtggtccccctcccccaagtcctttntggggcaaaaaaaacggcggggtttggaaaaaattgaccttaagttcatttccccccctccaaggttgggcatggccgctttccgaccatggaggaaaaaaaagcatttttggggccccttaaaaaaaacccaatttcaaaggaaaaagggggtttatgcccgggacaaattttgcaggtggggggggttcaataaaaggtttttttccctgga

SEQ ID NO: 634847 - DNA, 1483 bp, Homo sapiens
  misc_feature (1)..(1): n is a, c, g, or t
ncctctatgatgctttgttgagacgacaaaagcaaaaaacaaaaggaagggttttttatattcgctgtatccaggtccgccagccaagaagacaatctcctgtgttggctgtagaccagccaaagaaagactcctggggttgtttcttgtaaatacaccccgccctggcgccgcccctctgtgtgtgtgttcatcaatacggggagagtgttttcggtggttatgttcaagaggtgggaggtaccaacatttttcggaggaacacccccgtgcttttgttgacgtagtatatccacctgcggccccccacattttttccctatctaccagaaatttgttgtgtgctccaaccacaccccaccaccccctactatataagcctccccctccacccgggtacaaccccttttttcttatcccaactaggagttttttggaaaattactttgttggggtttaacacccctaaaagaccccaatttccataaggactttcctagccccctttttatttccgtctcccacaacggtattttcccccaccaagaagataccttctgtaaagcagtaaaaatacgttgcatcggcaatagtccaaaggacccccctttctttataggagaagggaaaaagaggggggtcaatatcaacattcacagcgttgggttctcggggaaatagggccgccttttataaggaaaaaataaatgtttcgctcccccacagaggaactcttttgcccccaaaagagagaattttctcgtggtttcccaaaaagcccagggtgaccgccctcgtttataacaaataggggtgttgaaaagagagaggccacagagaggagagagaaattctctttctcgggtgtgcgcgcaaaaagaatatagatgaagatactgagacagataggagagagaccacttctctgagaggtgtgtgtggttatattatccgagaaggcctgccccacactggtataccccacaaagctttgagagagactgtgttaaaagctcacagagcacacactcgaggagatgacccgagcacatcgagatattttgaatcgcccacatgttaaaaaggagagatgagaatgcacacaccttatggccttataccacgtaataaattctccgcacaaattttcctcccacttatatcaccgccacagagaagtgcacaacacacgtaatgtgcgccacaaagctataaaatggcgttaaacactcacatgcgtacacctttaccacctataaaatcttacattatcccgtgagagtggttctgttatattatagcccacactgaggacacttctatagggaggtccacataacacacactcacgtgagcacagaatgtatgtttgcttaatttaatagcacacgtttttttttgaaaaactagtggtggaccacatttggatcaccaatttataccagttattaaaataaaggtttgattttggtcgtttcttcca

SEQ ID NO: 634848 - DNA, 1231 bp, Homo sapiens
  misc_feature (870)..(870): n is a, c, g, or t
  misc_feature (877)..(877): n is a, c, g, or t
gatgaccagaactgtgacgagcggcgtgtggggtgagttggtctgtgggcagtagggcctaattgtggtggctaggtagagtcttgagttgatgcattgatgtggtggctgtaacgtggaccagtcactggagatcctagcgggaggagagttcgcctggatgtgtgtgagaacactggccattactggcaggttctgaggctcatctacatggtactcttactacgagaagggagctcctatacgctggtctcgcagtatccaaatcatggctgaagaacaaccgcaggtcgaattgttcgtgaaggctggcagtgatggggccaagattgggaactgcccattctcccagagactgttcatggtactgtggctcaagggagtcaccttcaatgttaccaccgttgacaccaaaaggcggaccgagacagtgcagaagctgtgcccaggggggcagctcccattcctgctgtatggcactgaagtgcacacagacaccaacaagattgaggaatttctggaggcagtgctgtgccctcccaggtaccccaagctggcagctctgaaccctgagtccaacacagctgggctggacatatttgccaaattttctgcctacatcaagaattcaaacccagcactcaatgacaatctggagaagggactcctgaaagccctgaaggttttagacaattacttaacatcccccctcccagaagaagtggatgaaaccagtgctgaagatgaaggtgtctctcagaggaagtttttggatggcaacgagctcaccctggctgactgcaacctgttgccacgttacacatagtacaggtggtgtgtacagaagtacaccggggattcaccatcccngaggccnttccggggagtgcatacgggacttgagcaatgccagcgctcgggaagaatctcgactgtccacctgtccagatgatgaggagatcagagctagcctatgagcaaggggcaaaggccctcaaataagccgccatgcctagggactgcccgtcaaccccgctcacatgtgtctcatccacaaaggcccctggctggttatccacacttgctacacgctatggacacactgccaaaagtggccagtgggccagggaatcacgtaggagcacttgttccgggatggtgatggtggaagaggggatgagggaaagaaatgggggcctgagtcagattataactgtggggtgggatgact

SEQ ID NO: 634849 - DNA, 447 bp, Homo sapiens
ttaaagaggaggagacctccccaggccatttagcaaccccagggtcaaggggcccgagagagttatcaaatgggacacattaaacgctaactgcagcttttgccttggtttttcctagggcccacaatgggaaaacttccctccaaaaagaaacctatttagttattatttcccaactaaaccctccccaggtacaggtgaagaaaaaatggccagaggtcatatcctcagccccggtgggatttctttaattttaaagcccgaaaattcccatttgggggggggagggggaaaaggaaccccatttttttatgaacaaaaattttttacttaaaggcccaaagttttaaaaaattattatgggccccgggttccctgttttttggtggggcatttttttcacctgcaggcaaaattgggtttcaataaactttttcccccaattga

SEQ ID NO: 634850 - DNA, 114 bp, Homo sapiens
gcaaaacttaaccatgaactttctgatattggctaggagagcacgttggagagatcctgatgttgctatcagcaatctgtctgaaacggagagaagttggtcatgcaggaggag

SEQ ID NO: 634851 - DNA, 224 bp, Homo sapiens
tatgtcgatggggtaggggtggtgtgcaaatggaaacctcaggtaacctggacctccaactttagaagcccagagtacaggagaggtggggccttgactgccaataaatacaaagcttcgtctgccttgtaacaaaggcaggtgggcttagggcccgggagcctgacggcccaggcccacttggggatggggagcagttatcactcctctgccaatcaacaggg

SEQ ID NO: 634852 - DNA, 996 bp, Homo sapiens
  misc_feature (6)..(6): n is a, c, g, or t
  misc_feature (9)..(9): n is a, c, g, or t
  misc_feature (11)..(11): n is a, c, g, or t
  misc_feature (13)..(13): n is a, c, g, or t
  misc_feature (18)..(19): n is a, c, g, or t
  misc_feature (23)..(23): n is a, c, g, or t
  misc_feature (25)..(26): n is a, c, g, or t
  misc_feature (635)..(635): n is a, c, g, or t
  misc_feature (642)..(642): n is a, c, g, or t
gagggncgncnanttccnntccncnncgcaaccatggctgaagaacaaccgcaggtcgaattgttcgtgaaggctggcagtgatggggccaagattgggaactgcccattctcccagagactgttcatggtactgtggctcaagggagtcaccttcaatgttaccaccgttgacaccaaaaggcggaccgagacagtgcagaagctgtgcccaggggggcagctcccattcctgctgtatggcactgaagtgcacacagacaccaacaagattgaggaatttctggaggcagtgctgtgccctcccaggtaccccaagctggcagctctgaaccctgagtccaacacagctgggctggacatatttgccaaattttctgcctacatcaagaattcaaacccagcactcaatgacaatctggagaagggactcctgaaagccctgaaggttttagacaattacttaacatcccccctcccagaagaagtggatgaaaccagtgctgaagatgaaggtgtctctcagaggaagtttttggatggcaacgagctcaccctggctgactgcaacctgttgccacgttacacatagtacaggtggtgtgtacagaagtacaccggggattcaccatcccngaggccnttccggggagtgcatacgggacttgagcaatgccagcgctcgggaagaatctcgactgtccacctgtccagatgatgaggagatcagagctagcctatgagcaaggggcaaaggccctcaaataagccgccatgcctagggactgcccgtcaaccccgctcacatgtgtctcatccacaaaggcccctggctggttatccacacttgctacacgctatggacacactgccaaaagtggccagtgggccagggaatcacgtaggagcacttgttccgggatggtgatggtggaagaggggatgagggaaagaaatgggggcctgagtcagattataactgtggggtgggatgact

SEQ ID NO: 634853 - DNA, 986 bp, Homo sapiens
  misc_feature (12)..(12): n is a, c, g, or t
  misc_feature (625)..(625): n is a, c, g, or t
  misc_feature (632)..(632): n is a, c, g, or t
ggtcttgccatntactccatggcatggctgaagaacaaccgcaggtcgaattgttcgtgaaggctggcagtgatggggccaagattgggaactgcccattctcccagagactgttcatggtactgtggctcaagggagtcaccttcaatgttaccaccgttgacaccaaaaggcggaccgagacagtgcagaagctgtgcccaggggggcagctcccattcctgctgtatggcactgaagtgcacacagacaccaacaagattgaggaatttctggaggcagtgctgtgccctcccaggtaccccaagctggcagctctgaaccctgagtccaacacagctgggctggacatatttgccaaattttctgcctacatcaagaattcaaacccagcactcaatgacaatctggagaagggactcctgaaagccctgaaggttttagacaattacttaacatcccccctcccagaagaagtggatgaaaccagtgctgaagatgaaggtgtctctcagaggaagtttttggatggcaacgagctcaccctggctgactgcaacctgttgccacgttacacatagtacaggtggtgtgtacagaagtacaccggggattcaccatcccngaggccnttccggggagtgcatacgggacttgagcaatgccagcgctcgggaagaatctcgactgtccacctgtccagatgatgaggagatcagagctagcctatgagcaaggggcaaaggccctcaaataagccgccatgcctagggactgcccgtcaaccccgctcacatgtgtctcatccacaaaggcccctggctggttatccacacttgctacacgctatggacacactgccaaaagtggccagtgggccagggaatcacgtaggagcacttgttccgggatggtgatggtggaagaggggatgagggaaagaaatgggggcctgagtcagattataactgtggggtgggatgact

SEQ ID NO: 634854 - DNA, 991 bp, Homo sapiens
ggatgctgtggcgcccgttgtgcgggctgggctgcggcagccctgggcccgtgccccacctggactggtgtgtcgggccccaggtgctgtggtgttgagtggtgggcttcgtgacacctgggagagagcaccctggtgaaaagggttgctccaggagcgagcagcggctaatctatgggcttcagcgtgtcccataccacgaggaagccgaggcccggcgatcgagaacggcataacgattactactttgtcacaccacgggtagtgtggatgcttagttcgtgaccatagcagtctggcgactatcatctgagtcatgcctgagttgctcggggagaactgtatggcacgagcaaggatgtgcggtgctagagcctgtgtaggacatgaaccggatctgtgtgctaggacgtggacctgcagggtgtgcggaacatcagaggccaccgatctgcggtccatctacatctctggtgcagccgccttcactgcacgtgctggagtccagcggctgcgggagtgcaacactgaaaccgaggagagcctggtgaagcggctggtgtgctgcccaggccgacatgggagagcagaaggagcccggctgtgtgatgtggtcatcattaacgacagctggaccaggctacgcagagctgaaggaggcgctctctgaggaaatcaagacaaggtcaaaggaccgggcctgagcttgctgtctgttctcggacccgggccaatacatgagcaaggaggagcattgagcagcccttggagcgaacgcagtctgtgccttggcagatttgatgggggggaatcttccgcgtggtggaacctggtggcccaacagagtctgggggcccgggcaatttagggacccgccgcagccccacaaacgtggttcactcaaaaagaaaccggtttggcgagaacacagcgcgatatcactttcagaaagcctatttaccaaaaacaaagtcatctcggaaggatacta

SEQ ID NO: 634855 - DNA, 917 bp, Homo sapiens
  misc_feature (73)..(73): n is a, c, g, or t
  misc_feature (146)..(146): n is a, c, g, or t
  misc_feature (262)..(262): n is a, c, g, or t
  misc_feature (281)..(281): n is a, c, g, or t
  misc_feature (317)..(318): n is a, c, g, or t
  misc_feature (362)..(362): n is a, c, g, or t
  misc_feature (375)..(376): n is a, c, g, or t
  misc_feature (383)..(383): n is a, c, g, or t
  misc_feature (391)..(391): n is a, c, g, or t
  misc_feature (393)..(393): n is a, c, g, or t
  misc_feature (398)..(398): n is a, c, g, or t
  misc_feature (404)..(404): n is a, c, g, or t
  misc_feature (416)..(416): n is a, c, g, or t
  misc_feature (425)..(425): n is a, c, g, or t
  misc_feature (427)..(427): n is a, c, g, or t
  misc_feature (448)..(448): n is a, c, g, or t
  misc_feature (462)..(462): n is a, c, g, or t
  misc_feature (473)..(473): n is a, c, g, or t
  misc_feature (478)..(478): n is a, c, g, or t
  misc_feature (481)..(483): n is a, c, g, or t
  misc_feature (491)..(491): n is a, c, g, or t
  misc_feature (502)..(502): n is a, c, g, or t
  misc_feature (507)..(507): n is a, c, g, or t
  misc_feature (524)..(524): n is a, c, g, or t
  misc_feature (529)..(529): n is a, c, g, or t
  misc_feature (545)..(545): n is a, c, g, or t
  misc_feature (547)..(547): n is a, c, g, or t
  misc_feature (586)..(586): n is a, c, g, or t
  misc_feature (613)..(613): n is a, c, g, or t
  misc_feature (735)..(735): n is a, c, g, or t
  misc_feature (756)..(756): n is a, c, g, or t
  misc_feature (759)..(759): n is a, c, g, or t
  misc_feature (784)..(784): n is a, c, g, or t
  misc_feature (813)..(813): n is a, c, g, or t
  misc_feature (834)..(834): n is a, c, g, or t
  misc_feature (836)..(836): n is a, c, g, or t
  misc_feature (857)..(857): n is a, c, g, or t
  misc_feature (873)..(873): n is a, c, g, or t
tatatgtaaatagcttcccacttctggacccatctgatgcaccttttccctaactcgattccccgggaaaagnaatccgaggaccacagcagcccatttggaagccctttccaaatcaagacagtgactcggtggtactaagtggnacagactcagaactgcatatacctcgagtatgtgaattttatcaagcagttttcccaccatccattacatccaggggggatccctccggcatcctaatccacacctcaatggaganacttaagacacatctgaanacagacatatcaagttctatgtgaagattttgggtnnctaatactataaatacttgattgtaaactaaatccaagaccatntatagaaaaatcnngcccacngctatccnanccccnccccgnattcactatatnactcttatntnttaaaagatcatcctggcctntcaaggagaaatangcctaaaagangaaanagnnnaaaaaatnggtagaaaacngtaancctttgtattcatgttnacagngctatgactataaggnanaattatgtatgtgacttagagttatataatcataatttntgtttatgtcaaatatctaagtttatngcttggatgtctagtgagagctgttgaatttggtgatgtcaaatgtatctagggtttttttagtttgtttttattgaaaaatttaattatttatgctataggtgatattctctttgaataancctataatagaaaatagcagncancataaacatctttgtaaatatcaancctaatacatttcttgtccagtgataaancaactggtagaattatttaancnctttagatttttaaataatanacatgctttaattttncttgtgatagctccatgatgaaattaattaaatattaaggggta

SEQ ID NO: 634856 - DNA, 110 bp, Homo sapiens
taacacagaaactcatcatttggtctgtatgcagtagctcatgcctataatcccagcactttgggaggctgaaaataacctttgaatctcgggctgtgttacgtctaggt

SEQ ID NO: 634857 - DNA, 430 bp, Homo sapiens
tagacagctagcctttgtaggattaaaaaattagccgaaagaatagaaattatggtttaggagtcacgcagctggagatgacaagattctgacactcctccaattgctcctggggataacattactattctaaggcctaacatcagtgcttgagatgttttgtagaccctgcccttgatggatcagctggtactacccagaccgataaactggctcgtcttatcttgtggcccccacccaggagctgactcaatgcaagaagactgttctgactccctatgatttcatctccaacccaaccaagcggcactgtcagctcactggcctccccctacccaccaaattatccttagaaactcagatccccaaatgctcagggaaactgattatgtttacccaatagcttggagtaataataaaactggcctgt

SEQ ID NO: 634858 - DNA, 1078 bp, Homo sapiens
gtatcgagccggcgtcggggagcggcggataccgggcggctgcgagggctggctcgacccagcattgaggtctcggcgtccgagtcctgcggtgcccatggggatctcccgaggaccttgtacccgcgcggattccttgggctggctttggacgacgctttcgccttcctgctgcctaggatccgccgacatgcacatcccatcgtagtggtccacggcggcggcagccggtcccatctccaaggcatctggaaggagcgagtgcaccagggcatggtcaagagccgcacaccgatgggcatacggcaatcctaccgggcagggcgggagcgccgatggatgccgtagagggagctgtacgatcgccctggaagacgatcccgacgttcaacgcaggttgtgggtctgtcttgaacgaaaattggtgaggttgaaatggatgctagtatcatggatggcaaaagactgtctgcaggagcagtgtccgaagtccagtgtatagcaaatcccattaaaccttgactcggatagtcatggaaaagacacctcatagctttctgactggccaaggcgccaggacagatatggaagcagctatgggggtacagaagatcctggagacaaaactggtgaccgcagcgcacccacaagcgcctggcccacgagccgcctgcacacaggtgctcccacacagactggtcacaaacccttgggacacgcgggatgatgatgcctagtgactggcacgggcatgacggcctacgaaaacactcaccacggggaacacgacaacaacagtgccggacgcgaaggggcccccacgagacatacgaaaccggcagagaactgccgccacaaggcacatccgtgaacacggaccacaccacacgggaatgtggaacagcacccaaacgagcgaacccgtgcaccaacgccccgtgggccacgaaacagcgcaccgtgcagcacaggcgccacacccgcgacacgtcacaacggcacacaaaggagacacacagagagcagacgccgcgagaagagtaaccgccacgagcgaccacgacaacaaacgcccacc

SEQ ID NO: 634859 - DNA, 897 bp, Homo sapiens
ggacgggaatgacaataactttgttacgcagggacggattgcaaaccgtgcactgtgcaaaacgctttgaccaaagaacaacgacgatgccaacagcttcgctttgccagctagaactccggaaacattcggacagaagcaactttcaaaccacttcttaactactgtcctcttgcttatcgtacttactggcctaactcctgccatatactgggtagtactctgacacgaactaactactgaccacgcacttgagcgacaacacaactcacttgcgctgacttctagtttcacccgagatctgcgtcacttacactaccaacgctcgacctatctcatcacacacaatccctgcgccataaccccctcctcaatcactcattcacacctccagctctggcctcatctccgccacattgctgccagctcttcaccccactccgccctgcaaactgtctccaatgcgggatctcgacaccctcgctacactcggtgccagcaaacctggcaccaatgtacctatggccccaacctggcccattgacagcgcattcattcacccacaggccacaaacacctacctggaacccatccaacgcatcgaattcgtctccctcatggcgccgcggcttccgggcagagctatccccattggcacattctcgtacaagcgcaacaccgaacggcggacttccaacttacacacccattcggaaaccatcaccccaaaccaatccaacgttaacacccgcaaccctaacacggtcacacattactcaccttcccaccatttgtactacgccccactactccctcctacaccgaccccaacctttacgcattactcatcagtcaacagtaacaaccctttaacacacacaccaccacccgctgagc

SEQ ID NO: 634860 - DNA, 197 bp, Homo sapiens
tcgtcgaccctcacggatccccgggacgttgagtctccacgtgggtttctgcgctaacccgcacttggtctgagaagattttgtgatctccatgattgtttgcgcacctgggatcacgacgtagctgaatcttccgattctcgccctcctccgcccctatgcctgctgctctcccccagtgaccaagcggggcatcg

SEQ ID NO: 634861 - DNA, 98 bp, Homo sapiens
ttttttttttttaaaacgggaagaaaaaaaattttgttgggtttccaccaggggttggggggtttttcccaggggtttttaaaaagatggaccctgga

SEQ ID NO: 634862 - DNA, 165 bp, Homo sapiens
ctcactgggtcagacccgagactccatgcaggagaattcaagtctcagcccagaacactggcggcggtggctggaggccccgggtgggaggtccctcactgggcgggaccccagactgccatgccagggaagaactcaaacctcttgtcagccccaagaacacca

SEQ ID NO: 634863 - DNA, 254 bp, Homo sapiens
ccgagctcggtacctggtacgggagtgggatctaaggcaatgaaacgtcccctgagatcatcacatctcactcgataaaaaagggcttcttggctcactcagtgaagtttgtagcatccgtctgggatttcaaaggtcttccctcaagcaaggtctgagaaggagaatgggaaagaaaagcagggcggtggctggttgacaacacactcataataaaaacaatgggtggaggccaactgccactcccgtaccag

SEQ ID NO: 634864 - DNA, 381 bp, Homo sapiens
ggggggggggaaaacttttttttggaaaaatcaacacctttgtttttttttaaaaaaaaacccaaagggggcaaaatttactttaactttaaaggggggctttttttaaaactttaaacacttttttttttttaggaaggaaaggtttttttttttttttttaaaaaaaacccttttttggccccaaggggttttttttttcattccaggccccattttttttgggaggggggaacaaacggggttatcccccttatttttaggggtttttattgcaaccaacccccttgcaagtttttttttaggtgggggtaaattttgttaaaaaagggcttctagggtttttgggccaagtgttaacccgttaaccaaaaggacctt

SEQ ID NO: 634865 - DNA, 756 bp, Homo sapiens
ggcggtggcggctgttgccggtactggacccggcgggatgagcgatggtggatggcggcagctggtgggctacagcggtccccgcggcgacggtgcccgcgacggcgtgcagggtggtagcggtggtggtaccggtgcccgcagtgggatgccgtcagaaagtgcgtgctggaggcgtgtgctgtgctgtggtgtgctggagcctgcctctgggcccctgctgctgtgtgaccccctcgtgcgcctgggctcccgtcacccctgggcaatcctggcgactggcggtctcgtgggaaccccctggcccccctggcccgggagtcagggcggacaagccggtgctggcaatccaagtcctgggcactgtcaaatggttcaacgtccggaatggttacggattcatcaacaggaatgacaccaaggacagatgtctttgttcaccagacagctattaaaagaaacaagcccaggaagtttctgcgcagcgttggagatggggagactgtggaatttgatgtcgtggaaggagagaagggctgcagaagccactaatgtaactgggcctgggggagtacccgtgaagggcagccggttatgcccccaaacgactgtaagttccgccgattcatcccccgtgctccctcagttgaccgagcaaccattgtggcagagatcccctcggcgtggacaggacatgacagtaaaggggagcagggctgaagaactctggcaaggggccgacgatggtgccccaca

SEQ ID NO: 634866 - DNA, 290 bp, Homo sapiens
gcggccgcgactactactactaaattctcggccgtgcgacttgattattttttttttccgttagaatgcgatctcactctgttgccaaggatggagggcagtggtgcactcgtagctcactgcagcctcgaaccttgggctcaagtaatcctcctgcctcaggtcctgagtggctgggaccaccggcacacatcacccatgcccagctaattttttttagagatgaggtcttgctgctttgcccaagctggttttgaactccggggctcaagcaagcgatccagtcgacg

SEQ ID NO: 634867 - DNA, 314 bp, Homo sapiens
gggcaggggggcccccccccctacttgggggccccggggagcctttacaagtgaaggtaaaagccgggctccccaagatttcccccccaaggggggggggtttccttcaaagggccaaaaccctggggggcccttttgggctgcccgggggcaacggccgggttaagcccccccgctttgcccctcggggggggggccctttgccaaagggttttttccccttttaaaacccggaggggggaaaaaaccttctggcctgaattttttaagcccccgccaggtccctttggggaatttaactgttggggttttta

SEQ ID NO: 634868 - DNA, 357 bp, Homo sapiens
gggtcttcaatagtgctttcagcagcaatgtatcctcgatctgtattcggctgtcattggactgtttctccattcaatagtagtcgaacattgcgtcagtgatagcatgtggatgtcatccagataggtgcacacttattactgatagggctgcctgtgtgagcatgccattcgtcaggtcacctctgccgtgaaatcgtcgttgtagtacataatcgcttccttcagttccgtgtaatcatgcatctgcatcatgcacttcgagcccatgtatagcgttgtcaccggcccaaatctgtgggcctaccgcgtgaaggcctcctggatactcttccattcatactgatgtaggttccc

SEQ ID NO: 634869 - DNA, 193 bp, Homo sapiens
ttggagacgaccgggcgcggagccgagcgaggagcatgacatcttcgtagatggcgatcgcgtcggcagtcgatgagaggtagccgttgcgtcgggcgagctgaacgatgccggtgcaccatctgagcagctgcgaatggtcctgttcggcgatcggatgcggcttggcgatgagttcggaagtggtggtctc

SEQ ID NO: 634870 - DNA, 940 bp, Homo sapiens
  misc_feature (161)..(161): n is a, c, g, or t
  misc_feature (207)..(207): n is a, c, g, or t
  misc_feature (219)..(219): n is a, c, g, or t
  misc_feature (229)..(229): n is a, c, g, or t
  misc_feature (286)..(286): n is a, c, g, or t
cgcgcgctcctccgacccgctccgctccgctccgctcggccccgcgccgcccgtcaacatgatccgctgcggcctggcctgcgagcgctgccgctggatcctgcccctgctcctactcagcgccatcgccttcgacatcatcgcgctggccggccgcggcntggttgcagtctagcgaccacggccagacgtcctcgctgtgggtgngaaatgctcccnaagagggcgngcggcacgggtcctacgaggagggctgtcagagcctcatggagtacgcgtggggtanagcagcggctgccatgctcttctgtggcttcatcatcctggtgatctgtttcatcctctccttcttcgccctctgtggaccccagatgcttgtcttcctgagagtgattggaggtctccttgccttggctgctgtgtccagatcatctccctggtaatttaccccgtgaagtacacccagaccttcacccttcatgccaaccgtgcttttcacttacatctataactggggacctacaggctattgaggtggcgcagaccacgaataatcctgaatcggcttgtgcacttctactaacatgctggcatccccaaattaagaccgaatgacccttactggggcaatggacaaagaccaagggtacattcttacaaaatttgggcttaagttgggacatggacttgttgggagcaacatcggattgctggtatagactgtgatttcagaaagaagacaactgtgacatccaggtggaagatttgtaaggcgcaattgtatgggcagttgttaataatttaataacggttagttaagaaagttcttagaatagtttgggggacaaaaagtactttataacgatacggtaaataaggtactgggtgacacatagagagacaataggtacacatgatgcaaatcgaaattggcatataa

SEQ ID NO: 634871 - DNA, 248 bp, Homo sapiens
tggcgcgggcgtggccgtacggcatcgctcggtacactgcgcacctttgccgccgccgcggcgccgctttgcgaggtctgcccatgtcccggatctgggaatcggggctgtaggcggcccgggccaggaacttgccgtcgtcggccaatacctccaccgtgtcgccgggacgggccttgcccttcaggcggccgacagagccggcgaagatccagggatggcggcgcagcagggagcgttccttgccg

SEQ ID NO: 634872 - DNA, 650 bp, Homo sapiens
cggtcggtaccctatgtctcgatcgttagagacaagacaaccaaaatgagaatttctagagcaatatccctgatgaacatcgaggtgacagtcctcaattaaagtactggcaaagcgagtccagcagcaaatcaaaaagcttatccaccacgatcaagtcaggttcatccctgggatgcaaggctggttcaacatatgcaaatcaataagaggtaatcgcatcacataaccagaaccatcgataaaaaccacatgattatctcaatagatgcagaaaaggccttggagaaaattcaacagcccttcatgctaaagactctcaataaagtatgtatcgagggaaggtatctcaaaataatgagagctatttatgacaaacccacagccaatatcatactgaatgggcaaaaacgggaagcattcctttggaaaactggcacaagacagggatgccgtctctcaccactcctattcaacatagtgttggaagttctggccaggtcaatcaggcaagagaccgacctaacgggtattcacttaggaccagaggacgtcaaaatgtccctatttgcagatgacatgattgtatatttagaaaccccattgtctcagccaaaatctccttaggtgataagcaattcagcaagtct

SEQ ID NO: 634873 - DNA, 482 bp, Homo sapiens
cggcgcatcaactgcgagcagtgcagcagttgtaggaatcgaaagactggccatcagatttgcaaattcagaaaatgtgaggaactcaaaaagaagccttccgctgctctggagaaggtgatgcttccgacgggagccgccttccggtggtttcagtgacggcggcggaacccaaagctgccctctccgtgcaatgtcactgctcgtgtggtctccagcaagggattcgggcgaagacaaacggatgcacccgtctttagaaccaaaaatattctctcacagatttcattcctgtttttatatatatattttttgttgtcgttttaacatctccacgtccctagcataaatattctctcacagatttcattcctgtttttatatatatattttttgttgtcgttttaacatctccacgtccctagcataaaaagaaaaagaaaaaaatttaaactgctttttcggaagaacaacaacaaaaa

SEQ ID NO: 634874 - DNA, 484 bp, Homo sapiens
  misc_feature (11)..(11): n is a, c, g, or t
  misc_feature (17)..(17): n is a, c, g, or t
  misc_feature (90)..(90): n is a, c, g, or t
  misc_feature (252)..(252): n is a, c, g, or t
tactcaggagnctgagnttgaaatgattgcttgagcccctgagttcgaggctgcagtgagccatgatctcaccacttcttccagcctggntgacagagcaagaccctgtctcaaaaaacaaaacaaagtgtttagatattttaaatgtgattttttaagggaaagtttacaaacattaacagcaatgtttccattataaaaacataaaaatcgtccatgggttttgtttttttgtttgtttgtttgtttttntgagacagagtctcactctgttcctggtggcatgatctcggctcattgcaacctctgcctcccaggttcaagcgagttttgtgatcccagctactcttgcctcagccacccgagtagctgggatcacatgtgcatgccaccatgcctggttaatatttgtatttttagtacatacagacgggtttcaccatgttggccaggatggtctctaacttttttttttgaggcaggg

SEQ ID NO: 634875 - DNA, 255 bp, Homo sapiens
tgtacattttactctctctacagttttctatgtcaagagtgtctctatgctaccgtaattacagtgattagaggtctgtggcaacttaagttgactagattctatcttggacacagctatcaccagctcggaggttgtcgctctactataatcttccactatatgtacatagacgggtgtgctctttagctgttcttaggtagctcgtctggttcgggggtctataactttggctcccttgcaagtattctagtt

SEQ ID NO: 634876 - DNA, 1576 bp, Homo sapiens
  misc_feature (5)..(5): n is a, c, g, or t
  misc_feature (348)..(348): n is a, c, g, or t
tcctnccctcccgcaccatacagtagcgtatgagccggaggcagcgcgagaagcagtgcgacagagcagggagacagaagaagaaggaccatcgcctgtgtggtgtcccgtcgtattagcgatgcgggtggtcttatgacccctctattatgttgcacggcgtcctgttttatgatgatatacgcagggtttgtgttctccgccctccctcattctgcggggggactatttttctgcgcccccatactgagtggttttcctccctcttgtttgtagggtgatggtgtgtggtcccctctgttcgcgcgcgccgctctgtggtgtgattgtgcgtgtgcgtacgtgctncgtgtcgcctccgacgggtgtccgcaaggcaccaggcttgcttttggtggggggacacccttgttggacatcttatgtgcgggtgcctcccctgtttatgtgtgggatcgttgctgacaccccagagcttgtggtgtgggaactttatgcggtttgtgggacgtctgctttgccccccagcggggagatttctgccttgtgttccccccggagctccccatgaggtggtcttgacagggtcccttttcctgagtggccctagtgtcccccgtcgtgttgcccccggggtgcccttgggggagcccacaattgggggtcccatggcgttgcccctggcccaagaacccgtccttgtgatcccaggtttttggatgttccctcccccgggtggccacatgggaaattgggctccagtgtgcccttatcccacggaagatgctgggccctctttgggccggccccccccagcggagcacggccgggggtacaccaaggggtgttacacgaagttattttcccccggccgcctcttttggggtgttgtcccgccggtcacattgtgcctgtatatgtgagaggacaatcgccagcaaatggttgggggtccacatattgtgtcgagaatgcctcgtttgggccccccttgtgggccactctcaccacgcttcactgaatggggctttctctctccctggcgtggcccacccaccttgagggcccccctcgtggtgagaatatactgttctttcttccgcctgtggagttcccgcgcgctcttacaagagaaatatttcgccgcgtattgtggttttcttcttcgaatgtcccactggacccagcacacctcacgcacagccacgtactcacgaatattgtttcacagtgagaagtctgacaccacaagtcccacaagtggccccgcggagagtgttttggctggctgtgcacggacccaaagggtcacaatccacccaaatttgtcccttacctgattgctggcactcccacacctcactgccacggacacttggggcccaagaggcttgagccccagtccgaggccctgagtgtaacttctggggagcttatagctttgagaaagagaacgtcctcacgcccacggtggaaggtggcgtccctagacctcccttcgtatgagaagacggcttttctgaaaagggatcccgcccccctcctcggtttttttttccaataaaagttttgaaca

SEQ ID NO: 634877 - DNA, 389 bp, Homo sapiens
tcacatacatcatttaaagaggatttatgtaaattttctctgtactcataatttttcaagcattagtgcagtcataagtatagggcaccttggcttgatttaattattatcgtttctaattcagcacactttattttattttattttattttattttattttattttattttattttattttatttttgagccctgattgctagttcattctcaatcattagcatttagaagaactagtcattactggttttcaatagctgcttgggttcctataagcacttagagtcttaaaacacagaaatggaaaacagacatttcaaaggtagaacaaatcatgactcctagaggtagggtacaagaatccctgggtgcgtgggcactgaagcac

SEQ ID NO: 634878 - DNA, 133 bp, Homo sapiens
gcccctttttccccgggggccccccccccattggggccccccgggttttttttcccccccccccccccccccccccggggttttttttgggtaaggtggggggggaaggaaaaaaaaaagggattttttgcca

SEQ ID NO: 634879 - DNA, 578 bp, Homo sapiens
cactcctgcatcctctctcacctctctcctgcgtcctctctcagccatctcagcactctcacgtgatggacagagcagtgttcatgcacgtgggtaggggagaattcatgtgaaccaacgtatgagagacagtgccccattgacgatgactgcctgttatgctgttgtgagatccctcttaggaagctaaagataactcaattaacattaagcctatgtagccagtcatggtaccttgtcttgacccgcaagacaaagaggaatggatctatttcatcatattgtgtttaatcaagtggtggacatcatgctaaagtaagtttatatgcagtagctcatgtaatacttgaacaaaggtaggtactaattactgtactcattttataacatgaaacatacagagacttagtcaggtgaaataacttgcataatactataagtcatgaatgatagcagcgcatacattatcctaggtactacctaccttggccattctctggcttaatctcacaatcatggcggcacggcaaggaggcagcacagtcatgtcttaatctctatgccactatgatcctatc

SEQ ID NO: 634880 - DNA, 991 bp, Homo sapiens
gaaatacactgggtttttaaatttgggggggcccgcccccttgtagaggccttttcaaccacgttttataaccctggaccccgcccaatcctccccgtggattaagaaatttccctccggggaggccacacaccaatgtccacaaaacccccgaaaagttttctccacaagagggaaatttttcggcaatttctgggtagtcaacacaacccgaggagcaaagaaggaagctctttcccaggcaccaccaacaggcgtctctgagtccacgataaaattgtacaacacccgttgttttggggaaaaggggaccacactttcctttttttgtcccccaccaaccaacgggtttctcccgacagtatacacaaaaaaggggtgttctgagagagacaacactttgggtgttatttgtccgagtggtcttttaaaacatcacatcctcccccgaggtgacccccccgcgagaaactaggtgttgggcacacaacaagaccacacaaacatctcccgcagagagtgttctcctccaacaagaaaattcttgtggacccccatttctcaaaccgcccacatttttcccgcggtgactacttttaagagtgaaatcttgtttgaccaccaatccacccctccaggggttcatgagagggaatatattttttggggatattccaacaatgtggcagaaaggttatcaagggacccaggagggggctatataaagagtatctcatttgtcgagtgacacataaccaccacacaccccttggggtctccatttttttctccctaaacacacgttttgcgcgttgctgacatagacacccacaacatctctctgcgcgccaacatctcatttttggagaacaccaccacgacagtttttttaaaaagccacccccaaaatttttgtgccccaaaaaaccaattttttggggcctggggaaccaaggggggcccccaaaaaaaaccaactttttgaaaggga

SEQ ID NO: 634881 - DNA, 653 bp, Homo sapiens
tactgctgagtaatatgcaattatatggttgtactacagtgtgtttatccattcaccagctgaaggacatttgaattttccccagatttagtgattatgaatgaagctgctctatttgcctaaaatttacataagcgtaagtgttcatttctttttggtaaatacataggaatgaaattgcctgatcacgtgataagtatatctttaactttatgagaaactgcaaactgtattccaaattggctctaccattttgcacccccatcaacaaagtttgagtgttcttgttggtccatattgttaccagcactgagtattgttgctttgttgttggtacttcaaaattttagtcattcaaataggtgcatagtggtatctcttgtgattttaatatgcattttcctaatggctactgatattgaacatcttttgatgtgtatttttgccacttgtatctcttcttctgtgatgtatctgttcaaatcttttgttcttttttaactggtttgttttctattttttggtgtttgagcatttatatgtattattgatgtaagtccttaatcaggtaatgtgatttataaatatattcatctattctgtggaaagttttctcattctttcaataaattaaagttgtatattttgaaaaa

SEQ ID NO: 634882 - DNA, 163 bp, Homo sapiens
taactcactggcaagaatgcagtgttgggcctttcaaccactagaacaaacttttttcaattgacagttgcagaattgtggagtgtttttacattgatcttttgctaatgcagttagcagtatgttttgcatgtatgaattaataaatccttgaatcataaaa

SEQ ID NO: 634883 - DNA, 876 bp, Homo sapiens
gaaaagaagaagagcgagggacgttttacaagtgacgcgtctactcgttgatgcggattaaatctgctttctatgcgccctaatcttctttgggatcgtcttaaagcacgttgtcccgttaaaactttgccgctgggcatatctctggattcggcctattcccctagtttctacgttcggcgcaagatttggtcaggccattgtcaatgacatttttacggcggggattgcccccacattcgcacaggcgagctttccttttcccaatctggcgaggtctttttcgcctcctccgaaccgaagggagtttctggccccttgagcccaggggttccgttctgccgggaaacacttgtcaaatcacctgtaggaggcaccccagaagttacaccggaaccatcatctctcccgggtgtgaaacatcgaaaccatttacagggcctttaatgtgttccaagagcgcagctgaagagttccctgagcatccgcggggctctcttccgctcctcaacaaagaaacgagacatggtgttgcgagagtgcacccgcgagcaacaaggcggttgtttgtccctccgtggaggatgaaacctcccggggtgcaccccacaaattccggcgcgctagttcacgcacaaatgattctacaggcgcgctttgggagttgcaagggagtacggggattcactttggacttcaggacgtttgacgatcacgctttgtggtgtacagaggcgagactagcatagtctcttcttgaaagagaagaaaaaatatggagtcttgtctcatttggcagacaccctgtaattcactagtcctcgtgggagtctccccaaaaaatttgggacacctccgactaaaacccaacaatga

SEQ ID NO: 634884 - DNA, 319 bp, Homo sapiens
tgtatgacaggttcacgtgagtatagagaagcagttgattggtatgtgtaggtctgtatcctcactagtcctaggaggttgtaattattagttatttgcttgtattgtatgtcgtgcccatctagctgagagcaccatggggcaaggactgggtccgatccctgtcgcatccccagcactagcacagtgcctgaaacacaggaggcacccaataatcattccagaaaaatgagtaacagaaaggtgctatcacttttatttcgcttctgtatcatcaacactggctgtgaaagacttgggataaacctcatgtcataca

SEQ ID NO: 634885 - DNA, 478 bp, Homo sapiens
tataggcgcataagtcatgttgctgtccagatctactgtatcttcctccaggagcaaggcatctagctcctccagccgctgctgaagcaggtggccacatcagggctgggggccacattgtgaggaacagtcctgacccctgcagccctggaccccacgggacggacttcgtgatacgaggaaggctgctgtccctgaaattccacagcccgcctggagcttccttgagcttggctgaaaatcagagtcccattgctgctcccgggtttcctcaaagatggtctcaaaggtcctccatggtatgtgggtgattggtactacttgtaaggtgtcaatttcttccaagctgaactccttcttgtccaacctgattggacgaggcagtcccattgtgtaaggtttagctgagtgacgggctgatgttcttgcggtatactgaatcgagaaactttccccatggtcttggtctcagggtctg

SEQ ID NO: 634886 - DNA, 227 bp, Homo sapiens
agcgtgtgttggggtcgagctttctgataacgaggctgtggagcagcacaggaagctgcacagtgggatgaagacgtacgggttcgagcttttcgggaagcggttccctggataagttttcggcttagaattcaattacttgctattcaaccgggttccaaaaccttttttttttatcaatgccgggcacaatttttcagaggggttttccctagacacacacagga

SEQ ID NO: 634887 - DNA, 242 bp, Homo sapiens
caattctattagtcaaaaaagaaaagagggatacagaataatatctaagtaatcaaaagatttccatctccccatcaacttatacagcagaccttaggccaccatgccgtatttattcagtatcccctgcaaattatagaaattgaaaatgagtgtaaagcatattagttacttttccaaaatccttatgaagccaaaggagtaaagaaagaacaaaggaaggggtgaggaggtaacatgga

SEQ ID NO: 634888 - DNA, 955 bp, Homo sapiens
cattcgacccggctttcgtgaattggcccccacggttggaaacttttttcccgcccctgttctttgccagatatccctcggctattgagtgtgcccccctatccttggtccaaggaatctccggccccaaaaaatttccctcgcgcctccaaattgggtctccagaccaaggttccgcctcccagaccaggtcctcctcgatcagtttggaaccccccaactattgtgggccccgcgcgtatactgacgcaccgcagggggcgctggtctccacacaccacagtggaacaccccctgtctggctacggccgcccccctggtggtacgctgccccgcaatttcgcctcttttccgccggaaacaatggtgcaccccacacaacaacgcgggcgggggcccatagtctatcacaggagccaactcttctcccatagccggcatactccgaggctgccctcccgccctgcaccaccatgcgctgccaccaggttaaccccccagctctgtgcaacaaccgcgggcccgccccgccagagtggagcaacaccacctcccctgtggccccccttacaggggccctccactacaaatgtgcccccccccacccacggtgtgagaagcgcttcctggcggggagaatcttactctaagtccagaccgctcgaggtatcccccctcttcctctacacgcggtaatccttctgcccaacgagtacgcgccttgtcaccccagttctcttgcaccgggctgttaatcaagagacaaacgcacgaaatggtaggcggctcctaatgtcgaacacaccacaacaagaggtctctcccttgtccttgagtcgcaccaccagccggcagcgatgttatggggggcaaaaatgtggtgtgagagatgggccgccccagtttaccccccccctcttttttcccaataacccctgcccaccaaaaaaaaaac

SEQ ID NO: 634889 - DNA, 200 bp, Homo sapiens
gccttgccacatacaccaataacagttctaatggcagcaccagtacccttaccagtagatgtagcagttagatctctgaaagaaccaccaattataattgtaccagaatctttagaagcagatactaagcaggacactatatctaatagtttagaagaacacgtaactcaaatattgaatgagcaagcagatatttcctc

SEQ ID NO: 634890 - DNA, 379 bp, Homo sapiens
  misc_feature (94)..(94): n is a, c, g, or t
  misc_feature (96)..(96): n is a, c, g, or t
  misc_feature (103)..(103): n is a, c, g, or t
  misc_feature (106)..(106): n is a, c, g, or t
  misc_feature (110)..(113): n is a, c, g, or t
  misc_feature (129)..(129): n is a, c, g, or t
  misc_feature (141)..(142): n is a, c, g, or t
  misc_feature (152)..(153): n is a, c, g, or t
  misc_feature (157)..(158): n is a, c, g, or t
  misc_feature (164)..(165): n is a, c, g, or t
  misc_feature (168)..(169): n is a, c, g, or t
  misc_feature (173)..(173): n is a, c, g, or t
  misc_feature (304)..(304): n is a, c, g, or t
  misc_feature (320)..(320): n is a, c, g, or t
actctctgcctcccagaattcaagtatctcctgcctcagcctcctgagtaactgggattacaggcacatgccacaacgccgggctaagtatttntntttttanganagannnngtttcaccatgttggncaggctggtctnnaactcctganntcanntgatcnnccnncctnggcctcccaaagtgctgggattacaggtgtgagccaccacacctggccttgcttcttagatcttaagtctttatctcctttctttcaaactgaatagccaacttcccaacaacattaatcaaattactcanttgttttaatgccacnacatacacagtagcagtcttagaattacatcactggaatcgtgaggtggaaggatggta

SEQ ID NO: 634891 - DNA, 215 bp, Homo sapiens
caaacatttaaaaatgcaattttttgcagaccaaggtataattttaaaaaatgcaaattttctaaagagacacatctcttgaaaaatgagatgatgtggccaggcgcagtggctcacgcctgtaacccagcactttgggaggccgaggcgggcgggtcacgaggtcaagagatggagaccatcctcgccaaacatggtgaaaccccatgtctact

SEQ ID NO: 634892 - DNA, 254 bp, Homo sapiens
tgggggacatcttcccctcatcactgagcatgcacagccgacccatttattagcaacccatgtggattgcacttgcagggttgcatttcagggcccttttgcccgattcagacttcaatttccgggccacaatgacttgccaaagttcagggacagctgcctgcacatgccatgcaaagtttcggggtactcttctccctggctgcagtcacctgctttgagaccctgccttacgtgccaacccaccctactgg

SEQ ID NO: 634893 - DNA, 551 bp, Homo sapiens
  misc_feature (25)..(25): n is a, c, g, or t
  misc_feature (42)..(42): n is a, c, g, or t
  misc_feature (77)..(77): n is a, c, g, or t
ttggttgggtgatctttagtcagcnccacataagatgttcgntaaggccaagttacatatgtgccgtggtctcatangttataatagaattaaaattcctattcctaagtgacatcatagttgcccataacatcacagcacaatgtgttactcacatgtgcgtgatgatgctggtataaacaaatctattgtgctgccagtcatatgaaagtatagcacatacaattgtgtatggtacataatgctaatcatgataataaagattatgttattggttgacatacttactatcctatatttgttattttagaatgtaccacttctacttataaaaataagttaactataaaacaacctcaggcaggtccttcatgagatattccagatgaaggcattattacagagatgatagctccatgtatgttattgcccctaaagacttctcgtggagcaggatgtgaatgtggaggacagtgatactgaacctgaccctgtatatgcgtggattaatgtgtgtgtttgtgtctttttaacaaaacagcttaaaaagc

SEQ ID NO: 634894 - DNA, 473 bp, Homo sapiens
tgtcttttatgtgtgtttgatttatttttttaattttttctagaaattaaaggccagaaaaatccccacttttatccccactggagggtggggtgggaaaaacgcccctggccccggggacaccattgtttccttttaaaacccaggggaaacagggaacaagggcaagtccggggggggggaccactgtcccccaaagggggaattgttataaaaacgcttgggggggaacacttaagccaccaccttggggccagaaaaccaggggccatggggggcctggagggccttatgggtttaaggggctttggaaaactccaaaaagattttgaaaaggattttggcatccccctccccccccttgtttttttgggaaaagaaaacggggttaacggccccaaacttgccacactttttggaaacctcccctttacaggaataatggaggtcctgtggggcccaccatgttgggc

SEQ ID NO: 634895 - DNA, 718 bp, Homo sapiens
ggagagagagagaactagtctcgagtagtggtttttttttttacttataaaaatacggagtttaattccacatgtattattttggtctccccaccatttccatgtctgaccaccgctactactatgtcctatcataacattccatacttacttaaaaccaagcaaagggtggagtctccatctttaaaaactaaccggcttttgggacaacacattctgtggcaataaaacctggacaacttttatcaaacacggtagggaaagttctcactctgctttataaaagggacagccagatatcacctgttacagaattgcaaatacagagggaaaatttttttaacaacatggtttaaactattttcttaaagagacttcctccattgccagagatcttgaatagcctctgggtcagtcatccggaagcaattcttcacataatggatgaattgggctcccacttggggaagagaaccacctttttctatactggctggcatatttggctctaaaggtcttctacagaactaggtccttagggggttccaggagtttttccctgtttcttggaaggattctggtcccttctggatctgggtcgtcgatgatgggtcttcgagtcttgccattcctgattggacttttggagcatagcggctgaagtatctcgtatagatttcttcagggggctttccttacagcttccctcattaatcaa

SEQ ID NO: 634896 - DNA, 162 bp, Homo sapiens
agagagcgactaccctagaacaagcgacctttcagccccactgtggtgtgactgacaggagcatgtagggcaatcccggcaccacattattagggacctctgacacactgcaacagacccaacagaggatgaccaggatggcaaggttcctacaaaccattt

SEQ ID NO: 634897 - DNA, 858 bp, Homo sapiens
atgcccctcatttacatatagatattatactatgacatttagccatctcacttctagcgaatactagtatatcgctcacactctcatatcctccctactatgcctagaaggaataatactatcggtgtctcattatagctactctcataaccgatcaagagccagtccctcttagccaagtattgtgcctcattgccagttagcgtagatcttgtgcgctgcctgtcgaatgactagacggtggtgcctatgcctccatactagtgctcagatctccaacatcatatggcctagattacgttacataacctagagctactccagtgctaaaaactaatcgtgccaacaattatattactacctactcgacgattactttccaataaaaacacataattgggagatcaacacgaatccacccacaggccttaattagttacgcattcgatcccgtctactatttctttgaaccaaagtcaacaactaccgtatttatgcttgtttgcccaatccttttcctccgaccccactaaggacccttgttccttaatagctaatgtacctgacctcctaccccccgtcatcacctgcatggccaagcccgaatcgcccatttatccagatggatggccagttatcacccaaagtaaaaatggctagcttcgtctatgactgaattctgtcggactgaatctccgtgaacttatccacgatggacgagtgcggatgaaactaatcttcatcagatatggttccttcggaaaccagaggttatccccggcttggtgtcatgcacccgatgggggcccgtccgaaagcctgacgggttctattcctgtctccactataggtccctcc

SEQ ID NO: 634898 - DNA, 479 bp, Homo sapiens
agccccacgatgatcgcccagatttaaatttcgactggacaagatctcactgttctctcgaagagctcaaattaatcaacaatgcgcgcggtttaccagaacaatcacagagttgaagtaaggactgtaagtactacggaacagctcacacacctgcgatatgcttgtgactgcctgacgctttgcgattatgaatgcttaatgataccctatcactatgatgatggactcattagccattctcaagaagaaccgcctgacgttgtggcagaggcaccgtaaagtattacgaagatttgacgacttggaactgagagttgaatcatttcagcccgtgtggcagattggtaagctcttgtgtatgcgaaatttgttagcaacatacagcttgaatgtgatgaaagataaagattacataatgctttggtgagttgaataaaaacttccaatattgtgtacctggaagaaaggaccacata

SEQ ID NO: 634899 - DNA, 348 bp, Homo sapiens
cacgaggtgacatcgcgccctaagacagaggttgacaccgttctttttttcttgtgatggagtctcactctgtcgtccaggctggagtgcagtggtatgatcttggctcattgcaacctccacctcctgggttcaagcgactatcctgcctcagcctcccgagtatctgggattacaggcacccgccatcatgcccagctaactgttttatttttgtatagatgggatttcaccatgttggccaagctggtctggaactcctgacctcaggtgatctgcctgccttggtctcccaaaatgctgggattacaggcgtgtgccactgtgcctagctaaggtttttctaca

SEQ ID NO: 634900 - DNA, 276 bp, Homo sapiens
ggcccccgtacccctaaaaatccacccgccaacttcatcggatccggcgtcaggtagcgaccaatatccggattgtagtagcgatggcggttgtagtacagtccggtttccgcatcgaaatactgcccttgaaaccgcagtggattgtcgactttgcccacgtcgagccgggcgatctggccgtaggcgcggtagtgggcggaccagacgatttcgccttcggtgtcggtcagttcctgcggggtgccgaggtggtcgagttggtagatttttagg

SEQ ID NO: 634901 - DNA, 187 bp, Homo sapiens
tttgtattagatcattatgggtatcttcttgtacccgcagtgccgtcatgcagacttcatcctttagggagctaatctcctatttcaggtactgtatttacgattcctttaaccgctataagacctcttgttcataggcatccttgccctgtgcaaggtgtgacccagcgatcatgagtaccgagct

SEQ ID NO: 634902 - DNA, 752 bp, Homo sapiens
tcagttctcagttctaggaatactatggtatatcgctcaccgatctctatatctccctactatgcctagaaggaattatactatcgctgttcattatagctactctcataaccctcagcacccactccctcttagccaatattgtgcctattgccattacttagtctttgctcggtgctgcgtaagcatgcggtgggcctagcccgtactagtcttcaattcttcctaaaactatatggcctagactacgtacagtaacgcgtaaactctactccaagtgctaaaacgtaattcgtcccaatccgacatttatattactaccatctgacatgagtttgcaagaaagcacatgaatttgatatcaactagcgaagccagcccacagacctaatgattagcatgatccctctactatgttctaaccaaatcagacaacaacgctattttaggctgttgcccaagcttatcctccgcaacccctaacagatgcctccttccgtaattacctaaactgaacgctgactccgtaccccatcacgagtgatggcgagcctaacgccagcttgtccgacggggacccaatactcgacgacctcccacctctacctctcttgatatagattctcgcatacaaaagctccctttattatacacgattcccagcccagcgaccctaattcatctcttcatatgtgtctttagaagcccactgctttgccccaccctgggcttaatcgtcagccggtggagac

SEQ ID NO: 634903 - DNA, 221 bp, Homo sapiens
  misc_feature (45)..(45): n is a, c, g, or t
atcccatctggaccaggtgactctactcgcatgagtctcttgtantatatggtgactaccagatgcgtgcatccaagcctggctaatataagactcatgtcttctacaaaattattttgtgaagcccctatcacaagaaaaccttaagggaaatctgatggtgctcaggaatctaactctccctaaaccatcctctataactgcttactaaaatactctct

SEQ ID NO: 634904 - DNA, 312 bp, Homo sapiens
gggggaaggaaacatttttttggaatcaaagggcaattttacgttaagccccaaatgctacaaaaaaattatgaaaataggccttaaacaaatttttcctaaattaacctccccacatgtgaaaataaattttggaagtaaaaagggggggtttggttctggtccctaaaaataaaaacgtgcagggactgcagttttgcacttttggggtggggcggtttttctgagtggctggtggtgggtttgcacgtgagggcacataactgcttttttcgtcaggaattttgcaagaccctggaaagaaaaccaaat

SEQ ID NO: 634905 - DNA, 594 bp, Homo sapiens
  misc_feature (467)..(467): n is a, c, g, or t
  misc_feature (478)..(478): n is a, c, g, or t
  misc_feature (495)..(495): n is a, c, g, or t
  misc_feature (500)..(500): n is a, c, g, or t
  misc_feature (513)..(514): n is a, c, g, or t
  misc_feature (540)..(540): n is a, c, g, or t
  misc_feature (544)..(544): n is a, c, g, or t
  misc_feature (549)..(549): n is a, c, g, or t
ttctgatgtatctctaccaaattcatagtctttggcaatcatttggttctcctacactcttatttggtaacttatctccaagtgtattattggttatttccagtgaaatttggtgtctactttgtaaccaggtttttgtctagaaccattttatttacttagggcaatgttgctatatttgcatgcaaagtacacacagaggaggaatgcaaatttgccgatacagtaacaaaattcacagggtatttcctactgtgatctatttttagactgacttatataaccgattctcaaacactaaccttatttcaaatgatgctatctgtgagttttcattaagaaaaatccggctggccgcggtggctcatgcctgtaatcccagcacttttggaaggctgaagcaggtggatcgcttgagaccaggagttggagaccaagcctggtcaacaccggagaaaccccatctnttactaaaggnccaaaaatgagcctggngcggnggcacaccccgtnngcctagctactcaggaggctgaagcncaanaattnttttaaccccgggaggccggaggttgcagtaaatttaaaattggg

SEQ ID NO: 634906 - DNA, 474 bp, Homo sapiens
cggtccggtgctgccaaagcactgagtagaagaaaaggggccggataaccagcaggcctggcagacaacttctggctcccttgccatttaaggtcccgaggaatgtggagacattggtgggggccaggtgggtttggaaggacggattttttcctctttgtctctatctctctttctctctgtctttttctctttctctcatagcttatgctatgattttgtaaaaaaaaaaaaaaaaaaaaatttctattgtctcaaaattcctcatttgaaggcttttttttttttctaaatttaaatttttttctccttatactgtccggggaaagggacgcttttttcacccaaactgaaagggaaaggtcctcttttttattctattactcacttttcccaaaacttttccttatttttgtacttttggcacagtttttgttgattacttggaaggcgatgtgtttagcatacggagct

SEQ ID NO: 634907 - DNA, 121 bp, Homo sapiens
catctacaggatccccatcatgcgcgttcctggaggaataactagaaagatactatgtcggttgtgaggtgtaaaggccaaggtgccttacctattggatattagtatatatagacatatt

SEQ ID NO: 634908 - DNA, 205 bp, Homo sapiens
  misc_feature (8)..(8): n is a, c, g, or t
  misc_feature (188)..(188): n is a, c, g, or t
  misc_feature (205)..(205): n is a, c, g, or t
cttgggcnaccccgcttaccaaacccttgccgggcggggggttgggcccaagcaattgggccccaagttggacccgcccgaagggggctttcccaagggaagccgaagttgccgggggccgccaagccgggggcccgtccgccgggaaggaaggaagaagccgggggcctcgggccacccttactggnccccgtttttgccgggn

SEQ ID NO: 634909 - DNA, 147 bp, Homo sapiens
tagcagcagcagcagaagcaacaacaacaacaacaacaacatgtgacaatgctggccagggaagcaagtagaacacactgcagcactgtgggcaagcaagcttgttcaaagccaaggcaagcaacagcaagcttgctcaaccttgtg

SEQ ID NO: 634910 - DNA, 114 bp, Homo sapiens
ctcgtacccgtaaatgcagcgtgagcgatgaaagcgacctgcagatgatgaaggcagaccgaagccccagcgtgcaccgatccggtcaacgatccgtccccataaaagataaga

SEQ ID NO: 634911 - DNA, 221 bp, Homo sapiens
gccaaacttcatttatttaaccttacacaccgacattaaaccaaatgttgagtcacaacttcagtcacaatcttaaacaaaacaaaataaaaaggacttcgtaataataggttttgtagatactacagcccatgaatgacgagtcacaaccgagtttaggtcatttctttccactcttcttgagcccagaacctccaaaagcacccttctgtcgtcttctc

SEQ ID NO: 634912 - DNA, 196 bp, Homo sapiens
tactacccaggcctcttggacaccacattcttggaatagaacctgcacaacattcatcacgacacggtaggaaacgttctcactctgcattataaacaaggacagccagatctcacctgttacagaaatgacataagacggaaaattctttcacacattgattaaactatttacttaaaagaggctatacctccac

SEQ ID NO: 634913 - DNA, 794 bp, Homo sapiens
  misc_feature (54)..(54): n is a, c, g, or t
  misc_feature (282)..(282): n is a, c, g, or t
  misc_feature (284)..(284): n is a, c, g, or t
cacgcgtccgcagggatgctgctctccacttttcaaggtggggtccttgggggntacgaagaattccctcatctttctctactgtaaagtgatttgttgcaggtaagaaaataatagatgactcaccacactctacggctggggagatcaggcccagcccataagagatctacgctggtctcaggacgtgttaagagatctgggcctcatgtagctcaccccggtcacgcatgaaggcaaaagcaggtcagaagctatactctgcattatctcaaaatcttntngagatggggtcttcctctgtgcccaggctgagtgatggtgccacttgggtctgtaacctccgctcccaggtcagtgattcttctgcctcgctcctgatagtgggattacggtgtgcccaccgtacccagctaattttgtattagtcagagcacgggggtttccccatgttgggtggggctgggtcttcgaaacttcctgactcagggtgatccacccgctgagcctcccaaagtgctgggattacaggcatgagccaccgcgccgggcccactctgccattgtctaagccacctctgaaagcaggttttaacaaaaggatgaggcagaactcttccagaacaatcaccttgtgggaactgcttgtgacagtgctgaggtccccaagtgtgtgaacgaaggggcggcgggaactccctgacatatctagttaaaagggcagtatgtctaaacctcacaagccgattttgagccgtttaaaggcggtgtcagggtttccactcaaagcccta

SEQ ID NO: 634914 - DNA, 771 bp, Homo sapiens
ggagcttaaagagaaagcagtggccgggcgcagtggctcacgcctgtaatcccagcactttgggaggccgaggcgggtggatcacgaggtcaggagatcgagactatcctggctaatgtggtgaaaccccgtctctactaaaaatacaaaaacaaaaacaaaaaatttagccgggcgctttggagggcgccttgtagttcccagatactcgggaaggctgaggcaggcagaaatggtcgtgacacctggggaggcacgcagtttgcagtggagcagagaatcgcgcccgtggaactccaagcctggggcgacagaagcgaggactccggtctccaaaaaaagagcagagcagtgcagacagggcaatgtaagaagccgctattgcctctacccattttggttctcacataaggctagaaaatgtctacagggaccaggggccacacaagaccctaaatgtcggtacatcagcacggactggttcactaacacacttgtactgggacgtacatcattaggatgggaacaccctggggggtttaccccgaacagcgtggttacaccacggtgggacaacggcgggccaacagtaaaaaataaaccgggggctcaagcaccggcgaaaacacaacgtaaagaggcccaacgtaacagggacgaggagtctaggggactccacagtcgactgaagcaagaggacacgcgaaaagccattggcccccggggggcaacttggggacaggacaacccatagagggggcgtggaaccca

SEQ ID NO: 634915 - DNA, 139 bp, Homo sapiens
ctgatctagaggatcccgagatggtgtcaatccctgtgtctccatcactcttgtttgggggcgggtctctgtgcaccttgtatatcttcatactagtctagagtattactagttgggacactgccagcaccgaagctga

SEQ ID NO: 634916 - DNA, 775 bp, Homo sapiens
aagaatgtggagctcaacatccatctgaccatgaatgacttcagcgtgcatcgcatcatatgggcgcagggaggcgtttgtgcgaggtctatgggtgccggaaggctgacacaggcaagaatgtacgccatgtaaatgcctggtacaatacagcgtcatcaaacgactgaagtcagtgggggagacccgtgggccctgaagctacgtcgcatcatgctctcgctcgtcagtgctggggactgcccatttcattgtctgcattgtcattacgcgttccagcaccgccaggacctaagctcacgcttcagtcctggtagcctctctgaaccggtgtggtgacctgcatctagcaactctccgcaggcacggggtcttctcagaggcctgacatcgcgcttctatgcggccgagcatcatcctgggccctcggacgcacatgcacacaccgcgttcagtggttctaccgcgtgagcctgagatgccacgtcgcaagcatccgttctggacgtagcatggccacgtgcaggatctcggagcctgggcctgagtcgctgtgacttcgtccagcgaagaagccccatgccagcgtgggcacccacgggtacatggctccggaggtcctgcagaagggcgtggcctacgacagcagtgccgactggttctctctggggtgcatgctcttcaagttgctgcgggggcacagcccttccggcagcacaagacaccaagacagatcgagactcgaccagcatgaccctgacgatggccgtgacta

SEQ ID NO: 634917 - DNA, 581 bp, Homo sapiens
cttggacagtctgcatgcaccttgcaacatctcatgcctccttccaagcatctcatcgctcgttccaaacatctcattgccccttccaacgtctcatccgctccttccaacatctcatcgctccttccaacatctcatgcgggccttccaacatctcatggcgcgtgcaacatcgcatggcgccttccaacattgcatagcgcccttccaacttctcatcccgtccttccaacttctcatccctccctccaacatctcatcgcgcctcccaacatctcatgcccccttccaacttctcatgccccgttccaacatctcatggcgccttccaacatctcatcgcgccttccaacatctcatcccgccttccaacctctcatccctccttccaacatctcatcgctccttccaacatctcatccctccttccaacatctcatcactccttccaacatctcatcacgccttccaacatctcatggctccttccaacatctcatggctccttccaacatctcatggcaccttccaacatctcatcgctcctaccaacatctcatcccaccttccaacatctcatc

SEQ ID NO: 634918 - DNA, 362 bp, Homo sapiens
gctcgactttttgagatggagtttcgctcttgttgcctaggctggagtgcacgctgcgatctcggctcaccgcaacctccacctcctgggttcaagcgagtctcctgcctcagcctcctgagtaactgggattacaggcatgtgccaccacacctggctgattttgtatttttagtagagacggtgtttctccatgtcggtcaggctgatctcaaactcccgacctcaggtgatccacccacttcggcctcccaaagttctgggattacaggcatgagccaccgcacctggctaactttctccttgtttgcctaagagttttacaattttacatgtatgtccataatctattttggtcgacg

SEQ ID NO: 634919 - DNA, 1511 bp, Homo sapiens
gtcgggagacatggcgggcgttaaagctctcgtggcattatccttcaggtggggcgtatggactgactttgtcttatgctgggatgtgccttagaggattatggcagtttactggcccttattcgtcctgattttccacgccatctcccccatcccccatttcattgccaaaagagtcacctatgactcagatgcaaccagtagtgcctgtcgggaacatggcatatttcttcactactgggaatcgtacgtattactggcctttggatttccatgtgattcttgctcgtgtaggctagtgatcaaaactggggagcctgcggcctcatgatagtggcaggcaatgcagtcacttttccttacaattcaagggctcttcccttatatcgggaagaggagatgattacagctgggagcagtggtagcactttattctgattacagtgcactcgaatctcttagcaactcatacctatctgtatacaatgtgcacatgcggccatcttactatgcacaactctaatatgctgggttcccacaataccttttatatatcactgtgcactttaacgaaagaccttcataagtaaggacagagacgttctaatctcacgccaaactaggacctggcacacactagcataatgttacctcccaatttcatggtcggccagcataggagggccactttcgatcacggggagacccccgaacaatatttaaccgccagctcgtaaggcagcgccaccttatgcacaggatcgaacacatttggccgggagcactcccgaagagaaacaacaatgaaacagacacaagtgacaaagagggcgcggatgaccccccttaggcagtgaacgcagagtaaggggggcaaccaaaagacaaatatgaactactaaaaataaacgccccacggcgaccactgtataagacgcgaatacaacgaccacaaccaactcatgaacagggtcggcaacagcccgcagagacttagagaagacgcgccacaacacaactaaccacagcgccacacagcgaccaacagaacgacgcacgacgcagcatggggaagatgcaacaaacgacgagagcgagacagagctacagaggaggaagagcaaatcgggggggagaagaacgcgaaggcggctgcgcaccaggggaggaaaggaagaggccagcgaaggaggaggaaggagcaggggcagaatagggagggcgggcggcgagcggagtggtgagggcgaggcaggggcagacgacagagacgagcgaatagacaggatgaaggcagcaacgagcaacaacaggcaggagacgaggaagagcgactaggaacacgtgagcggacgaaacaggacaggagcggaggaagagaaacgagcagcacgagaaggaaggggagacgagagcgcgagcgaagcaagaagacgacaagcgcgaagaccgacccagcacggcaaccgacgcagacagacaggacacaagcagaacgacggcacagccgt

SEQ ID NO: 634920 - DNA, 143 bp, Homo sapiens
ctcatcggccaggttgacactaagccgtacctaggcgcggtgacgcggccgctggccaagatggccgctcgtggacttgtggggctagccgagcgcagcgccgacgccgtcgtggcggctacaccgaccgtgggggaaaggtt

SEQ ID NO: 634921 - DNA, 331 bp, Homo sapiens
gattagacttgaaaactgaaagcaggcatgcagatgtttggctcataacaactcagccttacatctcaaagtctcaccttcctgaatccaaatgcatgtttgtactcaagcacacgtgaatgttcttgctcttctgaggactttgtctagctgtctgggattcactctgcccttccctgtagagcaatccatgctttgaggaaggttctcaaacttgatctggccccatgaggctgggcactgccctgattggagccagggataagcagatatttcttgtgtcaccattccacccccaggcccttccatgtatgtgctgcaccccgccgtg

SEQ ID NO: 634922 - DNA, 429 bp, Homo sapiens
  misc_feature (6)..(6): n is a, c, g, or t
  misc_feature (17)..(17): n is a, c, g, or t
  misc_feature (42)..(42): n is a, c, g, or t
  misc_feature (92)..(92): n is a, c, g, or t
ttttgncctacctaaanccttattttaaggttatgtgtaaancaaggtaaaagaacctaggaaataagagagatgtaaggaaagcctatagnaataaagaggtatttttggttaaaaaaaagccttaaagaaaaataattttatataagaatattaggcccaggtacagtagctcatgcctgtaatcccagcactttgggaggctgaggtgggtggattgcttgagcccaggagttcaagaccagcctaggcaaaagtgcgaaatcccatctccacaaaaaaatacaaaaattaggcaggcatggtgttgcatgcctgcagtcccagctacttgggtaggctgaggcaggaggattggatcgcctgagcctgggaggtggaggctgcaatgagccatgatggcgccactgcacaccagcctgggcaaca

SEQ ID NO: 634923 - DNA, 1076 bp, Homo sapiens
gcctttcggatatcacatgtggacagaggaggagcccggctggagatctgacttacctggaaccggtgtgccttgtgatgcattgaatgcccagtgcagatatacctgagagtactagtctaataaacctgtcttcccagaccaattggtggtgctggaatcccctatgagccttcagtactgggagaaacagagtccagacatagacagattgccatgtcagtcaacagaaaccggaatgaaagatacctgcaaactgatgtagaagtccatgtactgggaagcagcagtaaggcgtgccttggccggcaataccagggcacttttatgtctgatgcgcttggcgagatacgaattaggacgtctcatgcccgagcgtacgagagtgacgtgacataaagagtcgatgagcaaagcgtcttggagctgagtgacgtattggaatccacccccgttgtattgtacaacttgggggagtacatgatggagcaaagggtgccatcaagaagttagatggccatcacaagttgaaggttcgatggtgaggtcgaaaaggacccatggaacgagaaggttcgttcagggaacaagccaggattgatctatcacgcctacttgttgaagctctgtggcggtaggcattggcgcagtcagctccagcactgtatgaaatactttgaaagccatacgagttccctggcgcaggcttgaacattccgtgtgagctcccgtccatagtacccatggcgacatcagagctgccttggtgtgttacgtgggcctagggaaccaagttcgtggtctgtgaccggcgagatcagatgccaaatgtgcaaaggtgaagacactggggctcctgttaaacgatggaagcatttccacacggacaggttagcttcacccggggacaaaagtccacctttgggaacccggggacaacggggtccggaggcccggtctggaggcaaaacttaaggggcagtggcagccaacgcggcgccccctgttgcagaccgcgggacccattgtgctaaaaatgtttgacataacactggcgaacacaaaaaaaagcgctc

SEQ ID NO: 634924 - DNA, 309 bp, Homo sapiens
ttcacgtacctattggccatttgtatgtctttggagcagtgtcttttgagttctattcccatttcttaattgggttgttttgttgctgttgagtcatttctttatgtattttggatattaaccccttattggatgtatggtttgcaaatattttctctctccctgtagattgtctctgaactctgtttttgtttctttgggtttttttttgagacggagtttcattcctgtcatccagggttggagtccagtgagctgagattgcatcactgcactccagcctgggcgacagagcgagacttcatctcc

SEQ ID NO: 634925 - DNA, 503 bp, Homo sapiens
ttcacgtacctattggccatttgtatgtctttggagcagtgtcttttgagttctattcccatttcttaattgggttgttttgttgctgttgagtcatttctttatgtattttggatattaaccccttattggatgtatggtttgcaaatattttctctctccctgtagattgtctctgaactctgtttttgtttctttgggtttttttttgagacggagtttcattcctgtcatccagggttggagtccaatggtgcgatctcggctcactgcaacctccgcctcccaagttcaggcgattctcctgctgcagccttccgagtagctggtattacaggtgcctgccaccacgaccacctaatttgtgtatatttagtagagatggggtttctctatgttagctaggctggtctcgaactactgacctcaggtgatctgcccacatcagtctcccaaagtgctggaattactgtcatgagccaccgcacccatcctcttcaata

SEQ ID NO: 634926 - DNA, 391 bp, Homo sapiens
  misc_feature (63)..(63): n is a, c, g, or t
atctagaggatcccggtattgagtggcatgtgatagaataaatgttagaattttatggtgttngaattagttatctattgctctgtaacaaatttagcagcttaaaacaacaaacattatctcacagtttctgtgggtcagaattctgtgcagtttatcttgggttaactggcttggtctctcaccaggcagtgaaggtgttgatggcggctgtgatcatcccaaggcaggatagggagagaatctgtctccaagctcacattggcaggaatcatctcagaggctgttggactgggcctccgtttctagatggctattggtcagaggccttttacaataccttgtcacgtgggcctctccatagggcacctcatcacatggccactcaata

SEQ ID NO: 634927 - DNA, 475 bp, Homo sapiens
  misc_feature (98)..(98): n is a, c, g, or t
  misc_feature (119)..(119): n is a, c, g, or t
  misc_feature (121)..(121): n is a, c, g, or t
  misc_feature (166)..(166): n is a, c, g, or t
  misc_feature (179)..(179): n is a, c, g, or t
  misc_feature (194)..(194): n is a, c, g, or t
  misc_feature (233)..(233): n is a, c, g, or t
  misc_feature (238)..(238): n is a, c, g, or t
  misc_feature (250)..(250): n is a, c, g, or t
  misc_feature (257)..(257): n is a, c, g, or t
  misc_feature (293)..(293): n is a, c, g, or t
  misc_feature (295)..(296): n is a, c, g, or t
cattcggcacgatgtatgtgctagagattaacaagcggatcacagaggagcaagcccgcaaagccttcgacagagccaccaagctggagcaggagttnacagagtgcttctcagccatngnggagggtgacagctttgaggagatctaccacaaggtgaagcgtgncatcgaggacctntcaggcccctacatntgggttccagcccgagagagactctgattcctgccctgncttgncctggactcgcnctgcctncatcacctgggcccttggtctggactgaattgcccnannccttggtccccgccggggttccttcaaaaccctttatagatatcccccctttctaagtggattcaagccttttgaagggggggacactccctctggcatggtatccccggcaccacaagaagttggggctcctggaacgccagggaacctggggggtcttgggggggaagctgggctcc

SEQ ID NO: 634928 - DNA, 453 bp, Homo sapiens
  misc_feature (98)..(98): n is a, c, g, or t
  misc_feature (119)..(119): n is a, c, g, or t
  misc_feature (121)..(121): n is a, c, g, or t
  misc_feature (166)..(166): n is a, c, g, or t
  misc_feature (179)..(179): n is a, c, g, or t
  misc_feature (194)..(194): n is a, c, g, or t
  misc_feature (233)..(233): n is a, c, g, or t
  misc_feature (238)..(238): n is a, c, g, or t
  misc_feature (250)..(250): n is a, c, g, or t
  misc_feature (257)..(257): n is a, c, g, or t
  misc_feature (293)..(293): n is a, c, g, or t
  misc_feature (295)..(296): n is a, c, g, or t
cattcggcacgatgtatgtgctagagattaacaagcggatcacagaggagcaagcccgcaaagccttcgacagagccaccaagctggagcaggagttnacagagtgcttctcagccatngnggagggtgacagctttgaggagatctaccacaaggtgaagcgtgncatcgaggacctntcaggcccctacatntgggttccagcccgagagagactctgattcctgccctgncttgncctggactcgcnctgcctncatcacctgggcccttggtctggactgaattgcccnannccttggctacgcccggcctgcctaccaccccttcataataatttccttagaaactggatccagtctgttggaggagggacacatctatgcatgtatgcgcgtaccccataactgggctcctgaacgccaggaacctgaggtctgagagggtgatcga

SEQ ID NO: 634929 - DNA, 781 bp, Homo sapiens
agcgaggcgggtgagtgaagggccgggggcgtgtgggggagtggctgggcgctggtgggcggtatctggaccgggtgggctgctggtagagtgggcttggttggtgttcccagggctggggttcgttccgaggtggggctccgcttatgggaagagtgcccagcggatggggccttatgtgtcatgcgtagtggatgagtgaggctggcgaatggcggtggtgcgggcaaatgtgctagtggatgtcgggcatgcgagggcggtaattcgtgacccggagctgtgcgaggagagtaccgaggagggggatcaggcagggagaggatgatacggactacaagaagtagaccttcctcgaggaactagccttatcccattttgctgcctgaagttaactgtttcgttgctgggtcaaatcagggacatgccggcattaggcgggatgagtgggctgtaccggacagggaatgctggatacattgaccggccagtgatcgtgctgagaagtaccacgggtccagcttcttccattggaagcttggacgatgattggggcttgggtacacacccggagggaaataaaggccactgaagggccctcggagagcatggaggtgaccaggggaagccttcgcttagaagctgaatgacaggacgggactgcaaggttggcataccgtgataggttccagaatcatatagaagcggactcttgcgggccaagtgaacgcagagtaaaacttcgcacggtgcgcaacggccaatgacatccgagatccta

SEQ ID NO: 634930 - DNA, 1166 bp, Homo sapiens
tcgagacaatccttagctaaatcatttacccaaataaaggtataggcgatagaaattgaaagcctggcgctaatagatatagtaccgcagagggataagatgagaaattataagcgcaagcataatatatgcaagggactaacgcccttatacgcgttctgcagtagctgaatttaagctagaagagtaagctttgcgaaggagagccgaaagctagagacccccgagaagcgatacggagctaccgtacagcaacaggctaagagagagcacgaccctgtcgtatgtagcgagatagatagtgtggaagatttggtagggttagaagggcggacaaaaccttcacgggacgccgtgggtgtatagcgtgggtgtgctccaatgataacgacatttctgtaaagtatgcatacgttttaagaaatgtctggcctcgaacaggacaatcccgtcttgaaaatctccactctttggttaaagagtttagaatcgtggttcagttcccaaacgtaggcaaccgagcttctctgagggaagcgacctaaggggagacagaaacgctttggtgagcaagaagaagttcagagacaaaatgtgtaaatcacatccgataagattaggggcgctaaacacaggctaggtccaacccaaaatttcaaatgacaaacacgggcggttatacaaaagcccttccaaggaaacaccccaaaatatcccttaaaaatatatattcgcccaaatagcaattataggcttggaaagcttcccctccacgaagcgcaaagtgtgggagcccaaagtcataattcaacctcctattacgaaaaagaaactcaaagtggtctcacgtacactaaaggtaaagccatggaaaagagccatttcttcgccttccctgcccaattaaaagcgcccttgccggttcacaggaactgttgacaaacaacccaacttaggaacacctgtggagcggaaattttcaaaccgaaggcgcgctaaaggttaattgctaaaccaaaggtcaaaagccaaaacaaaaggggttcaatttatttgaaccccctttcaaccttgttgcgagactccccagagcacaaagggggcactgggcgtccaattaacggcgagaaggggttgaaacacaaacacaaggtgacacaaagtag

SEQ ID NO: 634931 - DNA, 91 bp, Homo sapiens
agcgccagcgcgatggccgcgttccagcaggactttcgcagccgccaggaacgcaccgcacccgccgcacccgccgaggacgccgtggctg

SEQ ID NO: 634932 - DNA, 1166 bp, Homo sapiens
gcagtggcggcagctgggggcgatggcagtaactatgcggcagatacagtcgtgggaacgcagagtcggggcgggtgacgggtgtgcggaggtggtcatcgactcttgcggaaaacgtgctgtggcaccggtcagtggcgctgaacggtggttcgtagtaccatgctccgagtgtgcttagcggatggccttggaaatccggcggtgccaagccgactcgggagctaagtccacaatctccgcaaaaaattggaatcatcaagaccagatacaggtattttgaaggtgatgctgggctacgatggaccggtgcccatgtattgcagagagaggtgtaagccgtattacattggattttcttccaagaacgtccaattacggtgtttccaaaggcgaagcaaattccaggtgctaccaagaactattgcatttgcattattgcagcgttagaaaattttctaattttgggaatccgaggtatggcaattggaaggtggatgctaaaaaagcttctttggaattgtagggcatcgtggggaaagggtgggaaatccgtttacgtgtggattggtattggcacgtgttattgggttgagaaatagataccgtgggaagaaaaggtccacttaggggaaatttgtggatccaaggttttacaaagaagcttaagtttaagagttgaccttcgaaatagaaatttaaattgttcacggaaaggggacggaattcccaaacaacttttccttgttctttccaggcgggcaggcagctaaccaagcgcttgtgtcggcgagggggcgggacatctggacagaaagttgggggaatcatggcctgaaagagaaaagacccccttttaattggagttggcgcaattctcaatggttggtgcgaggcgtgtgagtaggcccccttttgtttggtaccccccccaaggaggggggcgcacaatatagaagcaccacaggttaaaaaaggccccgggcgaggagaacacagctgtagggaattatgccggctggttggcggtccccaagtggaagcgaggcgggagaaaccccaaacattgtttgtgacggcccacagagattgtagagacgcttaccacagagcgagggccagcgcgctcctcataagaggaagagcgccccagacagaggaggggg

SEQ ID NO: 634933 - DNA, 1022 bp, Homo sapiens
ggtcccctcgacttccggtgcttccctacccgtggcgccctatatgtccgctgtgccaccgtccccactgcgcgccttctgcatcggcggtcactctcctgtgtttctcccccgtgattcttttcgggccatggccctctccggtgcgcttctcgttggttccgtgtttttgctgtgtctttcccattcccggtgttatcgtcggtctgttctcccctctgtgggtgtgcgtagcctggggtcctcacctggtttaatatttccgcctccttcggcggggtatttctctgccgtgaattgatcgtgtagttgtaatttcattgcttgcattgcgtcccccatttggtgccccttcggttgccgcgtttactgcgcggtccgtggtcccgcttttcgtcggcccccatggggtcgcgctacctcttctctgggtaggttccatggggcttcctacggcatatgccctgtgcgtgccccgccctgtgtgggtctgtctgtttctggccgcttccctgccgtcccgtccctccactggttttcgcgtgggcccttgggacgtttcaacgtctggacgccactcctttcactactatgctaggcgcgctttcccacagttttctaggtctacgccgctacacgtcctatggctggaacgaagtcgtgtttttccctcgaatcgcgcccttccatctcatctgggcctaccccattgcccaggggggcgccttaatgactcggtcggtctccatccctgtgtcgcgggtagcttgcctgcccgtgaatgtctgggcccctcctgtctgcttggtgcccgccttccgtcctcagtcggctggggacagttctcatgcccagtgactgggcctggggctgtctgctcgtcgtcctttgccgccgccgttgtgggtgccctgcgcgtgtcctccgtggtcgctggctatggctcaccaggtgtctagaagggcacggtcatgggtacatctgcgcagcctaggtgctctggccagggccgcggggccctg

SEQ ID NO: 634934 - DNA, 970 bp, Homo sapiens
cttgcggagtgcagaaggctttctggcagctgcctgggtgggccagacccgtgcctcccctcccggcggccaaaccctagtccccttcctgtctccacttgcattcaggggtggctgctgtgctgagcaacagttagaactgggaagagagatggagtcacatggattctttggtgtggcattattctataacttatcgtgatcgcagagttagtgcccccgttattccgagctgtgtgactagttggccgttctaagcagttacctgagtgtcctgactgctgtaagagctgctcagcaggtaggcggcggcggcctggcactgccccttgcattaggtcttgtgtgggatgtgttcttgtgaatgtacttgtgtcagaacaaaatattttacgcggtagggttcaggaggagtttcgttattagactccccatctggctgtgaagttcaggaaacctcccgttggctagtagatcacccgatgtaggtgtacattgtgacaaggtggcatctgagcactaaggggcccccttggtgaccccagcacattcacagcagtgttaaaatggctgcatttggagatgctggcgtggcctttcagtgcctcccaggtaagacatcatggcctttccctcttcagatgcctgaagggagtgctttgaggcaggtgatgtgctgggagtgtgggctggctccctctggccccgtgggccctctgtggaccttgggtccctccgtggaactgggcttcgtggtgagcacttgagctcccttgggcagttcgcctccaggcgccagcaccacttgtcagcatataggacctgggtgctattgtatttaggctgggggtgtaatgctcttcattggtgtaaaaattggtgtgcttttgacagatttgaggtgaatggggtaactgtaaggttgagagttacaatgaagaaaaaattcatgacaaaaaagaaagaaaag

SEQ ID NO: 634935 - DNA, 349 bp, Homo sapiens
  misc_feature (6)..(6): n is a, c, g, or t
  misc_feature (107)..(107): n is a, c, g, or t
  misc_feature (111)..(111): n is a, c, g, or t
  misc_feature (127)..(127): n is a, c, g, or t
  misc_feature (147)..(147): n is a, c, g, or t
  misc_feature (243)..(243): n is a, c, g, or t
  misc_feature (262)..(263): n is a, c, g, or t
cagtangcatgcaatgagtcttggtaactaaggtctcactctccagttagaaaaacagaaaaagcactattgtttctagatttaactctgagcctctataagtttangttngatgggggaaaacacntttttaatgctaagggtcanttcccctgttcccctgacttagcttttccaccacactcacaattatcacaatgtggtttttgtctcagatgtgtgcctgtataatatttgtatacntttacaaacaatgagatcnnccctgctgatttcctggtgtggacaaactagggacattgaggacacagatggatgggctcctctttacacacttactctgtacaca

SEQ ID NO: 634936 - DNA, 192 bp, Homo sapiens
  misc_feature (110)..(110): n is a, c, g, or t
  misc_feature (138)..(138): n is a, c, g, or t
  misc_feature (158)..(158): n is a, c, g, or t
ttcaaaccctggcggcacggcttgtccctcgaggcccggccccttccccttccggagagcccaccgctgggtcctaaagcccaccgctgggtcctaaagcccgccgggtntttacccaggacggggctggggaaaccnggtctttcctagctcttggnttacttcctggagacttcttaaaacgagaggaga

SEQ ID NO: 634937 - DNA, 248 bp, Homo sapiens
gctcacatctttaatcccataactttgtggagctcaaggcatgtggatcacttggtttcaggagttcgtgaccagccttgtcaacatggtgaaatcccatctctactgaaaatagtaaaattagccgggcttggtgttgtttgcctgtattctcagctgtatcttgggagtctgatgcaggagaatcacttgaacctgtgacttattctgagttatctctgatgctagtttctctgttgatggttgca

SEQ ID NO: 634938 - DNA, 220 bp, Homo sapiens
gtgcgtatgcattgtcccttcacgcccagaacttactcacgtcatagctatcacgcctatctaatgcatctggtcagcctttaaatgcccagattttgcctcataaagtcagctcctgtttaatggcgggctctcaagtcccaccttctgccttcctgtgtccactccaggcccagctactgcctttgtgctcttatgaagtcaataatttcctctgtta

SEQ ID NO: 634939 - DNA, 255 bp, Homo sapiens
  misc_feature (2)..(2): n is a, c, g, or t
cngcaagggtttgggagcttttaatgttccccgggggtaggcctttcctgccgggggttttgatgcaaaagtggaaatcgcttaaatgtccttggggtgggggttggattaatttttaataccaaaaaaaaaaattggaggctgatgttttagcttttttcccacccccccaaggtaaaaaaaaaagcagtggcccgcccttttgggaatcagttttgtataatttaaaaaaattaaataaatgaataaatccca

SEQ ID NO: 634940 - DNA, 469 bp, Homo sapiens
gggcttggtagttgcattatacatgtactggctgatagatcatataaactcataatcactgaagtgtgctaaatgatatccgtgaagtgggtatatgccatagtttatctacccattcagatgattctctaaagggaacttaggatttcaacagttttgacacactgtattactaaccaccctaacttatcgaccaaatataaataacaatgatttgcatttgaagggaacagaaatgactcacttccaaaattggtttgcattatataatttccaaaattatgtatctgtttatctattttttgagacggagtctcattctgtcgcccaggctggagtgcagtggcgcaatcacagctcactgcagcctctgcctcctgggttcaagtgattctcctgcctcagcctcctgagtagctgggattacaggcgcccaccattacacccggctaatatttgtatctttagt

SEQ ID NO: 634941 - DNA, 327 bp, Homo sapiens
  misc_feature (283)..(283): n is a, c, g, or t
  misc_feature (304)..(305): n is a, c, g, or t
  misc_feature (307)..(307): n is a, c, g, or t
  misc_feature (310)..(310): n is a, c, g, or t
cttcttctcagggtcttagatgttccattgtaattctctgcctgtaatctcccgctccaagtgcccttgggtctacagttctccggcagttttcatgtgccatggcaccttcccctgctttcagtggggttcaacctgctatccaactatgccaccgttcccatctaagctgagtcatatgaaataaaaatcatttcctcagccaccccccatacaaaaaaaaacagtcaaaaaattcttattttgccccagaaaaaatttaaatctcccccccccccccaanaaaatttcttttggtggaagnnanccnaagaacccaaaaaaaaa

SEQ ID NO: 634942 - DNA, 145 bp, Homo sapiens
taccaggttccgggcgcttctctcggaggagactgctgagcgcgtgcgcatacccagccacgatagaataagacttctaggtgaactctgtgctccacttgtcccaaggaacttctagcagctagggccccctcctttctggtcg

SEQ ID NO: 634943 - DNA, 400 bp, Homo sapiens
atggcgttaaactggctcccccacaccctttttttcggcgcagattcgctaatctaatggagaaagctacttttgacaaggatgtttatctgatctatttcaagaacaccttttttctaacgctgatgggtctaaaactcagaatattatgaactaaaaaaagtacatattaagagcagcttctgagaccagttgtttctggtttatttttttagttaaagagtataaacatattggatgttctgctggtttaattcttcttaaatctcagagatgttaatctgattgttaacatgatgatgtaaagccattatcacatgtgtcttgaacgactcttaaaaaaaaaacattaacatggggatatgataaggataacccatctaaccccacttacaatcca

SEQ ID NO: 634944 - DNA, 497 bp, Homo sapiens
aaacataataaagtacaatggatcctgaccagggtttttaataagatactggctagggcatttcaagtgtggcaaaaaaattagcatagttcttttcaaaagaaacggtcctcagggttctagagacctagagggttccaagaaatcaaatcctaatcagttggcggttgaagtgtatggatggagtccatacattcacactgtagataggcaaaaccaagaacggatgcaggctcaaaggaagagaaagtcagcgcctgtgcctgccatgtcctgagcgattgccaccatggtgcttgctttaatgggacctctcaaaggagcgagatcgttcacgccggtccctatgatgtcccctttcatgcctgtgttactgggcggcatctgagtgatcccgagacttgctctgagatcgagaacgaggatttttccttttatgaccatgtcggttggaactttttaaatcatctcgggtatgctcagggcggggtaccgag

SEQ ID NO: 634945 - DNA, 215 bp, Homo sapiens
tctagaggatcccggtcattttctacacagcaaaaccccatttctacaaataaaaaaaaaaaattaactgcacatggtgggtacacgcatttagtcccaactacttgcgagactgaggcaggaggatctcttgagcccggtaggttagagttgtagtgagctatgatcatgtctctgcactccagccatggtgacagatgtgagacgctgtctct

SEQ ID NO: 634946 - DNA, 535 bp, Homo sapiens
  misc_feature (161)..(161): n is a, c, g, or t
  misc_feature (164)..(164): n is a, c, g, or t
  misc_feature (166)..(166): n is a, c, g, or t
  misc_feature (193)..(193): n is a, c, g, or t
  misc_feature (238)..(238): n is a, c, g, or t
  misc_feature (245)..(245): n is a, c, g, or t
  misc_feature (269)..(269): n is a, c, g, or t
gggctggtggggtggggaaagcagcccattcctggtgctcagagactcccaccccagctcagagggagcaggggcccagccagggacggaccctcattcctcccagggaccccagacctctgtctggccttggctccttgaacttttggccgccatgtgcnttncngaaggtcctctctgatgacatgaagangctgaaggcccgaatgcaccaggccatagaaagattttatcgatnaaatgcnaaatgcagaatcaggacgtggacnggtgatgtcgagcctggcagagctggaggacgacttcaaagagggctacctggagacagtggcggcttattatgaggagcagcacccagagctcactcctctacttgaaaaagaaagagatggattacggtgtccgaggctaccgatcccctgtcccggatcttgaggatcccgcaccgaggagcctggggagagctgttgtgaaccaggtcactgagatggttcccgccctcctgctcgtctccgccctgatgctcgtcctctcg

SEQ ID NO: 634947 - DNA, 830 bp, Homo sapiens
  misc_feature (456)..(456): n is a, c, g, or t
  misc_feature (459)..(459): n is a, c, g, or t
  misc_feature (461)..(461): n is a, c, g, or t
  misc_feature (488)..(488): n is a, c, g, or t
  misc_feature (533)..(533): n is a, c, g, or t
  misc_feature (540)..(540): n is a, c, g, or t
  misc_feature (564)..(564): n is a, c, g, or t
gggctggtggggtggggaaagcagcccattcctggtgctcagagactcccaccccagctcagagggagcaggggcccagccagggacggaccctcattcctcccagggaccccagacctctgtcttttttgggttaagtttcaattttggctggctttggctttggctttggctttggctggtttttacgcacttagcaaggccttctggcctgagagaggcttcggccactaccccccacttttcccataaaaccagctgagtctttgtgccaggaagactgcgtgcagaaggtgactgtctcagtggagctgggtcatctcaggtggggagttggggtccccgaaagtgaggaccctctggggaggagggtgcttctctgagacactttcttttcctcacacctgtttctcgccagcaggccttggctccttgaacttttggccgccatgtgcnttncngaaggtcctctctgatgacatgaagangctgaaggcccgaatgcaccaggccatagaaagattttatcgatnaaatgcnaaatgcagaatcaggacgtggacnggtgatgtcgagcctggcagagctggaggacgacttcaaagagggctacctggagacagtggcggcttattatgaggagcagcacccagagctcactcctctacttgaaaaagaaagagatggattacggtgtccgaggctaccgatcccctgtcccggatcttgaggatcccgcaccgaggagcctggggagagctgttgtgaaccaggtcactgagatggttcccgccctcctgctcgtctccgccctgatgctcgtcctctcg

SEQ ID NO: 634948 - DNA, 319 bp, Homo sapiens
  misc_feature (199)..(199): n is a, c, g, or t
  misc_feature (209)..(209): n is a, c, g, or t
  misc_feature (244)..(244): n is a, c, g, or t
  misc_feature (250)..(250): n is a, c, g, or t
ttcaggtcttacatttaactccttaatccattttgagttgatttttgcatatggtgtgagataagcttctggtttcattctcccacatgtggatatccagttctctggacaccatatatggaagagactgtcatttcctcatgatatgttcctggcacttttgttgaaatcaattgaccatagatctgtgggtttattnctggcttttnattctgttccattggccaatgtacctgtgtttatncttgtnccttgctgttttgattattatagctttataatatgttttgaaatcaggtagtgtgatgcctccatcttt

SEQ ID NO: 634949 - DNA, 1289 bp, Homo sapiens
  misc_feature (221)..(221): n is a, c, g, or t
  misc_feature (438)..(438): n is a, c, g, or t
  misc_feature (1115)..(1115): n is a, c, g, or t
  misc_feature (1274)..(1274): n is a, c, g, or t
ggaactgggtaccggcccggaatttactggtcatagttacgcaacgagcaggcctagagtctgaccccagacgacactgcacgtcgtttctgactacagaggatgcactaattctatttcctgtgccacctgagaaaatcataatctgagaagagaaagtgtcaggccatgtcgtagtgaactattatttccaaaccctcacggaaccctgtaacagggtngtgaattgatggattcatcaacttagcttgactgtctgcctggtatcagccttctgctgttcgcaactcacataaaggctaaagccgcttacagctatggttcattattcctgtccagactcgtttactcgccgctaaagattatctcatgttcatcttggctcagttctcaacgcccacatcgtcgacgtctcattaacggataatcactagccanaacatcaagatcagtaccttcacctttgtgatgccaccctcgaaggtaccgcagtggagataggtccatactcataagcgtagaagggagaagaggggaaaagtcatagaagggacaagcgcgaggggatggctattttcgatcaatttggaccttcctcgttatcgcttctttcctgacacgtacgccggggaatatctccgagcgtaacgttgtcgagaacgaagtgcttgcgaaggaagagatccatattagtggacattcccattctctatgcgccttgccttctagaatctctcccctcttccttctagcacttggtcgtcccctaccacccgtggtttaaatactaggggggtaaaaacccttgttgggtgagcttgactccgtaaactttgtaaggttttaagagaacgggaaatatttagctcgggtggaaagggatgaatgcgggggcaatagggtaggttgcggttttgggacagtcgacggaagcgggagaatttgggaaatttttaatagtgggggacagctcttttgtttgagcgcgcgaagataggaaccgttgacttttcgcgcaacgccgaattataataggtaaccctattcgacgtaagataaggggcctcttggacccggcttttggtttgggaaagagcccactttttaccgcaggnggcgtaggccctctaacgaaaggggcgaaattggttgaccaagggttggaaggaattcctaccggaatgacacgcgcgcactgtgtgggtggcccagcgggagatggcccccgttgtggatgtcgccgtttagggggggcaaaaattctgcttttcttnctccttcaccaaacg

SEQ ID NO: 634950 - DNA, 216 bp, Homo sapiens
tcccacccgagacccactgctcctgtgtgggaagcagagctgagattggggtgcgggggcctttccacggtcctactggtcccatagtgtcaggaccctggctgtttgggctgtgggctctcatgggacctggagcagggtgtgtgacaggactaggaatcccgggggcctgcagcgagaacatggcagtaccttggagggaaacccccccgaact

SEQ ID NO: 634951 - DNA, 677 bp, Homo sapiens
gtttactccttgggcttctttgcgtggcgggcgcttgttcccggtttaggactctgccccggcgtttgtggtctcgcccgccgtgttcttcctgggcgatcctctgcgagttctttcaccgggccccccccaggggtgtttcacgatacaggtctcccctggctccgggccccctcgggttctcggattctggcttggggttctcacccccgggctgtactccgagccccgcgtatcgccgtgggtatccgccacgtctccctttctctcgggcggagtctctgtgcccacgcccccaaatgtgcttttggcctgaggatcttcgctccccctccgctggcttcccacggtttcccagcgccctccctccggtgcccctccttaagggcccccctattggctgcccacgcacgagaccgttgccccccaggtccgcgctcgtgtggatcccgttccacgctgtagcacttctctccggggtccctcgtcctcttgtttgttaacccccccgacgtctttgcctctgtcgcagctgcaacaattctttctcttttgctcccccgagggcgtttttcctccgggggacgctggtttctcctttttcgtttgccccccccccccttcccccgccccctaccccttcccccccacaaaacaaaaaaaaccaaacataaaaa

SEQ ID NO: 634952 - DNA, 1185 bp, Homo sapiens
gtgtgtcggagccacccgcgtgttgccccgatatagtccgggggctatcctcccggtttagttattccgcggccggtttacctttcctcacccggatccccttttccccttggcccttttggggcccccatatgacccaggttgtccccaaagccacggcggtctcggtgtccggattttccccggagttgttttggagccaacggcggtccgggccccctctgcgagcccccgatgtggctgcgcaactgtgttgcaacttctggccgcttgcccttttaaccctcccttgggccaaccttccttggagggaccctctgcccacccatttgaggggccctgagtttcaagggtccgccaaaccccttgtgcacaactaagggggcccaccccagcgcggtagacattcgggggaatcatgcgcccccgactggggtgtcccctgggccccgctggggccccacgccacctgggctggtttactggaccgattgggtcttcgagggccccttttcgaggatatttgacaccccttttattgtagtgacccactgaaacctcttgggcaccccaaaccttctgaggggcctccacaaacccacgggcccctgagggattgtggcccgcggaccaaggaggaaagtttccgcgaggcctgtgaacgaaggcccgcaaattgtgaactataccttcactggaatgttgctgtgtgggcacacacccaggcacctggaggcgaaccccccgggggccacagggcgccttgagagccccctctggtgcctggaatatgggttgttcttggtattcttgaaacctgaggccctgtcctgtgctggcacccactggtccctctgaaaagaccaccagctgggcttctccttagtcaccagaagaacaccgaggctttgggcccacctttgtggagaagcaccagaaattttagatcctgggcgcaacattctcacacataccgtcctccctcgttctccacgggctggcacgggggaggcctcggagattaccccccttagttgagtggagatgaccacgggttcttggttggggagctgaatttccctcggccctcggggttcactagctttgggcttgttccttttttgatacgggaagagacccccatccagatttttccaaatttaagcccgtcctggggaatttcca

SEQ ID NO: 634953 - DNA, 315 bp, Homo sapiens
  misc_feature (18)..(18): n is a, c, g, or t
  misc_feature (245)..(245): n is a, c, g, or t
catagaatgatacctttnaatgacccgcaagctacatttaagtgaacattaatgatttcggtaagcttggtccactctgggaagtgatgtgctgtggttggtttcagttgcatgggagccagtcgaagctacaactcatcgactgccctgtgccagatgaaaggaggtggttgatttttgaacaccttttcccttccttagggttggtgagctcatcgctctctgtggagttcatagtgtccctntaactgagtatcttagctgtgaagccaagcattgtctctgcaggagtggcacacagattttccaaggctg

SEQ ID NO: 634954 - DNA, 344 bp, Homo sapiens
  misc_feature (13)..(13): n is a, c, g, or t
  misc_feature (44)..(44): n is a, c, g, or t
  misc_feature (49)..(49): n is a, c, g, or t
  misc_feature (52)..(52): n is a, c, g, or t
  misc_feature (54)..(54): n is a, c, g, or t
  misc_feature (109)..(109): n is a, c, g, or t
  misc_feature (159)..(160): n is a, c, g, or t
gttccagtcctgntggagatgcagccaaaacccacaggacgggncatcnccncnaggatgccgggaacagaggggtgaagtgcttttctctggtcccatattttctccnccagcttcttagttgcctagatccttgctgctcaaagtgaggtatgaagnncagcagcagcagcagcatcacctacgagagtgttaagaaatacagaatctcagcacacacacccccgctccacctactgcgacagaacccgcgttttaacaacatccccaggggatttggtgattcatgtgcaaaaaaagtttgagaagcactggcctagaagacagcctctgagaatgacctc

SEQ ID NO: 634955 - DNA, 616 bp, Homo sapiens
cgacagatgctattggacatgattagtagtccaattcaatggattacagacttcgtgaggacaggaccaacttatctctcatggggtttttttagaatacttttataacccaggaagaaaccatgccagctgttacccgtcaacttcttaagcagagattaagctttgtcatatcgtgttcttatcctggacatccgtagtttttaattgcccagcatccggtccatcttgtgacgactccctgatgtttcgttaaaccacctcttcctatttgtcagtctgtggtttggacagtctgaccccagccttgagctttgtgggtgaacatgtaattcagacctcatccatcacgccaatccactctgaactgtggaggagaagctctctttactgagggtgctttagctttgtacggatgaaaacctcctacttacccgggcctaccctgtagagaatgaatgcccgtgtcacggggaaagcagagcccaaatatggagagacttgaatcctgatgaccagcgtttgtgcccctggatcccaccgtgcctgaagctagaatatccctggacttttccagttatgtgaacccaataaatacccttttttgcttaagtta

SEQ ID NO: 634956 - DNA, 322 bp, Homo sapiens
  misc_feature (31)..(31): n is a, c, g, or t
  misc_feature (34)..(34): n is a, c, g, or t
  misc_feature (41)..(41): n is a, c, g, or t
  misc_feature (46)..(46): n is a, c, g, or t
  misc_feature (51)..(51): n is a, c, g, or t
  misc_feature (56)..(56): n is a, c, g, or t
  misc_feature (60)..(60): n is a, c, g, or t
  misc_feature (72)..(72): n is a, c, g, or t
  misc_feature (81)..(81): n is a, c, g, or t
  misc_feature (89)..(90): n is a, c, g, or t
  misc_feature (113)..(113): n is a, c, g, or t
  misc_feature (137)..(137): n is a, c, g, or t
  misc_feature (162)..(162): n is a, c, g, or t
  misc_feature (203)..(203): n is a, c, g, or t
  misc_feature (222)..(222): n is a, c, g, or t
  misc_feature (242)..(242): n is a, c, g, or t
  misc_feature (253)..(253): n is a, c, g, or t
  misc_feature (257)..(257): n is a, c, g, or t
  misc_feature (262)..(262): n is a, c, g, or t
  misc_feature (283)..(283): n is a, c, g, or t
  misc_feature (291)..(291): n is a, c, g, or t
  misc_feature (308)..(308): n is a, c, g, or t
tagagagagagagagagagagagagagaganccngcggccnttttntattntcccncgcngatgcaatgaanggaaagganggtgttgnngaatgttccttcgttaagtcacnggaaacggaatgtacctacttctncacaccgctgctgctcgggaaaacnggcatcgagaagaacccgggcatcggcaaagtctcctcttncgcggagaagatgatctcngatgccatccccgagctganggctccatcangacnggggnagatttcgtgaagaccctgangtgagccnctgtgacgggtggccanttttcttaatttat

SEQ ID NO: 634957 - DNA, 634 bp, Homo sapiens
tatgtgatgatttgttggttacaacctagcattttatttagatcttcattaaactgacggaataggcaaccatgcatccgttataacacctccaaaaatagcatcctgaaagggactttctggttagggcaagcagtcatggaattagcatgtaaacaagctggcttctatgtaccacaccatgcaagtcagctttcatccatgagcatccggaccagctactgcctaccttctgtcaacaccaggcagacgccgtgtaggtctaacccaaggtttttctgtaggacaccttggcctacctgggaatgctggaaacatggagcttaaggaatcatggcgatgagagaaaactgccgacagatcttgtaaaagctgacatctgaggcgatggcttctatgtacttacgccataccttagaatacagtctgtgagcagttaaaagacgctcgagcatgaagggatttcctactgatcaacgaaagcactgctctatgaaagaagctggtcactgtgtagctacaccagctgttcataaagctcattggacctgagtttgaaaataaaacacaggttgaacactgcgatgaactattgatcaatgtggacttcttaggcttttttcataacgaataa

SEQ ID NO: 634958 - DNA, 386 bp, Homo sapiens
gccaatgctggtgatcgcctcaggagactctatacaactcctggcagacaggacggacaagcatggcacctttttcacagggcggcaggatcaaacatgactgccagcagtggacctgccagacgcttataaaaccttcagatctcatgagaccggctcactatcacgggaacagcttgtaggaaaccggccccatgatccagttagctccacctggtcccaaccttgacacgtggggattgctacaattcaaggttagatttgggtgaggacacatagccataccatatcagcccagatcaagtagtgacagagtagggatttgaatacaggttatagtcactattgtgttatttcttgacttttgtactattaaaaaactgtag

SEQ ID NO: 634959 - DNA, 102 bp, Homo sapiens
ccccgccccgccgtccgccgaccgccgccgcccgaccgctccccgcccccagcggacgcgcgcgcgacgagacgtggggtggggggggggcgcgccggcgcc

SEQ ID NO: 634960 - DNA, 780 bp, Homo sapiens
gaaacgtcagctgcgctcccctaggagtgctgagcccgcgaacctgagccatgactgaggctgatgtgaatccaaaggctatccccttgcgatgcccactcacaagaagctatgacctcgttcagcagtcatgtaactataagcagcttcggaaaggagcaatgaggcaacaaaaacctcaacaggggcatctctgagttcatcgtgatggtgcagaggcgagccactgagatcattctgcacctgcgctgctgtgtgcaagacacagaattgtgcccatacgtgttggtgcgctccaagcaggccctgggggagagcctgtggggtctccaggcctgtcatcgccttgttctgtcaccatcaaagaaggctcgcagttgaaacagcagaatccaatccattcagcagtccattgaaaggctctttagtctaaacctgtgcgctctgcccaggtgctccctgcaagttttcccccctgaggttgtgtatcatatatctggtgttaagccatggtagtattcaaggctactcctctaatggtgactacaactggtcggtcgttaacacacgacgaagacacgcccgcagacacacacacttttgggcccgccccgcccggaaaaaacgttctctagcaacccccgtggtgggcagcgggaccaaggggcaagaagcacggccccacagcgggcccacggagaccggggccagcacaagtggcgcggtcccaccaacaaccccggcacccgcgcgcttgaaaccacggcggcggccgcgcca

SEQ ID NO: 634961 - DNA, 423 bp, Homo sapiens
gttatttcaaaaattaaaattctcattttctttcttttttttcccccctgctccacccttcaaaactcccgttagatcagcattttactccaagagtgaaaggaaaaccctaacagatctgtcctagtgattttccctttgttttaaaaggcgcccctttcagggttgtggtattcttaggttagcggagctttttcctcttttccccacccatctccccaatattgcccattaattattaacccccttttttgggtgggaaccctggcagttttgctcccttcctaggatctgcccctgcattgtagcttgcttaacggggcccttctcctttttccaaaggtttccattttaggggggggggtgggtttttctgtaaagagatgaacgcaatgccaataaaattgaccaagaccaatgata

SEQ ID NO: 634962 - DNA, 299 bp, Homo sapiens
  misc_feature (186)..(186): n is a, c, g, or t
gatcccacttatcgtggggtatctactattgtcagtgctggatacagcagagctcatcgtctgtgagcacgtctacaagctcgtgccctagggtcttctgatcatgcacacatgcatcagaatgatgtctatatggctcgtacacgtgccaccacagtttcagaaacacatgctgatctcataatnccgacgtgctttttcttctctcacgtgtgttgctgcttgtgcgcaacacccagctgtcaatgagaatgggagtacgctagacttgtctgacctagaagctgagaaactggtga

SEQ ID NO: 634963 - DNA, 552 bp, Homo sapiens
acgcgacctccacgaccgcacgaactacggctacgtacgaggaccgagggttaatcggccgaggcacgtaccgggagctcaatcctgtccatcctgctggaggaggtcagcccgtagctggtgtgcatgcatgctgcacctctgctctgtgcacgcggctgcctgcactgaccgttcacgtgactcagccaaaggacgggtggctatctgcgtaagtgttgcaagaatgctggtgggtttatttggcatcgcaaccctggagaaaacgcacagcagaatctgctgctctgagaagtgcagttctgcaacttacaagcagtgtgatcgtgtgcgagtacagccgtgctgtcgaatctgtgaggtaggatcttcttctgtgctgaaatggagcctgccctcggccataagcctgttgggaacggagtgtttgggccagctatgtgccaaacacagaacagcagccatagcagctgtcacatgcacgcatgtgtgaatgaggaggctatccatctggcgaaacaagcatggttttctactcgtgtgctgggggac

SEQ ID NO: 634964 - DNA, 504 bp, Homo sapiens
tgagtgcagtaatatttaataaaatgagaatgtttgcaagctgaatagatcattcaataatttatctgttgtgtagatttggatatacagcagactcttgacattcctgaggcatacatctgaaaccttcttgaattcccagatccacaaatacaagaatgtttatagaggctcccagctttcgcttgaatcacatttctatggagagccatatgcgttttcctgtgcatagcctcacactacaagttaaccctactttcagatttcactaaatattgctctcacctgatggctgtttttcacagacacaacacactgttttaattaacaagcattgttacaaatgcatgaatgcgcagaacaataaggataaatgacccttttccataacatgtgtcttgcaaagtagacttctcggattcatacctcagcccaactctgtgccacagacccacaggggaacccacaaagaatcacaaacctgtgagttaaatccatgaacac

SEQ ID NO: 634965 - DNA, 1518 bp, Homo sapiens
  misc_feature (716)..(716): n is a, c, g, or t
gcaacagagtgagactccgtctcaaaaaaaaaaaaaaaaaaaggtttcccaggcacaaaaaatacggcttggtcctttcaaaaacaccaaagaattgggtgttctcagaattggcaaaggtccccggggaaaaacccttggcttggaaatcactggagggactctccttaaagctcagttccggatttggcactggtggtggacctttggaccttaactatacaatttgagtcaccaaaaacctctggggggacaccccttatattacaaggattatattaaccccttcatgtgtttcccgtggtttataaggggggggcgcatctcttaacaggggatctcaggcaaaggggctctcaggatgtgttcaagaggacactctcttggagcgcttctctttgtggggcagagaacaagggggcaaatatatctctctcaaaacgtgtgcgatttatttttcaccaatatagctttctcaagaggcatagttgcagggttttctacacaccactatgtgcgatttatttccctttctctacaaaatctcgaaggacactctgggggaccccccttctcacagggaacaccttacaatcttcttttaaacagaatatatataaccccagaagaaaaaatctcgagagggtctcccttataaagaaaaatctcacagggacaaggaacggggggagcaagtggggctctacattataaancctttttttgttgaacaccaacccgcatttatttgggacaggccatggtgtttcttttaggaaaacacgggggggtgactaaaaaaggaagcattttgggcacatgaagtggttttgcggcctgtgaggtgaatattcccccaaaaggcacaactctttggggggcagacggcggccgttcggcgacagcaggagcggggattacaccctttggggagacgagcaacaggcgagaatgttctccgaagaggaaccaagtggcctgtggccccaattctgtgggtgtcgaaaagccccccgcgtttttttgtacccaaaaatatttcacaaagaatttagcccaagagattgtggtgcgacaggggcgcccctggtgtaatccccgaggcataaccccgggggaggcatggaggagcgaggaggagatgggcccgaaacccggggaaggcgaggacgtgtggctcaatgacgcccgagaaaatggtggcacagtgtgaagccacagatgtggggtcgaaaagagaacacgaaagttttgtgtgttgtcgacgaacaacaaagaaataaaaacaaacatactgtgtgtggcggcacgggcagctggaaaagaccttttagaaccatggttgggggggggggcgcgcagagatgagaaagagcagaagtgttgtagctaacaaaggggtgtagcaaggtggggtggttcacaaaaaaaggcgggcgagagagggtgaaacaaacggaatgtagttgattaaacagaagaatgagttgagtcattgatcgatgctgtgagcgcatc

SEQ ID NO: 634966 - DNA, 185 bp, Homo sapiens
gctcctgtgaaaaagcttgtggtgaaggggggcaaaaaaaagaggcaagttctgaagttcactcttgattgcacccaccctttagaggatggattcatggatgctgccaattttgagcagtttttgcaagaagggatcaagtgaccggaaaagctgggaccttggtggaggggtggtgccctcgc

SEQ ID NO: 634967 - DNA, 647 bp, Homo sapiens
  misc_feature (215)..(215): n is a, c, g, or t
ggaataggtgttattgatagaagtggggcgggggcaggagtgaggcttcgcccactttggggccctctctctttgggaaaggaggtgatcccgaggcgaaggcgcagatcgataacctgcatattggggtgcgcgtcagggtggacaccgcagcaggcgcctttcctccctccccacgtcctgagtcagctctgcgccgctggagcgaaggccgngccccgctggcccactttggggtaaaacgggttcctggcatctcgcgggcgcggtcgttcgccccgcatctggtcaggacttcgccccccggtagatggcttgggtggcttgtacagccctgggagcgatgccctgtctgaagtcctctgcatacttagttggctgtcaggacagtgcctcccaggtatgcggcaaagagatctccaaccgcttggtcatttccagccactgcgtctccttcacgccaaagggccaaaaacttgagcgtgaaagttgagtagaattagtattaaaaaaaaaaaaaagttttggtattatatttttctcaaaatttcaaggcttcaagtgttagtaggaatttgctttagtgcagtatgcttcctatagcaataataatgaataaaataatgattcattcagtaaaaaaaaaa

SEQ ID NO: 634968 - DNA, 242 bp, Homo sapiens
ttccatcacaagaataaagccctacttgattatggtgaattagctttcagtttattagtattttggattcagtttactagtattttgttgaggatttttgcatctatgttcatcagggattttgatctgaagttttctttttcattgtgtctctgccaggttttggtatcagaatgatattggcctcatagcataagttagggaggagtcacctcttcaattttttgaaatatttttagttg

SEQ ID NO: 634969 - DNA, 660 bp, Homo sapiens
gtcatcgttttttttcttttcccctccttttttgccaaaagacaccactccacatcacaaaaacaaccggagcaaaaagcgccccaaggaaagaaaacaacccccccccaagagcacaacccaaagcggaaaaaacacacacatcccacaaaaacggtatgacaaaagaaagccccaaccccaccacaacccggaaacaatacacacaaccccaggcagacccaaccaaccaaacccactgcactcaacctccggtacccaacaaaaacaaacaaacattcacacccaaatctacgacacaattcacgaacaaacaacaaccccaaacagccacaaaacgcggagggcaacaaccctctccacacctattccaacacacccccagcgcacccccaccaacatcgccgccgccccaacaacacgaaaagccaaaaaaaacactgccaacgtgctcaagacgcggaggtccacaacaaacgctcccacccgacacagaacccgcaccccaaacaactcccaaaatcacacgaccagaccgcgatccctctacacctccacgaaccaacagacgcaaacaccgcgctctaaaacaatacttatccaacaacacgccgatctacaacacatcgaacacacaaccccaacaaaacccctgctcct

SEQ ID NO: 634970 - DNA, 707 bp, Homo sapiens
gctagcttttctcttctgtactaaccccacacgcctatggacacaactgaacgtgggtaaccattgatttcccttctttttctctattagctcggtatatattaccagggtgtgtttcgtcggagatgcacacaagagtgaggtgctcatcggtgtaaagattagggagaagaaaatgtcatagccttggtgtagattgcctttgctcagtatcttcagcagtgtgcatttgaagatcatgttcaattggtgaatgagagtaactgaatttgcgaagatacatgtagtgagctgatgagtcgagctggaaatagtgactaatcgcttcatagcctttttggagactgaattatgcacagttgggaactcttcgtgaaacctatggtgaaagtggctgactgctgtgcaagacagagaacctgagcagaaatgaatgcttcttgctacacaagatgatgacaacccaaaactcccccgattggtgagaccagaggtggaggtgatgtgcactgcttttcatgacaatgaggagacatttttgacataaatactctatatgaaattgccagaagacgatccttacgttttatgccccggaactcctgtgcttagctaaaaggtatgaagctgctttgacagaatgtagccaagctgctgatacagctgctgcctgtgccaaagctcgatgaacttcgggatgaagggaa

SEQ ID NO: 634971 - DNA, 498 bp, Homo sapiens
tcgagctggtaccgacagcatcctaaccaggtgcaggtggactctttcgggatgtgtagtcagacagggtacgcccatcttccagctgttttccggcaaagatgaaggctctgctgaacatggaggagtgcgtttcgttatcttggatctgggcgttgacatactcgatggtgtcagggggctccacctcgagggtgatggtcttaccagtgagggtcttcacgaagatctgcatcccacctctgagacggagcaccaggtgcagggtagactctttctggatgtggtagtcagacagggtgcgcccatcttccagctgttttccggcaaagatggagctctgctggagacgagcagtggcgtttgttgtcttggctctgggcgtcgacgtaacaacgatggtgacgtggggctcgacctcaagggtgatggtcttgccaagtgagtgtcttcacgaagattcgcatccccaccttctgagacggagcaccaggatgc

SEQ ID NO: 634972 - DNA, 120 bp, Homo sapiens
agaatcagcagagaagcaacaccagtcggagaagctggggtcctcccagccctcttggccatgtggccaattttttctccaatagcctcataaaatcacattatttgagtgtccatggct

SEQ ID NO: 634973 - DNA, 615 bp, Homo sapiens
aaagttgccagacatgagcaggtgcaagaccgatcgagagagaattgtgctgtaatcatcgctaagactcatgattgcgctgtagtggccagcgcctcgaaatctgggtcggtgtctgtcctccttcttgaatcagccccatggaatgcaatgtaatcagcatcctacacacgttctcaattcccaggagaagccagaggggtagtcctctcaccatcgattgtcgatcgcccgggcgatgatttggctcgagcgagcccatgttccattggcgcatggaggcgtcccaaagaacgtccgagtcttaggttccagggggcttggtatcgtacctgctgattggcagaacattggctatccggtctaatgccaaggaacccgtctctcaagcagcagctcttctcctatgccattcttggtaataccctgtatgaggccatggggcgttgggctgtccgatggtcgccttcctcatcctcttcgcatgtgaggctccatggggggtcaccggcttgttgctactggaactccaaccattcttggtgctggggtgtggtcaggctttaccattaagcacaacgtgcgtcaaaacggggaacacaaaagaaaacaaag

SEQ ID NO: 634974 - DNA, 312 bp, Homo sapiens
ttacaggatccccctggggcctgcgacataaaataggttctgttcgttcttcttagcgagacgtgggtctgcagtatcggcatcaggggctatacaacgtcacaggccatcatgggagtattcactgtttatactaaggacgtcacgtgtttcaagaacgcagtctcagagaatgctattcgggatcctaaatggtccctgacgactgcacgctcaccggaacagttctgaaacgctgcttcagaccacctaactctactgccttgccagtatcagtccttactcctgctgccttgccacactcaacatgta

SEQ ID NO: 634975 - DNA, 420 bp, Homo sapiens
  misc_feature (19)..(19): n is a, c, g, or t
  misc_feature (145)..(146): n is a, c, g, or t
  misc_feature (193)..(193): n is a, c, g, or t
  misc_feature (253)..(253): n is a, c, g, or t
  misc_feature (271)..(271): n is a, c, g, or t
  misc_feature (309)..(309): n is a, c, g, or t
  misc_feature (404)..(404): n is a, c, g, or t
ccaagaggcaaaattctgnccagaggaacagtgtggttccggaaagatggataaactccgcctcacttgccctcgtccctgggggagagaggcagccaagtcttaacaaaccaacccctttgcgaaaagataaacctggagatannataagggccgagctgagccagttgtcccatggacaactttatttaancctatttcagatatcaaaacctctagctgtatgatttgtccttgaattttgtttttatcntcaagagggcaagtggangggaatttgtcagcgttctaccaggcaaattcactgtntcactgaaatgtttggattctcttagctactgtatgcaaagtccgattatattggtcgcgtttttacagttagggttttgcaataactttctatnatttttaatagaaata

SEQ ID NO: 634976 - DNA, 146 bp, Homo sapiens
tctccagtcgcaacacaatactaactctacagttacacttctaagaatatatactatggacatatttgcatacatgtacaaagatatgtgttgccgggcgcggtggcgcgtgcctgtagtcccagctactcgggaggctgaggtgg

SEQ ID NO: 634977 - DNA, 125 bp, Homo sapiens
ggggggggaaattggggggccatttttttgagggatttatttaaaatttggactttttgaaaaaacccttgtaaggggtttgtttttttaaaaggggactttttaaaaaagcggttttttaaata

SEQ ID NO: 634978 - DNA, 123 bp, Homo sapiens
atctctcgcgtaaaagtagactctctcgctacagcaggggcgactcctctctcgctaaagcaggagcgactcctctctcgctaaagcaggggcgactcctctctcgctaaagcaggggcgact

SEQ ID NO: 634979 - DNA, 265 bp, Homo sapiens
tgatggctgttctaggaggtccctgatgggtgctgaggcacagggtttcgtattctcgtgaggcaaagtatataagaaacaagagaaggaagttttaattttgaagaatggtatggcaacgctggtcaatgtgaatgcaagtgaatcataatatatgggggctacaggagatttttttctttagaccttggtaaagtacacaagtattacagcaagagagcctgcaagggcgcacggcatgcaacattctcgatcccagactata

SEQ ID NO: 634980 - DNA, 896 bp, Homo sapiens
  misc_feature (479)..(479): n is a, c, g, or t
actctaaattgaaaaatgtatgtatgatctatatttgacccttaaaatgttggatctaactttaaccaaatatggccagattttccatatactaagtcattcaccgtcttacgacataggatagctgtctacccgttctgtcttcttagatcacgattcaattgaagatgctgtctgtaagacgatacaactttcagacatatgttcatatattatgtagaacaagaagacaggattatgtattcgtaggccagtggtccacaaatggtaactagttactgaccatgtagagctgttatagtttcatagattgtcccacgttcacccagtaatcttagaaatctagaaagtctggcgagatactgatatcagctgtatgtcgggtaattccacagtgctgatagtgctattcatcttttagagttacttgtgtcagatgaaacaatatgccaagttgtaaaatattgcagatttctatncatcctcatggttctaggcataattattaacaagccatgccttatgtgtctcatcttatatccgttctttataactaaaggtataaacagacttgtggacaaagtgatttgactgtgcttgctcacttgattgacttggtcagatatttgactgattggtgattacctagattctaatccttgattctagttatctaattatataagtataagaacttattgcaaactctctttgtttgggggccatgtaactggttaataattagttggtagttaggcttccaaggcacagaacacgcatttactaccattctattgaaattgaagacagttctgcaatccgacaattaggtataagctggttcatgtttacaaacccatgcttatgaaaagtagcaacgcgatttacattgcccc

SEQ ID NO: 634981 - DNA, 148 bp, Homo sapiens
ttagcactccaagtgaatagagagggttcttctactataaggactaaaccgcttcgaagcgaaggctactacaaatcatgaaaattcattaatataaactagactagttagacgaaatgaatagagcctaacagaatgataaggatag

SEQ ID NO: 634982 - DNA, 502 bp, Homo sapiens
caacatgcggacacttccatcagtaagatgtcttgtatgcagcacacagttatgctgaagaacctcgtctggtatgctggcctgacctggagtcagcagcgcggtcacggctgcgcaccacaggtatgggcccggcgctggctcctctgcacctgccaccgctacagcagctccttgtactcccgccagctgcagcacctctgcacctcgggatgggcgttcacatcatcctggatctgcgcggcctccgcgtggtgctcccgttcccgcctgcagagcttctccttgcgctggctcagcttctggctccaggactcagcgtgtgtctatcgcccagccacgttggccgggagcagctctcggcctggggcgcgcagaagggtgtggcgcctgtctcaagccatgttggaaaagtagatctgctcgaagttccagcgccgctgcacggctccagtgtctccggtcacggctctgccactctcccagctgcactccaccccct

SEQ ID NO: 634983 - DNA, 481 bp, Homo sapiens
gatgcgtcatcgccttggggcgtcagcagcgtcagcacgccatcgacgccggggtcggccagaaccgcttcgagcgccgcgcggtagcgcgcatcgtcggcgtcgccgatcaggtcgatcgggttggcgtgcgaccaggtcggcggcagcgtacggttgagcacttccagcgtttccggcgccagctgggcgagcggaatgccgaggtcggctgcacggtcggcggccatcacgcccggcccgccgccgttggtgacgaccgccagccgcttgccggccggcttgaagccggtgaacagcgcattggcggccgagaacatctggcccagcgtggacagccgcacgacgccggcgcggcgcagcgcggcgtcgaacacgtcgtcggcgcccaccatggcgcccgtgtgcgaagcgaccgccttggtgccggccggatgacggccgaccttgatcgccagcaccggcttgacgcgggcggccg

SEQ ID NO: 634984 - DNA, 93 bp, Homo sapiens
agtccttgctggggtccccggctgcacctccaacccccaaatccttcaggacccaccagaggccccaccacttcctctccggggggcactggg

SEQ ID NO: 634985 - DNA, 170 bp, Homo sapiens
  misc_feature (65)..(65): n is a, c, g, or t
  misc_feature (100)..(100): n is a, c, g, or t
  misc_feature (108)..(108): n is a, c, g, or t
ctgtcaactgctgcaagaagaagtgtggtcacacctataacctgcgtcccaagaagaaggtcaantaaggttgttctttccttgtaaggcagcctcctgncctgcccntgtcctggagcctcatataaagtgccctttcattgtttggagcatgcaataaggcaaatttt

SEQ ID NO: 634986 - DNA, 356 bp, Homo sapiens
aatgtagtgcaggcccatgcccgccagcatgaggaggaggcagtactccagcacttgtgtgttttgtttgtgttgctgctgcctcaactggggcccctgtggcctctcgctgtgtagctgggaccagtactgtgcgttggggggtgtccagcatctgtgtgtttggtgggcagacttgtcatggactgtggctagtgaaggctttcgtggccacatgaccccagctggtcatcatagctgcggcggctctgctcacggctgagcacacggtatgcctcgctcagctccacaaagcggctgtgcaggcttgggttcacagggtcccggtctgggtgcagctttttgaacgtggagaa

SEQ ID NO: 634987 - DNA, 311 bp, Homo sapiens
aagatcgtcatgaatgactatcctaaatttagagtagcagttttcttttgggtgggtttattcgtgctggttcatcgtgagtaagaagcctgccttgctgtgccggggaagatgccatagttttcgttactggatgtttggagtagatactggtctgtgattggtggaatggagaacacacgtgttggtgcttctgggtagcactggtttgcattagtttatgtttccatgccagagtttgtgtgggcgggcgcatgtgcaccacagagtgcactcgaggggactttcagtcacaggatttcataattgtc

SEQ ID NO: 634988 - DNA, 396 bp, Homo sapiens
aacggcatttacaaagaaaacatgaccatgccctcagtagatacagaatacaaatgtacttatagggctttatttttaactgacagcaaatagaaatcctttagtgagatcgtgacaattagatcatgtattataatattagctcaataaaggtacactggggtacctggaagatcaagatctacagctgcctatttccacatctttcaatccatctggctccttaaatagggtaaaaagcccttatttggtggagaagcatttccaaaatgaagttacaggttctattaaaacttactgtcacatcaactgtttaactagggccttttgagtgaagttatttcaccttaatatcaccagaattcctgtcattccacaattgtgattttactatct

SEQ ID NO: 634989 - DNA, 592 bp, Homo sapiens
  misc_feature (345)..(345): n is a, c, g, or t
  misc_feature (367)..(368): n is a, c, g, or t
  misc_feature (500)..(501): n is a, c, g, or t
tgaagagctggctgagcggactgagaccaaaagaccagacatcggtgggcatcagcttcgtggccggtggatctcaggaatggtggctgccaccttaccctacccttcgatgtggtgaagacacagcgacagatgtcactgggagcggtggaggctgtgagagtgaagccgcccagagtggactccacctggctcctgcttcgcagaatccgggctgaatctggcaccaggggactctttgcaggcttcctccccaggatcatcaaggctgcaccctcctgtgccatcatgatcagcacttacgagtttggcaaaagcttcttccagaggctcaaccaggagcancctctgggccgctgaaagtcgnngagcaaccggctcttgcacgggtgggatcaggagactgagccaagtgccttccctcccagtccagtcaccccaggctgtcctcagacctggattcctgctgtttcccttcccaggattgcccctctcccgcnncccgaattcaagaccaaatctgatgatcgcccttttttgtatccccatgtttgttatagcttggcccgaggagcttgggccaggcagtatc

SEQ ID NO: 634990 - DNA, 217 bp, Homo sapiens
cgagctatgcgttacagagcacgatagagaacttagtttgcagtatgtatggctgataatcggacaaggccaagactcattaaaatgctgggggaaagcaaaatgcctcataaaatgtgatatcatcagcctggaaatttacagaaagaaaaaatgactgcagaagatcgcagcctttcttatttatttattttaaacagggtctagctcttattgt

SEQ ID NO: 634991 - DNA, 156 bp, Homo sapiens
atacggctgcagacggagtgctgttatcgataattcggtttatcgcaccgtcaaagtactgccattgggataacacctatcaccagcgatcccgacctggatcactggtatcgagactcttttaaaatactggagtgggaatgtcttgcttcagtg

SEQ ID NO: 634992 - DNA, 381 bp, Homo sapiens
atttgggttttttttttaaacagggtatccacgaaacttctcagcatcccgatggccctgaataaaaattgccccccctcagggcagccatatatttcccgccagaataaaaaagaaatcccttttttaaaaaaacagctttccagggcccttttgccgtttttcaggagcgccagatagatttggaataggaataagctctagttttttaccaccgcccctccccccagatttagaaaaaaggtttccacctaatttagttttccgaaaaatcttgggctagaaaacttttttaaagggattttgaaaactattaaaaccgcttttttttttcccgccaggatcccacccacttgggtttgcttccattaatctttggga

SEQ ID NO: 634993 - DNA, 202 bp, Homo sapiens
acgcataggtcatcatttatattactttaactagactgtatgagtacacttaactatctagtcagagcacaaaactgaatgtatacatttcaaaaacttcaaaatccatttctctgatctacccaaaattattagctttttcataaacaagctgtagtaaattcttagggttattatttgcttttttttttttatttttatg

SEQ ID NO: 634994 - DNA, 420 bp, Homo sapiens
aatagcatcaaaacgggtaaaatacataggaataaaattaacaaaagaggtatgagatttgtacactgaaatctataaaacattgctaaagggaatataagaagttgtaaataaatggggagatagtccatgttcatggattcgaagactccatattattaattaataacaagtattggcaagaatatggagaaactggaaccctgattgctgaaacccacattgctggtgggaatgtaaaatggaatagccactttagaaaacaatttggcagtttcataaaatgttaaacatggagttaccatatgatccaccaattccactcctagatatctattcaagagaaatgaacatatatggccacacaaagacttgtacatgaatatttatagtagcactcataataagcaaaaatggaac

SEQ ID NO: 634995 - DNA, 101 bp, Homo sapiens
gagacagatgtgtcaaattactattatgctcacggattgaagagtttctcctcgtagtactgtcaaatttttgataatatgtttagaagctttgttgttag

SEQ ID NO: 634996 - DNA, 508 bp, Homo sapiens
ctttcaaggctacgtgaagttcaactctggatgagccggcttacaacgagcagttccttaaggagccaacatgacagggggggtcagaatttccctaatgagaaacaaaacgggccaccaacggcaaaatatcaaatggggtaagtccttccttcctcttcctccggattatatacaacatatctcctttcaagactataatttccatcatggcttattccgttcacacaatctaaaaccttgtgaggtgatatggagggaaaccaacatcaagaaaggaaaactcatttcagaaatgaggaaaatgggcagtgtatacaatacacccccagagcatctcaatatcccgggcacagtacaatccagtgtacggctacagcccatagataattatgggcagctggaataagctaattttttccctcagggggttaagggccaccaaacaattacggggcaacaggggttggtggggagagttagaaatacaaaattaaccaaatttggt

SEQ ID NO: 634997 - DNA, 277 bp, Homo sapiens
catggtccgagagaaattagaaatgcctgtatagatgtcctcaggggaacttgtacatagtgagtccccgatgatttactacatactctggtgccctttactacaacgcaagcatggtagcttaccatcacagtaatataccaagtacgtatgtatctagcacagtacttcaatatggttcgcatttaatcgttctgcacactgaagcatggagatttattttttccatttattcttactgtacacttttaatatcctaatttctctcggaccaatg

SEQ ID NO: 634998 - DNA, 815 bp, Homo sapiens
gggcgaagactgcggttcggcccggccacagccgcggtagtgctaggcaagcgcacggagtcacgccggcctcagccagtctgctgaacctctctgccctagcatacccgtaggtgctgcccgggcattaccaggcacgatcgtgccgatggaggccgtacatactgtatgatcccgacggggtgcgtccgttggcaccgatggactccgtcgacaggtcccttgcctcagctgataaacgttgatgcggtagtcggacgctacgtgggaccggttgatcacctcgcgaaaccagtgaatgatacgatgattcgatgcatgggttatcgactgaccgggatatcgtgctgtcgtgtactcatgttagaccgtatgtacgattgttgatcgtgcccagcgtgagtggatcgcaactgcacgtgtgacatggctatggaatgatggacactttgtgtccccaatgagttagaatcagattgggtatgtgcttagggctagggcctctgattgatgattaggcaagcgtgcatacgaaggaggccgtgagtatcattgctaggctacggacatcagcagagttctgacgtcttggtcccaccccattggtacattgcgcctaaggctgcacttctaagctttcgcaacgccaacaatgacgcccctacaatcgtatcaacaggtcccagcctgggctaaggctccaatctgaagcacacggcatcatgccggagcgcattgcaaccgatacggacacacatgtcgtcacacattaccttccgtcccttccgcgctttacctcgcttacatgcgcggag

SEQ ID NO: 634999 - DNA, 186 bp, Homo sapiens
cttaggttcactaaacattctactactcactctcactgcccaagaaactatctagactccgtggagccatcaatttaatatgactagctgacactatagcgtttatagtatagatacctctttacggactccaattatgactccctaaagcccatgtcgaagaccccgcatcgcttggtcaatagt

SEQ ID NO: 635000 - DNA, 456 bp, Homo sapiens
  misc_feature (85)..(85): n is a, c, g, or t
  misc_feature (88)..(88): n is a, c, g, or t
cggcaggtgagtgtcagtggttggggccagtgtcggagtccagccagcctgtccctggacctcagagccagctgcccgggacgtntcnggtctggggcctcctttgggtctgagagggagatctgcggcccccagtaaccacctccccgagagaggactgggacagccacctgctggccacccccctcccagagctgagtgctggtgggcagatgctgggtggatggtgagtggacccctcctcagaggctcaagggtgagcttgggcctccctgcaaggtgtctacctggaagcctggcctgctggagcaatgccaatctccccaatcctgcggccgacgtgcttggttggccaaggtaaagttgccggtgggtctggggggcaacctcccgtggcggcaacttcaacaatcctggttgtcttcgccttccccaacaaggtaacaatgttccaag

SEQ ID NO: 635001 - DNA, 119 bp, Homo sapiens
cttctgccgcttgctgcttctgcctgcttcctgcttctgcctcctgcttctgctgcttcctgcttctgccttcagcctgacccgcagtgccctgccatctagtacatacgtcagggttt

SEQ ID NO: 635002 - DNA, 102 bp, Homo sapiens
gtttgccgccagagcacaggtgtcgtggcactaccctggcgccagatgggagaggggaagactcatatcaccattgtcgtcattggacacgtagattcgggc

SEQ ID NO: 635003 - DNA, 661 bp, Homo sapiens
  misc_feature (561)..(561): n is a, c, g, or t
gaaagagaggttcagcaactccccccaatttctggtgaagccaggatttcactttaggcaatttggctactgagcgtgagttcttagccaccgtattataccacttgctttgcaatgaatccagtttcatttcctctacttaatgaaactgcagaaagcacagctcagtgcctggaattccatttcctgttatatttttatgcatttaggaattgatcctctcattaccactctgagagaagcagtacaggtgtttgggcccctagcacccagccacagggcctgaacacaatcatactcaatacatgtttattgcatgataaatgaagcctaattttactgaggaagaaacagaaactcaaagaggaggagttgattctgaaccaaggccttctgactccaagtccagtgttcttgctgcctgaacttcagctgtgacgtgtacatgcaaccttaccatccagtgggaagaagaaaataccagaattaaggtatggacagtccactatccagtgaataaacagctccattaagattaccctgagagggccaggcgcggtngtcacgcctaatcccagcactttgggaggctgaggcgggcagatcacgaggtcaggagatcgagaccatcctggctaacacagtgaaaccctgtctctac

SEQ ID NO: 635004 - DNA, 522 bp, Homo sapiens
  misc_feature (358)..(358): n is a, c, g, or t
  misc_feature (381)..(381): n is a, c, g, or t
  misc_feature (387)..(387): n is a, c, g, or t
  misc_feature (390)..(390): n is a, c, g, or t
ggaaggtcttagcggatgaagggcagtgctagcgggatggaacgttgagaagagcaggcgctccagtgcattcaccagcggttcgctagtgcagatgactgactgaagagaggttctccggggaggggccacgagaggcacagtggctctgtcgtgttacccataagatcctgatctcgttctcttgaagctgctagtgatccaagcggaaactaggtgtagtagtgaaactggggcacagatgtgaagaatctgccccctgttgagatgggtgggcgtgattgttgccccctagggtcataaaacttggagggactctctatagtgagagaggaggcctggaccgagatgtgagtcntgttgaagacttcctctctagcncccacnctnggtcctctcagataccagtggaattccaacttgaaggattgcatcctgctggggctgaacatgcctgccaaagacgtgtcagacctacgttcgtggccccctcgttcagagactgcccttctcacggctgta

SEQ ID NO: 635005 - DNA, 418 bp, Homo sapiens
cagggagctgccttgggctttcggaaaaggtcatccagcagcttggcaggtgggtccacctgggctatctctttcttctcactcttcttttctttagacttcgcacgttccttgcggcggcgggcacgggaccttgatcgggaacggggcccttctcgaactatggcccgatcccattcacgctctgatcgaggccgctccccgccggtccatttgccgttcccgtactgcccactggacccgcactgcccgtgcctgctaccgctgtactgcccgggggagctggggcggctggaccccggggggggggcgccccccccggccacaacaaccaccacgcccaccggcggcaccgccagctcaacccaccacaagaacacacatcgcacagggggcaacccatcacacactacgctaa

SEQ ID NO: 635006 - DNA, 145 bp, Homo sapiens
tgacacaaatctccaaacctacagagactgcgcggtgcattgagtccctgattgctgtcttaccagaattattgctgggacagggatgggtataacctacactctttaccaagaacagagatcctacagctttcaattgaattac

SEQ ID NO: 635007 - DNA, 378 bp, Homo sapiens
gactagatcgctcaagatggccgccagagtgtctcagaaaatctatcgactccggtgatcatgaatctgaccctccccagtaaggttctgtagaagcatagctgggtctgcatcttctctcggctactccataggtggtcactggccctatggaggtctctgaaaggggaaatagcttttctagcagagggccctggttggggagttcacagtgagaacgaacccctcttaatattataacaggctgtttcacatgaggggatgttaccaatcccgttcgctctgacccttggtagctgatcaccttgagcgacttactttacatctgtgttcctcagtttctcatgggtaatatagggataattactggcacctgcc

SEQ ID NO: 635008 - DNA, 296 bp, Homo sapiens
cgcctagtgttgcagaacatgctgtcggccccagtctgagccactcttcctgagtttcccatagcaccgagagctccgcattattcatccccatatcttcctcgtcggtctgggacaccttgtccatcagccaagggctccagctctgcggctggccggcgccatacaggatgctctgcagggccacgaagctggaacgccgctgggatgcaggatactggtaccgagaggtccctgcagcgtcccgtccttgccttgatcctcgccatatcggcgttgtatggtcccgcgactgg

SEQ ID NO: 635009 - DNA, 155 bp, Homo sapiens
gggagacagagacccagagagagagtgagacacaatcccagagagagggacactgagacccagagagagagagatcgagactctgtgacagaagcagagagagacactgagagccacggagagagatccagatacaagttgagggacacagagct

SEQ ID NO: 635010 - DNA, 201 bp, Homo sapiens
  misc_feature (201)..(201): n is a, c, g, or t
gttcagtgctggtgattcaagggttctattgttctcggtggtttggccagcagcatagtagtttcacagttagctgtgtgcccagcacagcggggtgacggcacacatgcgagtgacgactccctactagatcttcaaacatctgtcggcacgctgagagatctcgaaacaacggacgccctcacgtcctcccatcacaan

SEQ ID NO: 635011 - DNA, 552 bp, Homo sapiens
acagacaatcgcagctgacaggacgaatgaggtccagcggccctctaccgctctaggatgactctgcacttactaatcacgtgcagcttcaaacaaggaggatgttgaatgctcccagtacaaaacagggataaatgtttaagatgatgggtaagcgaattaccctgatctgatcactgtacattatatggatccaaacatcatgagtatgtacaattcgtcaataaaaaaataaaaatgaaacaggtgatgacgaaaaagaagccagacgtcaacaaacaaaaaaacaaaaaacaaaaaaaaaaaacaaaaaaaaacaaaaaaaaaagaacaaaaaaaagcaaaaaaagaaaaaaaaagaaaagaagagaaagatcacaagaaaacgaacgacgagaggacagaacgaagaggcaacaaacaaagaggagcgacaaccacaaaccaccacgacacaacgagcacaccaacagaaaggaggaacagcaacacaaccagagaaagagacagggacaagccagagaaaaaaacaccgcggggccgaaacctccc

SEQ ID NO: 635012 - DNA, 609 bp, Homo sapiens
acagcgtagttgagacatggattcagagtcaaaaccaattctagatcccaccagtatatccagtaacctctctgggtatttccccagctaccacatttaatagtaagaatgaagaagctgtctgctgtttccctcctccttccgatccaaagctgggaataaccttagggaggaggctggaccttgaagcggaccattgaaggaagggccaaggaggtgtttcagaccagccaaaggagtactgaggtagcttgttaagcttggagtttggaatgggaagacgaccagacaagtgtcaccaaggagccacggcagaaaagggtgggtggttgcaggaagccgcccacactttcccacacagggggttggtggttggcctccaaatttacagccgaatcattttacagccacataattccagaaagtagaaaattacccgaggataatggcggcatttattcaaacattttcacttgatttccataaagtataacataattaaacattatacctctacatttccaaaattcacatcaataaaccatcctaattgttaaatgcaaaccacttcaaagttacattcttagtaaacataactaaatctcttac

SEQ ID NO: 635013 - DNA, 375 bp, Homo sapiens
gcacgcgctctcgcgccccaaaccactggggccgcgcttttggtggccccggggccccggtccgccccgacccttgggggtgctccaaagtcctgggctaccgacagggtctccagctccgcagaattccaggggccaattgataaaccaaagaataataagccggttcttgataaattgcaagtgggccgagaaaaaggaatccctgttaaagcccagacagcctcttttttttccaattgggaaggaaagcaggggtgctgctcccgcccgggggtcatgacaactcaataaagccctgctttttttttttgcggttttccatttgagaaaggggagaaataatgttttccataaatgggattcatcccctta

SEQ ID NO: 635014 - DNA, 121 bp, Homo sapiens
cacgagggaaactccaagcctgaggaatgggaaatgccctctcacagctctgacactgttgccacgaagcccgacgactgggatgactatatcggagtgtagtgggaacccacactgattt

SEQ ID NO: 635015 - DNA, 1090 bp, Homo sapiens
ggcgagacccgcgagctggcgctggcccgtcgacggtcaaggccgcctgggcttcgaggtggacgccgagggattcgtcacgcacgtggagcgcttcacattcgccgagacggcggggctgcggcccggggcgcgcctcctgcgcgtgtgcggccagacgctgcccagggctccggcccggaggccgctgcccagctcctgcgctcggcgcccaaggtctgcgtcaccgtcctgctccccgacgagagcggccgggcccgcaggcctcatgggaaagcgggttcccttgctgagccatcccgtgctctctccagctctctgtcggatgaggccccagtcctgcccaaaaccaccccggacctcctcctgtggacaccacaggcaagccatcagtacccagtgctgacagtgagacacccactgacccaggacaggccaggcaagtcccagaggctcatgaggacaagggcaacccagggcgccggaccctgacgggccatccttacagcacacgtaccgtggcactctgaaggaactccagtcagcaggatcatgtcagcaggccaggcagtgggaccctggaggacgagtggcagggccatctcggagatcgactctacttgcaaaccattctggagtcgctgcacccggagagggcaaagcccatcccagaagagtgggcagacccctaagggaaactacgaaaactctgctagctgaggccagagcctgggaaacctctcaacagaacggactctcaccggagctcctgctcaccgacgctgcacgacgaacgctgaagaaacgcacacggcgaaaagcgcacgaccatgcagcacagagctgacgaaccccgagacacccaccaccggcgagctacaaaagcagcacactccaaacgggacacaacaccaacaaccaagaccacacaaaacagggcaacaacagcggaaacgaacaacacacgggaacaacaggccacgaaccacgcaacacgcgccccaaaaaccacactacaagagacgaaacaacacccccaaaacagcggggcgcagccccaccaccgaaatcagagcaaacagccaacaat

SEQ ID NO: 635016 - DNA, 674 bp, Homo sapiens
cacttggagagaacctttccttttcatttaaccaacaaataatatttattttccaatagtctccatgcccaaaacttttccaggaagaactcattacattcctaaaaaaaaaataaagggcttcaggaaataaagggtagggccataaggcaaagaattgtccccaataaaaatccaaccctttggcaaaatagtcaaatattaatggtcaggggttaatccccagtggataatttttcatggggtgtgctcccccccttccactaagtgaccaccttcagctataagcacatctgccaaacagggtaggcaggtacgtcaaaaatgctttcaaactcaaatcaggcaatttttttagtcaagttgctgttacaaacatttgccaggatttcctgggtagatcattgaaacgggttggcttgcaaagctattaaatgtttctgtggatattaggacaatggactgggtgtcatcccccataaccatgttgcctgccaaatgcaaaggccttaccatataccagccggtttcccaaccattatcccatttgagctttccggtatttggttaaaaacccatccaatttccaaattcaaaatggtttttctacacccaaagtgacccaatttttgttaccataaaaaatcattttctttccgggcccaaacagaccg

SEQ ID NO: 635017 - DNA, 211 bp, Homo sapiens
atgtcaagaaggaataatactatcactgtgcatgatatgctactctcgagtaaccctctaatcacccagcgtaccctcttacccaatatagtgcctatagccatactagtctttgccgcctgcgaagcagcggtaggcctagccctactagtctcaatctccaacacatatggcctagactacgtacatcacctaaacctactctggaaag

SEQ ID NO: 635018 - DNA, 439 bp, Homo sapiens
aatccctgtttggccccatttgaatcctgctctgcccctttccagcaatgtgaccttgggcaagtcacttcatctctctgggtctccagtttcttcatctgggaaatggggacaataagagtacctgtctctggccatgtgtggtgactcatgcctgtaaccccagcgctttgggaagccgaggcgagagaattgcttgagaccaggagtttgagatcagccctgggcaacatagtgagacccctgtctctacaaaattctaaaaaaattagccgggtgtggtggtgtgtgcctgtagtcccagctattctagaggctgaggcgggaggattgcttgagcccaggagtttgaggctgcagtgagctatgattatgcccctgcacatcagcctgggtgatagattgaggccccatctctaaaaataacaatactaataat

SEQ ID NO: 635019 - DNA, 559 bp, Homo sapiens
  misc_feature (344)..(344): n is a, c, g, or t
  misc_feature (433)..(433): n is a, c, g, or t
  misc_feature (454)..(454): n is a, c, g, or t
  misc_feature (518)..(518): n is a, c, g, or t
  misc_feature (540)..(540): n is a, c, g, or t
tagaatcagaagtttatatattctgtgattccatttacatggcattccgtaaaataaaactggggacagaaatcatatccatggttaccatggagggagggggattggagtaggcgattgatttcagaggggcctgactttttggtgtgatagaaatgtttcctgtcttgaagtgtagtgttcacacagctgtataagtttttcaaaacccacagaaccatctgaaaaggtgaatttaactatatgtaaattatacttcgaaaaatgaataagaaaagacacagtttaatagtagtcaccccttatccacagtttcacttttcaaggtttcagtgacctgtggncaactgcctcttcaaaatattaagtgggaaaattcctgaaattaaacatttattagttttatatgggctggatgctctgaggtatgggngatgaaatctcacacagaccngctgtattctgcccgggcgtgaaccttccctttgtcccttggtccctggtgtctacatttctgnccgttgggacttcgtaggcctnttcgtgtccggtccgcgtc

SEQ ID NO: 635020 - DNA, 399 bp, Homo sapiens
agccgatcatggactagacgtagataaacgtacattcaagtctcccatgcggcggtagtgaccgaatacagcaagtctctggaggtagacggcatcagataccataacattctttcctgagaatcaaacttccaagcaatggtgatgccgccgatgactgagtcactgactctcaggaggaaggtcccatctggctagttacatgagtaggtcatggggactgtcgcttgtttacaagaccccaaaatggccccgtcattccaatgaggctagagatgtttaaataacacttccattcacaccgtcaaaccattgccagaaagtgtaattccatcctggtaaattctccctgttgaactgggaccaggacacagacaggccactgtcgtcctccaggtg

SEQ ID NO: 635021 - DNA, 740 bp, Homo sapiens
atgaggtttcttaaagcttatttttataaagctttttcataaaaaaaaaaaaaaaaaaaaaaaaaaaaaaaaaaaaaaaaaaggggggggggaaaaaaaatataaaaaaagaggggaaaaaaaaaaaaaaaaaaaaaaaatatatattgaaaaaggggggagtgttaggtaggtgtattatattagtagtcttaggatggagtgcgcagtcttctaatacaaagtcgatagaagcgggggaaagcacggtatgttgtgaatcttgattgtaaaaggacaacctactatctttggggagggtggaaactactggtgcgaagactagtctctactctatgatagatatttataaatactatgagggagataagctatataaaaattctaagaggagaactaacgaggggtaagaaccaaacaaccgagcgaacaaaacaagcagatagcagggcaacgaacagactgatctcgacacctatcacgcggcgccctcttactacttctgctgagacacctatctatctatccatacaccagcaggggagcggccatatgtccataccataacccgccgaacgaaaccgcaaccatagcaagaaccctaaagacaacgactaacactacacaactatctaacggtcactggaacctcatacgaaagccactacccaacaaagtacaccgacccaccccagcccacggcaaaatcgaacaagaaccacacaatcaacgagagagaa

SEQ ID NO: 635022 - DNA, 123 bp, Homo sapiens
tggcgtgtggcagtttaaagttattagttttataaaatcagtactttttaatggaaacaatcttgaccaaaatatttgtccacagatattttggagcacccttttaaaaaagttaatgtgcag

SEQ ID NO: 635023 - DNA, 120 bp, Homo sapiens
actgcgtcaggatcagaatcatccttggagtggagtgcctggactgctcgatcatgtaatcaacgataccatatttatctcgtgggccgttgtaatcataaggccttcctttgtggaaac

SEQ ID NO: 635024 - DNA, 409 bp, Homo sapiens
atttcgagtgatggcagggtattatttattacaggtgttttaatttgatttcaaggcactttcaggtttttgcatgttttcaagtggattgttcatgttccgaggttgctatcatacaagtgatctccccgccatttataagtgcataaacaacacaagcttttattttttagcagtcactgttatcagaaaaaagcatgtttttccacaccccttgttcttcagtgagcccatctggatacttccggcatatgcctcccgtgttcgagggattctcctgtcttagcctcccagctactcgggaggctgaggcaggagaatcgcttgaacccgagaggtggaggttgcagttttctgcgatcatgccactgcactccagcctgggtgacagagcaagactccgtctcat

SEQ ID NO: 635025 - DNA, 137 bp, Homo sapiens
gcgaacacattgtcagtttgatgtggtctacagcgactaggatactcccagtcatgcatgaaatggcggtaaaaacaaagcccatctccctttccagcctcagtgcatcatgaggcctggacttccccagcagcgtc

SEQ ID NO: 635026 - DNA, 695 bp, Homo sapiens
acggtaggtgcgggattaacgtcatcccgtgggtgttcgacttcagcgagaggatcaaacaggtgcgaacatctcactgggagctggatcttgtggcgcccaagagcgaaagaacatccacggtgttactggggtgggctggtcgtggctgaaggggacatcactggcaacaaggagtaagtgggccagggcaacagctgggtcctggagggagctctggctggaagtcaacgtcagcaactcacaggggggggcaccctttacgcttgcagcttcggagtcacgggtttgaaacttcgaaataggtaccaaggaggagactctcagattctacagaacggggggtcgcagtcttgggcgacagagtaaacatttctaacttgccctttctgtaatcagtgaaagttgggatttaaacatttattcatttttaaaatactttgggaggtctgaggttgtgaaaacaaagtgggtggtctgagggtggagggaactgactgggatctgacgggtgggagttgtggggaaattggagggtatcccgaagggaattttggaaggggcaaggggggggcccttggggacaaaaccgtatgatgatccgggaacccgcaagaaatacctcagtacagacaggacaacaacgggggaggcccccccgcgtaccagcggcggcgcgtaggcgggcagccacg

SEQ ID NO: 635027 - DNA, 382 bp, Homo sapiens
atgatccccctgtgttgtcaggtctcctcgcttgctctcttactttctttctttcttttagaaggagtctcgctctgttgcccaggctgctggagtgcagtggtacaatctcggctcaccgcaacctctgtctcccaggttcaagcgattctcctgcttcagcctcccaactggctgagactacaggcatgcaccaccatgccaagctgatttttgtatttttagtagagatggggtttcaccatattggccaggctggtctcaaactcctggcctcaactgatccacctccctcggcctcccagggtgttgggattataggcgtgagccactgtgcgtggccccaatttctcaatttcttccccactaaagtgctcccagt

SEQ ID NO: 635028 - DNA, 900 bp, Homo sapiens
cggacgcgtgggcgacccactgcgtccgaagtacagccaaatgggtcagacagccctgcttgtctctggaattccgaaggccagatctctggtgtcagcgctatgggagaagctcccgttgtcatccttcgggccaagagctaggtactcaggcagcagttctaagggccccagaagtcactttggctacagatgtgtatgttaagcctgattatgggtgtgaggacaaacaagttatctggattactataacttgcatatggaccagttggaggatagcgttagtgttgacttggggtttatcattaatctaagttcttagtactttcgcagaaagtcaggtaagattagtgagctaagtacaagaagtagtcttgtacgtgcgtgcgataagttataggcaatgagtagagatatttctgatcaatcactatgatatcaggtggatttctagatagaggtcgtgaactttgtagctctataagtctacttccgtgcggtcataacattcttgcgttacagcagtactaatattgagaattcacgatagccacgatatggtgtatagtatttaggaagaaagaggctgagttgcagcagctcacgcctgtaagtcccaggctacttatgggagagctgaggcggttggataatccttgaagtccaggagttcacagcagcagcctgggccaacatggctaaataccgcatctccaattataaatacctaaattaggcaggcgttggttgagagcaagcctgtagtcccagaatactccaggagggttgaggccaggagaatggcttgaacccaaggaagccagacggttgcagtacactgagattgtgccatgtgctcagacctgtggcgacagaatagaatggttcaaaacacgacaa

SEQ ID NO: 635029 - DNA, 319 bp, Homo sapiens
tgtatgtagttagtgataattctactgaactattacagagtgagccaggaatcacatttatggattctggggatgtgtactgtaattctttgattggcgatagtgaaaactctagcctaaaaaaaaaaacaaaattatcactcaaatataagacaagtctcattcacatttctcttatacttcatgtgatacttgggtgaaactctcattttgactggcggtcccactcgtgcttttggaagaggctttgggtccacgtccccacattctcgattggcttttcgcactcgccttttgagattactcagagggtgtctcc

SEQ ID NO: 635030 - DNA, 622 bp, Homo sapiens
cggaggccatgccgtcggccggcagcagcctctggctctctgagctcttgaaagccttcatcttaggaagggaaaccgagggcaggtaacgacagggcagccaccataggccaggatggacagggcttgtctggtagggcaagcagaaacgggccccggggtactgcaccagggtgtacccgacacctgagcagacatctgggtgcctcagtctgagcgctcctgcgtgggctgtaggcaaagctcccccagcctggccccttaaagtgtggtaccgacatgtcagcacgcagcagctccgcctggagccaagctccaagcccctctccattcctgccccggaccctgaactcagtggagcccactgcagaggctcgttgggggtctattctgggccccatcatatctcccatgtggcacttgggggagccacaggcctattcgcccggatggactcatccgccgtaacgcgccaagcaccatatcaccaaaggcccaatggaccaacaccactcaccaacaacaatgggactagcgatacataggtcccaagatcgaagcaccaaagcatcccaaacggcactgatcgtggcgaaaacggagcgcataaggacagacagag

SEQ ID NO: 635031 - DNA, 352 bp, Homo sapiens
gccccctgagcggccacctgtcgccggcgcaccggataccgaccgaggaggtcagcaagcgttgcctccgccgcctcggtgacagcgctgggcgtgcggctgaactgcacctgcttgagcacctttgccagcggcgctcgttcaagaagcaactcgggaagagtcttgcggctgaagttggtcttctgggcggcctgcatcattgtacaggcgttcttaaacattagcttgatcggaacaactgacttctggagtcccctgatgaggtgaacggctcgacgagggcgcttcggatgccgacggcactcgggcggatctcccgccttatactagatcttgtggcgtacggcct

SEQ ID NO: 635032 - DNA, 90 bp, Homo sapiens
gagagagatgaagggtcttactactgtgcctgtgacaccgaaggtatctcttcaggggggatacgaacctgggacacccgacagatgttt

SEQ ID NO: 635033 - DNA, 163 bp, Homo sapiens
cgtcaggagttcgacgaccagcactggcctacgtggcaatatgctggtctctactagaaatataaaaataagccaggttatggtaggtggacgcctgtaatacccagccccctgggagtctgaggcaggagaatcacttgaacccgggaggtggcggttgcaa

SEQ ID NO: 635034 - DNA, 148 bp, Homo sapiens
ctatgtccaccagtgcggtggcggtcggcgtcaagccggaatgggtgcagcagaaggtgtgccaggccttggcggttatcttcgggaagggttcgtgtgctccggcgagctaggcgaagccgccggcccagcagctgcctaagcgctg

SEQ ID NO: 635035 - DNA, 172 bp, Homo sapiens
cagacactgcttgcatgattatgatcctgattatgcaagaaatgacccaacatagacttgcaagacatggcctgtatgagagaaaagacctcaagaagcaacgaaggacgcaagaacaagattgaggagtaggggactcaaaggccatgtttgtctgcaaaagaataggtct

SEQ ID NO: 635036 - DNA, 179 bp, Homo sapiens
gatcccgtgtacttcaattggttgagctggatagtatgcagtgagaggaatgttagtaatgggaaaaggtgatgttggcattgtaatgcaggcaaaagatctcagtgcatatcattgagtgggaggatcttgatgtagtgagaggtagcctgtggaaggtctagtaggtacggcgggat

SEQ ID NO: 635037 - DNA, 493 bp, Homo sapiens
tgcgtgataccaatcggtagcgccgacctggtcgtgcgttgtcacctgtcgggctcgagtacacgttttggttgccgaagttggtgctacccagtgtcgtgccaacgtacgaatcggtcgtgtacaggttgagcacgcccaggcccgaaccgctgctgtacttagcataggacaggtttaagtacgcgtcggtgcgcttcgacagagcgtaatcggtgccgaccacgaacaaccacgggttacccgcgttgctgttcttgaactgttggtagtaagccgtacccgtcagcgtcagagccggcgtaacttggtagccagcgcccagacagtacaggtacgagcgcacgttgccgtatgcagcaacggtagcgaagttggcatggtaccaacggtagacagagtacagattggacggaccatatgcgtacgtgccagcgatcgtggcgcgtagtaccttgttgtatgacgtagcaatgatcgtctggttacattg

SEQ ID NO: 635038 - DNA, 221 bp, Homo sapiens
  misc_feature (4)..(4): n is a, c, g, or t
  misc_feature (14)..(14): n is a, c, g, or t
  misc_feature (30)..(30): n is a, c, g, or t
  misc_feature (35)..(36): n is a, c, g, or t
  misc_feature (69)..(69): n is a, c, g, or t
  misc_feature (75)..(75): n is a, c, g, or t
  misc_feature (117)..(117): n is a, c, g, or t
  misc_feature (120)..(120): n is a, c, g, or t
  misc_feature (143)..(143): n is a, c, g, or t
  misc_feature (180)..(180): n is a, c, g, or t
  misc_feature (182)..(182): n is a, c, g, or t
  misc_feature (217)..(217): n is a, c, g, or t
gaanaagtaggaanggtttatttagcactntcaannttttcactttataaaggacaagtgctttgaaangcagangtttatgtacagttgtatatacagtatgacaagatgtaaaanaanatgtttttcatgcagtttaaaanattactaacttaagggtttctatgtgctttttaaaanantccttctttgatgttgacatcaaataaagtatgtngttt

SEQ ID NO: 635039 - DNA, 174 bp, Homo sapiens
aaaaaaaaaaaaaaaaaaaaaaaaaaagttaaccaggggtagtagtgcacacctgtaatcccagctactcaggagactgagatgggacaatcacctcaacccaggaggacgaggctgtagtgagctgcaatcacagcctgggtgacagagcgagaccctgcctccaaaaagaaa

SEQ ID NO: 635040 - DNA, 332 bp, Homo sapiens
  misc_feature (181)..(181): n is a, c, g, or t
  misc_feature (188)..(188): n is a, c, g, or t
  misc_feature (263)..(263): n is a, c, g, or t
ggatcatcgaggtcaggagttcaggaccagcctggccaacatggtaaaccccgtctctactaaaaatacaaaaattagctgggcgtggtggtgggcgcctgtagtcccagctgcttgggaggctgagggaggagaattgtctgattccgggaggtggaggttgcagtgagctgagatcgtnccactgngctccagcctgggcaacaagcgtaaaactctgtctgaaaaaactctatctcaaaaaaaaaaatagccacacaggnttttatcccttcttcccaatttaaatttgtctttttcttagggttacttcttgtggctaaaaacatagt

SEQ ID NO: 635041 - DNA, 482 bp, Homo sapiens
cggtctgatgcacgcagatcactggctgaagaccgacaggacggcacgggacgggagaccgccttagttactcactaacagatgaaatacagcctcattttgtctccataccctatcaccccaattgcgagccacaaaaaggacaacttttatcttgacagatgaacaacaacacctactactacagaaaaagagtcctccaaaaaaaagacacagattcctacaacggacggactactgagtcttagtgtctgacactacctaggacttgcaaagtgaaatctactatattcctttacacactcacattggtctggtctcatcgctaaatgctcgaagttgggggagcaagtgtgtacaaggggcaactaccaataagcatcctaaatatttatgttcattccattggattttaagtcagtctacatagagatcatagggtcttaatccaggcaagcctgtctattcttaggagaggtaaa

SEQ ID NO: 635042 - DNA, 232 bp, Homo sapiens
cgcttctagaggatccctgaaatacgacctcccacctcataaggatgcactatcaaaaaataaaaactaacaagtgtcggtgaggatgtggagggattgaaatccctatgcatgctggcgggaatgtaaggtggtacagctgctgtggaaaacagtatggcagttcctcaaaaaattaaaaatagaatgaccatatcatccagcaattccatttctgggtatatacccaaaa

SEQ ID NO: 635043 - DNA, 351 bp, Homo sapiens
cccaatggaatccccctggagattcggtgtcatcttccaggacaaacagcggcatactgccgtgtgtcacggtccccgcgctgtacagctcctcccagagcttctcaacagggaatatttttcccgccagactgttatccgtctgcgaatccgcaataatcacccactcccacaggtaaccttttcggttcaaagggctgatggtgagcgcgcgataaggccacgcgctaatcaccccttgcgcaagcacactttttcctgaccctttaccgccctgtaatattagccattgttcctgaattaacgtggaaaacatgctgtcccgaatcagacaatgccgcgtagtataaa

SEQ ID NO: 635044 - DNA, 737 bp, Homo sapiens
tcctagaggatcccgcctacatagtgtcaaggaaaggcacagaatgatgtctctttcaatcagaagccagaaatgattaagcgcagcaaggaggccatgtagaaggttaagatccactaacaagttagacagacggctgtgaacacaaaggaagagttctggaaggaaatttagaggtggtactccacgggcgaaatgaatactaaaaagtgaaacagccttattgatgatctggagaaagcgcaagtggtctggatagaagatctaaccagccacaacattcccttacatgaaagcctaatccagagcaaggccccaactctcttcaattctatgaaggctgagaaaggtgaagaagctgcagaagaaacggtggatgttagatgaggtaggttcacgaggtttaaggaaggaggccatcaccataacataaaagtgcaaagtgaagcagaaaatgttaatagaaaaggtgcagcaagttacccagaagatctagctaagatcattgatgaacgtagctacactaaactgattctacacgtagaccaaaaagccttctatgggaagaagatgccatctaggactttcatagctagtgagaagtcaatgctggcttcagagtttcaaaggacagtctgactctcttgttaggtgctaatgcagctgacatataagtttaaagcaatgcttattgggcattctgaaaatcctagggcccttaagactatgctacatta

SEQ ID NO: 635045 - DNA, 118 bp, Homo sapiens
  misc_feature (48)..(48): n is a, c, g, or t
aattagctggacgtggtggcgggtgcctgtacgtcccacgctaccttncggacggctgacggcacggacgacactgggtacccgacgctcgacacttcgtaactcactggtcactacg

SEQ ID NO: 635046 - DNA, 1227 bp, Homo sapiens
  misc_feature (839)..(839): n is a, c, g, or t
  misc_feature (843)..(843): n is a, c, g, or t
  misc_feature (846)..(846): n is a, c, g, or t
  misc_feature (864)..(864): n is a, c, g, or t
  misc_feature (1070)..(1070): n is a, c, g, or t
  misc_feature (1097)..(1097): n is a, c, g, or t
gaaattgtacagtagtacaataatacattctaatccatagtttatattcaaatttcatctcttgtctcaaggatgtccttcatagtgtttcgttccccctagtccagtatcaagttgtcatgcctctctggcctttttaatctgggttggtttcttagtctttcatgaccttggctttggcctggggctggggcgttaaaaagtacagaccaattattttgtacagtgtcctttgatgtggggattgtctgatgttttcttgtgtcctctttgggatcatgtatttttcagaagattgctatagaagtaatgatatgtccgtttcaatgtgtcttatcagaagggtgtgatgtcactttgtcctataaccagtaatgttaactctgaccacttcgttaaggtggtttctaccaggcctgtccagtggaaatttatttatttttccttttttaaatgatgagtaatttgggggaagatactttgagactatgtaaatatcctgaatctccttaaacttttacccactagttctagcatctgttggtgagtcttgcctgaatcagttattactataaagaatccatgctgggttttctaactccatcattctgtctacatttattagaatcagtaggctgtaatatatcactatcagtatttatttgcttatgtttgtttaaacttatttaatgtacattcagtaaaatgcactgttttttagtctgtacttgtgaatttggacgaatccattgagttgtgtaaccaccacacagtcaagcaacagaagctccatcacctcccaaaatgttccctcatcaacccttcacgcctcccttgancttngtnctccatcgctaatgattngccttttccagaatgaatatctatggaatcctagtctgggttgcttttcagtctggcttctttcacttaagataatgcatttcagattcatctactttgttttatttaccattaatttgttctttttaatgctgagtgctattccattgtgtgaatgtgccccagtttgtttatccatttaccctttaaagaatatttgggttgtntccagttttcagaatttgggaataaanctgctacaaatgttcacatacagtttttcatgtcaacataggtattcatttcatttggataaatgcctaggagtcaaagagtctctctgaaagtattctggtttgggtggctggctggctggggttcaaa

SEQ ID NO: 635047 - DNA, 111 bp, Homo sapiens
agcctgacctctccttcataaagttattcagcttcctacactattaaagtttactacaaccacgaccaatgatatgaaaaaccatcgttgtatttcaactacaagaacacc

SEQ ID NO: 635048 - DNA, 207 bp, Homo sapiens
ctggggctcccctttggccatccctctcctcccagggcctgcccacagctcgggccctctgtgagatccgtctttgggctcctccagatggagctggccctctcctggggatgtgtaatggtcccctgcttacccccaaagacaagtctttacagaatcaaatgcatttttaatctgagagctcgcttgagtgactgggtttgtgat

SEQ ID NO: 635049 - DNA, 385 bp, Homo sapiens
cccagggcacagggaaccagcagcgtagagctgcagcgaaagggcggagggatcgcgcaaaatatgaggaaagaaagcaacatgcagagggggcacaacatgaactcacttccataaaacaaagagcaaggtttaaaaattccacgtggttcacgtctgtaatcccagcacttagggccattgtaacacattttttatatccagtccaccactgacagacaagtaggtggattccgtatctttgctattgtggatagtgctgtgaaaaacagaagacctgtgtctctctggtagaattatttgctttctttaggatatatacccagtaataggattgctgggtcaaatggtatttctgtttaaagttctttgaggaatctccaaa

SEQ ID NO: 635050 - DNA, 134 bp, Homo sapiens
gccgtcatctactctaccaaccttttcaggcacactcatcacagctcttagctcgcaataattttttacccccccccgggctaggaataaacccccctgattttttattcccgcccgcgcccccaaaaaaatta

SEQ ID NO: 635051 - DNA, 239 bp, Homo sapiens
  misc_feature (8)..(8): n is a, c, g, or t
  misc_feature (38)..(38): n is a, c, g, or t
  misc_feature (40)..(40): n is a, c, g, or t
  misc_feature (42)..(43): n is a, c, g, or t
  misc_feature (45)..(45): n is a, c, g, or t
  misc_feature (48)..(48): n is a, c, g, or t
  misc_feature (118)..(118): n is a, c, g, or t
  misc_feature (152)..(152): n is a, c, g, or t
  misc_feature (165)..(166): n is a, c, g, or t
  misc_feature (168)..(168): n is a, c, g, or t
  misc_feature (179)..(180): n is a, c, g, or t
  misc_feature (223)..(223): n is a, c, g, or t
  misc_feature (225)..(225): n is a, c, g, or t
  misc_feature (229)..(229): n is a, c, g, or t
cgcaagtnaagaaatatatacatatatatgtatatatntntnncncanaatctgagagctcagggaggccgtggaaatttggggaagaagaaacagactccctgagcagagctcaggncagcagctccaggcatgcctgctgagcccatcangccaccgcacctnntnaagagcctctnncctgaactgctggggatgggctgcagaaagcctgagacatttngnccancaccttccca

SEQ ID NO: 635052 - DNA, 771 bp, Homo sapiens
caccatccagtcgacatggcaagcacaatggcgtatgcacacagaacactacatttctcactatgcatcagagagaacatgcattttcacaagtcataaccagtttgcagtaattcaagcctctaaaacaggaccagggacatttagaaaccagatgtccatgtgctacggtgtggagcaataatgttgtcaataatcaccacagctattaagaaagcgatcatcacgacacatttgccttcagtcttggtaaaacattacttatttacactgcattaaaaataccttctatgtattagtgtccaacttttcacacttctgggcgtaagaccaaatgtagtttgtatacagagaagcacacacctcaagtaataggcatttcacgtaaaagtctacctgtgtattgggctaacaacggctgctcacaagttctatttcttgacgcactaaattctacctccttgtgtgccactgaaccaggttctcttcctggcatcatcaaggcagtggtgtaactcattttacattcccactgacaactttaccagtatccccttctcattcgaagggatcgggtatccgagctctaataatagttggtttctaaatcagtggtggggcatctaactccacgctgcgcgtcactcactatcaaggacagaggcggcaccaacgttttgcaacccacgttcatcatggaactcgccctggaacactcgttcgcgccttaaggcgggctaggagccacacagggaccgcccggcaccgaaa

SEQ ID NO: 635053 - DNA, 162 bp, Homo sapiens
tgtggtgctctagagttccccaggcacaagctcctacgggacctgtccagctgggagctggaagcctggtactgaggacctgcaaggaggtcctcgtcttcagaatgaaaatagggggtcacctatgtattcacctcactttacggggcttcagaggggttt

SEQ ID NO: 635054 - DNA, 1610 bp, Homo sapiens
  misc_feature (1)..(1): n is a, c, g, or t
  misc_feature (990)..(990): n is a, c, g, or t
natgcttgtagccgtcgggtgtgctgttcgtgactgcgtgcttttgcttcgtctgtgtgatgtcagtggtgcccctctctcttcttgcttttgttggagtggagtgcttggtctgctcgtcggtagcctgtatcgttcactacctgtggcaaggggctggtttcttttgttacagggtgcgcttcttctccacccccttcttcgctcttggcggatgtttcttgttcttcgcgcctccttcttgtggcctccttcctgctttcacgcgtcgcccttctgtgtgatggtctggcgccgggcgagctctctcctcggccaaggctctgttgtgtacgcctccaacacacggggttgtttttctgcgggggcggaccgaacacaccacccgatggtgttgttcgccggcgccctctgttctccgctctcgtggctttgtccagtagagagtggttgttttcctctccccttcttggggtctctccctcccttgcctccctcctggggatgttgttcctacggctttcctctgtcgccgcgcctccccctcctccgtggggtcccgcgcaacatggttaactcctccgccgtgtggtgggaattctcgttgtgggggctccccactcttcctctttgggggccccgtccaccaaggggcccccgcacaccgcgtgtgcccccagccgccaagaatgattgagggaagttgtttggcccacacacccctcagggggaggtgtttatctcggtacccggagtgttcttctggggccccccccctccccccatttctgggtcctccccccccggcccgtagaatggccttgtctttataaacccgggagctttctcccgcccctagaggttgtcgcgttatcgccactctttgggctccgcccacttgcgggttttatatttggaggagaatattgagaaaagttggtggccccccctcgggccacaaaatgggcaccacccacccctccactgggngctataggcctcttcactcgcagaaatctcgggagattataagcgcctctttcgcagaaatagagaagatgtgggcccctctggagaaggctttgtgatattctgagtaattccacgccactctcggagattgtaagagaactctgttgtctgagattttgagcccctctgtatattgagaagttataaactcgttgtccccctctggtatattaaacgcggtccacgcggcttgaagtgttttctcgggatatttcttcttagagggctggcccacgaaacccagttgtgtttggttctctgcgggttctgtccacgggttgggaagttcccacgcccgcttggagcccacggttcctctttcttaagctgatgttctcttggcccggacacccgctgggctgttacttgctttgagttggaaagcggtttgcactttacgcccgtaaaagtattcactttttataatttaatgtaaggttttttttgtaaccccatttctcgagtttctttgaaagagatgacacaccaattttggttttttactgttatgctgcaggacctttggcccccgccacacgtccttgtgtaagggaaaattaaagtgctgccgtaaccct

SEQ ID NO: 635055 - DNA, 153 bp, Homo sapiens
gacaaatcagtcatagcactgcctatagcattagccagtgaccaattagggacacgtcttggcacagattgcttatcaaggacatttccacaagaaggaaatattaagggttatttccacagagcccaaacgcttggaacacagaggtaggag

SEQ ID NO: 635056 - DNA, 682 bp, Homo sapiens
  misc_feature (3)..(3): n is a, c, g, or t
  misc_feature (101)..(101): n is a, c, g, or t
  misc_feature (117)..(118): n is a, c, g, or t
  misc_feature (194)..(194): n is a, c, g, or t
  misc_feature (217)..(217): n is a, c, g, or t
  misc_feature (224)..(224): n is a, c, g, or t
  misc_feature (226)..(226): n is a, c, g, or t
  misc_feature (241)..(241): n is a, c, g, or t
  misc_feature (246)..(246): n is a, c, g, or t
  misc_feature (248)..(248): n is a, c, g, or t
  misc_feature (266)..(266): n is a, c, g, or t
  misc_feature (278)..(278): n is a, c, g, or t
  misc_feature (280)..(280): n is a, c, g, or t
  misc_feature (282)..(282): n is a, c, g, or t
  misc_feature (285)..(285): n is a, c, g, or t
  misc_feature (287)..(287): n is a, c, g, or t
  misc_feature (291)..(291): n is a, c, g, or t
  misc_feature (300)..(300): n is a, c, g, or t
  misc_feature (315)..(315): n is a, c, g, or t
  misc_feature (334)..(334): n is a, c, g, or t
  misc_feature (341)..(341): n is a, c, g, or t
  misc_feature (343)..(343): n is a, c, g, or t
  misc_feature (354)..(356): n is a, c, g, or t
  misc_feature (358)..(358): n is a, c, g, or t
  misc_feature (368)..(368): n is a, c, g, or t
  misc_feature (386)..(386): n is a, c, g, or t
  misc_feature (394)..(394): n is a, c, g, or t
  misc_feature (401)..(401): n is a, c, g, or t
  misc_feature (405)..(405): n is a, c, g, or t
  misc_feature (422)..(422): n is a, c, g, or t
  misc_feature (445)..(445): n is a, c, g, or t
  misc_feature (448)..(448): n is a, c, g, or t
  misc_feature (484)..(484): n is a, c, g, or t
  misc_feature (491)..(491): n is a, c, g, or t
  misc_feature (514)..(514): n is a, c, g, or t
  misc_feature (596)..(596): n is a, c, g, or t
  misc_feature (656)..(656): n is a, c, g, or t
tgnaaataaaatataaaaactgttcttggaattatttctaaacagaactggcctctaatcctaacatcacagaaatgtatataataatcactattaggtanttttttcgtgtgaggnnaatttcaaagcacggaacaacagaaagtgaaacatcacattccgcacaaaaatattgccgttctctatagatcttnccatcctcgtcattgtgtgaccngcaaaantncagtgaccagttggnttttntntcttttatggtggtaatnctgttgggaaantntnttncnggtnggccaagangtgtgacatcatcanagcgtggacgaccccaganacgttgntnccctggttcannntntttttttttnatccttttaatcaatttnatttttangtttctnttgnaaactatttgctcaganttttccttcttgaacaggatgtnggngttaagcactgtaatgtttagaaggtggagaaaganttttttntatcaaaccttgtgtgttatctnaggggaaacgctgcagccgcaagcaccgctagcatgtattctcggcgcaaaagggaaaggattttaatgatattctgggaanatgtgctttctctgttctggatgttgacctcagccaggagaattgtgattcctgtctttnctcagggaaagaatcttcctcttcct

SEQ ID NO: 635057 - DNA, 334 bp, Homo sapiens
  misc_feature (308)..(308): n is a, c, g, or t
atccggcagcacgcttgattcggagctgccgcttcttccatcaggccctccaggtccattgctctctataatctagcactgttgtgctgtgatcatcatttatgctgtaaaacggaccatctttcaacagggaaagcattactgtgatgtgcttaaaccatttccatttacagaagcacacactgtaccacattacgaacagcgaattttttttcaccctaggtgcataaaaataattatagtagaataactctttccccatcttcatcacactgtccactgtccactattacaccatcaccctgatntagagtacaagcatttgattttcaca

SEQ ID NO: 635058 - DNA, 325 bp, Homo sapiens
ttaaccctaggcctctggtgccatctccgctccctggaagaccttgtcccagttcttatctgtcgtgcaaaggccagacattgctacatcagtatagcttgtcaggtacagcaacacatacatcattaatgtagaagtcgtgaaggggcttttatactttttacattgacttaagagattaaaaataaaaccattatccatctaataaataagacatcatctccaagggtggcgatagcttgggatggtcttcaatgtcatgtgtccatggaagatgttgggctggttgagggtctcgtggttagaggatacagcttctcttaaa

SEQ ID NO: 635059 - DNA, 364 bp, Homo sapiens
cgtcttctcacatctggttctgaggctgagagacactgggccagtgcagaggggatgcctgccctgccctgccagctctgaggctgagacacactgggcctgtgcagagggggacacctgccctgcccagccatggcccccaagagcacaggggtgcaaggccaggccagaagtggaggccgcccagtcacctctgcgggcacttgcagaggtctgagcagagaacacctctgcgggcacttgcagaggtctgagcagagaaccagacacctcaccccttcacacccttggtgtgcactacctgcaagagtcaatgaatgaatgagtgagggaaggagtgcgggaataaaccaatgagtgaaag

SEQ ID NO: 635060 - DNA, 129 bp, Homo sapiens
aggttaattgtgttcatctgcagatgagttttgtaatcattttgttttgttttgttttgttttgttttgttttgtgttttctgtcctttccttccctgtcccttaccacttcccttctgtcgtcttctc

SEQ ID NO: 635061 - DNA, 344 bp, Homo sapiens
ccgtgcgcgatggctcatgcctgtaatctcagcactttgggaggccaaggcaggcggatcacctgaggtcaggagttcaagactagcctggccaacatggtgaaactccgtctctactgaaaatacaaaaattacccaggcatcgtggcacacgcctgtaatcccagctacttgggaggctgaggcagaagaattgcttaaacctgggaggcggaggttgcagcgagccaagatcgcgccgctgcactccagcctgggcgtcagagcaagactctgtctcaaaaacaaacaaaaaaaaccaaatctaaatgcggccgttcgagctcacttggccttcgcccttg

SEQ ID NO: 635062 - DNA, 980 bp, Homo sapiens
  misc_feature (270)..(270): n is a, c, g, or t
tgtgtccgccgttcctcctgcaccacacctgggcggtgctgcatccatctcgccggcgcgggttgagtacatagccgcgcggtggttgtgccggcccacgatcgggtggtcgccgtcagccccttgggtggtgcattttgctccccactccggggggcgtgcgcactatattgtgtgcccccccagcgtgttcgctccgtggtcgcccccggcgtgctttgttttttgtctcgccaaaaagcgggtcgtccttcataaacaaggcggagnacagttttgttgcgttgtgatcagtactgcgtgattggtggccacgcgcgtcggaagaacagaccatgtgtgggaacaacaaacacttcccgtgcgaggggcggcgctccccccgcccgtgctttttgaggtgaatgttccgttgggggttggctcgctccaacccgccggcgctctttcgagggaacgtcgcgttttgtcttctgggccaaccaaatgtctggtcgcgagcgtttatagccatgttcccttcggggggagggccacgcctgtcttcgctccgtatgatctattctctcccagacccgtggagatataacaacttagccctgctcgtgttttgcagatacatagcactcgctcgaagtgcactcccccgcgcgtgacacctcatctttttcttgctctgcgtcgcatcccccctcgctaatctgtatctattggtaaggctacttatcggggtggatccataagagcagcggtgggtgttgttaaagagagagggggatgtatggatatacagccccccttcttggtccagaagagtatctcttctcttgttgtctccctctgttctgtgctgtgaaggaaggcctgcgtcgtgtcgtgatgtttcgtttgtgccgccgtctgtctaaggaagagcgggggaccaactttgcccccccgtccccgggatttttttttggggggtttctcccaacataaca

SEQ ID NO: 635063 - DNA, 168 bp, Homo sapiens
agagtctcctgaattttctagtatttttccccgagttgattttggtctctctgttttggcaatagggggccgggctcagtgcggaaggggctgccgagatcccatgctctcacaccatgtttttgtaccgaactgatggttgaatctttgttctcttgaaattaaccg

SEQ ID NO: 635064 - DNA, 651 bp, Homo sapiens
tccctcagccaccaaattttagacagctcttgctctgacagaggtgcagcctatgactacatggctccagggcatgccactcaccctgcagtccgcatggccttgggtggcggctatcacgcttatccatcaggggccggtaaagctctttccgaaagtcgctgccgcatgtgtgacaagctgcttaatgccaaccagccatgagcttccagatttatcagacatattgcaccgacgtgtaggcagacgctaacagcctgatcacttggaacctgcagctcaagtacatctaatgctttatgtgatgcaatttcgaccgtgatggtgcgtttctactagatgttagccacgtcgttcaggaactgaccgagacgaagcgtgtaagctacatgacgtacgtagagatgaaattctagtttgtcaaaccgagctcatttcgagacatcaagacgacctcttcactttgccgcatctcgcccctagactccttgaccgctccccctgtccttggagttcgttgaccaggcccctttggcatcttatagccctgcctccctgccccctcggacccctatctctccgccctacctgttcccatcttcttactgaggctgttcagtctattccgccctctcgctcccccctcccccg

SEQ ID NO: 635065 - DNA, 120 bp, Homo sapiens
tgagtagcgtgcgtcagcgattggccagcgtcatggcgtggcaaagcattcatcccggtcacttttggttacaggacgtggcagctgtcgggctagtcggggactgtcgggctagtcggg

SEQ ID NO: 635066 - DNA, 122 bp, Homo sapiens
tttttttgtgcaaatatattgactttatttgtctcctttcaggagcctcacagactatcacggtaaaaagatcgttaaataaatgccttcagcccatcgcaatgcaaaaataaatatcaatc

SEQ ID NO: 635067 - DNA, 665 bp, Homo sapiens
cggcctttgcaggcccactcgagccctaatggtgggtctcctggtgctgggcttcctggccacagtttgtggccaccgatgggcatgaagtgcacgcgctttgggggaaacgaccaagtgaagaaggcccgtataccactgggtggaggcataatttgtcatcgtggcaggtcttgccggccttggtagcttgctcctggtatggccactcagagttgtcacagacttttataaccccttgagtgccctgcccaccttaagtatgagtttggccctgccactctttaattggctgggcacgggtctgccctagtcaatcctgggagggtgcactcgctctcctgttcctgtcctgggaatgagagcaggctgggtaccgtgtaccccgctcttaccctaagtccaactcttccaggagtatgtgtgacctgggagtctccttgccccacgcctgacacggctatgggagtgttctagattgcctgaaagggcctggggctgagctcagccttgggcagggtccggacaaaggcctcctggtcactctgttcctgcactccatgtatagtccttcttgggttgggggtgggggggttcccttggtgggagagaccaaaagagggagagtgtgctttttgtacagtaattaaaaataagtattggga

SEQ ID NO: 635068 - DNA, 185 bp, Homo sapiens
tgagtacagctatacatcattggccgtcgtgtacagataacagctataaccaagcacaggccgtcgatagtacagttaacagctataaccatgcactggccgtcatttgtgacagctaaatagctatgaccatgcattgcccgtcgttgcccaccatcggcaataaccatgaatggctcggcatg

SEQ ID NO: 635069 - DNA, 174 bp, Homo sapiens
tagcccgctcattctggccctccttctggccgctgggtctctgttctttctgttgatttccttaagtaaataatgccaaacactttaatcagtcataaaattgtgaacagtatactaataattgatttaatatgttagcattatttacttaagggaatccacagaaagaacagg

SEQ ID NO: 635070 - DNA, 105 bp, Homo sapiens
atatggaggatggaccgcacagctcacagccgtttctggagcttctggatcctaggctcatctccacagaggagaacatgcacgcagcagagatcatggtgctga

SEQ ID NO: 635071 - DNA, 433 bp, Homo sapiens
cccccttttaaaaatagattggttaaaaccaaaaacctataagagagaaatgatatttcaattgtattgtaggtttggggaatcctggttagatttataatttctggccgggtgcggtggctcatgcctgtattcccagtacttttgggagcccaaggtgggtggatcacctgaggtaaggagtttgagaccagcctggccaacatggtgaaaccccatctctactaaaaatacaaaaagttagctgggaccacaggtgtgtgccaccacacctggctaatttttatggatttttttttcttttttttttttcgccatgttgcccaggctggtcttgaactcttggcactcaagcagtccttctgcctcggcctcccaaagtgctgggattacagatgtgagccactgcacctggccccagaaattatgctta

SEQ ID NO: 635072 - DNA, 159 bp, Homo sapiens
aatttttttgcccccccaagggggggaaaaaaagggccccggattttcctggatttcccccatatttttgttttttttccccgaaaaagtttatttaggccatgtcctttgctcaaaattgagggggtttttccccataaaccgtaagtttttgtttta

SEQ ID NO: 635073 - DNA, 233 bp, Homo sapiens
aagatagaagtgcataatgtgaagcactatggctagtatatgtttagccacatacgcttgtcacctatgaggaagatcacacagtgtgtaccacacttcggcatacattatcatgttgctgctgctatcatgtgttacaagaaatgtcgtacggtatgacaaagttgaaaatacacatgaagtgaaaaatgtcttaggaaaaaaatagctattttcatgcaattatgtacagt

SEQ ID NO: 635074 - DNA, 235 bp, Homo sapiens
  misc_feature (224)..(224): n is a, c, g, or t
ttggaccggatgtgctgtaggccagcgtctacctgttccgcttccatggcgccagcggggctcgacggtcgccctcctgctcggcgctctcggcttcaaggcgctgctgctgttcggggtcctggccgcccgcgctgcccgccgccgcccagagcatctggacaccccggacaccctaccacgtcccacaaccgtgtcctgtagtccctgtttgcgtgatttanctgtcgcacca

SEQ ID NO: 635075 - DNA, 376 bp, Homo sapiens
  misc_feature (46)..(46): n is a, c, g, or t
gactctcgagggagcccagcgagcagcattccagctacaatatttnaccctttttaatgtcctctgtgtccttaaaatgacagcctcctctcctggaactggtctctactccgggacatcaacaaggccctgactggaaagcacatagaaaaagggcagatggaggctgggcacagtggctcacgcctgtaatcccagaaccttgggaggctgaggtgggcagatcacctgaggtcgggagttcgagatcagcctgaccagcatggagaaaccccgtttctaccaaaaatacaaaattagccgggcatggtggcacatgcccgtaatcccagccactcagaaggctgaggcaggagaatcgcccgaacccaggagg

SEQ ID NO: 635076 - DNA, 344 bp, Homo sapiens
cccttttttctggggggcccccccccccggggggaaaaatttttttttgcccgggggggtttattccttttaaggggggggcccccgggatttgccaattggcgggggttttcccccccctggggggggttccccaaaattttgcccccaaaaaaaaaattttttcccccgggggggggagaaaaaaaatttttttttttccccccccgggggggcgggtttttttttcccccccccccccccccccgggggtttttttttcgggggggggttggccccctttttttccccccccccccccccccccggaatttttttttttttccccccccttttttttttta

SEQ ID NO: 635077 - DNA, 407 bp, Homo sapiens
ggaaaaccactgtgactcagtaaacagcttcataaattatccatcaaatgtttttatttatttcacgcactcatactaagctagacatattgcttattaaggtttcacttatttgagcatggtgatgcttttactagagatttatagaattgcatcagtttctcgcttaaatgaacacctaggtcctttcaaacttttatatatgtggtccctcacctaataataattttaccaagtcaattttttccagctactaactgtgacaaagatgcttgtaaagcatgtaaaagtctgttaaacccctgtttacattggacatctggtctgtaatacagtagtttctccttttctgctgtttgtcagttaattaaaatagactttaaaataagttaaagttgtttcctcta

SEQ ID NO: 635078 - DNA, 980 bp, Homo sapiens
ggtgcgcgacggtggtggcgtgcgcgggaggttctggagcggtggagctcgtggctcgcggacggtatggaggactacgagcagagagctgtgcggcgtcgaggatgatttccacaagcagttcgcggccgagctggaggtgctggcagagctggaagtgtggctgtcgactccgtcgccctccgggggtccccctgttcacctgctgggcctgacccctgtggactgttcggaggatggcccttgccaagagggggacgctgggcgtccaagtcccgccccagcctgcatcttgtgtggcaagcatgccagtggctggctgccatgtggaatgacgggcctgcgtgtgactgcctgaccttgcatgctgtgctgggtccctgcccccatgccgcccatgtgatcaaaactgtgctaagtgttgcatgttgttggtccaagatgtgcttgaaccttcaagtgtcggaggagattggatggagcccgccccttccctgattcctccgccgacgtgacatcaaccgcgcgcagagcctgaaggactcgcagagcttttgggggccaccggagtctcagaatgcttgctgctgacgtgggtctcacacgggcctcaagcagctgcctgaatcccagtctgatggcgtgcccccatctttggaggactacgtccactgtgaccttcaacggcaggacgtccggcgcttatcttggtgcttgcggtgatggcccctattgagcccgggggtagcagggactctctcctacacgtccattgcgaggctggtgccacgcttgaactggcttggatgggtctttagccttcctgaagaagaggtcgacggcaaaacggcggaaccgcgtgttaaggaggccaggagattaagacacgtgaacagctcaggtgtggacgaggaggcccaccttggggcctaagagaacgatgacgcagaggatacaactggtgtggttagtgacgccac

SEQ ID NO: 635079 - DNA, 128 bp, Homo sapiens
gaccatgatcatgggcccctcggcttcttgccctgattctgggccccctcgtgcttcttgcactgattctgggacccctcggccttcttgccctggttctgggccccctctaccttttagccctgatt

SEQ ID NO: 635080 - DNA, 2270 bp, Homo sapiens
  misc_feature (72)..(72): n is a, c, g, or t
atggcgtccatgcgggagagcgacacgggcctgtggctgcacaacaagctgggggccacggacgagctgtangcgccgcccagcatcgcgtccctgctcacggccgcaatcatcgacaacatccgtctctgcttccatggcctctcgtcggcgtccctgctcacggccgcggtcatcgacaacatccgtctctgcttccatggcctctcgtcggcagtgaagctcaagttgctactcgggacgctgcacctcccgcgccgcacggtggacgagatgaagggcgccctaatggagatcatccagctcgccagcctcgactcggacccctgggtgctcatggtcgccgacatcttgaagtcctttccggacacaggctcgcttaacctggagctggaggagcagaatcccaacgttcaggatattttgggagaacttagagaaaaggtgggtgagtgtgaagcgtctgccatgctgccactggagtgccagtacttgaacaaaaacgccctgacgaccctcgcgggacccctcactcccccggtgaagcattttcagttaaagcggaaacccaagagcgccacgctgcgggcggagctgctgcagaagtccacggagaccgcccagcagttgaagcggagcgccggggtgcccttccacgccaagggccgggggctgctgcggaagatggacaccaccaccccactcaaaggcatcccgaagcaggcgcccttcagaagccccacggcgcccagcgtcttcagccccacagggaaccggacccccatcccgccttccaggacgctgctgcggaaggaacgaggtgtgaagctgctggacatctctgagctggatatggttggcgctggccgagaggcgaagcggagaaggaagactctcgatgcggaggtggtggagaagccggccaaggaggaaacggtggtggagaacgccaccccggactacgcagccggcctggtgtccacgcagaaacttgggtccctgaacaatgagcctgcgctgccctccacgagctaccttccctccacgcccagcgtggttcccgcctcctcctacatccccagctccgagacgcccccagccccatcttcccgggaagccagccgcccaccagaggagcccagcgccccgagccccacgttgccagcgcagttcaagcagcgggcgcccatgtacaacagcggcctgagccctgccacacccacgcctgcggcgcccacctcgcctctgacacccaccacacctccggctgtcgcccctaccactcagacacccccggttgccatggtggccccgcagacccaggcccctgctcagcagcagcctaagaagaacctgtccctcacgagagagcagatgttcgctgcccaggagatgttcaagacggccaacaaagtcacgcggcccgagaaggccctcatcctgggcttcatggccggctcccgagagaacccgtgccaggagcagggggacgtgatccagatcaagctgagcgagcacacggaggacctgcccaaggcggacggccagggtagcacaaccatgctggtggacacagtgtttgagatgaactatgccacgggccagtggacgcgcttcaagaagtacaagcccatgaccaatgtgtcctagaaccacctgcctcacagctggccgtcacttgtgggggtccacgggacgatggctttgccagcttaaagtaaccggatggcggacacctggcccccgaggtcccccggccgccgccctgctgctgacccagcctgttttaagttctggatgcatttctctggggtatttggggcttatttttaaaattttaatatgggttcttttttgtgtgatttaagacactttttggactcaacgttacatttttgaatgtagtaagtaaattaaccaaaaaagttacaacttcctaattttagtgacagctctgcctgttagactcttactttttaaaatcttttctattttccctcgctggggcagtgccctcctacccccagggttgaggggaccaaggtggcacggtggtactgggggtgcggcagggacacccgaccacaccagagcgtgggagacggtgggccttgtcccctgcctgtgcctgcctgggagttttgtattcatcttttgtatagttgtggacatttaagacagtctttgggtacctattttcattgtaaaactatctgaaccattaaagtcgagcttttctaagaagggcacaaaacaccgaaagacaccaa

SEQ ID NO: 635081 - DNA, 1434 bp, Homo sapiens
  misc_feature (236)..(236): n is a, c, g, or t
gacagcatgtgcaaccacgatcttcgtgagagcatcctggctgtaccacagttaccgacgcctcgatcaaggaagtacttcaagggctacgtgcgaggtctgacgacggaccagtggatcaatcagccgatgccgtcacatgaccggagcacaggtccgcggcggtcataggtgcctgtcggtgataccaagtggttcgatgcacgcgagtgggctcgactgatgacggagtcatntgctagaagagagccgtagtcacccagatcactcagacggcacgcaatggaccgtgcgcgtgacaggcctgtgacacgtcgtacatggaggcgaccatagtccctggggaggtcacatccacgagcgaggcctttgagcatgtgggcgttggacgacatgtggtgggatgccgcaacccttgaaatccgagacggatctgtatatcgagggtcgtgaacccgctcgagggaggattaagatccataagcccagattccacatggtcggtaatacgggttgccaaagcgcctaatgctgttggcgttgcaatcccacagagaggctcgggtcgccaattggttaaccctggtgcagcctgtgggtcctctctggcccgcgctatacggattctaagcaagctccacttacacgctacgtggaccgcaatgacacacacctgaggccgtgttaagcggagcacccgaaggggtaagccctacaaaggcgactgtggctacgtagaataggctctatagttgtaacggggcgcacagggaaatataacgcgcctacccgatggggttaaagccgcgccaccgcgcggttaaacacccgacttccgggaattaccagtgggggcccccgaatggcgattgtgtaccggtttggccccgctgcagaccgattatatggcgggggattggtgggtgtaccaattaacccgattggttgccggattaatgtgcgctgcctcttgtttaccccagggttgcgccagttaatgggaaccccgactgtgaagcgcgcggggccgaccgtcggttgtcagctaccaatagcgaaacgccggtggcgacgcgaatacaggtgtgccacggtgccggcagtgggggagcccgacactacacgcagcccgctttgatatttgcggtgatgtaggaaccaacacgggagatcaacttgcctaaaggagtgggatcaggggaccacaggggcattaaagcagcccacattgggggctaacaggtccccgcctatgggaaacagtccccggttgggcacaacattggaccccactgttgtttatcaacacagtggtggtgggaagcctgggactttagtaccccctgtgttagtgatgccgtagcgaccgtcgggtgagtggttgtgcccacaccctgttgagtgcttgagggtgccacgcacacaattggtcgg

SEQ ID NO: 635082 - DNA, 389 bp, Homo sapiens
gggtgcgctcctcttcatactaactacctgactcctaccccttatcaaaaattaattcaagatggattaacagactgaaactgttagacctaaaaccataaaaaccctagaagaaaacctaggcaataccatacaggacataggcactggacaacggagttcatgactaaaacaccaaaagcaattgcaacaaaagccaaaatagacaaatgggatctaattaaactaaagagcttctgcacagtgaaagaaactaccatcagagtgaacaggcagcctacagaatgggagaaaatttttgcaatctcacccatctgccgaaagggttaatatccagtaatctactagagaactttaaacaaatttcgcaagtacataaaatcaatacc

SEQ ID NO: 635083 - DNA, 157 bp, Homo sapiens
  misc_feature (126)..(126): n is a, c, g, or t
cgaagttagttcaaagaaaagcagaagtgtgagacgcagacgcttagcgaaaggtggtcctctgcctgggaagaatgggaggcagcatcccggcaatcttccagccacccgtcatgtcactttagnacgggaaagccaacctaacagcaggccacca

SEQ ID NO: 635084 - DNA, 2171 bp, Homo sapiens
ggcgctatctcgcagcccccgaccagctcggcctgctgtcgggcatctctgctgtcctccggctgtagggctacctgcctccctcccggggggtgcactgcgagtccgactctagtgggggcagcgcctagcggactcccaaacccgctcaggtcctgccggcctcaccggcaccgcccaccctccagccggccgcggctctgcgcttgcgcgccggcagcacacagtgttaggggcgcgccctctgctctggacatgcgcgccgtcgcgagcgtctctgggaccggaagtgcgggcgagcgcgggtccccgggtctgacaggagcagcctgtgggcaccgcggcggtagttggaggcgggagagggtccgtagccgcgccgccctgccccgccatgggcctcctgtcggacccggttcgccggcgcgcgctcgcccgcctagtgctgcgcctcaacgcgccgttgtgggctctgccagtggcctggcttgaacggacgatgcggtcagtagggctggaggtctacacgcagagtttctcccggaaactgcccttcccagatgagacccacgagcgctatatggtgtcgggcaccaacgtgtacggcatcctgcgggccccgcgtgctgccagcaccgagtcgcttgtgctcaccgtgccctgtggctctgactctaccaacagccaggctgtggggctgctgctggcactggctgcccacttccgggggcagatttattgggccaaagatatcgtcttcctggtaacagaacatgaccttctgggcactgaggcttggcttgaagcctaccacgatgtcaatgtcactggcatgcagtcgtctcccctgcagggccgagctggggccattcaggcagccgtggccctggagctgagcagtgatgtggtcaccagcctcgatgtggccgtggaggggcttaacgggcagctgcccaaccttgacctgctcaatctcttccagaccttctgccagaaagggggcctgttgtgcacgcttcagggcaagctgcagcccgaggactggacatcattggatggaccgctgcagggcctgcagacactgctgctcatggttctgcggcaggcctccggccgcccccacggctcccatggcctcttcctgcgctaccgtgtggaggccctaaccctgcgtggcatcaatagcttccgccagtacaagtatgacctggtggcagtgggcaaggctttggagggcatgttccgcaagctcaaccacctcctggagcgcctgcaccagtccttcttcctctacttgctccccggcctctcccgcttcgtctccatcggcctctacatgcccgctgtcggcttcttgctcctggtccttggtctcaaggctctggaactgtggatgcagctgcatgaggctggaatgggccttgaggagcccgggggtgcccctggccccagtgtaccccttcccccatcacagggtgtggggctggcctcgctcgtggcacctctgctgatctcacaggccatgggactggccctctatgtcctgccagtgctgggccaacacgttgccacccagcacttcccagtggcagaggctgaggctgtggtgctgacactgctggcgatttatgcagctggcctggccctgccccacaatacccaccgggtggtaagcacacaggccccagacaggggctggatggcactgaagctggtagccctgatctacctagcactgcagctgggctgcatcgccctcaccaacttctcactgggcttcctgctggccaccaccatggtgcccactgctgcgcttgccaagcctcatgggccccggaccctctatgctgccctgctggtgctgaccagcccggcagccacgctccttggcagcctgttcctgtggcgggagctgcaggaggcgccactgtcactggccgagggctggcagctcttcctggcagcgctagcccagggtgtgctggagcaccacacctacggcgccctgctcttcccactgctgtccctgggcctctacccctgctggctgcttttctggaatgtgctcttctggaagtgagatctgcctgtccgggctgggacagagactccccaaggaccccattctgcctccttctggggaaataaatgagtgtctgtttcagcagcta

SEQ ID NO: 635085 - DNA, 174 bp, Homo sapiens
ggtatccacctcagaggctctcagcaactgacaacgattcctcctcatgccggaactggacactgatacatggtgttgtcatccccaaacagggtccaggctgtctgtacctgtcacagactctggaaagctctgagggcagcaagggaaggcagtgagaaaggggggagtggg

SEQ ID NO: 635086 - DNA, 2267 bp, Homo sapiens
ggcgctatctcgcagcccccgaccagctcggcctgctgtcgggcatctctgctgtcctccggctgtagggctacctgcctccctcccggggggtgcactgcgagtccgactctagtgggggcagcgcctagcggactcccaaacccgctcaggtcctgccggcctcaccggcaccgcccaccctccagccggccgcggctctgcgcttgcgcgccggcagcacacagtgttaggggcgcgccctctgctctggacatgcgcgccgtcgcgagcgtctctgggaccggaagtgcgggcgagcgcgggtccccgggtctgacaggagcagcctgtgggcaccgcggcggtagttggaggcgggagagggtccgtagccgcgccgccctgccccgccatgggcctcctgtcggacccggttcgccggcgcgcgctcgcccgcctagtgctgcgcctcaacgcgccgttgtgcgtgctgagctacgtggcgggcatcgcctggttcttggcgctggttttcccgccgctgacccagcgcacttacatgtcggagaacgccatgggctccaccatggtggaggagcagtttgcgggcggagaccgtgcccgggcttttgcccgggacttcgccgcccaccgcaagaagtcgggggctctgccagtggcctggcttgaacggacgatgcggtcagtagggctggaggtctacacgcagagtttctcccggaaactgcccttcccagatgagacccacgagcgctatatggtgtcgggcaccaacgtgtacggcatcctgcgggccccgcgtgctgccagcaccgagtcgcttgtgctcaccgtgccctgtggctctgactctaccaacagccaggctgtggggctgctgctggcactggctgcccacttccgggggcagatttattgggccaaagatatcgtcttcctggtaacagaacatgaccttctgggcactgaggcttggcttgaagcctaccacgatgtcaatgtcaccagcctcgatgtggccgtggaggggcttaacgggcagctgcccaaccttgacctgctcaatctcttccagaccttctgccagaaagggggcctgttgtgcacgcttcagggcaagctgcagcccgaggactggacatcattggatggaccgctgcagggcctgcagacactgctgctcatggttctgcggcaggcctccggccgcccccacggctcccatggcctcttcctgcgctaccgtgtggaggccctaaccctgcgtggcatcaatagcttccgccagtacaagtatgacctggtggcagtgggcaaggctttggagggcatgttccgcaagctcaaccacctcctggagcgcctgcaccagtccttcttcctctacttgctccccggcctctcccgcttcgtctccatcggcctctacatgcccgctgtcggcttcttgctcctggtccttggtctcaaggctctggaactgtggatgcagctgcatgaggctggaatgggccttgaggagcccgggggtgcccctggccccagtgtaccccttcccccatcacagggtgtggggctggcctcgctcgtggcacctctgctgatctcacaggccatgggactggccctctatgtcctgccagtgctgggccaacacgttgccacccagcacttcccagtggcagaggctgaggctgtggtgctgacactgctggcgatttatgcagctggcctggccctgccccacaatacccaccgggtggtaagcacacaggccccagacaggggctggatggcactgaagctggtagccctgatctacctagcactgcagctgggctgcatcgccctcaccaacttctcactgggcttcctgctggccaccaccatggtgcccactgctgcgcttgccaagcctcatgggccccggaccctctatgctgccctgctggtgctgaccagcccggcagccacgctccttggcagcctgttcctgtggcgggagctgcaggaggcgccactgtcactggccgagggctggcagctcttcctggcagcgctagcccagggtgtgctggagcaccacacctacggcgccctgctcttcccactgctgtccctgggcctctacccctgctggctgcttttctggaatgtgctcttctggaagtgagatctgcctgtccgggctgggacagagactccccaaggaccccattctgcctccttctggggaaataaatgagtgtctgtttcagcagcta

SEQ ID NO: 635087 - DNA, 2275 bp, Homo sapiens
ggcgctatctcgcagcccccgaccagctcggcctgctgtcgggcatctctgctgtcctccggctgtagggctacctgcctccctcccggggggtgcactgcgagtccgactctagtgggggcagcgcctagcggactcccaaacccgctcaggtcctgccggcctcaccggcaccgcccaccctccagccggccgcggctctgcgcttgcgcgccggcagcacacagtgttaggggcgcgccctctgctctggacatgcgcgccgtcgcgagcgtctctgggaccggaagtgcgggcgagcgcgggtccccgggtctgacaggagcagcctgtgggcaccgcggcggtagttggaggcgggagagggtccgtagccgcgccgccctgccccgccatgggcctcctgtcggacccggttcgccggcgcgcgctcgcccgcctagtgctgcgcctcaacgcgccgttgtgcgtgctgagctacgtggcgggcatcgcctggttcttggcgctggttttcccgccgctgacccagcgcacttacatgtcggagaacgccatgggctccaccatggtggaggagcagtttgcgggcggagaccgtgcccgggcttttgcccgggacttcgccgcccaccgcaagaagtcgggggctctgccagtggcctggcttgaacggacgatgcgatggtgtcgggcaccaacgtgtacggcatcctgcgggccccgcgtgctgccagcaccgagtcgcttgtgctcaccgtgccctgtggctctgactctaccaacagccaggctgtggggctgctgctggcactggctgcccacttccgggggcagatttattgggccaaagatatcgtcttcctggtaacagaacatgaccttctgggcactgaggcttggcttgaagcctaccacgatgtcaatgtcactggcatgcagtcgtctcccctgcagggccgagctggggccattcaggcagccgtggccctggagctgagcagtgatgtggtcaccagcctcgatgtggccgtggaggggcttaacgggcagctgcccaaccttgacctgctcaatctcttccagaccttctgccagaaagggggcctgttgtgcacgcttcagggcaagctgcagcccgaggactggacatcattggatggaccgctgcagggcctgcagacactgctgctcatggttctgcggcaggcctccggccgcccccacggctcccatggcctcttcctgcgctaccgtgtggaggccctaaccctgcgtggcatcaatagcttccgccagtacaagtatgacctggtggcagtgggcaaggctttggagggcatgttccgcaagctcaaccacctcctggagcgcctgcaccagtccttcttcctctacttgctccccggcctctcccgcttcgtctccatcggcctctacatgcccgctgtcggcttcttgctcctggtccttggtctcaaggctctggaactgtggatgcagctgcatgaggctggaatgggccttgaggagcccgggggtgcccctggccccagtgtaccccttcccccatcacagggtgtggggctggcctcgctcgtggcacctctgctgatctcacaggccatgggactggccctctatgtcctgccagtgctgggccaacacgttgccacccagcacttcccagtggcagaggctgaggctgtggtgctgacactgctggcgatttatgcagctggcctggccctgccccacaatacccaccgggtggtaagcacacaggccccagacaggggctggatggcactgaagctggtagccctgatctacctagcactgcagctgggctgcatcgccctcaccaacttctcactgggcttcctgctggccaccaccatggtgcccactgctgcgcttgccaagcctcatgggccccggaccctctatgctgccctgctggtgctgaccagcccggcagccacgctccttggcagcctgttcctgtggcgggagctgcaggaggcgccactgtcactggccgagggctggcagctcttcctggcagcgctagcccagggtgtgctggagcaccacacctacggcgccctgctcttcccactgctgtccctgggcctctacccctgctggctgcttttctggaatgtgctcttctggaagtgagatctgcctgtccgggctgggacagagactccccaaggaccccattctgcctccttctggggaaataaatgagtgtctgtttcagcagcta

SEQ ID NO: 635088 - DNA, 441 bp, Homo sapiens
  misc_feature (89)..(89): n is a, c, g, or t
  misc_feature (232)..(232): n is a, c, g, or t
  misc_feature (238)..(238): n is a, c, g, or t
  misc_feature (243)..(243): n is a, c, g, or t
  misc_feature (381)..(381): n is a, c, g, or t
  misc_feature (432)..(432): n is a, c, g, or t
cttgattcaccttcacctgctctggccacccgctgacccggggtttccggccggagagcagtcagatatgaacggacgggtggattatntagtcacggaggaagagatcaacctgacgagaggaccttcggggctgggcttcaacatcgtcggtgggacagatcaacagtatgtctccaacgacagtggccatctacgtcagccgtatcaaagaggatggggctgcggcagngattgngggcntccaaggagggtgataagatcctctcggtaaatggccaagatctgaagaacctgctgcaccaagatgctgtagacctcttccgtaatgcgggatgtgctgtgtccctgagagtacagcacaggttaccagtgcagaanggacctatagtacatcgaggtgaaaggagagccaagtggagttcctgtaanctatggtgc

SEQ ID NO: 635089 - DNA, 334 bp, Homo sapiens
caatctgaagaaaaagcataatcaaagtaatggcaagccggacaccacctgggtccaattaaataaaaacaaaccaggtcatgagcaaaggtcatggcaaaagttttactggatattcaaggcattttgcttgttggctttctagggggtcaaaggcaataacatgagcttactatgaaagtgttttgagaaaatcagccaaagccttagaagaaaagcactcaggaaacctttaccagagagtcctgctcaattctgtcatcaaacgagggcaattttgccagagttttgatgggaaatcattatatatttaaattacaatcctgatttgaaa

SEQ ID NO: 635090 - DNA, 2309 bp, Homo sapiens
ggcgctatctcgcagcccccgaccagctcggcctgctgtcgggcatctctgctgtcctccggctgtagggctacctgcctccctcccggggggtgcactgcgagtccgactctagtgggggcagcgcctagcggactcccaaacccgctcaggtcctgccggcctcaccggcaccgcccaccctccagccggccgcggctctgcgcttgcgcgccggcagcacacagtgttaggggcgcgccctctgctctggacatgcgcgccgtcgcgagcgtctctgggaccggaagtgcgggcgagcgcgggtccccgggtctgacaggagcagcctgtgggcaccgcggcggtagttggaggcgggagagggtccgtagccgcgccgccctgccccgccatgggcctcctgtcggacccggttcgccggcgcgcgctcgcccgcctagtgctgcgcctcaacgcgccgttgtgcgtgctgagctacgtggcgggcatcgcctggttcttggcgctggttttcccgccgctgacccagcgcacttacatgtcggagaacgccatgggctccaccatggtggaggagcagtttgcgggcggagaccgtgcccgggcttttgcccgggacttcgccgcccaccgcaagaagtcgggggctctgccagtggcctggcttgaacggacgatgcggtcagtagggctggaggtctacacgcagagtttctcccggaaactgcccttcccagatgagacccacgagcgctatatggtgtcgggcaccaacgtgtacggcatcctgcgggccccgcgtgctgccagcaccgagtcgcttgtgctcaccgtgccctgtggctctgactctaccaacagccaggctgtggggctgctgctggcactggctgcccacttccgggaacatgaccttctgggcactgaggcttggcttgaagcctaccacgatgtcaatgtcactggcatgcagtcgtctcccctgcagggccgagctggggccattcaggcagccgtggccctggagctgagcagtgatgtggtcaccagcctcgatgtggccgtggaggggcttaacgggcagctgcccaaccttgacctgctcaatctcttccagaccttctgccagaaagggggcctgttgtgcacgcttcagggcaagctgcagcccgaggactggacatcattggatggaccgctgcagggcctgcagacactgctgctcatggttctgcggcaggcctccggccgcccccacggctcccatggcctcttcctgcgctaccgtgtggaggccctaaccctgcgtggcatcaatagcttccgccagtacaagtatgacctggtggcagtgggcaaggctttggagggcatgttccgcaagctcaaccacctcctggagcgcctgcaccagtccttcttcctctacttgctccccggcctctcccgcttcgtctccatcggcctctacatgcccgctgtcggcttcttgctcctggtccttggtctcaaggctctggaactgtggatgcagctgcatgaggctggaatgggccttgaggagcccgggggtgcccctggccccagtgtaccccttcccccatcacagggtgtggggctggcctcgctcgtggcacctctgctgatctcacaggccatgggactggccctctatgtcctgccagtgctgggccaacacgttgccacccagcacttcccagtggcagaggctgaggctgtggtgctgacactgctggcgatttatgcagctggcctggccctgccccacaatacccaccgggtggtaagcacacaggccccagacaggggctggatggcactgaagctggtagccctgatctacctagcactgcagctgggctgcatcgccctcaccaacttctcactgggcttcctgctggccaccaccatggtgcccactgctgcgcttgccaagcctcatgggccccggaccctctatgctgccctgctggtgctgaccagcccggcagccacgctccttggcagcctgttcctgtggcgggagctgcaggaggcgccactgtcactggccgagggctggcagctcttcctggcagcgctagcccagggtgtgctggagcaccacacctacggcgccctgctcttcccactgctgtccctgggcctctacccctgctggctgcttttctggaatgtgctcttctggaagtgagatctgcctgtccgggctgggacagagactccccaaggaccccattctgcctccttctggggaaataaatgagtgtctgtttcagcagcta

SEQ ID NO: 635091 - DNA, 2146 bp, Homo sapiens
ggcgctatctcgcagcccccgaccagctcggcctgctgtcgggcatctctgctgtcctccggctgtagggctacctgcctccctcccggggggtgcactgcgagtccgactctagtgggggcagcgcctagcggactcccaaacccgctcaggtcctgccggcctcaccggcaccgcccaccctccagccggccgcggctctgcgcttgcgcgccggcagcacacagtgttaggggcgcgccctctgctctggacatgcgcgccgtcgcgagcgtctctgggaccggaagtgcgggcgagcgcgggtccccgggtctgacaggagcagcctgtgggcaccgcggcggtagttggaggcgggagagggtccgtagccgcgccgccctgccccgccatgggcctcctgtcggacccggttcgccggcgcgcgctcgcccgcctagtgctgcgcctcaacgcgccgttgtgcgtgctgagctacgtggcgggcatcgcctggttcttggcgctggttttcccgccgctgacccagcgcacttacatgtcggagaacgccatgggctccaccatggtggaggagcagtttgcgggcggagaccgtgcccgggcttttgcccgggacttcgccgcccaccgcaagaagtcgggggctctgccagtggcctggcttgaacggacgatgcggtcagtagggctggaggtctacacgcagagtttctcccggaaactgcccttcccagatgagacccacgagcgctatatggtgtcgggcaccaacgtgtacggcatcctgcgggccccgcgtgctgccagcaccgagtcgcttgtgctcaccgtgccctgtggctctgactctaccaacagccaggctgtggggctgctgctggcactggctgcccacttccgggggcagatttattgggccaaagatatcgtcttcctggtaacatcttccagaccttctgccagaaagggggcctgttgtgcacgcttcagggcaagctgcagcccgaggactggacatcattggatggaccgctgcagggcctgcagacactgctgctcatggttctgcggcaggcctccggccgcccccacggctcccatggcctcttcctgcgctaccgtgtggaggccctaaccctgcgtggcatcaatagcttccgccagtacaagtatgacctggtggcagtgggcaaggctttggagggcatgttccgcaagctcaaccacctcctggagcgcctgcaccagtccttcttcctctacttgctccccggcctctcccgcttcgtctccatcggcctctacatgcccgctgtcggcttcttgctcctggtccttggtctcaaggctctggaactgtggatgcagctgcatgaggctggaatgggccttgaggagcccgggggtgcccctggccccagtgtaccccttcccccatcacagggtgtggggctggcctcgctcgtggcacctctgctgatctcacaggccatgggactggccctctatgtcctgccagtgctgggccaacacgttgccacccagcacttcccagtggcagaggctgaggctgtggtgctgacactgctggcgatttatgcagctggcctggccctgccccacaatacccaccgggtggtaagcacacaggccccagacaggggctggatggcactgaagctggtagccctgatctacctagcactgcagctgggctgcatcgccctcaccaacttctcactgggcttcctgctggccaccaccatggtgcccactgctgcgcttgccaagcctcatgggccccggaccctctatgctgccctgctggtgctgaccagcccggcagccacgctccttggcagcctgttcctgtggcgggagctgcaggaggcgccactgtcactggccgagggctggcagctcttcctggcagcgctagcccagggtgtgctggagcaccacacctacggcgccctgctcttcccactgctgtccctgggcctctacccctgctggctgcttttctggaatgtgctcttctggaagtgagatctgcctgtccgggctgggacagagactccccaaggaccccattctgcctccttctggggaaataaatgagtgtctgtttcagcagcta

SEQ ID NO: 635092 - DNA, 382 bp, Homo sapiens
  misc_feature (21)..(21): n is a, c, g, or t
  misc_feature (23)..(23): n is a, c, g, or t
  misc_feature (55)..(55): n is a, c, g, or t
  misc_feature (112)..(112): n is a, c, g, or t
  misc_feature (162)..(162): n is a, c, g, or t
  misc_feature (252)..(252): n is a, c, g, or t
  misc_feature (347)..(347): n is a, c, g, or t
  misc_feature (363)..(363): n is a, c, g, or t
  misc_feature (378)..(378): n is a, c, g, or t
tcggcacgagggagacggagntnactctagtcatccaggctggagtgcagcagtncgatcttggctcactgcaacatccgcctcccaggttcaagcgattctcctgcctcantctcccaagtagctgagattacaggcgcccaccagcacgcctggctaatntttgtatttttaatagagaaggagtttcaccatgttggccaggctggtcttgaactcctgacctcaagtgatccaccggcctcggcttcnaaaatggttgacattacaggcataagccaccatgcccagccttttgtccctgtatttaatcagcccgtgaggtaaaacattacctcagtttaagnttaaagaagtaggggntaggtaggttaaggntttc

SEQ ID NO: 635093 - DNA, 1224 bp, Homo sapiens
  misc_feature (1124)..(1124): n is a, c, g, or t
  misc_feature (1140)..(1140): n is a, c, g, or t
  misc_feature (1160)..(1160): n is a, c, g, or t
  misc_feature (1181)..(1181): n is a, c, g, or t
ggcgctatctcgcagcccccgaccagctcggcctgctgtcgggcatctctgctgtcctccggctgtagggctacctgcctccctcccggggggtgcactgcgagtccgactctagtgggggcagcgcctagcggactcccaaacccgctcaggtcctgccggcctcaccggcaccgcccaccctccagccggccgcggctctgcgcttgcgcgccggcagcacacagtgttaggggcgcgccctctgctctggacatgcgcgccgtcgcgagcgtctctgggaccggaagtgcgggcgagcgcgggtccccgggtctgacaggagcagcctgtgggcaccgcggcggtagttggaggcgggagagggtccgtagccgcgccgccctgccccgccatgggcctcctgtcggacccggttcgccggcgcgcgctcgcccgcctagtgctgcgcctcaacgcgccgttgtgcgtgctgagctacgtggcgggcatcgcctggttcttggcgctggttttcccgccgctgacccagcgcacttacatgtcggagaacgccatgggctccaccatggtggaggagcagtttgcgggcggagaccgtgcccgggcttttgcccgggacttcgccgcccaccgcaagaagtcgggggctctgccagtggcctggcttgaacggacgatgcggtcagtagggctggaggtctacacgcagagtttctcccggaaactgcccttcccagatgagacccacgagcgctatatggtgtcgggcaccaacgtgtacggcatcctgcgggccccgcgtgctgccagcaccgagtcgcttgtgctcaccgtgccctgtggctctgactctaccaacagccaggctgtggggctgctgctggcactggctgcccacttccgggggcagatttattgggccaaagatatcgtcttcctggtaacagaacatgaccttctgggcactgaggcttggcttgaagcctaccacgatgtcaatgtcactggcatgcagtcgtctcccctgcagggccgagctggggccattcaggcagccgtggccctggagctgagcagtgatgtggtccaccagctcggccctgcggcccagagcttatttnccttttagttgagggnttaatttttagctttggganttggccttctttttttaaaangttcgtgacttggggaaaacccgggggttttacccacttttaa

SEQ ID NO: 635094 - DNA, 636 bp, Homo sapiens
  misc_feature (624)..(624): n is a, c, g, or t
ctcgaaagatgagcacaatttcatcatgcacagaagggaagtgtaaagacaggaaacagcatgtgaaaggcattctattctatttaaatctaggaatactggctttaggatgttcttggctgattaaatcagatgcatcatcatattatactatcatgatttacccatactgggtattgcctagaatttatccatggactcttcattggcatcattagtgatgagagcttgaagcttgagcacaccctggcataaagatgtttgtaacacaagacatagattggactcttggttctctgtgtcaggtttgggttcacctctaaattgagatataccacgtattaaactgggtgagttgctacacatggaaaggttaaaaaattaatggccatctataccaaactcacattaaaccatatgaggcttccactatatggcacacgaagaatatggcatatcacctaaatctcaagctatgctatatagaaaatgtctattcctatgagcacatgagtctgactaccttctcttaaaagtaatatatataacatctctgtgaattaatttttctctaacaataattatcttaaaggtgaccgaaatgcctgtggtttatcatggganataggagttttt

SEQ ID NO: 635095 - DNA, 1567 bp, Homo sapiens
  misc_feature (726)..(726): n is a, c, g, or t
ggcgctatctcgcagcccccgaccagctcggcctgctgtcgggcatctctgctgtcctccggctgtagggctacctgcctccctcccggggggtgcactgcgagtccgactctagtgggggcagcgcctagcggactcccaaacccgctcaggtcctgccggcctcaccggcaccgcccaccctccagccggccgcggctctgcgcttgcgcgccggcagcacacagtgttaggggcgcgccctctgctctggacatgcgcgccgtcgcgagcgtctctgggaccggaagtgcgggcgagcgcgggtccccgggtctgacaggagcagcctgtgggcaccgcggcggtagttggaggcgggagagggtccgtagccgcgccgccctgccccgccatgggcctcctgtcggacccggttcgccggcgcgcgctcgcccgcctagtgctgcgcctcaacgcgccgttgtgcgtgctgagctacgtggcgggcatcgcctggttcttggcgctggttttcccgccgctgacccagcgcacttacatgtcggagaacgccatgggctccaccatggtggaggagcagtttgcgggcggagaccgtgcccgggcttttgcccgggacttcgccgcccaccgcaagaagtcgggctggccaccaccatggtgcccactgctgcgcttgccaagcctcatgggccccggaccctttatgctgccccccttttnggtcttggggggctgaaccaagcccggcagccacgctccttggcagcctgttcctgtggcgggagctgcaggaggcgccactgtcactggccgagggctggcagctcttcctggcagcgctagcccagggtgtgctggagcaccacacctacggcgccctgctcttcccactgctgtccctgggcctctacccctgctggctgcttttctggaatgtgctcttctggaagtgagatctgcctgtccgggctgggacagagactccccaaggaccccattctgcctccttctggggaaataaatgagtgtctgtttcagcagctaaaaaaaaaaaaaaaaaaaaaaagaaaaaaaaaaaaaaaaaaaaaaaaaaaaagagggggggacacacaagaaacccacaagggggccccaaataagaaaaccacaatatatggaaaaggggcccaaaaggagccaaaaacaggagccaggaccacgaattaacaaaaatgtgaatggaaaaaaccgagtagcaatcgcaacacttgaaaagagcaccaataacctcgcagggggacaaatattgcgacaaaaccactaagagatataaaacacctagggacaacattacaattaacaggtgctaacgggtgagaaacacaacaggaatctatagagcgggcgagagaaaatattcagcaagagggtatagtttgagaatttcagggggggatagtaatatagagaagaagaacaacataggagaaaagaagaatgagacaaacagagaacacaagataaatcaagaaaataaaagaagagagaagagaagaaaaagaggagtaaataaaaaaaaagc

SEQ ID NO: 635096 - DNA, 538 bp, Homo sapiens
tgcctcagcctccggagtagctgggattataggcatgcaccaccacacccggctaattttgtatttttagtagagatggggtttctccatgttggtcagactgctctggaactcctgacttcaggtgatccgcccgcctcggcctcccaaggtgctggggttacaggcatgagccaccgcgcccagcccacagtaaaatatttagttcctcttctcccatgcagcacctacaacaatactgggcacatagtctttaataaataacacttcactgatttagtgaccttttcttctccattgtggctccatcaccaattactaactgatagaactaaaggcaatagaaacaccactgctttgcatatctaaagtttcatgtgtaacttaatgtcacgaatgctgatctttcttatttggccctcttttcctgtatgttgcaactaataaaacaggtttctaataagaattaaattaaaagccaaagtttccaataaggtagtgagcattactggagaaagagagaaggccctgaaagtga

SEQ ID NO: 635097 - DNA, 445 bp, Homo sapiens
gggagagagagagtactagtctcgacttgttttttttttttaaatgttaaacactgacttctttaatgtaactctttccagattatttcaacaagcaaagtaagtgtcagcgttttactataattgccaaatggtattaggaatataacctttcctcccttgcttacaacaaaaacaatacaaaaattaagttatggtaagatatttatcaaaggggattttaaacaaaattctcgctcttgtcaccaaggctggatgtgcaggggcgcaatctcagctcattgggaacctccacctccggagttcaagcgattctcctgcctaagcctcctgagtagctggggatatacagggtcccaccaccatgcctgtaatcccagcaaattgggagatattcaactagagacagggtttcgcctgggtgacagagcgagacaccatctca

SEQ ID NO: 635098 - DNA, 568 bp, Homo sapiens
  misc_feature (433)..(433): n is a, c, g, or t
  misc_feature (470)..(470): n is a, c, g, or t
tagatcgagctcggtaccggccccctggggaatgggtggcaggaggcagtcccatggtctcggacggcactcttggagtcactgtgaccttttctgaaggataacacagtgggccctcagctgagcagctctatcagccagtttcctgtctaaacaatcccactaatctgatagccttctttcacttcatcctgtccaagctggcagtgtttgtgttgagacggttgactggctctatcacatacctaatgtcttcacaaaagtgtagccacactcttagccctgtctccagaacatgttattcagacaggctgagaattttctaaattctcagatgctagttccttttctcttagcaggtccttactcgattgctcatttgtgtcacattattaagcagcaaaaagaaatcaggctacaccttccacaattngcttggaaatttcctcaatgaaatatccaagttcatngcttacatattctattttccttccaacaatagaacataattcagccacaatctgtcactttcttttttcttttttttttttttaagcaattccacagg

SEQ ID NO: 635099 - DNA, 253 bp, Homo sapiens
gcggcggcgagcgctctacgatgatcgacaagaactgcggaggcggagagaagagcggcgcgggcagtgacgttgctgctgttgggtgctggggagtcacggaagagcaccatcgtcaagcagatatagatcatccacgagaatagctactccgagaaggaatgccggcagtaccgagccggatagtctacatgcaacaccatccagtccatcatggaccattgtcaaagccatggggaacctgcagaatcga

SEQ ID NO: 635100 - DNA, 595 bp, Homo sapiens
  misc_feature (539)..(539): n is a, c, g, or t
  misc_feature (541)..(542): n is a, c, g, or t
  misc_feature (544)..(544): n is a, c, g, or t
agaacgaccactgaggggttgcttgctctgatggaaacgttattcctaggcttcatttctgaatatggatgtcccactgccagctttgggaagccttcaccatctctgcctatacagatggacacactccctgcctgtgctgctgctagactgtgcttacacttccatcacagaatttatttgattgggttatcatggcttctctgctggaatggaagctacttgggagcctggggaaatgcttggctcaaagcagcctaagattggacttttgagatgtcttttcagacttctgcacttctgatggttggatgactccactgagacccaagacttaagactcacctggtcctatagcccccacccagaagtggactcagcacataagaaccattttctacatctctatgattgcacccctgaccaatcagcagcacccattccctagcccccagcccacctaactatcttgaaaaaactctagcctccaaattttcagggaatctgatttgagtaataaaatcaacccatctgttatnannantctggccatttagctggttctatgtatattaacctgtttctctattgcaaa

SEQ ID NO: 635101 - DNA, 561 bp, Homo sapiens
  misc_feature (505)..(505): n is a, c, g, or t
  misc_feature (507)..(508): n is a, c, g, or t
  misc_feature (510)..(510): n is a, c, g, or t
agaacgaccactgaggggttgcttgctctgatggaaacgttattcctaggcttcatttctgaatatggatgtcccactgccagctttgggaagccttcaccatctctgcctatacagatggacacactccctgcctgtgctgctgctagactgtgcttacacttccatcacagaatttatttgattgggttatcatggcttctctgctggaatggaagctacttgggagcctggggaaatgcttggctcaaagcacttctgcacttctgatggttggatgactccactgagacccaagacttaagactcacctggtcctatagcccccacccagaagtggactcagcacataagaaccattttctacatctctatgattgcacccctgaccaatcagcagcacccattccctagcccccagcccacctaactatcttgaaaaaactctagcctccaaattttcagggaatctgatttgagtaataaaatcaacccatctgttatnannantctggccatttagctggttctatgtatattaacctgtttctctattgcaaa

SEQ ID NO: 635102 - DNA, 258 bp, Homo sapiens
agaaggatctcaaactcgaaccaccagaagaagaaattattgaagggaatactaaatctcacatcatgcttgtagcagcggcagatagtctgtgatagacagaggacctggcaagaattccatgctcgctcctgcaacactacgtggagcagtgcttcctcccaacagtgtgatgcttgcagtatttactatacagacagctttcaaattgaatctcgtctacatgatctatgatgttctcgggagcaatacgtagtg

SEQ ID NO: 635103 - DNA, 419 bp, Homo sapiens
gcatattattgcaagtgcttcaagcaaagaaaagaacctgatttcacatttgagatgcattttaaaccaaaggtctgttctggtacctccacaaggaagcatcaatcggaccacagaaaatttacatccagggatttgtcttctggaatggatctcactgacctacaagaattgaatttgcccgtgtcttcacaacaccttgttagtggtatcaaatcaggagattgaagtgagccatagtgagagtatggacaccacagaaatcaacttacatatcaaggctttttctttatttcaggagagccagttcaatagtacaacacttttatgatcttccctcttttgctcacacctccctgccattcctgttcccagtccatacttgaataaaaatgttgcaaataacatcagttcagaaa

SEQ ID NO: 635104 - DNA, 403 bp, Homo sapiens
gtaatccctgctggcttttaactttttagtaataactattctgactggcgtgagatggtgtctcactgtggtttagatttgcaattctctgacggttagtgatgttgaggattttttcatttgttggtcacttgtatgtcttcttttgagaagtatctgtccatgtcctttactcactttctagtggggttatttgtttttgtttgttgatttaagttagttatagattctggacattaggcctctattagaagcatagtgaatattttctccattctgtgggttgttgatagtttctgttgctgtgcagaagttctttagttatttggtcccactgtcaatttttgtttttgtagcaattgcttttgaggacttagccataaattctttgccaaggccaata

SEQ ID NO: 635105 - DNA, 210 bp, Homo sapiens
ggtctatttccactccctcccaaaactccacttaaatgaaaaaattttaaaaagatgtatttggaagaggaggataacattagagatgtcagcaaatttttggaagatggacaagtaggatggggggagtagcagcaaacgcaacaaagcagagcaacctgtaccctaaaaggcttgcagatgggggtactaaacagaagcgagtgtttg

SEQ ID NO: 635106 - DNA, 245 bp, Homo sapiens
  misc_feature (2)..(2): n is a, c, g, or t
angttgtgcagtaatcatattatggccaagggtcatgatggcaggagtaatcagaggtgttcttgtgtagtgatatgggtggacaggttagaggagtcgcttattaggtacggtagatggtaaaccgctggctagggtgagttcatatgagatcgtgggggctactgctcgcagagcgccgatcagggggtagtttgagtttgatgctcaccctgatcagaggattgagtaaacggctaggctag

SEQ ID NO: 635107 - DNA, 370 bp, Homo sapiens
  misc_feature (14)..(14): n is a, c, g, or t
  misc_feature (31)..(31): n is a, c, g, or t
  misc_feature (49)..(49): n is a, c, g, or t
  misc_feature (144)..(144): n is a, c, g, or t
tagctgaacaaaanggcagtaaaaacttctngcaggttaaacgtccccncgttgacagctctgaagagagcagtggttctcccaggcatggtgtttgagctctgagaatggacagactgcctctcaagtgggtccctgaccccnctgagccaaactgggagacaccttcccagtaggggccaacagacaccctcatacaggcgggtgcccctctgggacgaagcttccagaggaaggataagcctgcaatatttgctcttctgcaatatttgctgttatgcagcctctgatggtgatacccaggcaaacagtgtctggagtggacctccagcaaacttcaacagacctgcagctgagggacctgactgtt

SEQ ID NO: 635108 - DNA, 767 bp, Homo sapiens
ccgctgctatgtagccccattcttgactagtgacttcatctttcccgcagtcattcatctctattcaggtgaatatcagctccgcagacacagcagttatacagcggagtcccccacagtcaccctgatggccgtacttagtgattctgggtctacccatcccctgttgcacctttgtgcacagtccaattcatgtgggaaaatgttctgtttgtagaactcctagtattcacttatagtgctcatgtcacggaatggccagtgacgtaagagcccccgagtaatctgcttttgttagcacgttatgccaagataagtgaaacaacatggccaccttcttttctagttctaatcacgtttttagacatccagatttatgttactttgcactgacgatttgtttcctattatttgagatatgtggctatacgcttggattaggaaaacctgcttgaatgtattgtcagttattaaagcacatgtgactaagtttgcatttgtcagtacttgttctactgtttgtactgagaagtctcattttaaaattgccgtacttaacagctgtgactataccttgtaattttttagattctccacttgtgattctttaaatgtttccagatgcctttagttttagctggctgtaaaatagctactttgcgttatttgatatagaattgttttttaaaactccctttatttatacagagacatttataatattttaccaacatttttatattctggataaatatttctaattccca

SEQ ID NO: 635109 - DNA, 500 bp, Homo sapiens
  misc_feature (33)..(33): n is a, c, g, or t
  misc_feature (59)..(59): n is a, c, g, or t
  misc_feature (76)..(76): n is a, c, g, or t
  misc_feature (105)..(105): n is a, c, g, or t
  misc_feature (136)..(136): n is a, c, g, or t
  misc_feature (153)..(153): n is a, c, g, or t
  misc_feature (177)..(177): n is a, c, g, or t
  misc_feature (277)..(277): n is a, c, g, or t
  misc_feature (334)..(334): n is a, c, g, or t
  misc_feature (479)..(479): n is a, c, g, or t
  misc_feature (482)..(482): n is a, c, g, or t
caaaaaaaaaattaaattgaaatttggtttacncttttttgggccaagtttttttgtgnctcctttaacacattanccctgtgactccttaaggtaacatatttnacccactaagccccttaaatttaacacaagntgaaatatgctgacttntgagtcaaaaaacttcacaaaaanctccgaactcacagaaacaagtcagggcaccctcccataggggaaaaacgtaatgtggccacgaattgggtgcacgcctgtaatcccagcactttgaganccgaggcaggcagatcacttgaggtcaggagtttgagaccagcctggccaacacagnaaaaccccgtttctactaaaaacacaaaaattggccaggcgtggtgcacctgcctatagtcccagctacttgggaggctgaggcacgagaatctcttgaacccaggaggcagaggttgcagtcagccaagatcatccactgcacntcnccctgggtgatagagcaa

SEQ ID NO: 635110 - DNA, 865 bp, Homo sapiens
gaccaattctttgctttatagccaaagaagaaggaataaatctaagaggaggaactggtcaaaaccatactcccacttgtcttcttgtatgacatcacagcctttcttacattgcatgtaatcacctgtccactgtcaggctcctggactatgagcgctttgagggcagagaccacattttttttttttccgtgggattggagttctcacttcctgtcgcccgggcgtggagttgcacggggcgcagctttgggctcactgcgttctccgccttcccgggtttcaggcagctctctccgtgccttagcctcccgagtggggctgtgggatctacaggtgcccgccaccatgcccgtgtcatccccgtgccgtggcatgagtgtcctgaaaatgtctataggcatttaacacaacggtacattggaataaacaacttgacattctggtatatatgtcaataaaactgaattaaatggactatggatgcaacattttaactcccaacacagtgctggcattcgattttctttcttaacttcttaaggttgaccatcgaaccttacagcatccaggacgacctaaacggcaacatcggcacttttgggctgacccagaaatccatttctgggtacttaggcggacttttttacaacataatacttcattcaagcgagctctcagggggtggcacgctttggggcaccgcccatactctgttggataactttcataccggcctatttcacgtcgcacaccgcgcaagagacgattatctcatctgccggcgctacacgtatagacgccaggcgatggaccggtttgatgaccaaacgtcttccctagctaaataatatcgtcagtattc

SEQ ID NO: 635111 - DNA, 917 bp, Homo sapiens
gcgtctttaaggccctgcgatggaagtccctggacgcaccgtctgtgctgcctaggctagacacatcgggcgatctgggaagtccaactacttccttatgatcatccaactattggatgatccatccgaagagtgtgccattgtgcggagcgagacaatgtgggctccaagcagatgcacgcagatccgcaatgttcccttcgtctggtgcgcacaagtgcatgctgggtgctgatgcgtgcaagcaacaccatgatgcgcaaggccatccgagcgcacctgcaaaacatcccagctctggagcacaactgctgcctcatatccgggtgggaatgtgggctttagtgttcaccaacggaggacctcactgacgcatcacgggacactgttgctcggccaataaggtgccaaggctgctgccctgaggcttggttgcgcgagttgcccccattgtccaagtcatcttgcagccaaggctccatgcaacactggatctacgtgggcccgacgaacgacctccttttggccaaggctcacagtgtgatcaccatctaacaatctccagaggggcacccatttgaaattcctgacgtgattgtgcatgcttgatccaacgaccttggacgacaacacgttgggagcccaagcgaacgccacgcctggccttgaacatgctccaacatctaccccccctctctcccttttgcggctttgttcatccagcaacgtgttacgaacacatgggcaaggcaatcctatcaaccctgaagcgttgctttgcatcatccaccagacggaaaaactcctgcatttctcgcccttccctggaggcggtgtcccgcacatgcagccagatgtctgtcttgccagcattgggctacccacactgttcgcattcagtaacccattctattact

SEQ ID NO: 635112 - DNA, 741 bp, Homo sapiens
  misc_feature (25)..(25): n is a, c, g, or t
  misc_feature (64)..(64): n is a, c, g, or t
  misc_feature (70)..(70): n is a, c, g, or t
  misc_feature (107)..(107): n is a, c, g, or t
  misc_feature (111)..(111): n is a, c, g, or t
  misc_feature (115)..(115): n is a, c, g, or t
  misc_feature (125)..(125): n is a, c, g, or t
  misc_feature (128)..(128): n is a, c, g, or t
  misc_feature (134)..(134): n is a, c, g, or t
  misc_feature (142)..(142): n is a, c, g, or t
  misc_feature (144)..(144): n is a, c, g, or t
  misc_feature (146)..(146): n is a, c, g, or t
  misc_feature (148)..(149): n is a, c, g, or t
  misc_feature (151)..(151): n is a, c, g, or t
  misc_feature (154)..(154): n is a, c, g, or t
  misc_feature (158)..(158): n is a, c, g, or t
  misc_feature (162)..(162): n is a, c, g, or t
  misc_feature (173)..(173): n is a, c, g, or t
  misc_feature (176)..(176): n is a, c, g, or t
  misc_feature (186)..(186): n is a, c, g, or t
  misc_feature (213)..(213): n is a, c, g, or t
  misc_feature (220)..(220): n is a, c, g, or t
  misc_feature (228)..(228): n is a, c, g, or t
  misc_feature (236)..(236): n is a, c, g, or t
  misc_feature (242)..(242): n is a, c, g, or t
  misc_feature (245)..(245): n is a, c, g, or t
  misc_feature (261)..(261): n is a, c, g, or t
  misc_feature (273)..(273): n is a, c, g, or t
  misc_feature (278)..(278): n is a, c, g, or t
  misc_feature (296)..(296): n is a, c, g, or t
  misc_feature (312)..(312): n is a, c, g, or t
  misc_feature (318)..(318): n is a, c, g, or t
  misc_feature (320)..(320): n is a, c, g, or t
  misc_feature (324)..(325): n is a, c, g, or t
  misc_feature (333)..(333): n is a, c, g, or t
  misc_feature (358)..(358): n is a, c, g, or t
  misc_feature (360)..(360): n is a, c, g, or t
  misc_feature (367)..(367): n is a, c, g, or t
  misc_feature (400)..(401): n is a, c, g, or t
  misc_feature (413)..(413): n is a, c, g, or t
  misc_feature (415)..(415): n is a, c, g, or t
  misc_feature (439)..(439): n is a, c, g, or t
  misc_feature (442)..(442): n is a, c, g, or t
  misc_feature (445)..(445): n is a, c, g, or t
  misc_feature (464)..(464): n is a, c, g, or t
  misc_feature (466)..(466): n is a, c, g, or t
  misc_feature (480)..(480): n is a, c, g, or t
  misc_feature (483)..(483): n is a, c, g, or t
  misc_feature (485)..(485): n is a, c, g, or t
  misc_feature (489)..(489): n is a, c, g, or t
  misc_feature (531)..(531): n is a, c, g, or t
  misc_feature (537)..(537): n is a, c, g, or t
  misc_feature (553)..(553): n is a, c, g, or t
  misc_feature (579)..(579): n is a, c, g, or t
  misc_feature (589)..(589): n is a, c, g, or t
  misc_feature (717)..(717): n is a, c, g, or t
gggatcggacgccgaggcaggtttnggagtggggagtgcccattttctctacttccaaagttcntggccnccaaacgccatttgcaggcgggtgggttgggtgaggntggncggncggaggggantcncgtaangggagagngnananngngcnccgngaangaatgaggagnggngttaggtaancatgtttgagtgtggaaacagtgagcntggactntatggganagaggggngggganggnggaaggagggtgggtntggtggcccccngaatntctttgggcctggtggtngggagagggagtagantggagnangggnnagagaganaagggatgggagggaagagaaaagnanttccgtnatgcagaaaacccccatcatcctctcaaaaggnngaggagaggggngnaaagagggaggaggtggaagaggnggnggnggggggggtgggggagggncngtggagaaggccanggntntcangaagggaggggagggggggaaggggggtgtggcgtgagaggngcgtcngggcctgagggcgagncccaacaccccctgcagcccctgcgncacacaaggngggagaaggaggggcagagacccacacagcctgtgtaccagatccagaaccggggcatgggcactgccgcaccagcagccatggaccctgtcgtgggtcaggccaaactactgcccccagagcgcatnaagcacagcatcaagttggtggat

SEQ ID NO: 635113 - DNA, 376 bp, Homo sapiens
tctatgccttggtataatacaaaggaaggattcggagagtggaggaatgtggaatatcggagtgaactaggcacgtatgactctatcaccaactccttctctatgtccctaagagtaccctgtactaaagcagtgaagaaaacactgatgtcaaagtgagtagtggacaatgatgggaattcttcatatgtaagggataaaagtgggcgtgaagaccttggcatggattagttgaggaagacttgagcaatttttaacacagattttgaggcttgcctttctttggcccattcttttttcctttttctccaatattccagtctctttcaacatgaccctttatattctaaagtgtgtaaccaataaagaacatagc

SEQ ID NO: 635114 - DNA, 139 bp, Homo sapiens
aggagctgctgccacagctgctgctgcacgacgagcgctgcctgtgttactgcagcttccacttcatattacgggcgggatcggagggggtgcgtcgcgctacagccccagtccccactgttggagagggctacggtta

SEQ ID NO: 635115 - DNA, 396 bp, Homo sapiens
  misc_feature (116)..(116): n is a, c, g, or t
  misc_feature (122)..(122): n is a, c, g, or t
  misc_feature (127)..(127): n is a, c, g, or t
  misc_feature (140)..(140): n is a, c, g, or t
  misc_feature (155)..(155): n is a, c, g, or t
  misc_feature (297)..(297): n is a, c, g, or t
agggtcctgcttttttcctgctgttttgggaccaggcttttgctcctcctcagccagcggcaaaagcagggttgatgttcagggaccccccaaccctcaaaccttgcctccaaggntgggcnttaantgggtgccccgtngccctcccaggccantaggttttgatttttccagcacccatggatgtgccaaaggcctttgggttggtttgcatgtcatttgcaaatcgtttgcatgccctcatcccccccattttcagggcagtatgggaagccccaaggtgacctggccaagtancaataatttgggtccagggtcccctattgcccccaaaggccttttaaccccaggttggggccccagcacaaaggcaataaaggcagtggtcccttccca

SEQ ID NO: 635116 - DNA, 121 bp, Homo sapiens
ccacccattttcttgggaaaaagcttgagtgtaaacccatttgtaaaaggctttcccatactcattttaatatgggcctgttgctgttaacttttgatgaataaaaccctttcttttctta

SEQ ID NO: 635117 - DNA, 307 bp, Homo sapiens
gaaatatatctggggtaaaacattttgattttattcccttgttatgccatgagtcagattagaaagtaagtcacaatatacagggttaaataaaacccatctgctgagaatttatggtttgtagggcatgactccccataccccttagaaaggaatttgggcaagatgcacaactcagagcttcagtcctcaggtgaataggtggagcattcatacattgttggaaaagagtgcatgcagcatcgttactgtaggctacgtagaagttacagtagttataggttaagtggcacgtggtcgcagattc

SEQ ID NO: 635118 - DNA, 568 bp, Homo sapiens
ggccgggcgcggtggctcacgcctgtaatcccagctctcagggaggctaagaggcgggaggatagcttgagcccaggagttcgagacctgcctgggcaatatagcgagaccccgttctcccgaaaaaaaaaaaaaaaaaaaaaaaaaaaaacaattgtgtgggcgcgcgcgcctggggccccgagaaaaagttttaaaaaccaatccgggggggcgcgcgcggggcgcccaaggggaaagggaaccagggcgcgcaatagcgcgggttcccaatagggaaactccggggaccagagagaaaaggcggcggggagattccctcccaatatataaaaaagcgcgccgggggggggaaacccgagaggcgtttctgggaaacaatcccaaagagggggggtcccggagaggagccaataaggggagatctatacacacaaggggagaggccccaaaggaggaaggcccagattatacaaatttaaccgccccgctgcgggggggatcaagaaagaagaagaacaaagaaaaaccaaacaacacacaaaagacaaaaacgaaaaaaaaaggc

SEQ ID NO: 635119 - DNA, 1162 bp, Homo sapiens
ggcgggacaaaagcacgccccggcggtccccaccacaagagatttggagaggaaaagggtgcgtccccccgcccgcgcagcacgaagtgtggtcccgtggaggggaacgacggaactttgaaaagataagtgccgccccggacaccaagggggagggaattggaagaagtgtaaagaagggaaaaggaattttttgcaaaatggccaagcgcggggttttccaagtttaaaaaattcggaatgggggcaaaaaggttctcggaaaccgtgtgaattatgtagaacccgtgacccccttggcctggggagttttccatgggggaatggtccattcgagccaactttgaaaccacaggaaccggggagaggaggaaattttttccccgtttttgggagtctttaagtggaccagcccacaaaggggtttccgctttttttgccttgggaacacttcggtgattgtaaacacgccttcggagagagagggcgcccacaaggtgaacaaaaagtgttgtggccacaaaaagttggaggagaaaagaatctttttttggtggggcaccacaaaagggagatttccccttcaatcttgggtggaacctcacatgaaatgcgcccgcaccacacatcccgcggataccccgggagtctcccctctaatcaacaagggtggaaatgagatacccacttcaagagttagaattataagaggagctgggccaaagagttacctcgagtgtttcacttcaaagttttcgagacacctcggtaaacctcgtggtaataggtgagaactcggaggggtggttaacacctatggaaagagaattggtgtgaatcacccacaacaagaagaagagaggcacaccctggagttctttttagaacgctgggttcacacggtgagaaagaatgccacaatggcaaacaagcttttgccacactctgaacctttccaacactttttgttaattggcaagggcacacacaaacactggagtttttcttccccgagggaaaagggtatccgcctcaccacttgctgaaagaagaagagacacaaaagaactggcggccacaaacaagagagcagtgggtgaaatgggtccctgggtgacatgtcagatctttgtacgtaattaaaaatattgtggcaggatta

SEQ ID NO: 635120 - DNA, 280 bp, Homo sapiens
cgctcccgattcctaattacggagctgtagccgccagcctatgccagaaccacagcaatgcgggatccaagttgcatctgcaatctacaccacagctcacggcaacaccagatccttaacccacggagcaaggccaggatcaaaccctcaacctcatggttcctagtcggattcgttaaccactgagccacaacgggaactcctaaaagagtcttgatgcttttctctgtgtatcttttgtgcgtgtgtgtgtgcgtcttttttgttgagctttgacttt

SEQ ID NO: 635121 - DNA, 505 bp, Homo sapiens
aaaatagattcttgcatgaaaccatattcatcacactctttaatcatgcctaaaaatccatagacctgcttgcgattaactcatcccggaacgcagacatcacacaattcaacactcaggcattgtttcctagttttcttacacctttccatcatctcggtcagcagagcctcgcgcgggcatggtaggagatgcactggaagatccagtccactggcaggcgggtacaaggggaggtaagatgggagctccactccttggaccaccagctggttctggaccgtatccccatgaatctgtttgaacgtaaggaggaagtcaaagaagttcttatttacgggtttccttcgagatgtggggccacttccattcccacccggcacaggtcggcacgggcatacaccgacactcgtgggtctccgatccctctgatcatgcatgtcaactggggcaggcactctgaaactcccgttttggagaggaatttgttacatttcaggatgga

SEQ ID NO: 635122 - DNA, 979 bp, Homo sapiens
  misc_feature (1)..(1): n is a, c, g, or t
  misc_feature (132)..(132): n is a, c, g, or t
  misc_feature (136)..(136): n is a, c, g, or t
  misc_feature (168)..(168): n is a, c, g, or t
  misc_feature (170)..(170): n is a, c, g, or t
  misc_feature (179)..(179): n is a, c, g, or t
  misc_feature (200)..(203): n is a, c, g, or t
  misc_feature (216)..(216): n is a, c, g, or t
  misc_feature (224)..(224): n is a, c, g, or t
  misc_feature (236)..(236): n is a, c, g, or t
  misc_feature (255)..(255): n is a, c, g, or t
  misc_feature (258)..(258): n is a, c, g, or t
  misc_feature (267)..(267): n is a, c, g, or t
  misc_feature (320)..(320): n is a, c, g, or t
  misc_feature (323)..(323): n is a, c, g, or t
  misc_feature (327)..(327): n is a, c, g, or t
  misc_feature (334)..(334): n is a, c, g, or t
  misc_feature (399)..(399): n is a, c, g, or t
  misc_feature (441)..(441): n is a, c, g, or t
  misc_feature (451)..(451): n is a, c, g, or t
  misc_feature (528)..(528): n is a, c, g, or t
  misc_feature (649)..(649): n is a, c, g, or t
  misc_feature (865)..(865): n is a, c, g, or t
  misc_feature (979)..(979): n is a, c, g, or t
ntttgatagaggggacaatcttgaataaaattacaccactgtacttaagggcaacactacatagtaagcaaaatctgctctgaaccctttcacagaagagacacttcagaaaggaattttacatctcctganagtnttacaacattcatacctctgatgcacttctancntcaacccanctctcattttctaacttcttnnnnagaaatgtgtgtncacaagtngtgtgtgcgtgnacatgtgcctctgtgtgtncanaaaaggctnattttacctacttgataaatgagctgagacgatgttttgggaaaaaaaaaatnggnaaanaaatgtnaccccaacacgatggagaagccaatccaaaaaagcttcatgctagagctagctttctcctcaganacttacatcctaaaaacatccctatgggtgcctaaaaatggnaatccagtgngttcatggccttgagttcactcctgtcctgaatttctcccagtgcaggtccagaagggcgagatgtggcagaaaggngaatgtgggaatgtgtgagtgtcccacagccagctcacagtgcggcttgcactcagaaaggggactcagggacacaaggtctcaggatgcacagttcaccttggcctcatgtacctgggcnggggagagggagaccattcaaaagcctgtgcttggccgggtgtggtggctcacgcctatcatcccagcactttgggaggctgaggcgggcagatcacttgaggtcaggaggtcgagaccagcctgaccaacatggtgaaaccccatctctactaaaaatgcaaaaattagaaaggtgtggtggtatgcacctgtaatcccacctactaaaggaggncgaggcaggagaattgcttgaacctgggagtcggaggttgcagtgagccaagattgcgccactgcactccagcctgggtgacagaatgagactctgtctcaaaaacaaaacaan

SEQ ID NO: 635123 - DNA, 406 bp, Homo sapiens
gtcttccagttccaacaatttaccatgccttgggcccagggcctgcccccccccttgtttattcagtcagccaacagcccctccgcggggcaggcccccagggtgtccggcgatttagggccttagctggcaaggccaaggacccccacccaattttttccatacagccccaggcaatgggcccagcttcctccccaaaggacccggccgacctcagggcctcctgcaggttaggacactggtgccctcccccccatgcctgggggccgagattttccagcaaaaaaatgcaatattttttgtttcctttttttccctttttttttttaaggaatcaatatttccatatgttgagtgtgtgtcccatgctatgaaattaaaatttttaataacatttttttggcca

SEQ ID NO: 635124 - DNA, 751 bp, Homo sapiens
gcaggagtaagccagcaagggcggtcgggtcccgaggtcaggcgagatttctcaggtcccgccggccccctccctggagtccacagcgccgccggtgtccagaggatgggacacggcccggcccgggcatggcctcgtggctgaaggtggatcaggaagtgaatgctcatacggttgattcttgcaggggtagcggatcgacaagtgaggcaggcacagactgggctgggagaattgtttcccaaagaagtcattagaactgtgatagttttctgagaggaaccgaatcttagacatccatgacctaactcagatccactctgacgatgagatcgtcccagtccctgagcccgattcgttcgtcgagccgaatagcgcatgatggactggatgggtcccacttataaggaagcgaaggttgggatgacgtgtgacgagtgccttccagaggaaccgaaggtgtaagtgatgcccaatgggatgctgaatacagcaagccagtcggttggtggacattattgagaaagtgaaagctgagatccggctgtgattgagaaactgtcatacacggtgctcgcatgttgggtacagctcctgtagttcccaggatatgacgatggaaaccacttgggggggtcccttcaggaggacaacagttgcgagctaagaacgtgagagtgagcggctctatctggaccagattccgatttttttccggaccattggttctaagtgtagttcccttggggct

SEQ ID NO: 635125 - DNA, 315 bp, Homo sapiens
  misc_feature (21)..(21): n is a, c, g, or t
  misc_feature (41)..(41): n is a, c, g, or t
  misc_feature (115)..(115): n is a, c, g, or t
  misc_feature (133)..(133): n is a, c, g, or t
  misc_feature (139)..(139): n is a, c, g, or t
  misc_feature (142)..(142): n is a, c, g, or t
  misc_feature (155)..(155): n is a, c, g, or t
  misc_feature (159)..(159): n is a, c, g, or t
agactatgtctgccttgcttncattttgtaaactaaaaatntagcagaatgcctcaggctcaacaaaaaatttttcggttaagtggaaaaaagatcaataaattcaatccccctncatctcgttaatctattnggcatngtncacagaattcatncatnctcggtaccagtgaaagaattacttaaagtttgtatgacaactgttatttcaatttatacagatgattcaggattgagtaaaggttgaattaagacatttggtcaggtgtaatgctcaataaattgagcattcgctgagattagtaaatgctgtta

SEQ ID NO: 635126 - DNA, 195 bp, Homo sapiens
gggggcccccttttttttttcccggggggcccggggggggctttcttccgggagggtcccccccccccccccccccttttggggggtttttttttttcccgggcgggtggtggggggggggggggggttgggccccttgggcttttcccccctttttttttggggccgggttcccttaaatttttttttttctca

SEQ ID NO: 635127 - DNA, 800 bp, Homo sapiens
  misc_feature (279)..(279): n is a, c, g, or t
agcggatgggggaagtgatctgttggctggagcgatggcccggggctggagctcgcggtcggcgtcggcgaagtccgccgccaccaatgtcctaacaatgaacggtcgctccgcggagcgagcccgctgccgacagcccgcgcagcatgggcctggagctcggcgggtcttcgggagtggggctcgtgtcggccgtgtgaggtggaccgaggagttagcccgatgctcgggaggacctcgatatacgtccgtggctgtggtaggcgcttctcggggtgngaggccggcagcccggctcagatacagactcgcgcgagacaatcgcaggtggttacgcgccaaggggcctcgaggaaccatggcagagggcagttgggggtctagtcaagggtcggccggggagcttgggtctttcatctaccagcgtcccagagctcgcgtgtacgtacggcgcgggtgtcttcctgcggagttcgtattccctgcgtgcctcgtccggaggccctcccgcgtgtccagcggctttccataggaacagggatggcgcagcgtaggcagaagcaggggctcgtagtccgaagtgcaacagagaccatacagcaccgcgaagcccccgggccctttaccatgggccagcgaaggggccaatttgtgtacgttcattggacgggacgcccagtggcgagggtaggtctagtgggaactttggattaggtcttagcctcggaggaaggttcccccacttttctcgttgattcgggacggaacccattccttgcccgttggcaaataggggaaca

SEQ ID NO: 635128 - DNA, 296 bp, Homo sapiens
agcgccggatattcactgaagtcccttgggaagacacagcctgccagcatcccctgtcgagacgcgtcatatggatatgagggtgttgtcttccatctcgctgtcaggatctgtcttgcagtcactgtcttgttccacagctccatcctctcgtgctggaggatcacctcctggtacacgagctccgcaggatagggcaggtaaggtcttcagcgatccatgtctagtccgtgatcgggaccttcaaacgtgcggtcccgtgttgccgatccttcttagagtcgacctgtaggaat

SEQ ID NO: 635129 - DNA, 533 bp, Homo sapiens
gagagagagagagagagagagagagagaggagagccctgcgcctgtgctggctagctccttccctgccaccgatgctgcttctgactcatgactctgtcctgcctggtgtggacggctctgtctggagctcatgaccaaggacgagaagagaccttagatgcaccatcatgggggcataggttgtcacctggacaaggcagccgtggatgccaccgtcaccaactgaacctgggggcctgggtcctaacatgtctgatcatgaccccattatgtatggagagcttggaggaggcattgtcactatccaccaggatgcacgacttgacgttgatgatagtcatggcctaacgctggcaatggtgtagtacgagtacccccaagtactcgtactgctacatcgctgaatgtgaagtgactccccaaccactactgccatggtaggcaccataaggacagcgctgaaactgtttgagcagagtaaaaggtgcctcgaggagcatgcctgtacaaaacctggcactcttgtttcctt

SEQ ID NO: 635130 - DNA, 192 bp, Homo sapiens
tagaggatcttcctgcgtacagttgcgcttaccaaaagtgggcacttttggtagcgcattccacgcctggtcatgccagcgagctgggtttcttacccatttaaagttgagaataggtgagatcgttcggcccaagacctctaatcattcgctttactggataaaactgcgtggcgggggtgcgtcgggtcg

SEQ ID NO: 635131 - DNA, 1477 bp, Homo sapiens
ggactttgcgaaggcatggcggggaacctgtgcaatgtcagcccagaaggtgatcagagccgtgtaacttacaaagtggacaagacagacagaaagggaaccgtagaccattcacggttctccctgtggaagactttttcggttttgccattatacgcctgcggaaaaactgcacgtattctggccttaacaaccgccatgtacatgtacaagggtatagggctttgagttaccgtgtcagggccggaattgtgtcagtggaaccccttaaagggctttcctaaatgtgtaacgtaaggcatcgtcccctaaagccggcaacgaattttcccgggtgaaccatttgactctcgtgtacctttagtcttaacagaagccggtaacaacgttattacggggagaaacgcttggcacacagggttccctccgggccacaaatgctcgaattgtgctttttgtggccacttaccattctgtgtgctttacacccaaatatgccgttgcgctttcgacagggacctttgaatgcccccaagtttgggaccgaattggtcgcggcgttttcccaacttcattcgacgaacacgggaacaaaacgcggctgtggagagaacctttaaggccatgtggtaattccccttgtggcggatgttccaaccgcgccaatggacaaagacagaccaactcttctgtgcggaaaacctgcccaagtgggagcgacgccccggagaaatgacctcgccccgcgtgaaaacgcatggcaacacaagcgcggacggaggaattaacggccacgggcgaaaacacccacaacctggtttgcgtccttcggtgtggccaaccacggtaggaaacggttcacacagagacagcgagggggagggaaaaccaccgggcccgagattcccctaagatcgattttcacaccaagcaaaaacaacgggtgtgtgcatgcacgtgacacatgcgtgccgtgtgcaacaaacgacagacggcagtttgttctaccagcacgcctaaactttcttaacaacgttacaggcagtggcggctaggcccctctgtcgtgcgcggcacaccatccggcagctccctctcacccagtgaggtgagcacacgttgtgtcttaatccaccgcgggaatcgtgtttgacaacaggacacccgttttagttcgctgttcccaatgcccgaagtgtcgtataggccagcaccattatgcttgtgggacagaacagccttttatgaaaacatatttgtcgggccacacatattcccgtaagtggcaacgcgggcgccccctagtacagaagctcgttacaacgcgccattggtccgggcgagtacaacatgtgaggcgccccgtacaacaatgattgaggtcccatcgacacttgttaccgacattgcgtcgtgacacacgcgtgttagaacacacaccatataagccttcgacccgctaagccagcacatcttt

SEQ ID NO: 635132 - DNA, 425 bp, Homo sapiens
cccacccctttttttttttaaaaaattttgttttaaaatttttggccccaagggggggggggtccccaaactctttttgggccctaaaaggggggggggggggaaacccccggggggggccccccgggaaaaaaaaaattttttgggccccaaaaaaaaatttttttccgccctttcttggggggggggttttttggttttcgggcaaaaaaaaaaatttgggaaaaaatgttaaaatgggtttaaaaaaaaaaatttcccctttttttcccccggttttttaccccccctgggaaaaaagggaaaaaatttcccttttttttttaagggggattttttctttccctgggaaaatataaggggggggttccggaaaaatatccgggggggggtttccccccccccctttttttgggggccccctt

SEQ ID NO: 635133 - DNA, 194 bp, Homo sapiens
  misc_feature (97)..(97): n is a, c, g, or t
  misc_feature (156)..(156): n is a, c, g, or t
  misc_feature (171)..(171): n is a, c, g, or t
taagcacttgcctctccctattgaattaaggttcacatttaattgaatatgtagtcattgtgtcttctttagtctcttaaacctacgaaagtctttntttaatgacattttcttcttgaagacagcagacctttgtgttgtgcagagttctacatnctggatttgttttcncataattgtatttagggtaaatt

SEQ ID NO: 635134 - DNA, 163 bp, Homo sapiens
tcgttataaacggcacacacagcgcattgtttcctcatgcaattgtttcagcagaagtaaaaactaacaaagttataagtaaaagaatatttacagaagcactatttttggtggcaaaagtactttaatatcttaaatgctcatataatgaaagatactttaa

SEQ ID NO: 635135 - DNA, 149 bp, Homo sapiens
ggatcagcagatagtagagggactgaactaagacacgaccaactggctgctattgcagggaggccacactgatgttcttgtgactgaggctccttccattcactgaccagagctttgtgggtgctgcacattgggcggctgacattggg

SEQ ID NO: 635136 - DNA, 150 bp, Homo sapiens
ccggtaccgctctaccgatggggtgggactggaaggaagaagaagacttgtacggtttgacttgtttgtttagtttcattattgtttagtttgtttgagacagagtctcactccgtcgcccaggctggacgtgcagtgggaccatctcgg

SEQ ID NO: 635137 - DNA, 673 bp, Homo sapiens
  misc_feature (7)..(7): n is a, c, g, or t
  misc_feature (72)..(72): n is a, c, g, or t
  misc_feature (84)..(84): n is a, c, g, or t
  misc_feature (135)..(135): n is a, c, g, or t
caagcancagaatgctttccatggctggctgtggggcttgcgcctgtaatcccagcactgtgggaggccaanacgggcggatcncctaaagccaggggttcaagaccagcctggccaacatggcgaaactccgtntcaaaaaaaaaaaaaaaaaaagaagagaaaagaaaacataagtttcagccaggcatggtgggtcacacctgtaatcccaacactttgggaggccagggtgggagaactgcttgagcccaggagttcataccagtctaggggcaacatggtgagaagttgtctctactaaaagtaaaaagaattagctgggcatggtggcatgcacctgaggtcaggtcccagcgacttgggaggttgagaggttggaggattgcttgagcccaggagatgaggctgcaatagcatgatcacgccgctgcacttcagcctgggtgacagagcgagagcctgcctcaaaaaacaaatatgtttcaacttttttataataaatatgttcattttgcaactagcaaaaaaaaaaaaaaaaaaaaacccgaaagaaaaatactcaggctggtctaggtgaagtggtgtttacagtaactgatcaccaccagttacagatttctttgttccttttccactcccactgcttcacgtgactggccagaaaaaaaaa

SEQ ID NO: 635138 - DNA, 863 bp, Homo sapiens
  misc_feature (487)..(487): n is a, c, g, or t
tctgtgcaaagaggcatccagacgctggcggatcccggttcctttgactccaacgccttcgcgcttctcctccgggcggctttccagagcctgctggacgcccgggcggacgaggccgcgctatccacccatacttgaaacagatcgacccagtggttttaaagcattgtcatgcagcagctgcaacttgcatcctggaggcaggaaagcaccaagttgacaagtctactctaagcacttatttagaagactgtaaatttgaccgagagcgaatagaactgttttgcaccgagtatcagaacaataagaattctctagaaaccctactgggaagtataggcagatctctccctcatataactgatgtttcttggcgcttggagtaccagataaagaccaaccaacttcataagatgtaccgacctggatatttggtgaccttaaatgtagagaacaatgattcccaatcctacccagagattaattntagttgcaacatggaacagttacaggacttggtggggaaacttaaggatgcttcaaaaagcctggaaagagcaactcagttgtaatttggggaggctgatgaccccaggagcctagaggaaaaccagacgcgccttgtctcctgctggaccatcgttcgcgcgagctggatgtcattttcagtggaaaaagagctagcacccttttgaagtgatgccaaccatcaattttgacactttttttacacatgtgaaatggttaagagggagactcttaagcatctggattttcagtattactcttgcgttccttctatcttgagcgtcttcaagccctattaaagtatcgtaccctgaataaatacggtggtattccca

SEQ ID NO: 635139 - DNA, 108 bp, Homo sapiens
tgggacggcgtgctctacgctaactctggtactgcagcgggagaacggtccctgatggcttggtcactgtctgtgccacctcgaccaggcggacaccctgctgcttgg

SEQ ID NO: 635140 - DNA, 603 bp, Homo sapiens
ggaagcagaggcgggaaggtggtgatggggaggagctaggagcgtgggagatgccggccggtctgctgctcagtggtcctgcacgtctctgagaaaccccgtagctctgtacagtcagtagtgagccccgaggtccgggagtgtgcaggcccgtacattgtgggggccgttggtgctgaggcatggacctgcaggcagggaatgcactcaagcgcttcctcagctcgcagaccaagctccacgaagatctctgtgagaagaggacggttgccacccttgctacccacgagctccgtgccgtcaaagggcccctgcgtgtactgcgcccgggccccacatggacctcaagattgtccccttgtgtgccggaaagaagccaaggccaaggagcgtggttgcgggcaagcttgccagctttggggagggccggaagggaagcacgagggcaacgcaatgaaagaacgcggcgagaagttgtgttcgggcctgcgacagcataccttcacttgctggctggacaatgagaattacccgggtcttgtggattgcagacggtgcatgtgatatcccttcccagcaataaccgaacagtgagaagacaag

SEQ ID NO: 635141 - DNA, 1014 bp, Homo sapiens
cccagaggtgggagggctttgctgcaatcctggaaggccagtggcttagaaaggcaccctttacccattgtgcagacagggcacctagggttcaaaaggcagcacctaccccctgtttggacttcccacattaatgtgggagcttccctgagcccccagctccatgagtgtcctctggtgactctttaagacggcatttcttgtgggccagcagcatgtgtgctgtgactgtcctaggtaccattcagaaggtgacttgagccctgacctattgaccttctctgactatcccttcggcgaggaagcatgtgagaaattgtgggatattcttggtcctcgttagaggaacagagaatgtggaatctgaaacatcgctgtccatcacatgaccccatgcactgtgatgtgatgcatgatggcgaatgtgcttcctccccagagcctcagtcctcctatctgggatcattgggcatatgggatgaggagggaggggatgctggggcccccccattctggtttttggcatgtggtctagagttgtcttatgtcccacagatggttacactcagtgtggcttgtgatgaccccttcttgggcaggcagccctctcccctccagaggccctccctttgccatgcagccccgatggactccagcctttggtgtccctcctccccctgaatggtccctggggcctgggatgaagcgagccgggtggacagccgactgtctggttcccacagtctcagaattgggtgaacgagacctgcggttgaaagggtggaaaacgctggcaggtgtgtgcctcccacatgctggagcccagctggacctcagcaagggaggtgacatgtctgggagccatggagtcaggcaaggaaagagcctttgttcttcttttggggaatgatcagtaactacaaggcgagtgaacggcagggaggacagaacagagagaacggaaaacagagaccaagagagaaacagacagaaggggagcacacgggcactagc

SEQ ID NO: 635142 - DNA, 144 bp, Homo sapiens
gaacatttcaggatataagtatttttctagagtttaaaagcataacctaaagttaacttgtaggctttttctttctaatagctttttactagagtaggtaaagcatgagcaacctattttttatgtttaactagccaagatact

SEQ ID NO: 635143 - DNA, 334 bp, Homo sapiens
cccggggcccccgggaagggggacggggggggccccccccggaaaaatgggggggcccccccccaaaaagggccccccgggttttttggggggggtccccgtaaaaaaaccccagggccccacttttcccccccccttttcccccattttttttatggccaaggcccccccccccgggtttttttttccccggggaaggggttcccccccccccccggggaaagaaagaacccaaaaaggggggcccccccaaacccggggggaaaaggggccccgggggcccctgccaaattttgggggggaattaaaaaaatgggggcggggttaaacccca

SEQ ID NO: 635144 - DNA, 186 bp, Homo sapiens
cataatggatcttccgtggtccagtggggtcagcatctgggtggcccgtcctccatccgggccgggcaccgccggggtcagaatggccatcgccggtctgacgatcgctcgagcttccatggcgtgagccttgaggagactatgaaaaacctgcaggacgatcttctggtgtatggcgaattgggc

SEQ ID NO: 635145 - DNA, 122 bp, Homo sapiens
gctcgtggttgtcctagtggtgggtggttatggatcgtggtgggggaattggtggatatggtagcataaggttctaaaaacagtagaagagggctacagtcctatttgctggcgagagagga

SEQ ID NO: 635146 - DNA, 507 bp, Homo sapiens
cttttggggtctttgctgagtttacatgatgtactgacagtgacaaagataacataaaactcatgtactgccgcaaggacatagacaacacatgagttaaatgaacattgtcaattcaaagaatgtttaagattagccatagcgttagaaaacttgaatgcgttatagttttacaactcacatataaaagacatttgatagaggcctttctaaatttaaatgattctaaaaatgtacatgacaataccagttataaattgtgaagataaaacttcttaactattgtcatagaagataaatattgatcagtcatgctagaagaaagactaaatcaaccgtctgttgtcatagaatatattataaagttgtggacatacaaagaagcagtcaaagagtatccacccaaaatacgagagtaaagaagtactatagctggatacagtagctcagacctgtagtcccagctacttgggaggctgaggcaggagggatgcttgagcccaggag

SEQ ID NO: 635147 - DNA, 114 bp, Homo sapiens
tcaaaagaagtcagacatatttaatccagaaatagtttcgtttgagggagggcttgcaggtctgtaaatagcatttgccgtgttgcaaatgtgtaaaataaagattatctggca

SEQ ID NO: 635148 - DNA, 216 bp, Homo sapiens
ggggccccccccaaatttaaggggttttttttaaccaaggggggggggggctttcccctttggggttcccttgttttggccccccccaaatcccccccccccgggggggggggccccttttttttgggggggccaaagggccccccctccccccccccccgggccccttttttccttttttttggggccccttttttagggggggggggtttttga

SEQ ID NO: 635149 - DNA, 119 bp, Homo sapiens
tgaggaaatccagcacgtcccttcttcccagtacgaggcctatgtcgacagtaaagttgacatggtgacgtccactgctggctttattgaacagctaataaagatttatttattagtaa

SEQ ID NO: 635150 - DNA, 226 bp, Homo sapiens
  misc_feature (66)..(66): n is a, c, g, or t
tgctgggtgtcagaggatcccaggctgaggcaggaggatcatctagaggcaagagtcaagatcagnctgtgcaacatagtgatacctatctctttaaaagaagaagttttaaattttgaaataataataggtactggatttatgccaatgtcttttctagcgtctttttgaggatgagtatccaggtttatcttttttttccccttttattcttctgggatggatt

SEQ ID NO: 635151 - DNA, 642 bp, Homo sapiens
accacgagataatatacaactggctaaggggcgtatgtgatcagtaatcaagagagaatctatacatgcagctaggttgagtacagctaaattctgtacagtacacaaaacccattagtaatgtagtatagagaccaaaaggtagagagagatcgaatacattactgatgtgtggattaattcaagttcaggcatctacttgtgttacagcacagctgtcaaaaggcgataatgagtaaatcataaaacgggtttgtttcttcccacattattctataaatggaccccgatgggtagtgaagcaatggttttgctgtccaacttcagaggctgctgtggcgggggtctagttctgcatctgctcaaagaacttgtaggttggattttcgtagccgttctgctgcatcctggacaggtggcgctcctctggggtgacagcggcgtcaacctccaccacaccatgatgaatggatgtgtactgtatcttcttcagcatcaccaaggtgatgacgatcactgtcgctatgacaaacacgaccaccatgagtccaatgattgcacctttgtttgaacccacatcttctgcaaagaacaccattttagatgatgaacttcatatcctgagtcatgtgggaatctgca

SEQ ID NO: 635152 - DNA, 209 bp, Homo sapiens
tctgctgatggtgatcggagtaaatcgccagagtccctgaactctcgctactttttactcccctgcatcggatcaccggcgtgccccaccatgtaagacgcagccgtagacaccagctccgaaatcaccacaaggacttacaggagcagaaggaagttgttggtaagaggcagcaaaatgtgaagagtacgcccctgcttaactgggaa

SEQ ID NO: 635153 - DNA, 184 bp, Homo sapiens
gctgagggacaagtgcaccagtgacagaactccctgcgacactcctcctcctcttggccagcagcatctggctggagaagagctgtaatgctgctcgctggctgaggttgttgcacaagttgctccagtgccattcaccctgcagtggcctgggggccatgtggcacgtgagtgtgtgtgcaca

SEQ ID NO: 635154 - DNA, 400 bp, Homo sapiens
tcacaaaacctagttgccaggtttatcccctcactggggtggtccacatacacagcacagaggcacgggcaccatggggaaagggcagcactccgtgccttctgaggggatctgggcctcacgggggtaaaaagggaaaggagggtttctcttctgccctcactagggcctagggaacccatggagcaaatcccaccacgccttcacatctcttcagccaagggaagaagccacctggtgtgacgttatagtctccaaccatttatagtaatgtgtgaagaaggggatgggccgggtcccaaccattacggggtgaacgatataaacagtaaagggaagatacagtttgggatgaggccacaggaaggagcagatgacaccatcaaaagcatatcgcggg

SEQ ID NO: 635155 - DNA, 115 bp, Homo sapiens
aagaatatgaaattccagcaataagaaatgacaaaggtttggagctgaaggcctaaagtgcttgctttttgcccgttgaccagttaattggacttcttcattatctttgcagcat

SEQ ID NO: 635156 - DNA, 498 bp, Homo sapiens
  misc_feature (246)..(246): n is a, c, g, or t
ctttttttctagcccgaccgtaccaaccaaggcctgggtcctggtggggtggtggttggcctcggatttccacccccccaatcccctcacaattaattttggctgggcaaaccccgctggggttaagggtgggggcggggtggttaagtaaaaatggcccaagaccggacaatcccttgggggtttccccccccccccccccccccccctgggtgggggggggggcggggataaggaaagcccttnctggggggggggccgggagggggggatttttttttccgtccccccccccccggtgggttggaaaccccctccatttattttagggggggggggggattttagttttgggttttttccccccgggggaacggtccccttttttttatccccgccaaaggtggggttttttttttgcttccccccccggccttgcctttttgtttttgaagggggggttttttttttccccggtttaatttaattttttttcca

SEQ ID NO: 635157 - DNA, 749 bp, Homo sapiens
ggcgggcgcggtggctcacgcctgtaatcccagctctcagggaggctaagaggcgggcaggcggagcttgaggaaaccgcagataaagttttttctcttgtgaacagatagagattaatacaactacttaaaaaatatagtcaactaggttactaagatatggcttagcgtcaagttttaagcgtaattataatagcttaagattttacagagaaacatactgaacgaccttagaagagtagcatgaggaaggaacacagatacacaacgcgtttctaaaaaccactgaccggagcgtcgaccgactgaacgctctcttcagtggacgtacacaaaaacagtgtattttcaacaaggaaacactgacgacgaagaggactacaagagcccccgaaattaatacccaaatagaaggggcaacgtgcttttagatcaacaatgacggtgactcaaaccaggctttacaggtatagcttaaacacgtttgtacggtgacttacaacataatttgagacggcgactcttttacacaaaacggaagatataacacccgacaggtggattcaacaagaccttggaaaatgcatgaccgcagggcagcaaattcggggtcatttaacagccttagttaaacgcattttactaaaagcgcagaccgaaatcctggcacagattactttgggcgtggtaggattgccaccactggggccgaaagcaagaaagttggacggtgcaacaagtggaacaag

SEQ ID NO: 635158 - DNA, 497 bp, Homo sapiens
  misc_feature (29)..(29): n is a, c, g, or t
  misc_feature (58)..(58): n is a, c, g, or t
  misc_feature (72)..(72): n is a, c, g, or t
cccctcaaacccaataacccaaaacaaanctgcaacttgggggtaaaattgctagganccaaataattgaantgtgtggtgttctgttaagggttttgccaaacaaattccctcctgaagccttagcctaggagttccattatgccttccctgtttagctggtccttctttccttctactaaataagaaatgccttcatttttggccgagcacggtggctcatgcctgtaatctcagcactttgggaggccggggcatgcggatcacaaggtcaggagtttgagaccagcctggccaacgtggtgaaaccccgtctctactaaagatacaaaaaaatcagctgggcatggtggcgcccacctgtaatcgcaactatttgggagttcgaggcaggagaattgcttgaacccgggaggcggaggttgcagtgagccgagatcgcgccattgcactccagcctgggcaacagggtaaggctccgtctcaagaaaaaaaaa

SEQ ID NO: 635159 - DNA, 125 bp, Homo sapiens
accggatcttcggagacgacttgaccatacctttccaggtcaaagtacagaatagaatacattgatacaaagtacagcacaatactttgctttttatccatttcttttactactgtgtaaaagac

SEQ ID NO: 635160 - DNA, 2030 bp, Homo sapiens
  misc_feature (267)..(267): n is a, c, g, or t
  misc_feature (284)..(284): n is a, c, g, or t
  misc_feature (830)..(830): n is a, c, g, or t
  misc_feature (1330)..(1330): n is a, c, g, or t
gcatagcgccgcatgagtgctggcatgatctcctggttcgagcaggcggggacgccgggtgtctcgctgcgctgggagcgcattgggagttggtaaccagttgtgtaactaacctaagggaccgtattcttgtaacggagtgagtaactaccggtggaaccgttgtagtacagcagcgacgcgtacgagcggggtaacaacagctgactctagtgtactggctcgagacatacgcgcgcgtatggtggagtggcacaggagtaatanacagtagattaacatancaccagtccaacacatactaggggatgcagtagtgtgtctgcatggtgtaccacatagacagagtaccatacgtcctacctcttgtgtacagcggacgtatgttctataatctgtccctcgcttcctacgtacgcgcgcggtacatacgtggacatatgcgatgcaaggaaccgtccacgtcggactattgtcaattcaacccgtaagaggcgtggccccatactatccttacatgaggtcggattgccacgcgcggttcttggcacccctagaatatcaataagaatctcaattgtgctcgaggcagaggcccacttagatatggctcgaaatcttggcggcggcgcctggccacttggcgctcggggcccacagcggctctaggcggcacctgttccttttcccataggtttaaggggtcctttatggagcgcgaattgggaaactccaaaacggaaattggctcaatcggaaaattggcgcgccacaattttgtggcggtatggtgtttagaaacggtttggcgtttcgcaattgggaagganttgacgtacagatgcgcttaggcaagaaacgcactattctcgtactggggggtgcccagctccaatgcggtttgggcgtctcaaacgcctttcgttctccaatattctgggtgccactcgccggatgggcccggttataggcacggaggttaaaacttagacgcgaacgtaaggacgccaagactatatacggagagatataatgacccgccattagccaccccttgtaacaccccgtgtaggccataggtgggtggacataggaggacgcccgccgtttggtccgtaattcccctctgttcgaacagggttaaaccggcaacatcgaatttttccctctgtggagcttccatcggaggtcttccttagtagagccgcctcacggtgcactttcctgtgacacactccggtgacttgagcacacgtttaaccaatacacgcgctagaggcttccacctgttaactggggggtggccacatgataacgttggtgtttgacnctagacattttacacacctcgtttcgaggcttaacccgttgtgaagttgtgcacacgcgaagagcccactgtggcaccctgtgtgtgcgctttataatctgtagcggacaccaacagagctcccatcctttctaggagaagggcctccaatagtactcaaagcaggaccacttaactcaggccgtcaaacctttgtattcgtgccggggagcgcattcttgtcttcaagacaaagacagcgctgtgtgtgtttaggcccaaaaatgctgaatcccgaaaattccagcgaacgtccttcacatgtaggaccgccccctgtgtaaagagaacccttaacacccgaaacagtagttgctgggagccgccggtgcagcacaaatagtggcccccaggccgctcgcagacaaaaaggacatggggggtttacaacacagcaacgcgaacacacagcctaaaaagaacacgaggcgagcgaacgtacgtacaaacgacaacacacccgacggagctaagaagatactcggaagcagaccaagcacactccagcacccgccagccatagcagacacacgacacaaacaggcacagcgacaacaacgtacgggaacaacaacgacaacagagagcagcaaccgcagcccagcagtagccaactggtagcgacagcacagcgaaccgcacgtgccgaacttcgctctat

SEQ ID NO: 635161 - DNA, 320 bp, Homo sapiens
acaccccggactagattttcagaggaatactacactgtttggtcagttaaggaaggctgtgtgttattttggattgcctgcccttggctgacactacaggggtgcataccatcttgctgtggcttggctgacattgcctctttgtcctggcctcttagttttcttttgatatttcatagctctccttagtttcactctgcctggatagaaagttgaccactaactgcaggtttaagtactaaactgcagccttttctgtcgccagcaattaaagaccaccaatcttgtttgtccatctacatggtttgtccggggttgtt

SEQ ID NO: 635162 - DNA, 176 bp, Homo sapiens
ctcatgcctccttccaacatctcattcctcctttcaacatctcatatcacattttgataattgtcacaatattttaaaacttttcattattattacatctgttatagtaatatgtgatcggtgatctttcttattactctagggcaccatgagcaagcggcatgagatttggaagg

SEQ ID NO: 635163 - DNA, 142 bp, Homo sapiens
  misc_feature (50)..(50): n is a, c, g, or t
  misc_feature (65)..(65): n is a, c, g, or t
aaagcaagttctcacttccgtttagaggggcaaagcctttgagatattcnttgggagaccctaanctagtgtacacagcagtaggccatggggcgtaacataaagagggagtttccaaggctagaaccctgctgagctgtgc

SEQ ID NO: 635164 - DNA, 1077 bp, Homo sapiens
  misc_feature (496)..(496): n is a, c, g, or t
agcggggcgggtcgcggagggggggacggggactgtcggctcagtcgcgagatccgcgtgctgctgaccgagatggagcgtctacgcagcagcaccatggctcaagagaagaaccttgcaaggctatgttgggattagtcctaactcgtgcacacaactcacaaggtactacaagaaacaatcgtgtcgacaacgagcaggttattgaaattcacggcatgtatcggtagatcgggtgagctcgtcgggagtagggaggaggtcggacgattaaggtcaacatcgattataaccgtcacagatgatgtattcgtccagaggtatgcgaggtgccttcctccatgagaaagtctcaccagaaggagtggtacgagtgtggaacgaacatccgaaagtctaccaggtcgatccgaaaggtggttgtgtcaagctagcatgctcacgagaaagttggataccaccaggagtaatggcattatgcgagatgtgcttctangtatttagcttggacagccttgtaatggagataactatggataagtagataaccgaaggaccgagtctaaaatcgcatgaatgcaccgaggtggaagcagacgtcagatggctagataatcaggggatagtcagagtaagtttataacttcatttgctcggttgcagagaccatgtggatctataaaatgcgattgggatagttcgaagttgagtgaaggcgtgaggatggaatgtagagtgacactattctatcgacactctattgcggaatggatgacacaaactcggcaccagtagtgaatgccaagtagggtttaaaataacggatcattgaacgaagattcctaataaaccttggcattttttggcaatttgttcctgacaatttcccaagaacccgggaatgtatggaagaaagaagggaatcctggcgttggtcctcctaggagtctccgggacccgacttaccgcctggggaggtggatcggaagtagggaacggaaccggcggcgcttgaatgggccaatgggggtctaaaggtaggcgcaaaccacgagggggggttgccgccgtgcaaac

SEQ ID NO: 635165 - DNA, 325 bp, Homo sapiens
ttacctggctaggtgtggtgcctcacgctaataatccaagcactttgggaggccgagccaggaggatcacttgagcccaggagtttgagactaggctgggtgacatagtgagaccctgtccctacaaaataaaaaaagatttaaaaaaattagccaggtgctatggcatgtgcctatagttccagctacttgggaagctgaagtgggaggattgtttgcattgttgaattgaagtgggtggtctaggctgcagtgagctgtatcactccactgcactccagcctgggcaacagaacgagaccctgtctcaaaaacaaacaaagcc

SEQ ID NO: 635166 - DNA, 398 bp, Homo sapiens
cgagacgcattgtgtgcacggagttgacgtggaggtaggagcagaacgccacagtcccagacctggaaccgctcagagaggagcacgcaccacctgtgatctactatgtccctgacttcatctccatagaagatgacgagtatttgcttcgacaggtttataatgcgccaaagccgcggacccagctctctgtgagacagtgacagaactggagtgggcttcctcatcgcacagggaaggatactgagcgggtgccaccatggctctcagcgctacgtggacacagtgacagacctgaacctctgtggaggcactcacagctaaccatgtgctacatgaaccagcatctgcctgtagagggcatcatgagccacacacactcgggccgtgtccgtccc

SEQ ID NO: 635167 - DNA, 177 bp, Homo sapiens
  misc_feature (1)..(1): n is a, c, g, or t
nctattgctgtgggtatataagcaatcgtattgtacttgagatagcacaatgctgcctagtactatgccaaatacagtcaactttagatgctttctgaggaacagaaaactggtacactgatggatggatgagttcgaagttaactatagtatagtaatttgtacagcggggatcct

SEQ ID NO: 635168 - DNA, 139 bp, Homo sapiens
tatggacaaagaagacacgggcaccggtgaagataccaactcgaaccacagccctgacagcagcattcatagcttgggcattttcaccagaagtttaaacagcaatggctttgtcaatccccaaggtttcgggtggcca

SEQ ID NO: 635169 - DNA, 623 bp, Homo sapiens
  misc_feature (1)..(1): n is a, c, g, or t
nggggagaagagggaaagaaagaggataaagagcaggaaaagcaggtaggagagaggatggaagaagcatgaaaaaagggggagaaggaagggaaagaggaaagaggagaagagatgagaagatgttggtaggaagatgaagcggagagacatgatgaagaaaggggtgaaaagaatagacaatgtgagaaagatacagtatgagaagaatgcaatagaggcacgatgaaacagggtaagtgtggatgaggatatgggataaaggagaggcagtgtctagtaagagaattgaagtaaatgatctcatgaagaaaagtgagagaggtatatataaagtggctttatacagttaggcaattaggtattaaaatgatcctcaaaatacagaaaaaaatggcataggtacagccatgaaaacttcaaacaacgtcagacacagggccatgaatcaaataatttaatgagtttacagaggttaagcttcaaaagggctaagtgaaatatttatttatttaaagaaaaggcaagttctagatcagtctgacagagtctctctctcgctctctctctcgctcgagctctctctctctctctctctctctctctctctctctctctctctc

SEQ ID NO: 635170 - DNA, 206 bp, Homo sapiens
  misc_feature (39)..(39): n is a, c, g, or t
  misc_feature (91)..(91): n is a, c, g, or t
  misc_feature (124)..(124): n is a, c, g, or t
  misc_feature (165)..(165): n is a, c, g, or t
  misc_feature (167)..(167): n is a, c, g, or t
aggcacctgccaccacgcccatctaagttttgcattttnagtagcgacggtttcaccttgttggccaggctggtttttttggccaattgtntctaaactgctgtcaaaaaaaggaatggttcanattgttttgaatagggcagagctaacctgtaatcacctgtntnatgagaaacagctttgactgcatttaactcctgacctgg

SEQ ID NO: 635171 - DNA, 603 bp, Homo sapiens
cggcgggccgccgtgcggtctttgggccctcttgcccggggtcctccttggtcccttcttgcccatcataccccgatgttccatctggtgacaccccccgacagtgccccccgccccctcccgtgcccggaccgggttccctttccgagcttccaccccacccacctggccccaggcccccccggccagcccccccccggtacctctcccggtgccccgtggtccccggacccagcttctctggcccttctggccggcctccccgcggaccccgtgccccgcttcttcccagcctgccaccagcatccgcgccagatcggccggcgccgccagaacccgctccttaccacgccagctgctgtgccgcgcctgctggccgagccgcctgccgccactccagccccggcccgggtttaccactccactattacgacctgaacgccggcccatgtgggctggagaccactcccccttcgcctaagagcccgcccgggacccccgcctgtctgcgctggctccccccgggagaccccccccccgcctgtgttttaggcccccccccccccaccttttggtggggagaaataacccgtttagagacta

SEQ ID NO: 635172 - DNA, 1177 bp, Homo sapiens
tcgtccctaagtataccccctttggtgcctgacttattccccccccaaatatcctgcacatgctcacctccacaagtctattttcacccctgcttctgttttctccgaaccaccaagcatgccctaaataaagaaaaaggtttaaaaaaagagttaaaaaggagactcttgtccaaatttttactccccccccctgttttacccccaaacaccgttcgcccttgcttgagccttgcccccccggtattttaggagggccaccccgcctctgtcccccagggaacaaccaaaagggttttaaccgggccccgcagtgtacccccttgtaccccggtgtccaaaaggtttagcgataagagtcacccggtgtgtccccctttgaattttaggggacaccccgttatttggaaattgggctccccccccgagggggttttccaacctgtgcttccttaaacttttttaaacacccaccggtgagaaatttgaccccctgtgcccccgctggaaagaaggcccggggccactggataccaccacgccccaagaccgatgtaagacccctattggaggcctttaaaatttatttaaaaagcccaaccaccgtatcctatacccaaccccccccacgtgttccttaaaaactatgcccaacacctcggccttaaaaaaatttttcggttgtggggcgagcccctccggaggccacgaacccccacacctcttcgcgagccacgttaccaactcggctataggagacttttcacccacgtccacacaaggcgagaactatcctagtaactccacacttgtgagtccccaataaaacttgagccccaccgggaacacacaagttatccctatagggagataaccacgcgcgcacattcctattttctaagaagtccaataatcaaccacaataaggggtttatcgacacctccagaatgttggaatcacaggaacactcccgaatggtgcaccccgcctattaaagcgctttcgctttgttcacaccgattaaagtcctaacgtgattctgagtttcacgacccgcgagtaatccacggtccggttttctatttaacttcacaattcctccctgtacgaaaggaaccagagaaataaggcctacttcaccaagcgccttcccccctccactgatatcatttcata

SEQ ID NO: 635173 - DNA, 972 bp, Homo sapiens
  misc_feature (686)..(686): n is a, c, g, or t
gagtcaagggcctttgcacgcttggcggcggttctaggttccctgttctcgcctgatgatcggcgatgtgtcctaaaggcagctccaaacagcagtctgaggaggatctgctcgctgaaggattttcgatgcgcggcaatcttctctggccaaagatccttccgggcgtcgtatcttatcggaacacgcgtccattctgtcgtcttcgtcatggccctatcatggttaataagttgggccgaatatgggcaatgatggattctgcatcaggtcgtggctcgtgattggtttaccgtgtagatagaccgctagtaaggacacgattatttggagtaggccattgtggcgttacaagaggacattgtgacgctttgggtgctcggaggcactcaaatgtgagcaccaagatgtgaagggaaggattgctgttttccagataggaatgtgactcgaaaaactttgctgaaggctgataaatagaagaggatgtctcggagagggaggactctgatgccacgaatcttgttggcatacgaagaggtgactgtttgcgtgattatgaaggctaagcaaggatttgttccattgttctagtaacaacagtcgtgttgcctggttcgtggtcatctgtgtgcttccttgcttcatattgaggaactgccaactcccgagcagttgaactatcnttattgtccataaggtgcttcatcagcgacttcatcgccctctgttactggctccaaatagaccatgtttagctttacccgcggtgttggtgtatatgggatggcctgtggttcactggacaaggtccggctggccgggctgggaccaaaaatgttttgttagtcagacctttaaaaaccagggaagtagtcacgttgggagaggggttgagccaggttgccgtcaaattctggaggcgcgcagtaacacagcgtggggtcacgcgcgcacaaaaaaaattgggcc

SEQ ID NO: 635174 - DNA, 364 bp, Homo sapiens
  misc_feature (130)..(130): n is a, c, g, or t
  misc_feature (316)..(316): n is a, c, g, or t
tttcggcacagcagaattattcataatggccaaaagctgaatacaacccaaatgtctatgaactaatgaatagataaaccaaatctggtatatccatacaatggactatattattcagccataaaaaganataaagggccaggcacagtggctcacacctgtaatcccagcactttgggaggctgaggcaggaggattgtttgaggccagaaatttgagaccagcctgggcaacatagcaaaaccctgttctctacaaaaaatacttttccgtacattagtggtttgcctaaggctagaattgggggtgatgaatnggggagtacaggattcatctaatgggtacaggatttctttatgggttc

SEQ ID NO: 635175 - DNA, 741 bp, Homo sapiens
aagggtggctcacacctgttaatcccagaactttaggaggccaaggtgggtggactgcctgagctcaggaattcaagtccagctggggcaacatggcaaaacctagtctttacaaaaaaggcaaaaaattagccaggcatggtgtgcacctgtaccaggtatgcacctgtactcccagcatactcggtaggctgaggtgggagaatcacccgagcccagtaagttgaggttgcagtgagtcaagatcacgcctctgcactccagtctgggcgacagagcaagactccgtctccaaataaataaataaataaataaataaataaatagtttggtaggctgggcgtggtggtttgtccctgataatcctagcactttgggaggctgaggcacggaagattgcttgagcccaggagttcacgaccagcctaggcaacataggagggggaacctgtcttaaacaaaagaacaaaaagggagaggacaagaggcgacgagcagagcagacacgacgaccagcagaccacaggaaccaaacgacatcgggtacaacacgcggcaaccactctaccagaccacggctacgtaaccccattacctagcaatatgtggacaaggtcacatgttacaaacaaaaaaaaaaactatatccgaagaaatataatattatctagtaggcaccgcgaggataaaaagacaaagaagagcagacaggcatatgacaagaggcagttcatgaacaaa

SEQ ID NO: 635176 - DNA, 160 bp, Homo sapiens
  misc_feature (73)..(73): n is a, c, g, or t
gcaatgtcagccttataaaccagatttgccctggctgtcatagatggcagaaccagagctttgttcagtgagntgagctttgtcctcccctcaggtttggggaatgaggtttgctaactttggacaggggactatagctttgtggccctgttttactgtt

SEQ ID NO: 635177 - DNA, 1985 bp, Homo sapiens
  misc_feature (1102)..(1102): n is a, c, g, or t
  misc_feature (1985)..(1985): n is a, c, g, or t
ccaggccgagcgggagctgaccagtgcttgactcgggtacaggaacgatggcaccaagtctcccgttgctgaaccgaatgggcctcgcaagtggatgtgatggagtgcccagccctgagggtcaactgccaaacgcagagctagcctggtcactggtggcctactagtggttgggtaggctgtggctgttgcctgcaaggcacggttccgatgtgtgccgtatctccgttcatgtgtcgccctgggtgccgacgggggtgctcttatccgtctttgctgtgggccctgggcacatcatatgtgtccccgaccttctgtggcccccttctgtggcacccatgatgtcctccatccacagaattcaggaacacgccggaattcccatctctagccaatgtgggcacaactaacggggcacaaaggttagaagcttaaagtgcccctggcgtggccccgtatgggagcaccatacccgccacaatcctggaggggagccccttggagaaccttaatcgtagaacctagactggggcaccacccttgttgtggtgtaagtgtgggccccccccacattggtggccccgttatagccaccgactgggaaaccccaccattataataataccagttccaacaggattgcatccatggaaagcaatgggacgccatagcaccctacgggcggacagaacccgcactttgccgagaacactagggataagaccacacgcattgggacactcaaatggaggtactgcgccacccatgggagccacatatgagcaaagcacataatttggcaggcagcaggggcacccacgaatttatccgttttggcgagaccacacaaggttcatggaccgcgcaacagcaccagcctctggctgactatgccggtcaatttgcaacaaggtcgggaccatttccagtaggcgttgtatttgagccgtaggatgcctgcgtggactaaaccactaaatttctacaccgtatatcagtatcagccacacttgggctcgttccagcatacccacgattataccgagacacccagcgattcggctgtagtacccacacaaagcgcagcgcctatggtacccanctgggtgacacgcggagatcacactaacacggccaccgcagtagggtcgtaccatattaagacgcaacattctccataaatcatccgctcgattaccaccaccagacagatacattcattcagctggggtgcagccttcacatgcgggcatatacccctccttggagcgcccaaacaccacacacattgcggtcgtccctttgtaacattgtagcggaactgcaccacagaccaacaattgagtattgacttggcgaggcaaccaagttgtgcgacaccaatcttcaaacgaccgcatgtgagaactcaaacccagcacgaagcgtgaacgagacattggagacccagagctacgacatgcggtcattaatggcgctaagaagaaatgacgccacgccactatcatcatggatgatggcgacagcacacttatatgcgaaaggacgttcagcctaccaatgccgtatatcagtactcattccaatcccgtaaggcatcagaacagttcggatcggatcaattagtaaaagcggagactatgcgcattggagggagcgaccttatacacgagcagtgatcaactctcccttacgacgcgcataaccctatatgagctataccccgtcacacagccccttcgggtgacacacccattccgtgccaagcaactgcggacatcggaatgtccacaaatagtgattgaccaataatgggacgtcaacccgaataccaggagaggccaatccatatgggctattagcatcactcacatacgacgaagatccatagcggagcgcgacttacagtagatacagcaccattaaaggtaatgtccgccctcaatgtagttagcatgacaatcaatgctagacaacccacatgn

SEQ ID NO: 635178 - DNA, 1360 bp, Homo sapiens
  misc_feature (1165)..(1165): n is a, c, g, or t
tgacacttctgcttgccattacattgatgaatcgtatatagatgggatccacaggatgatgcatgataatgccggcatgccgtgacaaagattcgaaggtcttaggagtgctacacagcgattcaatgggactctgcacgcgaattgtaacgtcagcgtagcagaagtctgtagaattgcgaagtagaacgtccgtgaatctagaagcacgtcctcggtcgaatgtagcgtatttgcagacagagtcagcggtgttcatgtgatccatccatcacaagaagaatatcctgaagtaggtctatggtcaatcgtccacagtcgtagacgcagacgtactagagaacagacatctagatcatcttattgacttataaacagctcccagcttcgttcttaacaggagagaccgccccatgtccgtcgcagcaagtccaatccaggtagacaaatgcagtggatgcattctccatgcgacgaaacctcggcatgaggtgtccgcgcgaagccgatggcaggccccaggacgtgccgtcggtatcgcagaatcacaacgccaaagaaggcttgttcggccattggcggctttttctgccattgtatgccgtgtatacctgacatcatattaagcctgtgtggtaccttcccaaggactagtaaatgcagcacacctggtcgtcaattctgcaagcatcgctctaggagagccatctgagtaccggtcactgtaggatggcatgacgagaatgtctggccacttggggaaacgtcctgtgtcaagccgcggggctcatatggcgaaggcttcccttgaacgtagtgctatcttcgccagctagtctttgcgatcgcacgtttttaaccggccggcccagcgtacatactttcgccgctcgatgagaaagcgtcccgcgaatatccaaagtggcgtgttttaactgtagccgacagcgcaaaagctcttgtgcgtgagaacttccgctcagttcgaggagtaagagcccatttctctggccgcattttacctgctacggccaagttgtcagcggctgggtctggtgaacccccgataagttcgtgcgcaatgagatcctccccttttaccgtgaaaaacacgcttgcctaaacccgttgtgacgggacatagaatttttgcacatgatgtccncttactttgaggcgcgccgaggacacacacgcgcacacaaagtccggttggttgtgttacagcactagcgtaatgggaaaacgcggcaagaaagatcgctatccatatggacctgtttttccgcgcctgggtgagaccaagaggaactcaaacgcagtaatgtctatgcaacgcaaagatttactgacattcgac

SEQ ID NO: 635179 - DNA, 993 bp, Homo sapiens
  misc_feature (22)..(24): n is a, c, g, or t
  misc_feature (757)..(757): n is a, c, g, or t
aacatggcaggctggtactgcnnngggcacgagggccggctgagctgagtctcgctgctcggtgcgaggcggcggagagcgaggcctggtgagcaccgccgaggcgcgggccagctcttcgaggttgtgcgcgggagtggcacggcgggcgggcgagcgaggggctaacttcagcggtggcaccgggatcggttgccttgagcctgaaatcatgaccaccccaggaaaagagaactttcgcctgaaaagttacaagaacaaatctctgaatcccgatgagatgcgcaggaggagggaggaagaaggactgcagttacgaaagcagaaaagagaagagcagttattcaagcggagaaatgttgctacagcagaagaagaaacagaagaagaagttatgtcagatggaggctttcatgaggctcagattaataacatggagatggcaccaggtggtgtcatcacttctgacatgattgaaatgatattttccaaaagcccagagcaacagctttcagcaacacagaaattcaggaagctgctttcaaaagaacctaaccctcctattgatgaagttatcagcacaccaggagtagtggccaggtttgtggagttcctcaaacgaaaagagaattgtacactgcagtttgaatcagcttgggtactgacaaatattgcttcaggaaattctcttcagacccgaatgtgattcaggcaggagctgtgccatcttcatagagttgctcagctcagagttgangatgtccaggaacaggcgtctgggctcttgggcatcattggttgagaatgtactgtgccggactatgcctttaacggaaatccttcccctcttgggcggatttacagcaaccgctgcagaccggaggagatgggttgcaacccggagggaagccccccaatgaaggtccctgagggcccgcggggggaccagtgggcgggcccattaagccgaaaggcggggcagggctaatgagg

SEQ ID NO: 635180 - DNA, 814 bp, Homo sapiens
  misc_feature (22)..(24): n is a, c, g, or t
  misc_feature (758)..(758): n is a, c, g, or t
  misc_feature (807)..(807): n is a, c, g, or t
aacatggcaggctggtactgcnnngggcacgagggccggctgagctgagtctcgctgctcggtgcgaggcggcggagagcgaggcctggtgagcaccgccgaggcgcgggccagctcttcgaggttgtgcgcgggagtggcacggcgggcgggcgagcgaggggctaacttcagcggtggcaccgggatcggttgccttgagcctgaaatcatgaccaccccaggaaaagagaactttcgcctgaaaagttacaagaacaaatctctgaatcccgatgagatgcgcaggaggagggaggaagaaggactgcagttacgaaagcagaaaagagaagagcagttattcaagcggagaaatgttgctacagcagaagaagaaacagaagaagaagttatgtcagatggaggctttcatgaggctcagattaataacatggagatggcaccaggtggtgtcatcacttctgacatgattgaaatgatattttccaaaagcccagagcaacagctttcagcaacacagaaattcaggaagctgctttcaaaagaacctaaccctcctattgatgaagttatcagcacaccaggagtagtggccaggtttgtggagttcctcaaacgaaaagagaattgtacactgcagcctcctcccaccttcccgcgagcggacgcggaacgcctctgtctcgcttttcttatttttcccctttcccttctttttttttctttcttctcctcccctttacattcctcgagcnttccgcagcaagcgctacccgttccgccgcgcttgaagacctcaccgtnacggggt

SEQ ID NO: 635181 - DNA, 321 bp, Homo sapiens
  misc_feature (73)..(73): n is a, c, g, or t
gggtgggggcgccgctggggcagggccaggtttgtgttttagtcccttgctcctgcttcttttctacacacancatctaaagacggtgcggctcgctctgtcatgggttccgtctctctctgtggagaagcagctccacctctgggggggctcggggcagaggggcggtgtctcgtagcgggcggcacgccagcgcccctctgtcaggctggggcaatcttggttttgtgtccaaaggtgaaggggtaggaggaggccctcagctggccctccccacacacaggacggcaggggcactgtgaggcttttcttattaaaatg

SEQ ID NO: 635182 - DNA, 763 bp, Homo sapiens
  misc_feature (22)..(24): n is a, c, g, or t
aacatggcaggctggtactgcnnngggcacgagggccggctgagctgagtctcgctgctcggtgcgaggcggcggagagcgaggcctggtgagcaccgccgaggcgcgggccagctcttcgaggttgtgcgcgggagtggcacggcgggcgggcgagcgaggggctaacttcagcggtggcaccgggatcggttgccttgagcctgaaatcatgaccaccccaggaaaagagaactttcgcctgaaaagttacaagaacaaatctctgaatcccgatgagatgcgcaggaggagggaggaagaaggactgcagttacgaaagcagaaaagagaagagcagttattcaagcggagaaatgttgctacagcagaagaagaaacagaagaagaagttatgtcagatggaggctttcatgaggctcagattaataacatggagatggcaccaggtggtgtcatcacttctgacatgattgaaatgatattttccaaaagcccagagcaacagctttcagcaacacagaaattcaggaagctgctttcaaaagaacctaaccctcctattgatgaagttatcagcacaccaggagtagtggccaggtttgtggagttcctcaaacgaaaagagaattgtacactgcaggtgagcctggcatttgctaggaaccagagtggaaccggcaaagtggccagcaacagagtcctgatccaaatggagaaagggaaccaggcgtacctcaactggagtgggaaacttgatagg

SEQ ID NO: 635183 - DNA, 749 bp, Homo sapiens
  misc_feature (513)..(513): n is a, c, g, or t
gtacctttcaaagcgtagtacccaaatcccgatgagatgcgcaggaggagggaggaagaaggactgcagttacgaaagcagaaaagagaagagcagttattcaagcggagaaatgttgctacagcagaagaagaaacagaagaagaagttatgtcagatggaggctttcatgaggctcagattaataacatggagatggcaccaggtggtgtcatcacttctgacatgattgaaatgatattttccaaaagcccagagcaacagctttcagcaacacagaaattcaggaagctgctttcaaaagaacctaaccctcctattgatgaagttatcagcacaccaggagtagtggccaggtttgtggagttcctcaaacgaaaagagaattgtacactgcagtttgaatcagcttgggtactgacaaatattgcttcaggaaattctcttcagacccgaatgtgattcaggcaggagctgtgccatcttcatagagttgctcagctcagagttgangatgtccaggaacaggcgtctgggctcttgggcatcattggttgagaatgtactgtgccggactatgcctttaacggaaatccttcccctcttgggcggatttacagcaaccgctgcagaccggaggagatgggttgcaacccggagggaagccccccaatgaaggtccctgagggcccgcggggggaccagtgggcgggcccattaagccgaaaggcggggcagggctaatgagg

SEQ ID NO: 635184 - DNA, 206 bp, Homo sapiens
cccgggaaaggttgaagactagtctgcattggtgctggtcacagcccaaactggtctcatcatctcccagtgacacagcttgtcccagatgacggacatcgtcctcagtgcattggtgcctccggaatcagggtgaagttgtcctttcctacagccttctgggcagtgttcaacgttgcaatgggcaactgcccgtgaccctggag

SEQ ID NO: 635185 - DNA, 455 bp, Homo sapiens
tggatgccctgtggcccctgccccattcctccagggggcccagggggcctgccttttactgtggcagccaaattggggggtagtgggaggttgtgcatggaggccccttaaactttccatttgttaaaggccttcaaggaaaaaaaacccggccccgcgtccggcagtgtgagtttcccgtttggccctaacttttttttttttttttaaaaaaaagaaaactttaaaaaaactccccttaaaaaccaaacatttttgtgttttgaacaaaggaattttcaaaatttgattgggattttgttttgaagtttaaaaaatttttcagcccataaagccccctgttttaagcccttttaattttaaagtttggggattgggggagggcaagggtttttttttttttttttaaagggggtgtgaacaaatggaaataaagcaggggctgtgaacattta

SEQ ID NO: 635186 - DNA, 155 bp, Homo sapiens
tagaactcttgttctatgagttgatgttttagatcacatataagtgagagcatgcagtattgtctttctgtatttggctaatttcacttaataagcatagtatggtctaattccattcatgttgtcacaaatgacagaatctctctctgttttaa

SEQ ID NO: 635187 - DNA, 131 bp, Homo sapiens
gctcactgaggaaggtcaaccaaagttgtctgagaaccagacgactgtttcgctcacgcagtctccctcatagctgccttggatcaaatctgcggcgactgtccagtttctcctgtattatgagctcatcc

SEQ ID NO: 635188 - DNA, 349 bp, Homo sapiens
caagtggtgctccattctctgataataccaatttgtcttgattgggttctgtggcttgcattcctcacctggaagttgtttgcttagctcagaaatctctgagctagtgattcagctaggcacacaggtcaagggtaaaagccatctggtgtctcaggaagagttaacccttgagaagccctccagaccagcacgaccttcctctgggttgtagttccaaggcacatattcaccctgtgtagaggatcctgccctctgtggattatgtagagcctctcagacagttctgcgtagagctgtccgctgtggctgtgcattgtgtccaccaccacagcgctctgggcgctcc

SEQ ID NO: 635189 - DNA, 253 bp, Homo sapiens
gtatgtgaagtgtgttgcagaggagtgggacacctatttcctgagctttgtgcagtgcaaagtgagagagggtttgtgcaaatcccactccattctctccctcttgccctgtgggagggatgggatctggctggagaatgagtgggtgttcccagcagctcagctgtgacaatggacgatgtaacagcccgtcatcatcccgtcatgtctgttttcctccgctgctatgccatccaaccttttgcaccagggt

SEQ ID NO: 635190 - DNA, 339 bp, Homo sapiens
aggatcacagctttctaactcacataagaaggctgactgcacaatcacaagggctgacttagacttcctggctttaatgactggtcaaaggaatcctcagtcagtcttctttcaaggcaaattgaaaatcactggcaccatgggtctcgctatgaagatacaaaatcttcagcttgaatcacgcaacgctaatctctgaacaactccctttggctacttttgaaaatcaagatgagatatatatatatatatccctaccttttattgtcagaatttagactgaagactacacattggcagatagcgtgggatagatttgtttcttaatgggtgtgacca

SEQ ID NO: 635191 - DNA, 169 bp, Homo sapiens
taccgcttctcctcgtactcctctaactacccctctccccacccatgaagactgaagaaagaggttacctgaagacttagccattagattggcgtgttcattgatcgagccttgtgtagggccatgggtgaggtcagagcgtggtaagagacaccactattggctttca

SEQ ID NO: 635192 - DNA, 196 bp, Homo sapiens
tcccccgtgtaactctgacagaagatatggtttcatccaaattgtcatgtactctaccccatccctaagccatttgtatggaacgaaaaagaggatgaagccagtactgtgactgcgtaagcttcccccagcatcacccgctatgagatgtgtggcagctgagacccgggaactgctcaagggcaccaggccccat

SEQ ID NO: 635193 - DNA, 136 bp, Homo sapiens
atctgtgacaagtacctgcagcagatctttgagtctcaacgtatgaagttttcagagatgtgtttaagatgatgcaggctgaagagacacctaaaactccttcgcagaaaagcatggacaggctaggaaagcaact

SEQ ID NO: 635194 - DNA, 336 bp, Homo sapiens
aaggatccccgacgccctccgtggggagccggagacagaaaaccatgaggcaatgagtgcatgaccagcttttatgatattgtccagcactgtcctctcatgccctacgtaccaggacatcatctggttatcttcaagggctaaactcttgaactcctgacctcagatgatccaccctcctcggcctcccaaagtgctgggattataggcgtgagccaccgcaccccagccccactgctgtttcggataaagtgtgagcgcctttgtgtagctgaggtggtctggtctctgctgatttctcccaccttccctcctcccagccccacagagagacgt

SEQ ID NO: 635195 - DNA, 234 bp, Homo sapiens
catctgctgtgtgtataggagaatgccagagcatgatgtcctcttcgagtcacactcggtaatgacatcataccagactccaggtaaccccagatgcacctgctacctaggtgccataccacgaggaagaatccagaaatgtatgaccttcctctgttgagaactcatagctgtgttgggtacatccttccacacccattacctgagcgttgcgagctatgggactctgtagtc

SEQ ID NO: 635196 - DNA, 401 bp, Homo sapiens
  misc_feature (159)..(159): n is a, c, g, or t
tgctgacagttaagtttctgtggctgacactcatcttcctttatcagaaagatgcggaacaatctgcttcaatgtatttaacttagcagcccagaatctttgctctttttgatttgcactgattaaaaaactttatagattaatcagaccatacctgtnctattacacagaaatttacacgagtcacaatgtgggcaggcacgcgggtcacacctgtaatctctgcactttgggagggcgaggcaggctgatcagcaggtcaggagttccgagacagcttgaccaacatggctgaacatccatctctcctaactatacacaacaaattaccgcaggtgtggtggaccatcgccgcaatcgcagctactcaggcggccgaggcaggcagacccgcttgaacc

SEQ ID NO: 635197 - DNA, 151 bp, Homo sapiens
cggaaataattttccaaacgttggagtaacttactttagggcgacaacttggatgaagcccattggcgtattcccagtatctgtagagccacgtttgacgtcataataatcacgttactgtagactacgcataccctagctacgggcaacg

SEQ ID NO: 635198 - DNA, 103 bp, Homo sapiens
tgtgaggagtgagtgtgagacttctgcatgataaccagacctgctgccgagacaaccgacagtgctgggcctgctgtccctaccgccaggcgtctgttgtgct

SEQ ID NO: 635199 - DNA, 624 bp, Homo sapiens
aagcatgatcgaatcgagctcggtaccggtgtcgtgtacatgcgcccggagggcccttcgtttggcactggacggcggtgatagatcgccagttgcgggggcagcatggaacataggggtgaccaaagctggttgctgtaaaccgctccacttcacattttgtggggcatcggaatctgccagagatgactgattgaactgcgaggaaccgtctctgcagtatccggtacagggtggtttcagtgaaggtggaaggaaggtccaggccagcaaaaatggtgtcataaatttcatccagtaacaactccaaacctgtctcagccagttcccgcccttggctgtcagcacagtggcaatacccagatacctcagggaacctcctctggaaggaactgaaggtcacaaatgcatctggaaacctgttgtagctgtgggccagatcaaaaatcatcatgtctgtggtgttgacaaatttgcactggacaggcataaactctccctccgcagaacactggggtggtgacttatctcccaccccgtggagaagacgacgatttcttatttcacagctccttggacatcgctttggactccccagctggagggtccatacacctccatccc

SEQ ID NO: 635200 - DNA, 500 bp, Homo sapiens
tagtggaacggattaaggaacattaaatcctttgaaaaaatgaatcagattgtaagaatattgtgggcctcatcacgaatatctttgtgagggtgatcagatacagtcttatttccctctgtgagatgaagaggtcaatactatggtttgctcttcagagttagagaaattgagattcaaaaaaagatagacctatcaaagattctctattcttgtcaaatcactgaagtggatggtaggggaaaagtcatgaagtatcagaatcatactctctctgaagcactgtgaccttaacatgttcagtctcaacatttggccttgaattacttgaggaaaccacttgcagtgttttttttaaagagcaggctagggacacgaaggcataggccacaagctctatggccggtacagggcatagaagttagagatgtgcttgtttccagcaaacatgaaggttcatgtggcatccctggggaaaaccctaaattaggtcacattag

SEQ ID NO: 635201 - DNA, 301 bp, Homo sapiens
cacgaggccagagtacagtggcacgatctcggctcactgcaacctccacctcccaggcatggtggcgggtgcctataatcccagctactctggaggctgaggcaggagaattgcttgaacctgggaggtggaggttgcagtgagctgagattgtgccattgcactccaacctgggcaacaagagcaaaactctgtcaaaaagaaaaaggaaaaggaaaaggaaaaacgagagaaaggagacaaagaaaggagagacaagagagaatcaaaggagagacaggagagaatgaattgagagaca

SEQ ID NO: 635202 - DNA, 1332 bp, Homo sapiens
ggaccagaagtccaaatgacttagtatatatttcttttcctctgtccctatcccccatagagcctccactttaggttctttggttactttcttggtgtcattccaacagcacattgacaagagaaccaggtttcaggctgttctagtgtgcacgactcagtatctgctcagacctttaacagcagctaactactgcctgccaagacttcttgggcgcaaacgctgtctaactcgttagggcgacgcagcttctctgctccctttgtggtcacctgcagactacttctacttcggtttacttctagtcacgtgaccacgcagcttccacctacctacacactgggtgctctgtgtctgtctaaattacgacactattaacttactccgggcagacgacacgttgcccctctcgccagtacactctattgcaccacgggtctatatactgggtccggctctgtatctctctctacaaagtacacagaggccaaggccaacttcgtgccctcaaagttaagagacctcgcaaagcaacgcaattatcttggcaacagcttatagaggccactttctactgcgtttctatagcactttttaaccgagggcctctctacaacgaaacacatccatgacccggctcatggctctaaacaggttggttcacactcgcggcacaactttacaacggctctggaccacggccttaaacgaactttcctaccgaacgcacttgcaccagtttttaaccacttgttcaaattctcagccggcgggctactgcgcctcacaggcacaagccccgctagccaaccttgggatccccacggaacttacaggcaaaatggacttgggggtctcctcccccttaacaacttggccacattggacaacttctgggtgagatcccccaaaggttgttacttagacacttcccatcgctggtctccaccctttcaatatcgggccttggtagacgattacgctataccttcaccttgggccataacaagtctctttattaaggccctccaacgcttttatttcccaaagggttggataaacctcctttataccttcccccaaactctttggccaaaacacgttttgcccaagttacacccttcaggggttacaacaagaatctgccctttaaaacaccattttagtcccgggcacaaggccaagtgggttcctttcccccatcagatgggctttagcccatgacaatcaacgcgttaacttttctgacaccttaacccgcatcgacgtgcgcctcggtctcacgcgcacacacatacgcaactcctcgccgtatagtattcacatagctag

SEQ ID NO: 635203 - DNA, 261 bp, Homo sapiens
  misc_feature (5)..(5): n is a, c, g, or t
  misc_feature (66)..(66): n is a, c, g, or t
  misc_feature (133)..(133): n is a, c, g, or t
  misc_feature (160)..(160): n is a, c, g, or t
  misc_feature (166)..(166): n is a, c, g, or t
  misc_feature (192)..(192): n is a, c, g, or t
  misc_feature (215)..(215): n is a, c, g, or t
ctcanatgtgggagggccctggtaggaaatgactgaatcatggggatgggtctttcctatgctgtnctcatgatagtgaatgggtctcatgagatctgatgattttaaaaaaagggagtttctctgtaaaagnctcttttgttttgcctgccaccattcncgtaanatgtgacttgctcctcctgccttccnccatgattgtgaaccctctccanccatgtggaactgtaagtcccaattaaacctttccttttgtaaata

SEQ ID NO: 635204 - DNA, 173 bp, Homo sapiens
  misc_feature (132)..(132): n is a, c, g, or t
acaggaggatctctagaagaacactcatctatgcagagactaacaccgtaaccaaagaatgtctatacaggaaaacaattagtctgttttttaaaaaccatataatttatatcccattcaacgtatagcctncatttggcagttattaatctccgcttactttatttctcttc

SEQ ID NO: 635205 - DNA, 239 bp, Homo sapiens
gtacaaaatcattatgagatactgatgattgtgctatattcatgtctcgtatggtgcgccatatgtagattcagcttgtatccatgattcatcatgcgcagacaacctctcatacagtactcgaatatctcatccagtgtctccttgagaccagcatcaaaagcagagggagcagaaggaggactgtctgggcttggagactcggcgcacccccacactcccttgcatactcctcagga

SEQ ID NO: 635206 - DNA, 141 bp, Homo sapiens
cgagattactacccgtttggctcgatattattagacctagcgagtctcctcccaattggaaatatgaatcatcttcagcctctgtccctggtcgcataaatttgtctgtgtactctagcaataaaatgattgtttaacttt

SEQ ID NO: 635207 - DNA, 678 bp, Homo sapiens
cccctgtgtttgtttcactgtgtgtctcagcccttcgtcctacgggtgcatctgggcgttcattcctcatgatcggggatgggtaactatccaaggatactggacagtagatgtcctgctatgtaaactctatgtaagctgcactgccttgaaagcgtcatggactatcatctcctatgagtgtaaaggatggagttactcactgcttagcatgcgctctgacagatcacctgattcacgtgaatttcactgacctttcacgttcgtgccataacagagccttctatcgccagctgtactagccacttatggacaccacatgtacttaactgtcagaggggtaagtgtggataatctctgagcgataaggccagcccctgacgctgtcattgtgaactactatcatatgaccatatgtgcatagctgactgtagcaagtctgtattgttatgacgcgatcacactcacttgcatgcatatagtaagcactttgtaatagcctatcgggtcctggatgaagagatgcctcatctgccataggggccacagaagcaagcaggtatattcactggcgcttgacagtacacggtgtcaactctcgcgatgcagatgcggagtggcttcgtctacaccatctggtgacacggccagcctgccacctttatacttgctttgagt

SEQ ID NO: 635208 - DNA, 291 bp, Homo sapiens
ggatgtcctgactggctttcgtgccggtgcagcgggatcacagtaatgagttgcttctggactacctgcatcgctgcatgacggatggatgttccgaattcaaaatgatggcaggtcgcacccagttcgtgatcagtccaaacacccgggttattgccatcgatttgaacaacatcatgggcgatgacagcaatgctggccacctgaagaccggaattatgttcctgtttgcaggcgaagtagctggaggacattttgtcctgccccagtacaaagattacttgatgaagg

SEQ ID NO: 635209 - DNA, 304 bp, Homo sapiens
  misc_feature (189)..(189): n is a, c, g, or t
  misc_feature (278)..(278): n is a, c, g, or t
  misc_feature (289)..(289): n is a, c, g, or t
gcacttaccgtgaatggagcttgcaagactagaagttgctctggaagaatcagtgaatgagtgaatgcttaggacatcactatacactactgtagactttataaacactgcacacttaggctacactaaatttatttttaaaataaagtaattgcaatatgatgttatgacagctatcatgccactagnagcagaaattcctgagctccattataatcttataagaccacccgttgtatatgtgatccttccgttatgtgggacatgaccccgatatnaaatggattgntatattgacctttta

SEQ ID NO: 635210 - DNA, 994 bp, Homo sapiens
  misc_feature (993)..(993): n is a, c, g, or t
cgttgtgacgtcgctcgtcgtataggagcttgactacattgtattgagagatagtgccaggatctctcggggaatcgagtgtctcactaatggacgaatagcctccatatgattattaggagtactcaaatcttgacctaaaagatgtatccagtggaaccagtattgagagacgtgagtgcattctctgatcgtaacatgccttctcacaatgtcatacagcgtatcgtcactcccagtatctcggaataatgaccaagtggaagtacagatggagatcgtataagtagtgaactggcaccatggtcttgcccagtatgtactcaggtcctgctgcatttggccgacctcgaggcaaacttaatctactgcagaggcgcaggtcatcgcccgaggccgatgttagctgggacaggattatgtcactgatgaactaaaaattgtcattgtgttcaaagacgtactcccgagtggtgtccagggacctgggcattggaggttattgcccaaacggaggatgaattggttgatgtccctggacgtatggacatgactggtggtggatggttggtgccaggatgcaggaggaggtcggggtcattcttctaactgtagactgaggggcttgaaattccatatctcaggtctgtgtacgaaatggagtccggtatgaaagcgcgcgatgcaagttggttcgggacttccgtcgagccctcctgaatgtccgggcaggcagggcaggcaaggactgagctccgttgacgtggatcactgggccggactgcgccgccatgttttctctccggccagtaaagttgcttgctcaggccgtgcacgtagcttggactgtccgctcacttgaggcacgggtgtcgcgcccatgcgcgcacgctcttgcgtgacctggctaccaccgacgggccaccccgcgcgtctcgcggcatacgccttcgccctcctttctccctccccgtctccccccctctcgtcttng

SEQ ID NO: 635211 - DNA, 446 bp, Homo sapiens
  misc_feature (19)..(19): n is a, c, g, or t
  misc_feature (444)..(444): n is a, c, g, or t
acaaccttgaccctcatancccaggtttaaaggaggtgaacacactggtccttaaaagcttcccctcctatcacagacgctccctaaataagctatctgtggtaatcctagccctgttccatcttgcaaactgagttgctgtataattgtatcccaatgtttgtgtttaaaaaaatatgactcttacaccgggcgcagtgctcatgcctgtaatcctagcactttgggaggctgaggtgggcggattgccggagctcaggagtttgagaccggcctgggcaaacagggtgaaaccctgtctctactaaaatacaaaaaattagctgggcatggcagcgtgcacctgtagtcccagttacttgggaggctgaggcaggagaattgcctgaacccaggtggtggaggttgtagtgagctgagattacgccactgcactccatccancc

SEQ ID NO: 635212 - DNA, 325 bp, Homo sapiens
gactatccagacctcacaaatctaagtggatgtgatccccagataacaatgtagttttctacaaactaaatgtgtaagaaacagtatctcttacaataatacagagtatgtgtcatatatctctaaatctccaaaagtggccctccaagtcgtgtgaaatgtatacacagctcagtgtcttacaagctcaactctaaaaataagagatattctccctaagcacctcaccccattctataccaacacctattctgattttgcggccaccctgaagttcatattcttatcctcacaggctgcgggataatctccctaagaggggcat

SEQ ID NO: 635213 - DNA, 883 bp, Homo sapiens
gcagtaaatgcgcactttacagccctcgacactgcagactggcagtcgctccgttggcaacctgacggctctgttgctttgtttcgtccccagcgcacatgtcaggtacgcgactcgagggtgacgctcggtccgtctcgtcccgctcgtcgtggccgtacccgggatcacggtccgagggtttggagattttagccttcaggtgcctggaatgcagatgggacagccatgtgctcatgaaacatggcccagcatatactccgtcgatggatacctctggagtccagcatagttcacgacagcgttagttcctcagactggtgactcctgtgtgtacttacttcagtgctgttgctggtacaggatggtgaacgtggatgctgaatgaacttcagaagtatgtttgacatcgagttctggacacttacatggcaacttactctcccttcagttttggaatacctgcagaaattatcattgccactgttcggatagagatcacacaggataaatgggatttaatgcattcaaatgagctatgggcagctcttaatgcctggaatgacaaacttcatgactgttgatcacgatggaacgtggctcagtagaacatcatgacgttgcgtcaagccattgtgtcttatgggttataggtagagtcctcaatagcattaagtacctattgttaaaccgttataggcagaatggcagaattttctttgatgattatgttggcttgctgtgtgaagcttcgagcattgacagatttctttaaggaaaaagagaccagttgcaacaagggtctgggaatttcatattgtgacgatgttagcagggcactaatgggcatgtgaatgcttggaatttaaagcctgaaggggac

SEQ ID NO: 635214 - DNA, 1326 bp, Homo sapiens
  misc_feature (77)..(77): n is a, c, g, or t
  misc_feature (172)..(172): n is a, c, g, or t
gatgggaagaggggaaagcccaggtctacaggaggcctctgggtgaaggcagaggctcaagcatggggttcgcgagncgaggcttggtacgatttgtgggcctgaccctgtcgtttgttgcgtgtctggtcgtacgaggatatcatcaagtcgtgcgttcaccctgcgtccntgtctcttcgtgcctgtagtgtgtggcttcctctgcagtgctcgacaagggtgcgggagagcgaattcctttgtccatgatgtgggctgggagcctagcattttgttctcgttcgctcgacctaggaattatgcgttcacgtacaatcatcgaatggcgcgagatacgtcaatagacgaatggagtgtggtaggggggctacccatgtgagagtggcccgctgtagaagggtggggagccctcgtctcatgggcactatcgtggagtttctctcgtcgcaggctttaccgcgtagggtgcaccggaagtttagggcctgtctacacgcaaaggggtggatggcaacgcgtttcctgatgatgcactgcgagcattgctgctctcattgggcttgtccgcgggagcggtcagcccggagccttgcgtggcgttggagggcgcatgggccgttcggttccccccccgggtacggctttgggcgcggtgtttagcgccccggtttggctacctatgtcccatggggcacgcaattagtagttggcgaggcggctgaccattgtccttttggggggaattcttggggccccaagggtggtgggcagcgttgtctggaaattccccgttttctgggcgccacggatttggttccccccatcttgtggctcccggttgggaagccgccatggttcgatgtcgcccattgtttgagggtagaactccacaggccaaagggcacttctcgtgaatttggaccaagaaaagcaacctatcaaggggcaaagaaggcacccattaacgtacaaggcattgtatagcccataggtccttgggctcttggggaacgtgggtcccccccgtatgtatccccccccggaaagtacttgcgccccttgggggcggtaaccccaaggctttgggcaagggtgggcgcaacgaattggccaacaaaccacgaaaggggccgttaaagcatttggccccctcccaatgtgagtaaaggactttcctaggaattgggcaccttttggcctttgggcccccctttgggacccactatccgcccaacaaccagtggttgacaagacgaggggggacttccaccttggttcccaacacacaaggcagccacatgacaagggtttcctctgttccca

SEQ ID NO: 635215 - DNA, 213 bp, Homo sapiens
aagaattcggcacgaggcgtgatcttgctgggtcggcacagcctgtttcatcctgaagacacaggccaggtatttcaggtcagccacagcttccctcctcctcgcgtctcctcgttcggtctctcgctctcccacccgatgtcgctcgctatcctggatgattccccacctgttgaaaaacggaaccaagtaaaggcagcccagtttgcttga

SEQ ID NO: 635216 - DNA, 304 bp, Homo sapiens
  misc_feature (8)..(8): n is a, c, g, or t
  misc_feature (12)..(13): n is a, c, g, or t
  misc_feature (19)..(19): n is a, c, g, or t
  misc_feature (21)..(22): n is a, c, g, or t
  misc_feature (24)..(25): n is a, c, g, or t
  misc_feature (30)..(30): n is a, c, g, or t
  misc_feature (35)..(37): n is a, c, g, or t
  misc_feature (41)..(41): n is a, c, g, or t
  misc_feature (43)..(44): n is a, c, g, or t
  misc_feature (52)..(52): n is a, c, g, or t
  misc_feature (56)..(56): n is a, c, g, or t
  misc_feature (90)..(90): n is a, c, g, or t
  misc_feature (120)..(120): n is a, c, g, or t
  misc_feature (128)..(128): n is a, c, g, or t
  misc_feature (130)..(130): n is a, c, g, or t
gactctancggnnccctgngnncnngtgangcacnnngtgnannactgggcngtcnttaaaaagctaaggtaactataaatatattgtcnaagatttaaaatattaagtttaaaaaagcntgttaccnantaatgtgtatggccttatgttgtttttatttaaaagtttatagcgggtgaagtctggatggctaaaatattaagcctgttactcttgagaatgtaattccaacacctggtgttcttatattttaattccataatttcacttgtaggaatcccttctaaagaaataatacgacct

SEQ ID NO: 635217 - DNA, 146 bp, Homo sapiens
gtgaatcaggcgccggtagtgtttcctgtctggcttctaagtagagcaacccaagaagagcctttccgctggtcgggattgtatttcgtagacacaatttcgtcgtccccttccgtaagttgtactgaataataatacgtataaca

SEQ ID NO: 635218 - DNA, 959 bp, Homo sapiens
ggcctgtctagacctgtttctgcttggttcatcgttcttttgtcggtgattccaccctgaggccggccgtggtccccaagtcaaaatggtgcagagggttttctttgccggccgtgcccagacatttgggccgggttaagggcttatccagggccgtccgctgggtcatattgcctttgaccaaagggcaccatccctggggcgtgcaccgcccttccgcacgttccagattgactatgaccggcgctgttgggccgaccaaacgatttcttgggcttggtacatcggcggggaagctttaccatcgaagcaaggcccgagcccccccagtatcccacgggaactcaaggtgagcactggaggtccacagaaactctggttggttctggacaatggaggagggaactcttggcctacgcttattgggggcacctaacctggggcccaaccttccccggactgtaaggggcaggaccctctatccgggcctttagcgccttttcttggggcccaatcccgagtccgcatccgcctacctgggcggaaaggagtagcggagcccacaatccccttttctgcaccctgaaccgcctgtgtgtgcgccaccaacctgggggattacccggctcggccacggtgttctggccctgcccttgccccccctgcccactgatagcgctacctgctctaccacgtgaggccgctcgtgatacccaccacgactgtgctgaggtcttgccaccccccccctccccctctggggaggtggggaggcacctgctggcctagaccacgctctgaaaactggtgaggctgagcccctacccccaccccagctttcggaatccaccgcccccgagccacttggagggaggaagaaagggaccggcgttcaaggctatgacaatttgctaccccaaacaatttttccagtaaaaatagtaagaaatgctgttata

SEQ ID NO: 635219 - DNA, 123 bp, Homo sapiens
gaggatcctggaatcgtcgtggtggttagataaggtcatggcttgttatcatgagggagagattggaacactcgcaggtgtacgaagtcctcgtcgtcgtcgtgccggaattcgactggtcgt

SEQ ID NO: 635220 - DNA, 155 bp, Homo sapiens
  misc_feature (6)..(6): n is a, c, g, or t
acaggnagtgtggatatacttgctgttctgggggtgtacatgtgtgtgcacacagatgaccctgtacagtgattgcatgcgtgcaccagggagtgtggatatacttgcctgttctgggggtgtacatgtgtgtgcacaaagaatgaccctgtaca

SEQ ID NO: 635221 - DNA, 739 bp, Homo sapiens
tgggtggatggaaggtctcgctctggtcgcccaggctggttttggaactccggggctcaggtggatatatcccacctaagcctcctaaagtagtgtaggcctatatggcacttggagccatctataacccagttaaattttctcaaaccttttgggtgaagaagacgggggtctggctggtgtgttgcgcccaaggcgggggtctcaaatatatttccctggcgctaagtttccacaaaggcatcgggggtattacaagtgtgtgtggagcgccatacatggcctgggctctcttaaatttgtaacacaacgcattttttggaacccctttaactctttgttcgctctaaaagagacctcttattacgctagtgtagacacctatatcatctcatagtggttgtcgtcctctgtgccagaaaaacaaagagcaggttttctcgagtgtgttggaacccacatgtgtttgtgcgccgggctcttcaaggtgtgcccccatttttgtgggggcccacagtgttggagaaacagcttctcccatcttaaagggggattttttaagggtcacccgtgggcaattgggggagcgatttatataaactatcggggggagactagtcaacacttgagacctcataagggggggcgttatggagaggtctattagagggtctgcagagagtttatcagttgtttcgccctttctcaacaaaagtttttggaggaacgagttttgttg

SEQ ID NO: 635222 - DNA, 346 bp, Homo sapiens
gacccctgcaaccccagtttcccccacttcaggattttgggtcagaaggaaactatcccgacagctatgtgtactcctgcagacttctgggtttggccatggttcccgtcagcccccagacccccgacaagtgtctgaggggatgtggaacccagcccactcccaccaacttctgccctgcagctgcatggagggcgggttggacaggtgagccacagcccctgccttcaggcagctcacacagtgagggaagcagccctgcaaaggtggccgcagctggaaaggcgtgtgtgtgccgcagaggttcagacccagtccaggggagagggataggatgcccaaaaaa

SEQ ID NO: 635223 - DNA, 669 bp, Homo sapiens
ggccgcgcgcgagcgcagcggtgggaggctgggaccagccggttgaggccccaggcttggggtcaccactaattgtggctacgaggctctggaagctatgagcggaagcttcgaggcatgatggtcgactacaaggaagagggcggagcggtagacgggatgtattatgagaagagatcaatgaaggacccatgcccagttcctgcaggtacattggcctgagcttgcagaggtgcaccatggattcgtgcagtaggccgctggcccgctgtagagccactgttaataatgaatgccctaggcaggggggacaccgaacaacattgattgacgcgattcagatgtcctgtgccacaccatgtgaccagcatccccggactacaacacgccccgatctgcgtcaccgagcgatcgtccccaagaaacagggagtcgggaacgaactggaaggtggtaacgtactgaggctgctacgagagcgcctggatgcaggaagcgacttttgccggacatctacaggaggacgcagttgccatgtacgcagatctaggattgagtgagtatgtagcggagggacgtccaggagagcccagacgaaggatgacgacagaacgaaagcgtggcaggagagagacaggcttaccatacggttaatacactacgaggaac

SEQ ID NO: 635224 - DNA, 173 bp, Homo sapiens
ggtcagtgatgttcccaacactatgatttatattaatagttactgcatattatgaaacgtgagtcatcatgtaagtattccctgtcaaccattttatagcctgtgaatttcagatatttaggtgagtagaaaccttaagattaaatatatggttatttttaactaaaataatt

SEQ ID NO: 635225 - DNA, 270 bp, Homo sapiens
gcacccagtatagacctaactcagagctaaggcttggtgatattagccaattagactcagcttgaagtgtagagctggttagactgagttcatcctctaaagtgcacctgatcacatgcagccttggcgatgtgctgctgagttgaaagttcgtgccaggaaatttgacgtgggttttatttttcacctgctgaaagaacaggatcctacagcaattaaaaaacaatcacataacaactatagctacagtgtgctgttaggtctacctgg

SEQ ID NO: 635226 - DNA, 181 bp, Homo sapiens
agtatgcactaggtcctcgtgtttcacccacagagctgtctgtgggtgcttctcaatctcagggcaaaacgccctggagaatattccagccagcagagaattttgacttgcagtaggattttggtttgattttcctacgatctgggtggatgccttgcttgtgacagatgcagttcctatt

SEQ ID NO: 635227 - DNA, 804 bp, Homo sapiens
ggcagacatggcgacattgacagtggtccagccgcttactctggacagagatgttgcaagagcaatcgaactactggaaaagctacaagaatctggagaagtaccagtgcacaagctccagtctctcaaaaaggtgcttcagagtgagttttgtacagcaatccgagaggtgtatcaatacatgcatgaaacgattactgttaatggctgccctgaattccgtgcgagggccacagcaaaggcaacagttgcagcttttgcagccagcgaaggccactcccaccctcgggtagttgaactgccaaagactgatgaaggcctgggttttaatgtgatgggagggaaggaacagaattccccgatttacatctcccgcatcatccctggaggggtggctgaaagacatggaggcctcaaaagaggggaccagctgctatcagtgaacggagtgagtgtggaaggggagcaccatgagaaagctgtggaacttctcaaggctgctaaggacagtgtgaagctggtggtcagatacaccccaaaagtcctggaagagatggaggctcgtttcgagaagctgcggacagctcggcgtcgacagcagcagcagttgctcattcagcagcagcaacagcagcagcaacaacaaccagaataaaaaccacatgtcataaggcgctcgaagggaaagctagcaggtcaatcatccgccagtcacaatttgggaaacccgggctccggaatcccagcccgaaaaggggaagaaacccccgtatgaacccggtcaaagtggggaccctggggttc

SEQ ID NO: 635228 - DNA, 180 bp, Homo sapiens
cctaaaaactttttaatttggtttaatttggaatgatgagcctcctggccccccttcccccttttttttcccccaaattgagatgtatgaaggcttttggtctcccttggaattggttgaagcaaccaaggccttacctgtacactgacttgagaccagttgaataaaagtgcacacctt

SEQ ID NO: 635229 - DNA, 107 bp, Homo sapiens
tggaattcgtcaggctgctggcgcctctgcaagggcagaacactagcctgaccgtgggcggggccttgcggtatccgcccccaataaaagcggttccaaccttaaaa

SEQ ID NO: 635230 - DNA, 134 bp, Homo sapiens
ccactttggcgaggcagtctcgaactgacctcgtgatccacctgcctcagcctcccaaaatgctgggattacaggcttgagccactgctcccggctgatttttgtattagtggagactgcctcgccaaatggtg

SEQ ID NO: 635231 - DNA, 311 bp, Homo sapiens
tgcacagtgcgtcggccatgactgtgtatgccctggtgggtggtgtcttacttcctcatcaccggaggaataatctatgatgttattgttgaacccccaagtgtcggttctatgactgatgaacatgggcatcagaggccagtagctttcttggactacagagtaaatggacaatatattatggaaggacttgcatccagcttcctatttacaatgggaggtttaggtttcataatcctggaccgatcgaatgcaccaaatatcccaaaactcaatagattccttcttctgttctacggcttcgtcggtca

SEQ ID NO: 635232 - DNA, 365 bp, Homo sapiens
tttggtccattatcagattgtctctgtaaatatattcctctaatctgtggcttttcttttcttttcttttctttctttttttagatggagtctcactctgttgcccaggctggagtgccatggtgcgatctcagcttgctgcagcctccgcctcccgggttcaagcgattctcctgcctcagcctcccaagtagctgggattacaggcacccaccaccatgtccagctaatttttgtatttttagtagagatggggttatgccatgttggccaggctggtctccaacccctgacaacaggtgattcgcctgtcttggcctcccaaagtgctgggattacagatgtcggccactgcacccagccct

SEQ ID NO: 635233 - DNA, 121 bp, Homo sapiens
cccagcctcagactgcaactctcagcaccacacatcatgccaggggtcggcttacccagaacttggtaaacccaggtctgccacctcttccttccatgcctacccgaaacttacctagcat

SEQ ID NO: 635234 - DNA, 86 bp, Homo sapiens
gtgactacttctacacatgaaccataatgctgcttttgtgctgtctgctctgatatacgttgaacaatgtagcagcactgtcattt

SEQ ID NO: 635235 - DNA, 517 bp, Homo sapiens
  misc_feature (157)..(157): n is a, c, g, or t
  misc_feature (170)..(170): n is a, c, g, or t
  misc_feature (507)..(508): n is a, c, g, or t
atagcagctgaaggtcccacgtgctcctcaaaagaaattagctcatctccagataatcatcagagtccagctaagcggctaatagaacagaacaggacgtgatagcaaacagcccttcaaacccacaggcctgtacatcaaaggagtggtcaacgcntgagcaccgtcancagagcagctgctttgcctctgggaacatgcgggagataggaggcttcctccttaaccctactgcagaggacttctcctcttttaccagcagcctcctgcagtaccctcccgggtaatggagcaggggtcgcttcccttcccatgagacctttgttcaggcactcaagtggaaggttgagcaataagccaactttcttgctcagaggctccgcagacttcctgtggttgtttgttccactctgtggtcagtcaagcaagctcaccgcctgattctcttattgttgtactaagcacaagctattatacttatgattcataatcatatagtaaagcacnnttctaagca

SEQ ID NO: 635236 - DNA, 983 bp, Homo sapiens
  misc_feature (7)..(7): n is a, c, g, or t
  misc_feature (64)..(64): n is a, c, g, or t
  misc_feature (84)..(84): n is a, c, g, or t
  misc_feature (88)..(88): n is a, c, g, or t
  misc_feature (123)..(123): n is a, c, g, or t
  misc_feature (135)..(136): n is a, c, g, or t
  misc_feature (145)..(145): n is a, c, g, or t
  misc_feature (185)..(185): n is a, c, g, or t
  misc_feature (211)..(211): n is a, c, g, or t
  misc_feature (309)..(309): n is a, c, g, or t
  misc_feature (375)..(375): n is a, c, g, or t
  misc_feature (446)..(446): n is a, c, g, or t
  misc_feature (450)..(450): n is a, c, g, or t
  misc_feature (468)..(468): n is a, c, g, or t
  misc_feature (470)..(470): n is a, c, g, or t
  misc_feature (477)..(477): n is a, c, g, or t
  misc_feature (481)..(485): n is a, c, g, or t
  misc_feature (487)..(487): n is a, c, g, or t
  misc_feature (493)..(493): n is a, c, g, or t
  misc_feature (577)..(577): n is a, c, g, or t
  misc_feature (715)..(715): n is a, c, g, or t
  misc_feature (805)..(806): n is a, c, g, or t
  misc_feature (821)..(821): n is a, c, g, or t
  misc_feature (897)..(897): n is a, c, g, or t
  misc_feature (921)..(921): n is a, c, g, or t
  misc_feature (976)..(976): n is a, c, g, or t
gggaggngtgagggagagaggacagagctggacgtctcctcctatttctccctccccaagtcantctgaggggaagaacactgntgcntgctccctgggcctgcccgcatacaaggttagagnctgggtctgggnnatccttagnctgaaatttgttgacatggggcaggagagcaggagggaanattgagggttttgactcttcgggctntaaaaggattactcaggatctggagttccgtatgaaacaaaggagctgaaagaatttgattgccattggctaaaaatatagaggatttgagccacaantggcccacatttgaagaatgaggaacaagaaatttagtggggatataatataaatgtatgggagtnagaaagatgcaaaaaacaaggctagctcctcaaacctcctcctctttcttcctcatctccagcttataganaatntggtagccatcatcccangnatagagntggnnnnntngggggnatagcggaggctggcatgggcaccatatctgcggggaaaataagggagtgctgcccgttcaggggtcagggtgccgctggcatnaaaggagcactggatgcgggcccgactggcaggacgggtgttatagacgacatagagggtcccacagatgacaaaggcagcctcagcattctctctggacatggtgttcccactgctgctctgtgtcagtgtctgtgnatctaacttggccagacacaagtgcctgtcatcctcccgggtggcatagacagcccaaagaccttcctcatcagctgccaggtcgatgtnngtgtctgctgtcaanccgtagggggggatcagccctctgctgggaatactgagctgtccacactgtccggtttgcaggtggatttgatagngcaagtgtctcatctcacactccncaggcttcaggaggctcgagcaaataagaagcacataacagcggctgtgctaccngggaggg

SEQ ID NO: 635237 - DNA, 744 bp, Homo sapiens
acccactccaactccaactccaactccaaccgttggaaactacagcattagaaatggcaatactacctgtctgctggctaccatggggctgcagctgaacatcactgaggagaaggtgcctttcatttttaacatcaaccctgccacaaccaacttcaccggcagctgtcaacctcaaagtgctcaacttaggctgaacaacagccaaattaagtatcttgactttatctttgctgtgaaaaatgaaaaacggttctatctgaaggaagtgaatgtctacatgtatttggctaatggctcagctttcaacatttccaacaagaaccttagcttctgggatgcccctctgggaagttcttatatgtgcaacaaagagcaggtgctttctgtgtctagagcgtttcagatcaacacctttaacctaaaggtgcaaccttttaatgtgacaaaaggacagtattctacagctgaggaatgtgctgctgactctgacctcaactttcttattcctgttgcagtgggtgtggccttgggcttccttataattgctgtgtttatatcttacatgattggaagacggaaaagtcgtactggttatcagtctgtctaatcaagccagtctcgtgcttccattggccaaaagccaggaattgctgtgcgataaaatcggatccacagactgacttcagtgagttgcaagctggcttgggctgaagtagaactttccattgccttaggaccagt

SEQ ID NO: 635238 - DNA, 788 bp, Homo sapiens
acccactccaactccaactccaactccaaccgttggaaactacagcattagaaatggcaatactacctgtctgctggctaccatggggctgcagctgaacatcactgaggagaaggtgcctttcatttttaacatcaaccctgccacaaccaacttcaccggcagctgtcaacctcaaagtgctcaacttaggctgaacaacagccaaattaagtatcttgactttatctttgctgtgaaaaatgaaaaacggttctatctgaaggaagtgaatgtctacatgtatttggctaatggctcagctttcaacatttccaacaagaaccttagcttctgggatgcccctctgggaagttcttatatgtgcaacaaagagcaggtgctttctgtgtctagagcgtttcagatcaacacctttaacctaaaggtgcaaccttttaatgtgacaaaaggacagtattctacagctcaagactgcagtgcagatgaagacaacttccttgtgcccatagcggtgggagcagctctgggaggagtacttattctagtgttgctggcttattttattggtctcaagcgccatcatactggatatgagcaattttagtaactgcaatctgattgattatattacagaatacatacaaaaaaacaaagttgtcttacctgtcagtgtatgaagcactttgctccttaagacagacaccttggaactttcattcggaaattagtccccgaagtttgagataagtctttttttgaatttttttttctctgatctgcttaaa

SEQ ID NO: 635239 - DNA, 936 bp, Homo sapiens
ggccgccgctgtctgagtcgactctgcgccggccggcgcgatggaggccgccgcccagattcttcgtctatagcccggacgtggtctacggaccctgaggccatcgaggcgcaatacgagtgccggacgacgcgcgtctagccgcgagggtggcgttctctaggtgcaccccatgtccacgcgcttcaccttccggagcggccggcaggtgccccggtctcggggtcatgcttgttcggcttggggctgggaacaacggctccacactcaccgccgcggtgctggccaatcgactgcgtttgtcctgagcaccactgcagtcagcgggcgcaaggaggccaaatactagggtctcgatggactcaggcggagcagccgtgagcctgggcctggacgccgagggccaggtaggtgttcgtacccttcagcggctggtgctggccatggtggcgcccaacgcactcgtgttcgatggctgggacatctcgtcgctgaacctggccgaggcgatgcggcgcgcgaaggtgctggactgggggctgcaggagcaactgtggccgcacattggaggccctgcggccccgggccttcatggtgtacatccccgaattcatcgcgggcaaccagagcgcagcgctggcggacaaacctcatccagggctccgagttgccgcacgcagcctggcagcaagaatccggcagtgaacatcccgagaacttccggggttcataagccgcagggggcctggacacacaagtcacatacagtggccggtagacacgggcgaaaacaaccgggaagcgcacatacatggcagcaaagagcgaaattcccaggggcactacaaccggcacactaggcagaaagaaacacttggcttgccagacaacccaatggaagaccacggacacgggacaggtgtgtaaagcccttga

SEQ ID NO: 635240 - DNA, 231 bp, Homo sapiens
agctaaaagcagcacacccgtctcatgtagcagcaatcgatgggaaagcattaatcaggtagaggagacaacaactatcgagactgggtgatagctggttgtcccaagataaggaatcacagttcacgtttaaatttgccacagaaccctctaaatccccttgtaaatttaactgttagtccaaagaggaccagctctttggacactcggaaaaaaccttgtagagagagt

SEQ ID NO: 635241 - DNA, 665 bp, Homo sapiens
agcggaatcgcaggctacgggagccagcagtggcaacacgctcgggtccccttccacactgtggaagctttgttatttcactctttgggtccacactgcttttatgagctgtaacactcaccgcaaaagtctgcagcttcactcctgaagccaggagaccacgagcccaccgggaggaacgaacaactccagacgcgccaccttaagagctgcaacactcgccgcgagggtccgcggcttcattcttgaagtcagtgagaccaagaacccaccaattccggacgcagcaccagtgatggaggctgacatgatgtaacagtcagaaaagaagacttgacaatcaaatgaaacatatgaagatgctaggttgctggctttgaagatggaagaaaggaccgcaaggcaaggctgcaggcaacccctagaaactgaaaaatgaaaggcagctgtttgtcgactttcacctccagaaggaacgcagcctccctgacacagagtagaggatttctgacctctagaactgtaaaataataaatttgtcggtttagaccactaaatttgtactatttttctaagcagtaattagagactggtaaaaattgtagtacttgaacaatgtgatgctgctataacaaaataaaaatttgaaattggctttaggattg

SEQ ID NO: 635242 - DNA, 246 bp, Homo sapiens
cattgttccttcaccgtaaggatcatctcactgtggcaggagagctcatgtatgggttactcctgaccatgagctctgtagcgtccggcggcgcatcttaggtgcataagtacacttggatctgctcactgaccagagaatctacatctaaacccttaagtacagcattactctctgcgtatgtaagcatgtgcagcaaaaattcagcactcttcatgggacaccgaccttgatgtccagccccat

SEQ ID NO: 635243 - DNA, 132 bp, Homo sapiens
ttcaatgcagaattaccacatgtcacaaggttatcgtgtacaacttcaacatgactcagtgacggatcacacaattatacagtgcatggaatctataaataataaacagaaacacaagatacgtggaacaat

SEQ ID NO: 635244 - DNA, 222 bp, Homo sapiens
  misc_feature (25)..(25): n is a, c, g, or t
  misc_feature (133)..(133): n is a, c, g, or t
  misc_feature (151)..(151): n is a, c, g, or t
  misc_feature (183)..(183): n is a, c, g, or t
  misc_feature (210)..(210): n is a, c, g, or t
ggagcaaatcatatccttctccacnttgtgtctatatatgcgcccggacagaggttttgggcagaggggaaagcagcttcccaggccttactcaaggcctcaggtccatgggttgggcagccagttctgggcnccttcttcaggatccttncattccatcctcatcctcttccttcacagcantttacttggagctctttgtgacacacncatgtcagtcat

SEQ ID NO: 635245 - DNA, 620 bp, Homo sapiens
  misc_feature (43)..(43): n is a, c, g, or t
  misc_feature (72)..(72): n is a, c, g, or t
  misc_feature (114)..(114): n is a, c, g, or t
  misc_feature (125)..(125): n is a, c, g, or t
  misc_feature (127)..(127): n is a, c, g, or t
  misc_feature (195)..(195): n is a, c, g, or t
  misc_feature (200)..(200): n is a, c, g, or t
  misc_feature (204)..(205): n is a, c, g, or t
  misc_feature (243)..(243): n is a, c, g, or t
  misc_feature (245)..(245): n is a, c, g, or t
  misc_feature (251)..(251): n is a, c, g, or t
  misc_feature (258)..(258): n is a, c, g, or t
  misc_feature (267)..(267): n is a, c, g, or t
  misc_feature (288)..(288): n is a, c, g, or t
  misc_feature (291)..(291): n is a, c, g, or t
  misc_feature (293)..(293): n is a, c, g, or t
  misc_feature (297)..(297): n is a, c, g, or t
  misc_feature (311)..(312): n is a, c, g, or t
  misc_feature (315)..(315): n is a, c, g, or t
  misc_feature (317)..(317): n is a, c, g, or t
  misc_feature (321)..(321): n is a, c, g, or t
  misc_feature (325)..(325): n is a, c, g, or t
  misc_feature (331)..(331): n is a, c, g, or t
  misc_feature (345)..(345): n is a, c, g, or t
  misc_feature (349)..(349): n is a, c, g, or t
  misc_feature (353)..(354): n is a, c, g, or t
  misc_feature (365)..(365): n is a, c, g, or t
  misc_feature (367)..(367): n is a, c, g, or t
  misc_feature (369)..(369): n is a, c, g, or t
  misc_feature (376)..(376): n is a, c, g, or t
  misc_feature (380)..(380): n is a, c, g, or t
  misc_feature (395)..(395): n is a, c, g, or t
  misc_feature (397)..(397): n is a, c, g, or t
  misc_feature (404)..(404): n is a, c, g, or t
  misc_feature (410)..(410): n is a, c, g, or t
  misc_feature (413)..(413): n is a, c, g, or t
  misc_feature (416)..(416): n is a, c, g, or t
  misc_feature (420)..(420): n is a, c, g, or t
  misc_feature (423)..(423): n is a, c, g, or t
  misc_feature (440)..(440): n is a, c, g, or t
  misc_feature (444)..(445): n is a, c, g, or t
  misc_feature (454)..(455): n is a, c, g, or t
  misc_feature (462)..(462): n is a, c, g, or t
  misc_feature (464)..(464): n is a, c, g, or t
  misc_feature (467)..(467): n is a, c, g, or t
  misc_feature (473)..(473): n is a, c, g, or t
  misc_feature (486)..(486): n is a, c, g, or t
  misc_feature (489)..(489): n is a, c, g, or t
  misc_feature (491)..(491): n is a, c, g, or t
  misc_feature (505)..(505): n is a, c, g, or t
  misc_feature (509)..(509): n is a, c, g, or t
  misc_feature (511)..(511): n is a, c, g, or t
  misc_feature (513)..(513): n is a, c, g, or t
  misc_feature (517)..(517): n is a, c, g, or t
  misc_feature (521)..(522): n is a, c, g, or t
  misc_feature (528)..(528): n is a, c, g, or t
  misc_feature (543)..(543): n is a, c, g, or t
ggctaaaaaacatcctttattgtacataaacaggggattctgnaaatgatcaagtaaatggaattttgaacnggtaaaggggaaacaagaattaaggtttccctggggaatagngcaaaaaaggngngccccacccatagggttatttacaataggtcctccggggaaaggaccccaaggggttaaccacaaatntttgnccannccaattttttgatcaaactttacctttagcaaggggtntnaacaanaaagttntatttaaanaattcgctcgggttttttttnagncntgangaaataatgggaannttntnaggnacanaaggtnatccctggtcaccncccntggnnaggctgggggnantntttggantaanccccacggggggggntnttttctngatagnttnatnttcnagnaaaatatttttttcccngtgnnaaagcccanntggtccnanatngggccnccaagaaccaggncantngggaaaaatgggcnttgnantngggnaccnntaaaanaaaaggccccacacntggcccttttaaaatttttcatagccccccgggatatatgggcgaaattcccggtacccaaaaaatttgggtgtttg

SEQ ID NO: 635246 - DNA, 619 bp, Homo sapiens
  misc_feature (43)..(43): n is a, c, g, or t
  misc_feature (72)..(72): n is a, c, g, or t
  misc_feature (114)..(114): n is a, c, g, or t
  misc_feature (125)..(125): n is a, c, g, or t
  misc_feature (127)..(127): n is a, c, g, or t
  misc_feature (195)..(195): n is a, c, g, or t
  misc_feature (200)..(200): n is a, c, g, or t
  misc_feature (204)..(205): n is a, c, g, or t
  misc_feature (243)..(243): n is a, c, g, or t
  misc_feature (245)..(245): n is a, c, g, or t
  misc_feature (251)..(251): n is a, c, g, or t
  misc_feature (258)..(258): n is a, c, g, or t
  misc_feature (267)..(267): n is a, c, g, or t
  misc_feature (288)..(288): n is a, c, g, or t
  misc_feature (291)..(291): n is a, c, g, or t
  misc_feature (293)..(293): n is a, c, g, or t
  misc_feature (297)..(297): n is a, c, g, or t
  misc_feature (311)..(312): n is a, c, g, or t
  misc_feature (315)..(315): n is a, c, g, or t
  misc_feature (317)..(317): n is a, c, g, or t
  misc_feature (321)..(321): n is a, c, g, or t
  misc_feature (325)..(325): n is a, c, g, or t
  misc_feature (331)..(331): n is a, c, g, or t
  misc_feature (345)..(345): n is a, c, g, or t
  misc_feature (349)..(349): n is a, c, g, or t
  misc_feature (353)..(354): n is a, c, g, or t
  misc_feature (365)..(365): n is a, c, g, or t
  misc_feature (367)..(367): n is a, c, g, or t
  misc_feature (369)..(369): n is a, c, g, or t
  misc_feature (376)..(376): n is a, c, g, or t
  misc_feature (380)..(380): n is a, c, g, or t
  misc_feature (395)..(395): n is a, c, g, or t
  misc_feature (397)..(397): n is a, c, g, or t
  misc_feature (404)..(404): n is a, c, g, or t
  misc_feature (410)..(410): n is a, c, g, or t
  misc_feature (413)..(413): n is a, c, g, or t
  misc_feature (416)..(416): n is a, c, g, or t
  misc_feature (420)..(420): n is a, c, g, or t
  misc_feature (423)..(423): n is a, c, g, or t
  misc_feature (440)..(440): n is a, c, g, or t
  misc_feature (444)..(445): n is a, c, g, or t
  misc_feature (454)..(455): n is a, c, g, or t
  misc_feature (462)..(462): n is a, c, g, or t
  misc_feature (464)..(464): n is a, c, g, or t
  misc_feature (467)..(467): n is a, c, g, or t
  misc_feature (473)..(473): n is a, c, g, or t
  misc_feature (486)..(486): n is a, c, g, or t
  misc_feature (489)..(489): n is a, c, g, or t
  misc_feature (491)..(491): n is a, c, g, or t
  misc_feature (505)..(505): n is a, c, g, or t
  misc_feature (509)..(509): n is a, c, g, or t
  misc_feature (511)..(511): n is a, c, g, or t
  misc_feature (513)..(513): n is a, c, g, or t
  misc_feature (517)..(517): n is a, c, g, or t
  misc_feature (521)..(522): n is a, c, g, or t
  misc_feature (528)..(528): n is a, c, g, or t
  misc_feature (543)..(543): n is a, c, g, or t
ggctaaaaaacatcctttattgtacataaacaggggattctgnaaatgatcaagtaaatggaattttgaacnggtaaaggggaaacaagaattaaggtttccctggggaatagngcaaaaaaggngngccccacccatagggttatttacaataggtcctccggggaaaggaccccaaggggttaaccacaaatntttgnccannccaattttttgatcaaactttacctttagcaaggggtntnaacaanaaagttntatttaaanaattcgctcgggttttttttnagncntgangaaataatgggaannttntnaggnacanaaggtnatccctggtcaccncccntggnnaggctgggggnantntttggantaanccccacggggggggntnttttctngatagnttnatnttcnagnaaaatatttttttcccngtgnnaaagcccanntggtccnanatngggccnccaagaaccaggncantngggaaaaatgggcnttgnantngggnaccnntaaaanaaaaggccccacacntggccctttacagatattcatgccccggcgcattaaaggccgattcccgggaccacaacaaaggggggttttcgag

SEQ ID NO: 635247 - DNA, 276 bp, Homo sapiens
aaggattgttattttgaaagattgcctgggctgggtgtggcggctcatgcctatagtcccagcactttgggaggctgaggtgggtaggttgcttgagcccagaagtttgagaccagcgctggcaacatggggagaccctgtcttgacaaaaaataaaaataaaaaaattagccaggcatggtggctcatgcctgtggtcccagctactcgggaggcagaggtgggaggatcactggagccccactgtgctccatcctgggtgagaggcactctctc

SEQ ID NO: 635248 - DNA, 417 bp, Homo sapiens
  misc_feature (85)..(85): n is a, c, g, or t
aaacttcccggggcctaccttcaaaatacaggcaatcgccacatgatattttctgtcagcaacagatacgatagtggtcccatanagtaacacctatttttactataccttttctatatttagatatgtttagatacacaaatacttcctattgtattgtctatagtattcagtagagtaaaatgccaggttgttcgtggcctgtaaacaataggctataccatatagcctaggtatatattaagttctaccatctagatttatgtaaatgcactcgatgatgctgaaacaacaatgaaatcacctaacaataaatttctcagagtgtaaatgacataccactgtatatccagagaagcccacttcttactacttccactgccaaaggccaacacctggttcaagctatctgtgtct

SEQ ID NO: 635249 - DNA, 438 bp, Homo sapiens
  misc_feature (214)..(214): n is a, c, g, or t
  misc_feature (389)..(389): n is a, c, g, or t
attcgcggccgcgtcgacgaaactggcaagctggaagctagtttcttctacaagccccaagaagactgattttttcgtctataaaattgagacagttttactgctttgctcatctttatagggatgttatgaggatcacataagatataatgtatgtaaaggctgggagtgatgctcatgcctgtggtcctggcactttgggaggttgaggcgngcggatcgcctgaggtcgggagttcgagccagtctggccaacatggtgaaaccccgtctctactaaaaatacaaacattagccaggtgtggtggcacatgcttgtaatcccagctactcgggaggctgaggcaggagaatcacttgaacccggtgggcggaggttgcagtgagtnaagatggcaccactgcactccagcttgggaaacagagcgggactccatc

SEQ ID NO: 635250 - DNA, 127 bp, Homo sapiens
gattctctgaagtagcaggtgatgtaggtatatactgctcgcactactgattttggctctcatttcactcttcagtgttcctgttatttatgaacggcatcaggcaccagatagatcataaatctag

SEQ ID NO: 635251 - DNA, 469 bp, Homo sapiens
tcgtgttggccagaggttgtcacaggataacatgtagcaaggtctctgtgtcataaatagtttagaggaaaggtgctgcgctgtgatgtgcacgtaggccagatttatgtctgactttacacaaacatctcagtgcagtaaagagcggtattgccgccagcttgtctcacctccagccataaggcagttttctcgtatcccagtaaatagaatgtacaatcgggtcttacaccgagacattccattcccagggaggagcaggagatagatgctttcctcctatctcaactgccaagaggccttcctctttcactaatcctcctcagcacagaccctttacgggtgtagggctgggggatggtcaggtttttcccttgtcacgaggccatatctcaagctgtctcaatcgggggaaaccttggacaacaaccaggctttcttgggcagaggtccctacggccttccgcaa

SEQ ID NO: 635252 - DNA, 480 bp, Homo sapiens
  misc_feature (184)..(184): n is a, c, g, or t
gcaaatagtttcttcctttccatatttcaaaagtacttgggagatgaggtgggaggaatcacgagcccgagacggaggttgcagggagctgaaatcgcaccactgcactgcagcctgggtggcagagcgagaccctatctcaaaaaacaaacaaaaaaaccccatgaatttactaactgaattntcttactgactcaaaggcatgtacagagtaataaaaggggggtgggatagcgcgagtgtgtacactacagtttttatctgcttcatcatggaaggaaaaaattaacttgcttcagaatgctgcctgccaactctagatcaggaagacatcttaagaaaatgatagcaagaaaaatccaagactgggcgcagtggctcactcctgtaatcccagcactatgggaagccaaggcaggaggatcactggagcccagcagtttgagaccagccaggacaatagtcaaaaccctatctctt

SEQ ID NO: 635253 - DNA, 1134 bp, Homo sapiens
ggtgactttagagaatgtacattggccgggtgcggtggctcacgcctgtaatcccagcactttgggaggccgaggcgggcggatcatgaggtcaggagattgagaccatctcctggctaacacggtgaaaccccgtctctactaaaaatacaaaaaaaaaaaaaatttagcccaggcgtgggtgggcggtgtggcctggtagtcccaagataactcaggcaggctgaggcaggagaatgggcatggaacctggggcaggcagacgctggcaagtggagccacagatcggcgccattggcaactccgagcgcggggcaacgagaccggaagaactcccgcgcctcgaaacacaaaaaaaacaggaggcaagaacatggcgtacacttgcacagggcgaaccaacttgggcgcctcccagaaaagagaagagcgcccagaggcaacacggggccccttggggacgccccctaataggggggagaacccactggctggcgagcggtggtgaaagacacagcagcgcaagagaatcccccctttgggcgcccgcgaagggtgtcaacccgggggggggataaccccctgtggaaacagcgggtcgatggaggaccacacacacaacccccgtggtaaacggcggagcagaaaggggggacactccggggacatcaccagttacacagcgcgaaaaagcactaaaaaaagcagagcacgcggggcaaaaacgcagagcgcgagggttatgcctagaaaatacactcccaaagaagttggggtcaaacggacccccggggaggggctacaaccccgcccaacatgaattaggggtagttagggagcacccccccgggggcaaggcgaacgaagacaatggggggacaacttggggggtcacacacaaattgttggggccaccacgtgtgggtgagacgacaacagtggtgtgtctcccttgttaatataagcaccttcaacgggggggtagtgggccgcggataaacgcagaatctatcggaggaggagcacttgttccagtagccgcagttgtgtccgccgacgttgtagatcgttcccgattgtaaacagattatgtcaccgcctgtgcggggtaaggacacctggggtgtggccacc

SEQ ID NO: 635254 - DNA, 358 bp, Homo sapiens
ctatgagatgttaggctgtattttaggtgcagagacagacctctaggtgtgtcagttcaacatggcaacattggagactcccatagtatatagtgggggtgccaaggctcaaaggcaggctgagaacatagtggcccaagtccgaaattggggtggctggtcccagagcggtatgaaaagctcaggactggaagtcgcctccacaatggggtaggcgtggctacaatatgtgaactgcgtttatctagggcagagtaggaggaacggtgaggttgtcaccactccccagctccgagcacttcggggacgtcctggggcttacccaggcgctcggagcacagctgacagtcgtgaacgc

SEQ ID NO: 635255 - DNA, 384 bp, Homo sapiens
  misc_feature (2)..(2): n is a, c, g, or t
  misc_feature (6)..(6): n is a, c, g, or t
  misc_feature (297)..(297): n is a, c, g, or t
gnctgnccagtcatgggtcacataacgatggggatacattctgagaaatgtggtgttaggtggtttcatcactgtgtgaacctcagtgttcagacaaatccagatggtatagcctactacacacatgggctctatggtatagtctattgctcttaggctacaaacctgtatagcatgtactatagtactgaatactgtagggcagttataacacaaaggtaagtatttgtgcatctaaacatagggaaaggtacagtaaaaatacaggcacaaaaggataaaaaaatgggtatgccntttttatggccttaggctcctgcttttcgagtgagtccagtgagtgagtgggtgagttaatgggggaggggcttggggccattccgg

SEQ ID NO: 635256 - DNA, 362 bp, Homo sapiens
cgatcggccggtcccctagtttagaagttccaatagcattcattatctaacataacatagaattctagttgtacatacaatgtaataaactatgacaccagctgttaaggagaaagtcgtgcatgtaagtgcatatatattaccgtaaggccaagaggacaagcacgggcgagctcccgttgggatgtaggtaacatgcatgcagctgcctcttgatctaggacgagtaatgacacattgagtgagatcatcatatgggaaatacacaagatctaggtgagcagtatcccgtcgtcgaaagctgtctgtaagagccctcagttagacgcaggaggcgctgtcattcgtcgaaggtgctctta

SEQ ID NO: 635257 - DNA, 110 bp, Homo sapiens
ccaggaaaggataattggaagtttttttggcccttcccttatgggccttttttcattggggattttaatctgtatcctttccctgtaataaactggaactatgggggcca

SEQ ID NO: 635258 - DNA, 183 bp, Homo sapiens
  misc_feature (47)..(47): n is a, c, g, or t
  misc_feature (68)..(68): n is a, c, g, or t
  misc_feature (108)..(108): n is a, c, g, or t
  misc_feature (167)..(167): n is a, c, g, or t
  misc_feature (172)..(172): n is a, c, g, or t
caatgcccaatctgagtgtatacacatcttaggaaaaataatctaangtaacttttgagggtgagagnggaaataagagatcacatttattcaagactgatccctatnaggaaggagaggcccaggcacagataccacaaaagagcacagtacccagctgtcctggnattgnttgagtgtaag

SEQ ID NO: 635259 - DNA, 450 bp, Homo sapiens
  misc_feature (267)..(267): n is a, c, g, or t
cgttgcacgacctcaccgaacagcggctgcacggcgttgacgaagttctcggcgtagtcgcccaccggcggtctggccttcgcggacgagtgttagaccaaccggtattcgcgtagatcgaccggcatcagcagaacaacggccggtactttgcgctgtagcccaatgcatccggattacgcttggcgaacactttggcggggttgccgaccacgtcagcgggccacgtccttgaccacgagcgcctgcggcggacgacggcgctcngtatcagggcgggcacaccatggcccggctcgcgatccagacgtatcctcgatcacggtcgggatcgggatcggcaggaagtccgggtggttgatgtcgtgcccaccgccgagcaggtggacgtcgctggcgatggtcacgttgtcgccgatccacaggccggcgcgcgcgtcgagcaggcag

SEQ ID NO: 635260 - DNA, 299 bp, Homo sapiens
cccactcaggcttttttcaaagaccaaaaggtccaggtgcaagggaaaaaaaaagggcatggccaaaaggcaacccccccaaaaggcagcttaacggtacttggaggtcagcacggggctcacaaaggcaaggaatttgtccaaaaaggcatgccccgggggggtgaaatcggcaggggggtggctagccaaggtcaccagcaggcaggggctcaggaccttgaagttgacgggatccacccccaccttgtgggcatgcaggtcgctcaaagcaaacaaggcaccgggcaggtcattga

SEQ ID NO: 635261 - DNA, 711 bp, Homo sapiens
gaaggaatgaaaggaaccagggggaaaaaaagggcccaatgctgagatttctgagaatggatttggcaagtctgtccccacagttcaggttcaaaagaggcaatgttgtgagatttattgaaaacgaagatggtgacaccacgattggtcaaagatgtgctttggttatttgcgaccaactgtggtgaacccagattactgggtaaaatcccgaccagtaccaccatttattaaagtgacaaagattttataagggaacccaatataataacccgtggctgtgaaaagccagaagaaaggcttgttttggtctgtttttcttttttagggaaacgctgccttaaatgttaatcttgtaaaaagtatgtatttgggattttcttcggtgttaataggatattatgactccaaatataaatttttttcacaatttggagtttaagatatagctgtagaggtggttttaattcccttagatgtctcataaaatgagactttttataatggtaatgtataataaaatctggaaccagattattttccactttgaaatttttgtatagtttaaaaaggcttccgtattctttgttggtattgtgcccctgcagaactttagtgcagagtttatatttagctaactgttatgttaattaagaaatgcataaatcttctattcttaatatttgtaattctaaataaattgatctatga

SEQ ID NO: 635262 - DNA, 376 bp, Homo sapiens
  misc_feature (1)..(1): n is a, c, g, or t
nctaggggaccgcatcatgcgtagttaggttgtctgggcgagggcagaacccaaggactactgcactcgggaatctaacgcgcactgtggttcttatgtgcacagcacatatggcaataagtgcgccttatgtgaggcgcatagggaaaagtgagtggaaagattagacctaaagcatccctggaaaatgctctgttaaagccaatgtttcttggtgacttgccagcttttgcagccttctttactcacttgtgcttatactttagctggtggattcctttaattcataaagacatacctactctgcctgggtcttgaggagttcaatgtatgtctatttctcttgatacacttgaccataaagtacattctagac

SEQ ID NO: 635263 - DNA, 115 bp, Homo sapiens
tgattggccgactctccgcgcccgtaccgtgagtgccatgcggggccacattgcgagtgctggctctctggcctggaggaacttctcctcgccacgttgttggaactgacacaac

SEQ ID NO: 635264 - DNA, 309 bp, Homo sapiens
taagcttctcaagtgtgggattacaggtgtgagccactacgccagcgaactattttttttcttaataagtttatcgagacggagtcttgctctgtcgcctaggctggagtgcagtggcgtgatcatagctcactgcagccttgaactccggtgggctcacatgattctctgcctcagcctcctgagtagctgggaccacaagtgcccaactaattctttttctttttctttttcttttttttggagacagggtcttgccgtgttgcccgggctggtctcgaactcctggccttaagctgttctcctgcc

SEQ ID NO: 635265 - DNA, 466 bp, Homo sapiens
ttttcatagagtgttaatggttttagctcttacatttgggtctttgtatattttgacttaatttttgtacattatgaggtaggagttaggcttcattcttttgcatatggctattcagtgttcccagcaccgtttattgatgaagactattcttcattgaattgtcttggcacccttgttgcaaatttgctgactgtacatgtgagagtttatttctggcctgaaattctattccattgatctgtataggtctatccttatgccagcaccacactgtcttgattactgtagctttgtagtaatggcacagctctttgatgattggtttctataagtgtgttttttataaagtactttcaatgacaaactaattgttttgggatttttaatcagcaaatccttaacatatatgtaatgactctgtccaggcaaaacttgttcagtttaaaatttgtcttcagtaatt

SEQ ID NO: 635266 - DNA, 328 bp, Homo sapiens
tatgcatggatctatcagacaaattagatgatgatgcagactgccataagacaaatactacataagtcaccttatacttcctctgagatccactaaaaggaggatgatgaagttgagaaatcaccactatcggtgactataatccataagattactaatagaggaatctgttcttctctccaaatctctcctctctctcattaagtctgttccaaatgatccaagtaccattgatgaagatctaggaacttgactatgcctccaagatgaatctgataatgtgtttaaaccatttccaacatttctcccagctgaggtagtacagtta

SEQ ID NO: 635267 - DNA, 878 bp, Homo sapiens
caactgtacaggagagtggcctttctacagcacattttcagtaatcctatatttagtcaaaatggatgagaaatcatgtattaatgctttgtatgggaattttgggtccagtgctaactatttttatccatttaacaaagcaactcctatttggtcaaaacacatttatttacatgcatggcatattggacgcacattaaatttgtgggcatttggtatcatggtacaaacaaaaaacacacacacaaaaaaaaccccaaaaacaccctcgtgtgtctcccctcaaaatgaaggttggtcgctgtggttccacccggggtttccaaccctatattgcgagtgtgttcactactaatacccccacacgtggtgtgttttgttcccccttctacaaattatttgtgttacccctgatgggcatgtgtcacatctgtgttcacccagtgtgggcccatggttttgttcgccccttgttacaaactggccaaagcaatctcgaccggggaacaccactaccttcgtggtgcgcatacctaaagcaccacttcttaatcttactgtaacatgcaccacatcacgatgactgctcttcaaccagtgcgctacacaagctcttacaacttagtcgagtcaatcttgggacacacaactcgtgtgggtctagcaccaatcaattgcaaggaacacactgtatacgccgagatatatcatatatccgggtaactttcaattggaattgcgtccacaatcatggaccagaaggcgccagtgctcaatggtcgagcaacataatatctaggcttaatggaccctctaaacatcagacgacacacacaaaaatgtaccagccgcgcgaccacacaaaagattttacagcg

SEQ ID NO: 635268 - DNA, 208 bp, Homo sapiens
taaattaaacttaaggtctcaaacctccgggcctcaagttgatcagtctgcctctgccccccaaagtgttgaaattatgggcttgacccaccaaacccagccataatttcttagcttgatttccccatttgtgttttgatttcaattggtgccctccccattaaaaaatatgctgaaggcctaaccctcggcgccctccttaacgtga

SEQ ID NO: 635269 - DNA, 167 bp, Homo sapiens
ggcgaggggtgtgcgcgtctttgtgtgaggttggagagctgagacgagaagaggggctactttgactctggaccctgtagtttcctggccgtacctgcttgggaatctgactaccagtaccagagcgcagtgcggcagtggcgccttcttttgtgtataagactgag

SEQ ID NO: 635270 - DNA, 359 bp, Homo sapiens
  misc_feature (116)..(117): n is a, c, g, or t
  misc_feature (140)..(140): n is a, c, g, or t
  misc_feature (156)..(156): n is a, c, g, or t
catgtgcctctgtgtgtcctgcctgggtcagaccaaggtgcagtttcagaaatgagaaagagaaacagcaacctgagacctgggacctgagagcagagccgagagcgcccacaccnntggacagactgctttgactctcnacccagcacgtctgcnacctttaattacagcggggaagttacaccaggaaggaattgttttttctggaagaaatgagtgaacttcaaaaataccctcataggccaggtacagtggctctctcctgcgatcccagcactttgagaggccaagatgggaggattgcttgagcccaggagttggagaccaggttggacaaaagagcaagaccccatttctac

SEQ ID NO: 635271 - DNA, 132 bp, Homo sapiens
ggtggtagttgcagcagtcctgttgctggccagtagatgcctggtctgccagcgctcaccatgggtgccaggatgcttccgcagaggcactgtgctcacggttggacttggttgtcagtgggaaaggagggg

SEQ ID NO: 635272 - DNA, 445 bp, Homo sapiens
  misc_feature (364)..(364): n is a, c, g, or t
  misc_feature (377)..(377): n is a, c, g, or t
cgcgcgcccgcaccggcgcgccatctcgcgccgcgcccacccaaatccccgggccacccctcccccatccacagggcggggtgcgctagcccaggaacgttttcggctccggagccgccccgaactctccagggcccagcggtagtggcccgcccgcccccgcccgccgttgtgtggggtgggccccccgtctcaggcctacagcttcgccgcatccccacccgcactggagccctcacccggcgacgtcactgccgccgccgccgccgcctccgctgcacccgccggccccgccgcaccgccagggaacctggttctgccgtcgtcgctccaagaccgacagggttttctcctcacagctccntgggcgccatctnacattcaaccctcacagccaataggagccgattgctcctctcgcgataattacggcgtcggtcccgca

SEQ ID NO: 635273 - DNA, 119 bp, Homo sapiens
ccaacgctgaggaccagacaacctacggatgttatggacgaagttgttgcgcaacaacttcgtccatacagatttgtctggatcctcggcgtgtgcagtatggtggttcggcgtgtgca

SEQ ID NO: 635274 - DNA, 145 bp, Homo sapiens
agtgtcctcagaggcgtgctaggtcccctcctcagtgacatcacagcctggactaattgttcctcttggggatgagggtggccatgcaggcaggtcccactagcaacttctttctgttgcgcagcaacctcaggtcacggagcag

SEQ ID NO: 635275 - DNA, 296 bp, Homo sapiens
gagaccgggcgttcaatccagtgcccggacctcggtctcgacgcgcctgttaggttccaggcactgaatcagttcggtgcgcggcgcttgcatgttgcagcgcaccaggggtttgttgctaccttcgcccacggcatcgaccagttccgccggcaggcccttgcccaccaggtaggtcttgatggtctgcgcacgttgccgcgaaacctgcaggttgctctggcggtcgccaatctggtcggcatggcggtgatcacgatcttgccgacgttgggggtgttaagcaagttggttgc

SEQ ID NO: 635276 - DNA, 215 bp, Homo sapiens
acgcttccccacagtgagcatatttattaaatagaaacaagttgttgattccgataattacaagacttgtacaaaaattcacagcgcctgtaaggagccttatggttgtgaactaggtgacacgtgtacctctccggacagaggaaggaagtctcaccccggcttccagcagcagcaagcctgtgtctggcataccctgttccgatgctcccacc

SEQ ID NO: 635277 - DNA, 290 bp, Homo sapiens
agttcacggagactctcaagttgcagtgcctgttattccagctacttgagaggcggagacaggagaattgcttgaacctgggaagcagagattgcagtgagctgagattgagccactgcactccagcctggatgacagagcaagactctgtctcaaaaaaaaaaaaaaaaaaaaaaaaaaaaaatttgtgtggcccccccccgtgcccccgttttcctggcagggttttggggtaaaaggggttaaaaaaaaaaatttttggctcttagggaactccaggggggaaaaag

SEQ ID NO: 635278 - DNA, 208 bp, Homo sapiens
ccccccgggtccgcccacgcgtccgtttttaaacatcacagtgaactattgccccttttgctaatgcctctatttacttgctttggcataaagaatgagccaatgaccctctgtgtcctgtggaaaaatgtataaatgttttttttttttgcttttaaatgtaatgctaattaatgttaaatcccaaataaacagaattttaaatata

SEQ ID NO: 635279 - DNA, 128 bp, Homo sapiens
gattccccacagcccatacagtccacgccatcacacatccaatacagtccacacagtcgatacacatcatcatcatcacatctatatcagatccacaccgtcacacgtccgattcagtccgttcgcat

SEQ ID NO: 635280 - DNA, 232 bp, Homo sapiens
cttttcttgcaaaaaaaaaaaaggggactgtaaaaattgggccattttgaaaatgacaagtagaccctagcaaaagtcctttaaaagctgatcccttttgtaacctcaagcaccttgcttactttgtcaatcattttcctcggggggggggttttcaacgggtttttgtttggttttccccaaaaaggctttttgccctgggcaaaaaaaaaaaaatgattttgactttcca

SEQ ID NO: 635281 - DNA, 1021 bp, Homo sapiens
ctgcggctgtcgcacaactgcgctcagcgtgctggcccccgaggcccttgcttggcctgcccgccctgagactggctcagccatacaccacaactgatgctccagtgctctgccctgggcctgtcttgtacccaggccctgtggcctggccctgtctgtgatgctaggtgccacaacacctgctacacctactgactggtgcgatggaggacgtggcttgtgctgctgacctgtgccgtgctgggagcttgctgctggacgtgcgtgtggcacctgcagggcccatggtatcccaggggacctatcgccacacattgtaccggcgccttgcaacaacccctcggaacctcccgccgtgggaaacccaggctagagcacctcttgccccccggttttgcattggcccatgtggcccagcctgcggccggggcttgcggcgatgccagggggcaatcacgaatcgtgggttgcaggcttgccaaggccagcggtacccccttaccatcgaagcttgggccttgggcatgcccggagtacgcgagcagattgcgccctacaggacccggtcgccgatgcacccgcgggggggcccgccagagacgcccatttgcgcgagatacgaaagccccttcataggacagcgaccccatgcgctgcccgcttggggcaacacttgacagcctgacacattgggggttacagtcggtgagaaagagggaaggcagctaagaagaggcagtgaatgcaaagacgggggccagtataggaccagtggagaccctggaggacacgcatcacggcgtgccggcagcatacagaacaacaggcgccaacagtagcaacgacccggaggcaagacacaagccataagcaccaatcagcaaaaccagaaaaacaaccagaaaccgaagagacacccgaggcagaaagaaaagagcggagacagaaggacacgaaagcaagagaaaagagaaggaacggcacacaggcagggcaaacagccagagcgggaacaacgcag

SEQ ID NO: 635282 - DNA, 270 bp, Homo sapiens
cttacgccactctttcataaggggggaatgaggtgctggctggggcaaaaatatcccatgcctatgtcaccattttcagttttcagcagctttcatccactctcttttccccatctgtagcctctcccagtgttgatctcacagtccactctgcaagcagcttctccctctccccatcactgcttcctcgcagtaggtgttggagtgcccccaccctcatgatgaagggcaaagctaatctttttttttttttttttaaaatggagtctc

SEQ ID NO: 635283 - DNA, 901 bp, Homo sapiens
gcaggtcggcggtcccgagggatctgtctctggcttcaacagatgttgggacggaacagatccggggactctcttccagcctccgacgcgcccgtccgatttccatcggtccgtcattgcgaaactgccggagaacatcttcgtcggaccatctccgtgcttcttgggaccttgctgatgcaccggtgtgaggtggttagcgtccttcttgccaatcaagcatgagctcccagattccgtcagaaattattccaaccggacgttggaggcagcctgtcaacgagccttggtggaagttggtacctggcaggcgctcctagatgctagactcgtctactggggttactagttatgagaagacgggactgactgtggctcgtggaaggccgtgaggacaatttgttccgcagaatttgggcgaggaagaagcgcgaggggctacgaagggtattggatgaaaggatggcgaagaacagtggttggcagggctgcgcttctctttccgaggagattcaagaaggccgagttggaagatgaagttggggtaaaaacccagagagccgattgaagcagcttggacaatgggccattgggacgcaaaaaacagctgtgactcgagggccccctttcgtaggaatccttacagtgccacatgggggttacatggcacaggcacatgtgacgacacccaattggtcattgggtgcacacttccactggtgaggaagttccagtttctcgtcagaacatgagcgcgaagttgaaagagctttattaaacgtaaggcatgtggattgacacaggctggagcgaaacgctcaataacagtggtgggtaatgggccacagggaagagcatggagactaggtgcaggaagctcattcttctgacgaaaaagggg

SEQ ID NO: 635284 - DNA, 1045 bp, Homo sapiens
  misc_feature (43)..(43): n is a, c, g, or t
  misc_feature (73)..(73): n is a, c, g, or t
  misc_feature (538)..(538): n is a, c, g, or t
  misc_feature (571)..(571): n is a, c, g, or t
  misc_feature (840)..(840): n is a, c, g, or t
  misc_feature (1037)..(1037): n is a, c, g, or t
gattgagaacaggttccagatgaagctacttgtatgggcttcngcgcaccaaagaaaattccatcattttgcnacagtccaaaagatgagggactgtgctctgccaatgtgactcgctattattttaatccaagatacagaacctgtgatgctttcacctatactggctgtggagggaatgacaataactttgttagcagggaggattgcaaacgtgcatgtgcaaaagctttgaaaaagaaaaagaagatgcccaaagttcgctttgccagtagaatccggaaaattcggaagaagcaattttaaacattcttaatatgtcatcttgtttgtctttatggcttatttgcctttatggttgtatctgaagaataatatgacagcatgaggaaacaaatcattggtgatttattcaccagtttttattaatacaagtcactttttcaaaaaatttggatttttttatatataactagctgctattcaaatgtgagtctaccatttttaatttatggttcaactgtttgtgagactgaantcttgcaatgcataagatataaaagcaaatatnactcactcatttcttggggtcgtattcctgatttcagaagaggatcataactgaaacaacataagacaatataatcatgtgcttttaacatatttgagaataaaaaggactagcaaataaaactcattttgcatttaaaagttggattatattttagtcccaagaagacaaagtcgcagattaacaacactttaaaaatatcactcccattttattgtgttagattgcagtacaatgaatgaataaggggatttatttaaaagatcttnactttcttgactgatttaaaaagctaatcaatttattaaagccagaaatgttctcctctgggaaagcaatttctatctatttatctaccaatccccactcccatgtatatgtttgtgtttacatagagatagatggttttaagggttttcctattgttaaattatttcctaagacattgtgggttggagaccactanacttataa

SEQ ID NO: 635285 - DNA, 883 bp, Homo sapiens
  misc_feature (1)..(1): n is a, c, g, or t
  misc_feature (883)..(883): n is a, c, g, or t
naaggctgttactggtccgggattttacggatagggtcaccttcccacggtgcttgcaccattgagcgcgtggcgctgccctggagcctggccggctgggacctggtgcccaatcctgggtggacccaggtgcctgtgtgcccagtgtgccggtgccgaggtcccggtggtgctggtgccttgctgggcccgtccctggggcggtgccatggtgtggctggtccccgcggattcctcccctctctgcgtggcccagtcgccctttggccgggctgagctaatcgtcggctcaatgacgacgatggccctgacccttcccgtccagtgacctacagagacaaccgaatggagagcccaaggcggcttctttgctgtctgccgaccccactgaagcaagagctccccggctccactgaaacaccagctcatttaagctttccccaactgaccggccctccgggacgatacctaacaactgacctggcgccctgcatctggaataggctggcgagatacttagtatccgagggctcgggacttggcgccatcgaggtcatggggacccaggatccagggaacatgggaaccggcgtcccagcctcggagcaaataagctgtgccaaagaggatccacaaggtttattgccctgaagagactggcggcaccaaggatgtgcaggttacagacttgtaagagtcccgaagacagccgaccccaagaagagacggactgctgcaatccggaggactctgggcagctgattggtaacctattaggggtaaagctattgggctaccaggtgcctccatttgacttggcgcattatgtctggctcatgagtttaaaggaaaagaggaaaccctttaatgctacaacgttcan

SEQ ID NO: 635286 - DNA, 1045 bp, Homo sapiens
  misc_feature (43)..(43): n is a, c, g, or t
  misc_feature (73)..(73): n is a, c, g, or t
  misc_feature (538)..(538): n is a, c, g, or t
  misc_feature (571)..(571): n is a, c, g, or t
  misc_feature (670)..(671): n is a, c, g, or t
  misc_feature (673)..(675): n is a, c, g, or t
  misc_feature (677)..(677): n is a, c, g, or t
  misc_feature (680)..(680): n is a, c, g, or t
  misc_feature (686)..(687): n is a, c, g, or t
  misc_feature (690)..(691): n is a, c, g, or t
  misc_feature (693)..(693): n is a, c, g, or t
  misc_feature (709)..(709): n is a, c, g, or t
  misc_feature (711)..(711): n is a, c, g, or t
  misc_feature (722)..(722): n is a, c, g, or t
  misc_feature (737)..(737): n is a, c, g, or t
  misc_feature (743)..(743): n is a, c, g, or t
  misc_feature (750)..(750): n is a, c, g, or t
  misc_feature (754)..(754): n is a, c, g, or t
  misc_feature (759)..(760): n is a, c, g, or t
  misc_feature (777)..(779): n is a, c, g, or t
  misc_feature (784)..(784): n is a, c, g, or t
  misc_feature (840)..(840): n is a, c, g, or t
  misc_feature (1037)..(1037): n is a, c, g, or t
gattgagaacaggttccagatgaagctacttgtatgggcttcngcgcaccaaagaaaattccatcattttgcnacagtccaaaagatgagggactgtgctctgccaatgtgactcgctattattttaatccaagatacagaacctgtgatgctttcacctatactggctgtggagggaatgacaataactttgttagcagggaggattgcaaacgtgcatgtgcaaaagctttgaaaaagaaaaagaagatgcccaaagttcgctttgccagtagaatccggaaaattcggaagaagcaattttaaacattcttaatatgtcatcttgtttgtctttatggcttatttgcctttatggttgtatctgaagaataatatgacagcatgaggaaacaaatcattggtgatttattcaccagtttttattaatacaagtcactttttcaaaaaatttggatttttttatatataactagctgctattcaaatgtgagtctaccatttttaatttatggttcaactgtttgtgagactgaantcttgcaatgcataagatataaaagcaaatatnactcactcatttcttggggtcgtattcctgatttcagaagaggatcataactgaaacaacataagacaatataatcatgtgcttttaacatatttgacnncnnnanccncccccnnccnncncccccctccccccccncncccccaccccncccccccccccacancccccnccccccnaccnccacnncgggggggggggggcgnnnggggnattgtgttagattgcagtacaatgaatgaataaggggatttatttaaaagatcttnactttcttgactgatttaaaaagctaatcaatttattaaagccagaaatgttctcctctgggaaagcaatttctatctatttatctaccaatccccactcccatgtatatgtttgtgtttacatagagatagatggttttaagggttttcctattgttaaattatttcctaagacattgtgggttggagaccactanacttataa

SEQ ID NO: 635287 - DNA, 179 bp, Homo sapiens
gagatttgactgttggggaactgagaacagcgaggagtctttctagaacttttgaacactaaaaggataagccggcattatgcaaaccggagtttcttcaatgacccctcgagaactttgggaccagtttcctatgggggactcagtttcagaggactgagacaaaagctcttctgtcg

SEQ ID NO: 635288 - DNA, 346 bp, Homo sapiens
cgagctatcagactataggcctgaggcttttgggtcctgtggacagggctgtcatgaccccccgggtggtgcatgccagaccgcctcagacgcagagggtccctctgcaagcgccctgtgagtgggccattccgaacaatggacacaagcccaaagagccttgtcacaattgtggaacccacattggcctgagataccgcttcgagggaccccctccggagtgggtgtttccgggggcacttggcgaccagacccttgtgtgcccaaggttggaggtctcccctggggcactccattctggcccgggctggctgtgtgacctccgtgcctagacgtgggtcttctt

SEQ ID NO: 635289 - DNA, 973 bp, Homo sapiens
  misc_feature (43)..(43): n is a, c, g, or t
  misc_feature (73)..(73): n is a, c, g, or t
  misc_feature (538)..(538): n is a, c, g, or t
  misc_feature (571)..(571): n is a, c, g, or t
  misc_feature (840)..(840): n is a, c, g, or t
  misc_feature (906)..(906): n is a, c, g, or t
  misc_feature (933)..(933): n is a, c, g, or t
  misc_feature (957)..(957): n is a, c, g, or t
gattgagaacaggttccagatgaagctacttgtatgggcttcngcgcaccaaagaaaattccatcattttgcnacagtccaaaagatgagggactgtgctctgccaatgtgactcgctattattttaatccaagatacagaacctgtgatgctttcacctatactggctgtggagggaatgacaataactttgttagcagggaggattgcaaacgtgcatgtgcaaaagctttgaaaaagaaaaagaagatgcccaaagttcgctttgccagtagaatccggaaaattcggaagaagcaattttaaacattcttaatatgtcatcttgtttgtctttatggcttatttgcctttatggttgtatctgaagaataatatgacagcatgaggaaacaaatcattggtgatttattcaccagtttttattaatacaagtcactttttcaaaaaatttggatttttttatatataactagctgctattcaaatgtgagtctaccatttttaatttatggttcaactgtttgtgagactgaantcttgcaatgcataagatataaaagcaaatatnactcactcatttcttggggtcgtattcctgatttcagaagaggatcataactgaaacaacataagacaatataatcatgtgcttttaacatatttgagaataaaaaggactagcaaataaaactcattttgcatttaaaagttggattatattttagtcccaagaagacaaagtcgcagattaacaacactttaaaaatatcactcccattttattgtgttagattgcagtacaatgaatgaataaggggatttatttaaaagatcttnactttcttgactgatttaaaaagctaatcaatttattaaagccagaaatgttctcctctggggggnaggccatttcctatcccttttatcctnccccctccccccacttcactgggntttgggttgggggttt

SEQ ID NO: 635290 - DNA, 103 bp, Homo sapiens
  misc_feature (2)..(2): n is a, c, g, or t
  misc_feature (15)..(15): n is a, c, g, or t
  misc_feature (23)..(23): n is a, c, g, or t
  misc_feature (26)..(26): n is a, c, g, or t
  misc_feature (44)..(44): n is a, c, g, or t
  misc_feature (47)..(47): n is a, c, g, or t
  misc_feature (59)..(59): n is a, c, g, or t
  misc_feature (73)..(73): n is a, c, g, or t
  misc_feature (77)..(77): n is a, c, g, or t
  misc_feature (80)..(80): n is a, c, g, or t
  misc_feature (84)..(84): n is a, c, g, or t
  misc_feature (92)..(92): n is a, c, g, or t
  misc_feature (96)..(96): n is a, c, g, or t
  misc_feature (98)..(98): n is a, c, g, or t
gnggaacagctcttnggacactnggnaaaaaccttgtagagagngtnaaaaatttaacncccatagtaggccnaaangcngccnccaattangaangngttca

SEQ ID NO: 635291 - DNA, 455 bp, Homo sapiens
gaccatgattagacctcagcatgtcgtatttcactctggaatgctgtttaacacgtatgaagtcatgctatctccgtcaatactctattcacgagagaataacatatatccacctaacagtgatagtccgcctatcttctatcgaatgaacatagacatcccccgtgaagcttttagatcacagggaagtgccatgaagccacaacctaaactaacttagtcaaacacattagtctagtgtccagactcaaatagatacacattcaaccaataaactgagaaagaagcatttcatgttctctttcattttgctataaagcattttttcctttgactaaatgcaaagtgagacattgtattttatctccttttaattgacctcagaagatgcactatctaattcatgagaaatacgaaatttcaggtgttaatcttcttccttacttttggggtct

SEQ ID NO: 635292 - DNA, 960 bp, Homo sapiens
ggtagactgagcgccagggaatctgactaccagaagttggagcctgacagaggcccataaactggagacctgatcgtccagaaccagtctcagtgaacagagattgggtacaatcgtggaggcaacatgagttggatggctgaggtcaggatgaagaaagacacagggactatctcgcgaagaacctgtgggaagcaaaagatagagtgcgtccaatgttcctagggggtagctcctgataggagactgcagtagtcgtgtccgttagaccctgaagaatgggagtgcccatggcaaacagtttccggcaggagtgcgagagcaagtcatgagcagatggcctgttggacacgatggcgacgaggggcatgataggccaatcagacacgggtgcgaaaattggtagcccctgaagcttccgggaaaagtgctcggaagacatggatcagcccagggaacatagaaggtctcaaaactacaggaaagcagaacccgccagagtctagcacgagagagcgtgctggacatctcccggggatggaaggctgagagcaaggggacggcctgaagaagcggacggaaggcgggaaggtccgggcaaagtccgcgtagaggaagcatcgagggaaacttgtgaccctgaggaaggtgtcagaaccaaaggtggacctaggaaagagcaacgtgggtccaagtgaagagccgagacgccaggaacagggcattagggaaagagaaaggtagaacaacaaggggtcgacgagaaacaattcaatccctcgtgccaaatgaagtgtaagtgcgagtgagaccaagtacaaacatgcatgaggacaagaccaaaggtaagaaattggagaaaaggtcatggagcatttcatggtgaaaggcagttagaactgggaaaagcaactgggagaacaaaaggaggctaaagtggaacgaagctgaagaggatta

SEQ ID NO: 635293 - DNA, 1744 bp, Homo sapiens
  misc_feature (1074)..(1074): n is a, c, g, or t
caaacgctgttagtgtgtgggggagtccctgcctcgtgggtgcctcaacgtcgcgctgtggttatctcacttcgtgaggtattctgctggggcgtgttgtcttgcagggtgtgttactttcgtcttgtgtagttggttaaagtcactttggtgtgccgggcatagatcccagccccgctggttgttttttgtggtcgttgtgttgcgtgagggttttctcccctcacgtagtgtgttgtgtgttgcgtcccctctcgggcgcggtcatcttggtgttgtgtgtgtccgccaaatagttgctcgcccgcgcggtggttggattgtgcttcgtccgccgcgtgggttttgttgcatccaggcgggtgctggcggcgttgtgtgtttatttagggggtgcgacctgccgtgtggtggtgttattgtcgctgccctggtgtgtgttgtattatcctcctccccggggcggttggtgttcgtgtggggtggtggttgttctctccccgcgtgcttgtgtgctgcttctgtatgagtgatctgttgctgtgtggtgcctgctctgccgtggtgggggtcttatgtcgcgccggcgtccctcctccgtcggcgggtgtgtgatccgcacgcccgacaacactgaggggtgggctggttcttttgtgttgccccccttttgttcatagatttcatcttcacagtactactacgatactagtatcatataaaacctcgtcaccccctggtgtggagaccttctgtgtgtgtgtccccaacaggtggagattgtcgtaaacatgtaacaacaggcattttttagcagaggagcgcagaatttttgaagagacgcggagacatattgttcttatgaggaggtccgtcgcggagagcgacctccaccaacagcgggtggtttccccgatcagattcctcggttttcgtaccaacactgtgtggtgggtgtggggcctctcgccgcgaggccgcggtgagccacggccgctgtccccctcgtctgtctctcgtctctcccaacatgccacagcgttgcgcggggcccctctgtgtgtgtgttatatngcccgcatttatatgcgcggtgtcctctccccgttgtgccccctcctcacagctggccctcacttggcccaccgagagggagagcgtgttgtggtacactctctcttatgtgtctctcgtcactggggtgtggctcccactctattcagagagtgtcacagaactctcttttgcgcccacatgggtctgtgtctgtcactgtcctctcctctgtgcgcgcccactattcacactctccacaggctccacaagccacgagatttgccacagcggtgtattcctcgcacctgtaccacacaccctctttctatcaccactctctcgccacagtgtcccacactcttttgaacaccacacctctgagttgagtttctgagaaactcgcgcccacactttctctcacccagcgcggagtggcttgaggaaaccctaccactttggaccacaatagagagagggctgctgcctgtcggcctatcgggccaccctcctttttccttggctccctgccttttctttttatagaactaatagtcacaccctaccactttagtcgggaagagggcaccggggttgacctgagtttctgtctcctgtctttctggctgatgtcacccctgaaattaagcctgtcttgccgtggcctaaaacaaaaattaaaaaattaaac

SEQ ID NO: 635294 - DNA, 274 bp, Homo sapiens
gtagttagatccctctacacgcaagtgcactgtgaagacatgtagagcacatagtaactatgaatagtgtatatatacaactctatgtatactgttctaacagtaagcagtttaaattatgttggttcatattcatctaatatagcttgtatgtactcttattaatataatctctattgtattgatttcttctgtattaccttttggattttgtaaaacagaaatttaagaccacaagttagaagaaaggtcacatatttcaaacacaactaga

SEQ ID NO: 635295 - DNA, 98 bp, Homo sapiens
gtgcggccaaacttaaaaaccagccctccaaaaaagatgaaggcattctggaaaaatacagcaattccagggtatactatgtctttttctttagcaac

SEQ ID NO: 635296 - DNA, 299 bp, Homo sapiens
gctgaacccatacgcggatcacattctgtatgttttctcatggtcgacaactgattcaaatgactttaagcttatcccaccatttaaagagagagaggcgctgcaataatcataaaccatggcgttatcttaatttcaccactggctgcttcgaacagaagttctttcagtgcttcctttgacacataacaatagcttgtaatctcattgggatctggattcaaagttacattcttcctcaccaacaaaatgtaatcaatttcatgtgcaccccagataccatcagactgagctttgta

SEQ ID NO: 635297 - DNA, 187 bp, Homo sapiens
tcatcatataccaaacctccctcactaaacgtaagccttctcctcactctctcaatcttatacatcatagccggcgggtgatggtggattaagccagaacccagtctacgcataatcttagcagactcctcaattacccacataggatgaataatagcagttctaccgcgaattatgataccgcgaa

SEQ ID NO: 635298 - DNA, 279 bp, Homo sapiens
tgaggacttacaaaagtgcactcttctatatctacaagttcctgttctagggaagacaaaaaagaaagaaaatacacgtgtccttagtacattagaaggtccaagtactgtagagaaaaataaagtaggttggactcggtggctcatgcctgtaatcccagcactttgggaggccgaggtgggtggatcacgaggtcagtagattgagaccatcctggctaacatcgtgaaaccccatctctaccaaaaattaggtagatatagaagagtgcacttttg

SEQ ID NO: 635299 - DNA, 643 bp, Homo sapiens
  misc_feature (44)..(44): n is a, c, g, or t
  misc_feature (60)..(60): n is a, c, g, or t
gtgcccggcacaccctggcgacagagtgagattcatctccaaanaaaaaagaaaaaaaangaaagtcttggttggtgcaagtttcctaaaaaccggggggtgattttgaagcccttttgaacgggtacccccccccttttggaggttttaccccccgcgggggggggggattaaaacaaaaaataagagggggttgttttttctcctctaacacctttttattttggaaaaaaggatgtttttgtgtaataatatatccccccctccaccaaaaacccccgggggggggtggtttattatcaaaaaaaagagagtttttttttataaacaccaaaaagaaggggttttttttttttttttttttttaagggagagaaatatattatctggcggccccgggggggggggggggaaacccctccgttctcttttctttttttattataaataaaaagaaaggggtttttttttttttttaacaaaacaaaaaaacacaaccacggggggggggtttttttccctccgggggcgctcgccccccctcgccccaaaaaaaaaatatatttttttgttgtgtttaaaaaaccccccccttcttttttttttttttttttggcgcgcgcgggacccatttttttttttt

SEQ ID NO: 635300 - DNA, 386 bp, Homo sapiens
aaacgggtaaaaaagagaaggccttttaaaataaggcattggggtttttcccagagcaactctgttttccccttgaaattacctagagattttcagtaaacatttgccccggatacattttcacagaggagtttgcccgcattctgaggacctcattggctcccactgttcattgctatgcccatctcacacccacttcaactgtcaaacagaagaacaattcttattaacagtgatttgctttgcagttttagtttatttctaaattgcagacatggttgatgagtgaagttgttttagtgactgtttattggaacagagcagagaatagagtcaggaattcttgaggctgccatgtgtatggtgaaaaatagaaataaaaacca

SEQ ID NO: 635301 - DNA, 806 bp, Homo sapiens
gggcgctcgcattccccgcgcggagccgaagcagccgcaacgagccgggagctgagccgtgctgcgctgcgtgtgcgaagagccggtgcggacggccacgagccctccccgcgctgccagtgggactcggagccagagatccctcggcatttgccccgtgggcatggagtgtgctagacaagactcttaacattgtgtccgtcgacgtccccgacacggacctgactcctcgggctaggaaacgcctctagaactcgatcacctgctgccgcgcttccacataatagccccgggaagttccagaagacggtgagggatcgagtgctgcgctccatgaggcaggagggtccccctagtactccgtcaggctcatgcccaagtgtcccccatctgtgacagcccccagccccgatgaggaccctcaggccggggcgaagagcccaggaacaagcccggaccgaaattttgccgctgccttagagcgttagacaggatgtggctgggccgccgggccctgtgcgctctggtccttctgctcgcctgcgcctcgctggggctccttgtacgcgagcacccgggactgcgcccggcctccggctacctcttgcgcccgtgggcgcccccgaaaagcccccgcaggcccgagctgccagatctttgctcctgagccccgctacgcacacactccggtcaggatcaaggagcaagtagtggggctgctggcttggaacaactgcagttgtgagtccagtggggggggcctccccttcccttccagaaacaagtcggagctattgactcaccaa

SEQ ID NO: 635302 - DNA, 158 bp, Homo sapiens
atcctcctcctccataccaagcgtttctagcactgagaccaccagccctggtgacagggtggagacccctgtgtgggagagagccccaacccctgtctcagcaagctctgaggtctcccctgatgagccaatgatggactcagagaaccccatgcaga

SEQ ID NO: 635303 - DNA, 748 bp, Homo sapiens
gtcctgcgtgcggaactacatgaccacttgcacgaaaagcctttgatggaaaaaaaacaatgaaagagaaaagtgaaacgagagtaacactcttcactgatgctaacttcctatttggcatgaacccaatcaataaacactttggaacacaacttaaaaaacaaaaaacacgaactccgtcggagctcaaaggaaaggagcgtctgcggcacgcattacactttacaggagggaataaaccatgatggctcaggtaactgactacaatgaactaagaacacaagactggggcggagcgggcaaaccatcactcaacaggcgccaaaccctgctatcccctccacaccccgtatccccccacgactcacaacgcacacctcaaggccactttcaggccgcacacccagagccaggccgcgaccgcccagccgcgccataccagaggggggcgtgcacaagtatgtgttcaagaacaccgtgccgtagccgggggacacgagaactctttgggagacacagaacagtgacacccgcccccttccccgggggttcccccggcgcacacccccacagcaaggccacccccgccccccccatggcacccggggcgcagccacccaggcagggcaacagccgacatacccacacggccgcccccacgggggtgggaggagagaaaggagagtgtgacaataagaagggccacggtgggggggggcagcccccgcacatcaacgcgccacatcat

SEQ ID NO: 635304 - DNA, 614 bp, Homo sapiens
atatataatgtgtgggcctggttcttgagcctgcagcacctcccctaggcctacatcccaacatgcctgcaactctcctgtggcaatgggtgcctgccccttccctgggatcctgcctgaaattttgacccaggagctacccatgaaaagtcaggcaggagcttttgccccctgcttctaaactttgccagctactgggcctccacatttgctccccttgccaccaccctccagtctatgttaagggatgtatctgtactttttcatagcctacctctaaattgataattttttttttttttttttttatggaagaaacaggtttcaccatgttgcgctggctggtcttaaacttccaaacccaagcatccttctgccttggcctcccaaagtattgggattacaggcatgaacctttgcacccaactgacttattcctttattattaattaattttgaaacggagtttcactcttgtttcccaagctggagtgcaatggcgcaatctacggttaacacaaattacgcctcttggcttcaaaaaaatatttctgcctcgggccaagcacgggggcttaccccccttaatcccaacatgaaacacccggcccggg

SEQ ID NO: 635305 - DNA, 131 bp, Homo sapiens
acacggagatagattgatcgagagacaattcactccatccctatggcagaggaatgggttagccctactgtagaatgtcgattgtttatacaactgttttatatcttaagagttgccttattaaagttata

SEQ ID NO: 635306 - DNA, 541 bp, Homo sapiens
ctactcagcattagcactaatttatggtaacagatcatatcttggaaaggtctaacttatggaaccccttcatttgaaatagcgaattaaagcatgtatttacatatttatatacaaaaaacttcaaaaacaaattaatccaaatctaggtccaagagtttccactttataagtggtatggtactatgctaaatatatcctcttccaaaagtctcttaggacttggtaagttccaaatattcattcacaaatggttcccctttaagcttaatgaaccatatacttcatttctgagtaaattagaggaaatattacagaacacgctttgtacaatacagcaccactactgagaagggctcgaggttttgtaatccaaggttctgacttaaagcaaaaatacacggcatagatggcaacagcaaagaagtgtccaattaaaactagagggttaggagacaatacagaaagcagcccaacaggacccgcaacacattcgccaccaagtttgaaataaagaaaacaggcttttcttagttgatgc

SEQ ID NO: 635307 - DNA, 468 bp, Homo sapiens
  misc_feature (289)..(289): n is a, c, g, or t
  misc_feature (321)..(322): n is a, c, g, or t
  misc_feature (377)..(377): n is a, c, g, or t
  misc_feature (392)..(392): n is a, c, g, or t
  misc_feature (410)..(410): n is a, c, g, or t
  misc_feature (438)..(438): n is a, c, g, or t
tcccattgaaagcatctattgattgtacttaattcatgcatctagagcaatggagatattcttctcttatttacatgagagctcttcaggtttcttcctcaatctcatcttctccagaacaaatagcctctcttttcagtggctgcctcgtcaggttccagatccctcactgtcctggccttcagttttggaggctgaatatgtgaagtttctatgtttggttcatgaattctgcatgggcacctagtatatgtaggatagtaataaaaatgccttaagttcccagaanggctctgtggttttaatgggtgctttccaatnnttcccaacccgggggtagggggagatattttcccatttgactgtggagggaaccngaggagccttttctnaggaacaaacagacatcnttttaatttttggagtttggggaagggnttgcatggcctgcccgacctcacatcattt

SEQ ID NO: 635308 - DNA, 616 bp, Homo sapiens
ccctgctgttcacgcccgggtttgtggtcgcccgctctcccggctctattcggcctcggccgggcaccccggcctctgctttttctcgaaaaacaacctcccaagggattcaaaataattggggcgaggcaccctaaacaagtccttaacggaagctcttagaggacccaattttcccccgtgtcaatattcgagattcattctcatcaaattggtgaggttggacccccggactgtggacccggacatactctttatcaggacccaactccggggcaatattttcacaactgctggggaatattttgccatattgaaacaaaaggctctccacctatgataaaaaaaaacgggcctccctatacaatctcacacaccaacctcggtcagataacaattaatctttttgattatatcgtcctcacataaaaaatactttggaatctataagcccctgcggaaaatatttttcatacccgacatggcccctcaaaaaagttagtaacgctgcatggtagatgcgctgtaaaatattggttcctcactaaaaaacagttctgatcttcatttttctattggccaattccccaaaaaaattattaaaaagccaaaaaca

SEQ ID NO: 635309 - DNA, 427 bp, Homo sapiens
acattagtatgcagtaatttggcatatacagctgaagcacatgatgtctgcgtgcttaacagaataagcattcactcagaccccttctgcaaagctatagaaggactaaatgcaagaaacacatgctcagccctaatcccttctcatttcctcctggcacctgtttctgcccccacaggcaccaaacactctaacagctggctgaaaccgagagagaaccagacagataatacactaccacttcagaccaagctctcaccaaaatggtggctgggaaataatggagacagaaccaccaagattttaagagatcaataaactgggtgtcggaagatctcccacattctcctgtcccagtaaaccaggtctccaggtagacaagagtcacacaacctatccttttcactcctcctcctcacctcccccg

SEQ ID NO: 635310 - DNA, 849 bp, Homo sapiens
gacctaagtggccacctgaaatgacaaccctgtgtatcccctgagatttaacaagtgaagatctctgctagaagatgttagacactccgagaaatatgaacagcgtacatggactgagatcacatttcacatattattgcgatgcctttatctacagtccacccatgtttgtcagcaaagaggatgtttatagtgaatcaaagaaattgaaatgtgctctgaatggaatgaaaatgatgaacacagaaggaaggacggaagaatgtgcaagataggccgagtgaagctgaagacatgaatgagtaatcaggaagaagtgctatggatcttaatgactagacaatggatgtgattgtgcagagtgttgaaaaggagacctatgataacatgataatcagaagctaatggtgtcagaagttttacaggttactaacactgatgatgagatgatgcagaaaatcataatgaactttgcactgtgaataatgttgacattatgtagcgaactgatatctgaatatgcaggggagacatgcgattctgagaagtgcttggtcgaattagcccttggtcgcgtggagccaaatgacctgtccatgggtatcgcattcggaacgttgaactagctcctgaatccagaagacctgggagtttggagtctgaacaccattcaggaagggcaacaagggccgaaaacaactgggcaacatgttgagattatggcgtcaaacaccgggttgcagggggagcaccatgggcacgttaataggcagaacatttacacagtcgcatctgctcttttttgcttgttgtagagtgcggtgacacattacctcaatagataagagc

SEQ ID NO: 635311 - DNA, 326 bp, Homo sapiens
ccacggcgcgccgaccaatgctacagaatgcctgctactgcggcacaaccgctttcggaggcttttattgcaaagtgtgttgttcgatgaactctgtcggtaccacaccttcacggctgaccagccgattcagctccgagcgcggcaatcgagcggccagcaagctgacaccttcttcgtcgtattcttctttctgtacggcgcccagttcgaaaaactgtgcacgcagtcgagcaaaacgttgcggcaagcgcaaggtgccgacaaacaaatcgctgcccagcagttcggcaatcgcttgttcaagcaactccagacgtcgacgc

SEQ ID NO: 635312 - DNA, 134 bp, Homo sapiens
agatctcatactgatatctcaaaagatcagatgatgatagagataaattacacatgccaccaggtcgcaaggatagcattctatctgtcatcatcacaatcacttataaggaagtttgtgatttcattgatccc

SEQ ID NO: 635313 - DNA, 117 bp, Homo sapiens
ctacaggatcccccgcgccgccccgcttctcagcaggacctactgaaagagctgcagaaacagctagaggataaacacagtacgcatagtactaattgtttcatagagactcgcaaa

SEQ ID NO: 635314 - DNA, 319 bp, Homo sapiens
taagatatttatatgttatcttcagatgattcttcctgttcttgacaattgtttttattattgagtctgtccagataagttatttataatgggcattactgaatttttaaaatgccgattacacccaaatattgtgcacatttaatgttctggagatagatggcctatctgatgatgatgctcacttaagggacatgtatgtggccttgcctagccctttggtgataagtacttcctctaggaaatgtacgataggtagaattgtggttccctaaagacaagtacataaaggtgaccctgatgaaaccttgaagttctg

SEQ ID NO: 635315 - DNA, 482 bp, Homo sapiens
tgcaaatattaagatatgccacatttcgcagtcctgttttggcagtgttcccatttttaaattacacacaaagtcttaaataaaaaaatgtggcccagcctcttgcagtttcttgggagccccggggtctccacgccgccctccacacacacacagccattcaaacgcacactcgtgcacacaccacgcgcgcgcacacacacagttactcacggtcggtccaacaccctcctcgcagcggggtaattacggctctggccggacggtgattggccagcccattcctcatcggggccccacagccaatgggtggccgctcagcccaggccccgcccccacggagcgggtggcgcgggacgggggaactgatcacgcgggatcggacccggcgcgaccccccgcctgcgcccggggccgcccgccctcggctgcgccgctgcccgcacaatcaggtctgggcagcgtctcccggcagcggccgc

SEQ ID NO: 635316 - DNA, 808 bp, Homo sapiens
agcggaagtcccgcctgccgtgtagtcgccgccgtcgctgccgttgccgctgccgccgtcgttgttgttgtgctcggtgcgctgagctccgcggctccgtgagccggttccgtccccttcccgccgccgccactgaagtgtcatgttcaaggaggaccactcgctgtgaacatcagcatgcagtgcgagtccagcgaacgattcgatgcgaaatatcccgacagggttccggtgatcgtggaaattaggtctcaggctctcatcattgtcgacattgacaaacggagtacttggtcccatctgtatatcgacctgtgcgtcgtccagttcatgtggcatcgatcaggcaatagaggatccagatttccttctgaaaaggcgatcttcctgtttgtggatatagacagtcccgatcaatgatccaggcctaaacgtagtgcggacaggcgttatcagaggaaggacaagaacgcatgaacgactggactctctgtatatgtggcactacagcgtgaagagtaacacgtttcggcattctgagggccagttgctgggtctaggtgcaccgtaactgcttgtgtatcttgctagatagccgaggcatttctcagttattgataccagaacctcttccacatagacctattcagtgcattcgtaactggatttatttcttaatatattggaaggttgcgtgtccgttcagactagtaaattattcatacagagtttccttctgaagtttcccttgagtgcattgtcctcatgcctgtagttctccaggaaacttgtccttctgggaaatcct

SEQ ID NO: 635317 - DNA, 115 bp, Homo sapiens
attctcgggagatcatccaggcatgcatgtgtcaacggttcgctcctttttattgctgcgtggtattccgtggtgtatgcattggcccccatgaaggacacctggcgatgtttcc

SEQ ID NO: 635318 - DNA, 248 bp, Homo sapiens
tcgccgtaatcagatgtatcgataggttcagataccataggtggcccattgattaagatgcgtaagggagggatcagtagacctcgatctgttatgtaacggatgcgataaggatgggagggcagatgaggactcgagatgactggcgggcagagatagtacagaccggttatctattatcctgagacgtctgagactgttagtacttacgttagattatgtatgtgacgtgtaaggacacagggcat

SEQ ID NO: 635319 - DNA, 306 bp, Homo sapiens
acaaaacaaaaagctagcaaacaattcgacaggatgccaaaaagataatacaccatgaccaagtataatttataccaaggacacaaggatggtttaacatacacaaatcaataaacatgatacatcacaacagtagaatgaatgacaaaaaccatatgattatctcaacagatgcagaaaaaacatttgataaaattctacatccttttatgataaaaagctgtcaacaaaccaggtacagaagaaacatatcttaacataataaaggctatatatgacccacagctaacatcatactgagtgggg

SEQ ID NO: 635320 - DNA, 1215 bp, Homo sapiens
taaagaggtctcgtgggccccgtcggggtgggattgagacctctttttaaacagatttgggccgccggccccaaatgggggctgctccagcggccggggggtgagagcgggaaggggagaaaaaaggagaaggcagaagggggcggacaagcggtttccccatcagcgcacaaacgcgcgggccgcccgctcgagtcacggaccgactcattccgcggagactcgcatcgttctctcccttccccctttcgtatcgcttcggcgcggcgaatacccctcggaggcctgtgaaacccgaaggagaacgggtgtggggcgagtgttgccgggcccgcggcccgggatctcctgtgttccgacgaaaaggggaagggcgtgaaaggcggtgatgagaagagagaggagagcggctatcggggatctccctcttctatgctcggccgccgtgcggggagaaactccagagcccagagtactctgcggttgttgtctctcaaagagaagtctcaatcgcagaatgtgtgggtgttgccacgaggggattgtgagagagttgtgtcgaaggagggaggtgcaaaaaattctgaggagctatccacattggggagagcaaaactttggctctctcgaggggcaatcaactgtgtaggagaggactctctcgcgaggcactctcccgcggggatatttcccaacaagcgacgagaaatttctcctctcgtgtgatctctacaacgctctctctcttatggaaagataagcgctatagagagaacaataacgaggggggggcgtgtgtacacacaaacaaacaaagcgccccccgcagagtataaactattggaggagagcatactatgacgaggggagaaagaaaaaaaaacggggggggaggtattatcacaaccgccggggatgtgttgggcgcgccagaggagaaggtggcgccccttacgacatctttgttcgaaaactcactgcgtagagaaatcatcccggcaccgaccaagcaccgttggggacgagacctcttccccacaaaagagggtgggtgtgcgggggagcaaataacaacggggcgcgcatatttgataaactaccaaccattattgggccgaatgaagaccacccacttatagtagaagtattatggagggggaaatatattaccccccaaccctcattttttttaatatattcccctatatgttagga

SEQ ID NO: 635321 - DNA, 298 bp, Homo sapiens
aaagagtgggacgggaaagaaacaaaaatgaaactaaaagcagacctgatccttttaaaaacatttttgtagactctaaagggaattacaaaaaaaaaaaaaaggtctgaaaccaattcctgacagcaccccctaggtttagggacgggttctaaattaaacccaaagggaaactctgacttctgtgcgcaggggctcgccgcacacctggagggcacctcctgacctgcacacaccttgtgcacgctcacctcccaggagcagggccagggtggctaaagatggcgtccatcgaatt

SEQ ID NO: 635322 - DNA, 347 bp, Homo sapiens
gactatcggctctctgggcaggtgactggaggagtcattttaccagcctgccagggtgctgtaatcccaataccctatagtagggtccaccacttgatgagcttcttagtgtcacattcttaaaaataaacagaagccaaggctgggcgcagtggatcacgcctgtaatcccagcactttgggaggtcaaggcaggtggatcatgagatcaggagatcgagactatcctggctaacacagtaaaaccccatctctactaaaaaaaaaatacacaaattagccgggcgtggtggcgggcgcctgtagtcccagctagtcgggaggctgaggcaggagaatggcatgaa

SEQ ID NO: 635323 - DNA, 345 bp, Homo sapiens
ctcggggttgcagtgttgcccagatgcattttacatcactgtaaagagattacttgtgtggttactacctggcttggctggccttgcggttcaccagattaatttacaaactcccccactttattttgtgctatgtagatctggccatacttgcattagtgactgtcttgccttaaccacacttaagcaacccacaaatttcttctcagatttgtttcctagattacttatgatactcatcccatgtctcaataagagtgtcttttctttctggatgtgttctcttactccctcttaccaccatactttttgctctcttctcctgcaagcgtagtcttcagggta

SEQ ID NO: 635324 - DNA, 104 bp, Homo sapiens
  misc_feature (4)..(4): n is a, c, g, or t
gccnataacctagtacaaatgttaaaaaaagttatgttcctctccttcccaaagggtccctgtgtagctattcttaaaaatgaggggaggggagacggtggacc

SEQ ID NO: 635325 - DNA, 910 bp, Homo sapiens
ctcggttgtggccaaaaaagttctccccccgtgtgaggcccactgtgtctctgtgggggaccacaactatatacggggcgttgtgcgaacaacactcttccctgtgtttcagggagacccccaacctccttgtttggggagaagcgaagcgcttcttccaagatgaattccccgttcgttattgggttttcaacaacaaaactgagtgcctcaccgtgccggtgatgaagcttcgaaaatatatgagagctgaacaatccgcccggcgcgccccacactccctcggagtattagagaaccgaacggggctctctgcaatgcagcgtgacgcaaggaaacagaaatatgtgatgtggcgcgccctaaactagatgaatacaccaacggatttatggatcaaatgaccacctccttccctacaaatggccggcgctccccccaatcccaacacctcactctcttttgagccgccgattacttcccccccgcatctattttaattaaatagtgagaggactcaccgctagcatttcttccaagaagagccgctctgccccaccacaggatccctggacaaatttctcctccagctgccccggaaaagcctcttctttcaccgtctatagtagaccgcgccctcttgaatcgagctcctcctctgataatgttcgtccccagagcgacgctactttgtactcgattgtttcaaccacatcaacaagccacaccctcaccatggtgtatgcgtcaccgcacgccttctctccctccgtcagtaccatcggtggggttctatagatcgctcctggaaaattcttgagtccttcctagagacggggtgacaagcaccccggaggcgtctccccctcatgacacaatccccccgggagccccccccagcccacataac

SEQ ID NO: 635326 - DNA, 1142 bp, Homo sapiens
  misc_feature (278)..(279): n is a, c, g, or t
  misc_feature (287)..(287): n is a, c, g, or t
  misc_feature (292)..(292): n is a, c, g, or t
  misc_feature (365)..(365): n is a, c, g, or t
  misc_feature (380)..(380): n is a, c, g, or t
  misc_feature (406)..(406): n is a, c, g, or t
  misc_feature (495)..(495): n is a, c, g, or t
  misc_feature (500)..(500): n is a, c, g, or t
  misc_feature (503)..(503): n is a, c, g, or t
  misc_feature (542)..(542): n is a, c, g, or t
  misc_feature (549)..(549): n is a, c, g, or t
gacaccgcctgcaagctgagggagccggctccggcctctgccagcccaggaaggggctcccacagtgcagcgggggctgaaggactcctcaagtgccaccaaagtgggagcccaggcagaggaggcgccgagagcgagcgagggctgctgccagcacgctgtcacgtctcagcaatagactgctcttgaggctgggagtgcaatgttgttatcatagctcactgcaacctggaacccctagtctcaagagatcctccagcctcagcctccctgggatnnctattttngttanttctgaattctactacaaaagagtgctgcaataaaaatctttgaacaagttctaatgccgttcaactggaatngaagttttcaatcgntggatatgtcaaaatttaatcagatngtatattgctcaattactttcaaattatgtacaccaagtcattcttgctctggcaaaataagaatattttcattaatatatcattcaanttganatngccagttttccttctcatttccccccagtcaaatgagtngaattantactgtctaaaaatatatattcatttgcttacctgttagtatttgttccatgtattaagaagctttgctagtatatgaaaatatatgtattaccatgtcttgtgaattagtacttttatcattttgaaatgtttgttttcatttctgctgaccgtcctaacctgggtatctattttgactggtttttaatgtaactactaacatctttttatgttcagcactttttcacaattttactttcaatgtctttatttttaaaatgtatcttctgtagacagtggacagggggtcttgttttattgaaatcaagtgacaatctctattcataattgacatattcatccatatatacttaattaatagtcgtattctgagactaatatccagtttaatatcttacgcattatttcggtatattctaatagcccgcctacctacatcagacgaatcccagaattaagcccttgtctcgataaaacaactcttaacatcccgcttattacccaccgtcccgaactaaaaacaccttacacttatcttaacaacggacttctcttgccaaggcaaacttcgcttgccatttagccagccac

SEQ ID NO: 635327 - DNA, 483 bp, Homo sapiens
  misc_feature (46)..(46): n is a, c, g, or t
tggccctcctcagctccaaagtgctgagatataggcatgatccacncatgtccagctatttttttttttaacataaatgtcattatacatgttttcccctggaggctttttttttttaaactgggagtacttgattgtcctggccttccttggcactacaaagaggttcatacttttcctacgggtccacagctttggtggtatcttaattttttggaccacataagttaagtttagacatttaggctcatggtgctcccttttatcattcattcaacagatttgcaagtggctcctatgtgccacacggttctatgaggcaggagtaatagtccagcaggagagacagactatgaggcaggtcaaatatggtgtgtacgatggtgatgagtatgggggagaaaaatacacttgggagcagggcattgggggtagggatgtagggagcggggtttccaagcacggtgctgggagagatacctc

SEQ ID NO: 635328 - DNA, 369 bp, Homo sapiens
atcacacatgtggcatcaccctgacttctttctatgcacaagatccaagaaccctctcttggggtctagattgggaccctttcctgtaactatcatgctactgcactccagcctgggtcacagtgtgagatctgtctcagaaaaagaaaaaaaacaagaaaaacaaaaactacagggtatggtggtggaataaaaagctctccttcacctcttttcaatattaaagagctgtgtgatataaaaaacatttttctcctaacaaaactaacatcgtagctaatgaaatttctttaaactggtgtcttacagtagatggtttaccatccggtgggccagtggccatagataggaatgtccctccatacttaa

SEQ ID NO: 635329 - DNA, 354 bp, Homo sapiens
tgtgagaagatcaatgtcatatctctaaggaactgcacattaaaaacagtgagatccactgcacacctattagaatggcccaaatccacaccactgataacccccagtgctggccaagatgtggaacaggaactctgattcattgcaggtggggatgcaaaacggtggtcactctggaagacagttcgacagtcttacaaaactaaacatacctttaccatgtgatccagcagttttgtccctttgtatttacccagatgaattgaaaatttatgtccacacaaaatcctgcacacagatatttacggcagccttattcataattaccaaaccttattcataatttcataatta

SEQ ID NO: 635330 - DNA, 837 bp, Homo sapiens
tgtaagtctacaacatgctaatctgcctattctataacagctttgtcactctccctagatctaccgcctctctctactcttgaccccgttattggcttactagttgagtgtgcctgtttcctaaacaggcagcacactccttgattcctgactaatctctccgatcctcgaggatcctcacatgaacgtgtgctgtatcctggccgctgacattctacttcgacatctgcgcctctcccgagtatcttgaacgcatcctgtgacaagttacgagcactgagtgtctccctgactcgccttgctacttgactctattgccaaatcaagctgtggggccactccgaattgggtgacatggaaacctttcaccgacgttccctcagactcaaagcgtgggtcgtaaagatttgctccacatcgcttgactagttactttcttcgcccatttattgctcctacaaatgcgagcctgaggctgcggactctcgttggatgagtgacatagtcgaactagcctaatactcccgagtatgacaggcaccacaattgcttattatataattgagcagttcagctaagtacgtacatgggctctacatggagtctaggcaccgcacatttcaggcttatatctgagaatgcctagtatcggccggtacgtcttaccaccagagacttcatgttgtcagcagtaacacgacacggtagtagttactagcaggacaatcgctgctgcacaatctagtggcagcgacacgcagggtctgatgcgcatcgtctaacaattaaatcccctaaaccatctttggactggcgccgtatttaccctaatagacc

SEQ ID NO: 635331 - DNA, 765 bp, Homo sapiens
ggctcacagagaccatggaggatggcaagagcatggactatgctgaacgtatcgaacacatttgtgcgactggcagacactacactttgtacaacgactgacccttcggtacctaccactgagaattcagcaccctgggccaccatccacctgccccgcacacttgtcatctaattgaaaaggacatgttacctggttcctaggactcaggcgttgactagggaacaggtaagaggaggagatcatctgcatgaacgatgctgtctgggcgagcccgaaggccgaagacgaccagaaactatgactacagtactaacgaaggtagcctcggttccaggaatgactgggagttcctattggcaaggaccagaccgtatgactagagattccgaccaagcgacttccgctgaccaatcgcccttgctgagtcgcagatctgcataacgaggaatggaccagagcaatgcatgcgacgcatttgtgcgaaccactgctccgcaagtggaggtgatgattgaccacgttccgtctcagtgctaccctgtcacccatgccattagtctgtccacatgagagtctatcagcatccctatcctgtttggctactatgcatctctatagcctgagttcttgcatcagtatctccattctgctggcagatgatccatttagagtcttgttgcgccagtctggcgacggtggtcggcgcgcatgtctgtctcaccctccatcgggctccgctccctggccgggcctctggatccg

SEQ ID NO: 635332 - DNA, 197 bp, Homo sapiens
ggaactgagggcagacagcaagacggactgcctgacagagaacaggcgctgagatgccctgaccctgttgctggcgctctgagaggattgcctcagggtgcaggggagctggagaacaccctaggtgctcaggctgaggcagcttctgtgggggccaaggaggaggaggccacagagggcggacttgtcagatctgt

SEQ ID NO: 635333 - DNA, 496 bp, Homo sapiens
atgagcttgcttgctggaatatacttgaaaaggtaagagaagggcaggaggtgacggaaaggagtacataaatatttgccaaaaaggctagaaccgctaatataagtataactataatgtactaaacccgctagcggggactggactacgctggtgatggtgacgacgctggtggggagggtactagcgcgcgactggatagctggcgtgctctgggtagctggcagacacctacgtgtaaatcagaggagatggcggaagagatagcctggatccatgtatacatttcctcatacgtctattggcttggaagaggtactcattgccatcattaagtcttagcttgaatacgtgtatctactattttgtaatcaagggccacttcgcagacagcttctatcaaactacacagggacctcgctgtggtagggaattccagaagcagcagtctaagcatatttgtagaaacccatatcaggttatatatgacacaaaa

SEQ ID NO: 635334 - DNA, 221 bp, Homo sapiens
  misc_feature (61)..(61): n is a, c, g, or t
  misc_feature (157)..(157): n is a, c, g, or t
gatctagaggatcccggaaaatagccgacgcagggaggcaggaggcagccagaccctcctngttctatggcagcacagacctaggggagaaaccagaacgcgctgctttcctgagcaaacacgcattggggctgagcttggtttcccgaggagagtngcactttcgcgaaagcaggttgcaaggaagctagattttggtgccattttcttgaacatggcgc

SEQ ID NO: 635335 - DNA, 1123 bp, Homo sapiens
ctccctctctccagactgtcgtggtcgttcggtcctatgtagcgccgggacctccgtgaggctgaggggggaacagcgcggccaggagcccctcgggcccggcgcccttgcatttcgatctccgtgatgatcgatgatcgcggagagaagaagggcccaagcgggagcttggtgtcccggcgtcccgtggggcgcagggaaggagtggcgtctctgagtcaacaactcgctttcgaatgcttgcgttagacacttgagctgcagtcttagagcgtagtgacccgtgctgtgtgaactgggggagaggtctgcgcgtgatgcggctctaccatgacagctgtggctagccacgggcatacaaataggcaagggcgtcagacggtggcagagacacgaggagagacaagatcgagactgggaaggaatgactacacgagaacacgtggcgcctcagcaggcagtcatcagtgccaagtgggcggactccggtaagaacgaaaaagaaccacggggaatggacaacgtagacgaggcaagcccacgggcagaagaccaatcggggaacagagcgagtgagctaagaagatatgcgagcggcatacctagtagcagcgcatggagggacggaccaactgggctaagaacaccggagcgcacggactccagagtcgccctggaggctcccgagagtaaggcacgataccacgtgcgatgaggatgacagacagggaaacagcctattgacgataccgagaactaccacggacatccgtggcgacagggggtaatcacggagggatgccccagggacagacataccatggggagagaaggccaaacaagggtgccacccggggcagggaacgaactgagcaggaagttggatatgccagcccaaaggaatgggcgacgatgatgggagcataggggcacccgaccaccacccgtaataaacggacgaaaccgaaggggcgcccgcccggggactaacaaacggcacgtacacgacgacgcggatcgctaggagacgcaattgcggaggttgggaactgggaaaattcgcaatgaccagaagaaggggacattcgataccagtccatgtgggcgtttcgtgagggccacc

SEQ ID NO: 635336 - DNA, 305 bp, Homo sapiens
  misc_feature (39)..(39): n is a, c, g, or t
tcggtttatcttaaagggttttaaatatagaaagcttcnttagtcttatgggtgagagtgctgtttaagccttacctaggtatgtctttgaacatttattacagattgttatttgtgactatgaccactcatgttcatggatttacagcatcaagactatgacaactgggcctacaaaataactcacatagtagaagtgtgccaccaagctgtggtctagaatgtcctgccaagcttgcagacttcagttccatccctacgacacaaatggtggaagactgactcctatgatttgttgtcgacgc

SEQ ID NO: 635337 - DNA, 522 bp, Homo sapiens
gatacgaggtcgagcgcgtgacccctagttgagaagtttcaatagcattatgtatatgataaatacatcactgctaaaaaaatgctaacaatcttttgctggtggagggtcttacgccaacgttaacgatggctactgactcatcagggtggtggtggttgaagattacgatagctgtggcaatttcttaaaagacaatgaagtttgccacactgacatcctttcacaagacttctctgtagcatgtgatgctgtttgatagcatgatagcattttacccacagtagaacttttttttccttttcctttttttttaaacgcaaggtctcactctgtcacccaggctggagtgcaggggcgccatctcggcttactgcaacctcctcctccctggttcaagagattctcctgcctcagcttcccaagtagctgggactacaggtgtgcaccacacctggctaatttggtagaggtggggttcaccatgttggcaaggctgctattgaaacttctaaaactagg

SEQ ID NO: 635338 - DNA, 470 bp, Homo sapiens
  misc_feature (28)..(28): n is a, c, g, or t
tgtgatatggtttgggtgtttgtccccncaagtctcatgttgaagtgtggttcctcgtgttgaaggtggggcctggtaggggtggttggattgtgggggtggatttcttatggttgatttgatgctgtcctcttggtgctgtcctcatgatagtgagctctcaggaaatctggttgtttaaaggtgtgtggtgcctccctcgacccccacctcttgctcccactcctgccatgtgacaggcctgctccctgctagccttctgccatgattgtaagcttcctgagacctcaccagaaacagatgccagtgccatgcttcctgtacagcctgcagaactgtgagccaattaaacctcttttcttataaattacccaaactcagatatttctttatagcaatgcaaaaatggtctgacacaccctatgaccagtcattgaatatattatccaccccgagccctatgcagtctc

SEQ ID NO: 635339 - DNA, 274 bp, Homo sapiens
ggcacgtcgagtcagctgctatctgatcagtcacccgaagattcaagatacaccaaatctcagttggtacggtaacgatgttcatcttctagagcgcggggttttatataataaagtatgcctgtgatattaaataataagaatatggcaattagcgatatagcatacccaaacaaagatgttctcgatacagtctggcaaagactatcccaaggttattttaatgaattcagacatttggcctgtggatatttctccatcctaaaaaaagtgg

SEQ ID NO: 635340 - DNA, 371 bp, Homo sapiens
  misc_feature (103)..(103): n is a, c, g, or t
  misc_feature (131)..(131): n is a, c, g, or t
  misc_feature (195)..(195): n is a, c, g, or t
  misc_feature (226)..(226): n is a, c, g, or t
  misc_feature (328)..(328): n is a, c, g, or t
acatggcaacgccgtttccgagaccgaggctcgcgtccgcgggacctaggctagccgccttcgcaagaagtctcccaaaatccatctccctgaacccgtcccnaccattcatagagtcacgctcgttttcnaacttgctgtccttcaagtcagacacaattgctcacggcgcgcagcagctctctcccagaccangatggttccgagcgtcagcaggcgcagccgnactcgacaccgtccacggccgctcccaagttctcatacaacatcgcagcgtccttcatcggcaaggacaggccgtacgacccctcgacgcacgtcttccagntcaacccgtacaaccggatccagcctgcgcgcaaccgccatcg

SEQ ID NO: 635341 - DNA, 614 bp, Homo sapiens
  misc_feature (21)..(21): n is a, c, g, or t
  misc_feature (38)..(38): n is a, c, g, or t
  misc_feature (246)..(246): n is a, c, g, or t
  misc_feature (250)..(250): n is a, c, g, or t
  misc_feature (253)..(253): n is a, c, g, or t
  misc_feature (256)..(256): n is a, c, g, or t
  misc_feature (267)..(267): n is a, c, g, or t
  misc_feature (306)..(306): n is a, c, g, or t
gcatctactcaaaccacccangaactcaccattccaantaactttaattgggctggcataaattcccgaggcgccaacattaatgagatccgccagatgtccggggcccagatcaaaatggccaaccaggaaggtctctgtaggcaggtactatcactggtctcgccagatagtctgcccagattaataagccagctttctctaaagggcatgggtgcagtagacaggaggttccctcaaaacccntttntgntgntctcccatganccaactgtgtaggttccctcaataacccctttctgctgntctcccatgatccaactgtgtaatttctggtcagtgattccaggttttaaataatttgtaagtgttcagtttctacacaactttatcatccgctaagaatttaaaaatcacattctctgttcagctgttaatgctgggatccatatttagttttataagcttttccctgtttttagttttgttttgggttttttggctcatgaattttatttctgtttgtcgataagaaatgtaagagtggaatgttaataaatttcagtttagttctgtaatgtcaagaatttaagaattaaaaaacggattggtta

SEQ ID NO: 635342 - DNA, 472 bp, Homo sapiens
  misc_feature (78)..(78): n is a, c, g, or t
ctgtgccacgtatatttaagtttcttgggggccccacggtatattcttagaatccacaaatggcccacaggcgttttncccttctgagagaaagggcacatggggtcgcacagctatgagaccacagtgtaaggttccctccacataaccccttttctgctgtttctcccatgatccaactgtgtaatttctggtcagtgattccaggttttaaataatttgtaagtgttcagtttctacacaactttatcatccgctaagaatttaaaaatcacattctctgttcagctgttaatgctgggatccatatttagttttataagcttttccctgtttttagttttgttttgggttttttggctcatgaattttatttctgtttgtcgataagaaatgtaagagtggaatgttaataaatttcagtttagttctgtaatgtcaagaatttaagaattaaaaaacggattggtta

SEQ ID NO: 635343 - DNA, 1277 bp, Homo sapiens
taacaccgcgcttttctctctttttttttttgttgtgtatatataaaacccccttgtgtgtgtggcccccacggacgggggggcgcgcgcgggcgcgcgcgcgcgggcgagaggagaaaaggcaggggggggggtttagggaggggggggcagagagacacacaccgcgcgagagagagagagaaaagcaggggggaaaacacaaggctctctctctctatacgagagagagagagggtgggcgacgagagagagagcgggaggggtgtcttataaagagagagggtcgctctagagagagggtgccgcgtgggagagagagagagcgccgcgcagaggtgtggagagagagagcgcaccgcgcgcgcgcgggagagagagggtgtacacaccacccccaccaacacacacaccaacagccatccacgcaagcagagagcagcagagtgtatatcttgagagagacgacgacagagcgacgaggagcgagaagaagaaaagaccagagagacgcgcgcgagagcgcggcgcggaggagagagcgcgagaagagagagagagagagagtgtgcagcacacacacacacagcagacgcgcgcgcgcgagaggcgcgcgcgcgcgagagacggacagctgctgtggagagaggagagcggagagcagcagagcgagagggacgtgagtatgagaacgagagacaaatatgtgtagtggtcgccaccaccaccacaaacaaaacaccccgctgcatgagaggaggagcagcgcgcgagagaagcaaagagagagagagagaaaacgcggggggcgcgcgacgcaggtgagagaagagaagagcagcgcccgcgcgaagagcagaggaggcggagggggcggggcgacaaaccacccccctcccgcgccgcggtggcgcggccagcaaatactacataaaaaaccaccaccacgcaaacgaaagcagccgggaggcggggccgccacacgacggatggcgatagcaacatcaccgccgcgaacacgacgacaaaagacaaaacaacacaagacgggccacggaccgagaacagcagaggggaagggcgaacccacacgagcagacgacgaagagacgcaaacaagagaagaaacgacaacgcagtccagtacgcaggagagaaaagggagcgggcggcacactaccaacaccacgcatacacaaaaaaaacacactcccaccacaaacaacccgacgggaacgacaaacgcgcagcggcgcccccacaacaaagaagaaaaa

SEQ ID NO: 635344 - DNA, 560 bp, Homo sapiens
  misc_feature (21)..(21): n is a, c, g, or t
  misc_feature (38)..(38): n is a, c, g, or t
  misc_feature (246)..(246): n is a, c, g, or t
  misc_feature (250)..(250): n is a, c, g, or t
  misc_feature (253)..(253): n is a, c, g, or t
gcatctactcaaaccacccangaactcaccattccaantaactttaattgggctggcataaattcccgaggcgccaacattaatgagatccgccagatgtccggggcccagatcaaaatggccaaccaggaaggtctctgtaggcaggtactatcactggtctcgccagatagtctgcccagattaataagccagctttctctaaagggcatgggtgcagtagacaggaggttccctcaaaacccntttntgnttcccatgatccaactgtgtaatttctggtcagtgattccaggttttaaataatttgtaagtgttcagtttctacacaactttatcatccgctaagaatttaaaaatcacattctctgttcagctgttaatgctgggatccatatttagttttataagcttttccctgtttttagttttgttttgggttttttggctcatgaattttatttctgtttgtcgataagaaatgtaagagtggaatgttaataaatttcagtttagttctgtaatgtcaagaatttaagaattaaaaaacggattggtta

SEQ ID NO: 635345 - DNA, 192 bp, Homo sapiens
tgattcttcgtgtccggccatggacggcatacgcgagaactatctcagccagtattctgaaattgctatccagattatgatgcacattcaggatcagctaaccctaagggagatctgtgcgctggcttgggttctgtgatgagagtcaaagaacatgacccattgcatgcactctcggttgcgcccgaccta

SEQ ID NO: 635346 - DNA, 127 bp, Homo sapiens
atttggtcccagagtgggcaatctctctgttcttgttatcttagccaactatactcatacctacagctacagaaagcatgactaggaactggaaatcactttgggtcctgccttcattagtgacgtt

SEQ ID NO: 635347 - DNA, 985 bp, Homo sapiens
gtgcttgcacacacatgccgggcggggattccgacgtattgtgggtgtccggacaacgagtgtgagacaacgttcgccccgggggtttttgcccctgccgcggggggtccgtccgtcgccccccgggtctggggattattgccggggaacccacggccgcagcctcacacggcgtgtgtaaccgtgacccggcgcgtggcctgttcaacggggacctcccctgagatgtcacctgcctgaaggaggggacaccacggcccacaggactggaggccccattggcctgtgggactgtttccacccgcggacggttcgagacccctgtttggattccggggccacccaaggagaggattacgtacctggttgaggtcccaccggcgtcccagccctggagacccctttccccccggaacccctcgaaacagctcgtccttattagggattcgtctcccccgatgggcaaatcatagagtgatctccgaatgttggcccggcctggtggctctacccccggggtctccgcctcccgagttgctgggattatgggcgcccgcccccacgccccgctaatttcttgtgagtctttggtagagatggggtttccccgttttggcccggctggtctcgaactcctgacctcatgagcctccggcctcggcctccccaagatgctgggattataggcatggacccccgtgtccggccataatattttcgtcttcttgaaaggactgcttatatacatgaattatatggtatgtagccttttgagagcgacttcttttgctatgagtcataacctttgagattcatccctatttctccgtgatattgatagcttcttatttctgagtccctcccttgtgtggatttactactgtttggtcccccgttgcaggatgtttaggatcgtttgccagtttggaccattaccagtaaagctgcctataacctttgtacgccaaacaacaaaataaatata

SEQ ID NO: 635348 - DNA, 1257 bp, Homo sapiens
gggactcactgctacctactgaccagacacgtgacaactctctacaacttttacactactgatctgttacgtacgtactggaactactactttcctgacgaggacgacgacttcttggattactacaccttacatggaccgactctacttgactatttccatcagtagcagtcacagtatggaccccaattcaaatcctttgcaagctcctgcaaaccaatccaattcatgcatctacttcatcctgcagcaaagacattacttgtatgcaggcggtgcaagattttcacacactttcatcaagtcatgcattcatcacatcagtggcagcacagcaatatagcacatccatcaccaagggcacacattagggtccatcattcactagctgatgaagcatttcagatcctgcatggcagcaactcatatgccccagtgagttccagcacagcaatggcacaccattgaagcactcatggccaaaactgatgcgtcaaggcaacacacacaggtcatggccatataggacaaaatgttgtgctttcactgaagcaagcatcagtagagtgcagcatatggccaaaagcacaacaagacttgggtataatccccagacgaccaaacaggaacgacaggcagcatagaacaggaacatttgcttacacagcagacacttctggctacgcaatcctaaaccctttccagtctccttgtcatgttcactgggcctcgagcggtcacatcatcactgttgacagggacagatcttaccaactactggagctaaacacacggccaacagcagcaagacaaacgccatcagaaccataccagaagaaaaacaggtcatggcttcacgacacagaacacagggaggacaaataaatggacggaccaacgagacatcacgcaccccagagcaggacacaaactaacaacacatggagagtacctgggagagacgacacacacaacggactacaattcactaggacaagaaggatactaacacccacagacaactacaacacgagcccgataacactcaacaatgacatcatacaagacacacgaacaccaaaacaaacaaaacaccgagagggaccagcaacagaacatgcgaaacggagcaaacccacagaggaggcaatcaaggacaacaaacaactaagacaaaccacaacaaaaaagagcagcccatcaatgagccgcaactcaataccacacagcaagatagagagcaccaccacagctacc

SEQ ID NO: 635349 - DNA, 423 bp, Homo sapiens
  misc_feature (375)..(375): n is a, c, g, or t
actactaaattcgcggccgtcgactctcaatctcctgacctcgtgatcgtccgctcgcctcccaaagtgctgggattgcaggcgtgacgaccgcaccccgccaaaccaaggattatttcttaagaaattatatactggccatatcctccaccctgtcaccccttaggttaaaagaactcctgactcaaactctgcctgttgagttcacagttcaccactcctggcctggtgacttggtgcaaattaaaacttgaaaagaaggcaagctccacccaagccgggaaggtccctatcaagtgcttctgatcactaagacagccgtgtgaacagcagaatgggggtggactcactatattccagtcaagggactagtanaagagaccccagaaggaagaaaaagaccagtggaaagtgcacgggtca

SEQ ID NO: 635350 - DNA, 1122 bp, Homo sapiens
  misc_feature (182)..(182): n is a, c, g, or t
tcgatgtatcggggctctgaagatggacggcgggaatccgcggaccatcgggtcgggtctatgtctcccgattaccgcgctcctggagacggagagcaatgtcaaccttggtacctgggtgctacgctgggggtggttggggcgaaaatagtcgataatgcggccactagcgtgtacttagnttcaacttcttgttatgccattcttaccgcgagacaagataggactgtgaattgaatgcgcaggtgcaagctattgaagtgcggcgggagactccagtggagggctctcctgtgttcggtccatgtgagaactcggagggcagagcgccgtctggatggcgatttgcactggcgcgtatgcgattttctgagcaccgatgggcaattgccgtgaatgccgggcgtctaccgaatatcgctcgtgcatgggaggactcgatcgacgcataaggcttcgtgtgaacggcgagagaatgaaactgcccttgatatggagtgagatggaacgtctctctaatgttggtgagcagtatatgtgttacatagggaacagtgatggatacaagtacccatgataggaagaattgtatttatattctcacacatgcacatgatttgcagggaaatcatgatatcaatgcgatgtgcgtggcctgagagggatatctctccaatggattgagggtttgttgaaaggataaccgtaacgaagcatgaaggaaatacggtgcagagagagactacaatgcatggttcgagggggattttgttgctaatgcgaggtgacctaccaatgggcaatctcaggtcctcggtggtgttgaatgtggcttcacaggcggtgggcaaccaggacattcccgtggggagtcgttcaaacgctgggcgaatgcttctgcaaacgagcctcgtgtcagccgagatggctacgtggggtgggacacatactcgtggggggcccatactgtcccttggcgaaggtggaatggccgcagaagggtcttgtggggggggcgcccatgccctggcgcagggggcttgtggtatggctccgccctgtggtgaaaaatcggctgtgggggtataacacgcgcgcaaacccgcgggcacacaccccggg

SEQ ID NO: 635351 - DNA, 401 bp, Homo sapiens
acacacacatacataccccaacccttaaaaaaaagggtggcctgaaattttagttacaccacatgtggttttcatttgtgaaaaatgaacaagctgtttgtggttaaactgtctaatcgcctgttatcaatctagcactgcattcaatatttacaggatacatcagcttctgtgccacactccctctacgcccgggggaggtgtgattaaaaaggaggaggagagagtttatcctgaggaataatatttccaatgcagccacactcgcactacatctggttgtgctggtagcggcagttaaattgaaatatttcacagcgtgtgtcagaaacatgcgaatgtaattatgacagatctgattaagccagggagcttgtggcactccggcttaatcagatatg

SEQ ID NO: 635352 - DNA, 578 bp, Homo sapiens
cgcataatataccgtcggactaacgcctataccttctgcatatgaattaacctagaaatactttgcaaggagagctacagcaaagactccccgataaccacgacgagctacttatgagcagttataatagcacacccgtctatgtagcatacatatgatgcgcaagagtctatgtgtggaggcgagaaacctaccgagcctggttattcctggctgctttcgttaataatcttagttcaactttaaatttgcccacagaaccttctaaatccccttgtaaatttaactgttagtccaaagaggaacagctctttggacactaggaaaaaaccttgtagagagagtaaaaaatttaacacccatagtaggcctaaaagcagccacccaattaaagaaagcgttcaagctcaacacccactacctaaaaaatcccaaacatataactgaactcctcacacccaattggaccaatctatcaccctatggaagaactaatgttagtataagtaacatgaaaacattctcctccgcataagcctgcgtcagattaaaacactgaactgacaattaacagccca

SEQ ID NO: 635353 - DNA, 309 bp, Homo sapiens
ccttccccccttcccccctttaagcgaaagggaggtaagaaaagttgaggccttggaacctttttccggggggcgggtttttcgtttcaggggaaagggtgccccctgcccctcttagaaattttattccttttttttttagttgttaatgtttattataaaaaaaaaaataaaaaaatttaaaacattttattttattttttttatattatttagattaataacattaatggcataaggggttgatgcttttctttctttagtcttgcctcctttaagtctttggtgatttaggcttttttaatatta

SEQ ID NO: 635354 - DNA, 359 bp, Homo sapiens
ggagcagagcagccatcttcgaacgtggggctgcatcaggctggcgtttatttaacaagcaacaaaatgtcatggttaagaaaattattcttgctttcagtgtaaatcttcgcagcgttctaaacaacgttcagtcttctgctcgcccctttccctcactgatgtctgcacttggttgaggtctcctggagcctcacaggctctgctgttctccacttctcacctgccatccacgccctgcaagctcatgcaaacaccctttcttcctcctgcggcagagttgttcaggttgcctgggcaggggcttaaacagtgccagcccctgccatcccaaagctattgttaagccccccaggcgt

SEQ ID NO: 635355 - DNA, 145 bp, Homo sapiens
tctagagatcccacactggtcgagtctgatgtagtaatagcttatcctgtaataatgctgtgagatcataacaagctgaatcgcttcaaagtgtagacatcactttaacgatcctgtctattgagccccacatcatagtcgctcg

SEQ ID NO: 635356 - DNA, 419 bp, Homo sapiens
ctcagacccaggagtccatactgcagcccctcctccctcagacccaggagtccatactgcagcccctccttcctcagacccagtggtccatactgcagcccctcctccctcagacccaggagtccgggccccagcccctcctccctcggacctaggagtccgggccccagcccctcctccctcagacccaggagtccagacccccaaccccttctccctcggacccgggagtccaggccccagcccctcctccctcagacccaggagtccggacccccagccccttctccctcagacccaggagtccgggccccggcccctcctccctcagacccaggagtccaggtccccagcccctccaccctcagatcttctggaatctggggccaggcacggtggcgcacgcttgtattccggct

SEQ ID NO: 635357 - DNA, 122 bp, Homo sapiens
gttatgctacagtatacaaagggaaaagcaaggtaaatgggaagttagtagctcttaaggtgattaggcttcaagaagaaggagggacaactttcacaggtattaaggaaggttctttttga

SEQ ID NO: 635358 - DNA, 745 bp, Homo sapiens
ggcagatcgagctaccctctaaaagcagtttataggggtaaaaaataagagagcacacccaacgctctgaggcacaaacgggaagaaacttcttctggacatcctcctgcttctcccgttactgatcgtcagctccctaaagacctttaagaagctttttattcctaagaggctaaaatgaggcaccgacgaaagagggctgattacagtagctcgacatggaattgcgagactgactgcctatgaattctttaaactcaaaagcaagctgcctctctggcatataaataagcatggactggaggaaacagctgccaaatgcaagggactgggtgccaaagttcatacctttgtggtagactgcgagaaccgagaagatatttacagctctgcaaagaacgtgaatgcagaaattgtggatcctccacatttagtaaataaagcttgcgtaatctataccatagatttgtatgctacacaggatccatatattagaaaagactttggacgttagtgtacttgcacatacctggactactaaggcctttttttgctgcgatgacgaagaataaccatggccacattgtacatgccgcttagtacgatgaacatgtataggaccactacttactgagttactgcacagcaagatagttgctggtgaggctcaaaaaatttgacagaataactggttgccttacaacaactgggtcaaacatgctttgctccttagccttgccttatc

SEQ ID NO: 635359 - DNA, 844 bp, Homo sapiens
attaatcttttcaaaataacagctctcggattcattgattttttctggaagcgtttttaggtgtctcttatccccttcagttctgctctgagtttatttatttatatgtcttactgctagctattggaattctgtttcgctacttgtatctactagtctcttattaattttcgatgttacgggtagtcgattcttcagatacttatcccgctattactacctgacactgaccttaacggcctaaactacactcgaacatcacaggccacgaaatgaccgacaattcctatctgaacccctacacctgcagcagaccacaacaccttaccgaccataacccagcacactaatcctagggggcaccacttagggctaccagcaacgggctggtaccacgccgacaggcgacaacatctccatcagcccacctgaaaaccaagggccaccgagcccttcccaacacacacgggatcacttcaaatcagcaacgtcggtccagcacatttccaccgccaaagcccgtacccacgcgaccgtggaacacctggacggccttaccaaccgcacaggcccacgcgaacacacacactgttccgacaccgcccccccaaaaccgtccattacgccgcggcacacgcgacctgcacgcagaaacatatacagcccgaaaccacctcgcaccaacgcctgaggaacccctggcaccggcgaaacacccgggagcagaacccaaccagcagcgccccatatttcacccaccccgcttggcaacctccgagagtccccacacatagctcagccgcaaacctccctgggcacgcgcaacgtttccgctaaaagaaca

SEQ ID NO: 635360 - DNA, 317 bp, Homo sapiens
ctttttttttgagacagagtctgctgccttccagtctaggctgaaatgcagtgatgcaatcttggctctcggctcactgaaacctccactagctgggctcaagcgatccctccacctcagcctcccaagtagctgggattacaagtgtgcaccaccatacctggctaatttttgtgtcttcagcagagacagggtttcaccatgttggccaggctcgactcaaacacctgacttcaagtgatccgcccgcctccgcctcccaaagtgctgggattacaggcataagcccctgtgcctggcgtcgacgcggccgcgaa

SEQ ID NO: 635361 - DNA, 189 bp, Homo sapiens
gcagaatgctccgaaagagggtgcgagaagaaaaggccgttctgccatcaacgagggttaaccgagatacaccatcaccattacaagcgcatccatggagtggcttcaagaagggtccacctcgggcacttaaaagggattcggaaatttccattaaggaattggacctccagttttcccatttcaacc

SEQ ID NO: 635362 - DNA, 233 bp, Homo sapiens
ccaaaaaggggggggccaagtcgggcatgggaaagacagcagtgtttgtcttggcacactgcaacagtggagcagttactgggcaggtgtctgtgctggtgatgtgtcacactcggggagttggcgttttcaagatcagcaaggaatatgagcgcttctctaaatacatgccccaatgtcaaggttgctgttttttttggtggtctgtctatcaagaaggatgaagaggtgct

SEQ ID NO: 635363 - DNA, 363 bp, Homo sapiens
agtatttagcagtaccttgacctgtttgtttgtgtgaaaagacattttcaaagatgaaatacgtgaaatcccattacacatcagcattaacagattaacattttctatttattccaatgaggggataccaactttcagcccaaattgagcaaaatgttacctcccgtcccctgccaaaaaatcccattattcccattagtagaactctattactaaaaaaagaaaaaaaaattgtactcaatattttgagttttcaatttttagaataaaaatttggtgaaaagtttccttgagtacctaaataatgtccttcattttgtcttagcttgcaaagcctctaatatttgctacctgcccttttca

SEQ ID NO: 635364 - DNA, 233 bp, Homo sapiens
agaccccagccagcagcctccttcctacggggggtcccatccgtgccagggtcggggtggccacctgccggcggcagcggctttggacgagggcagaaccacaacgtgcaagggttacacccctaccgacgctagcccgcggcgcccgcgacgtctgcacggaccagacccaggattccgaacttgtgaactcgtgacaatcacaaaattggagagtgaaattacggacagga

SEQ ID NO: 635365 - DNA, 388 bp, Homo sapiens
  misc_feature (187)..(188): n is a, c, g, or t
  misc_feature (193)..(194): n is a, c, g, or t
  misc_feature (203)..(203): n is a, c, g, or t
  misc_feature (227)..(228): n is a, c, g, or t
  misc_feature (251)..(251): n is a, c, g, or t
  misc_feature (340)..(340): n is a, c, g, or t
gctcgctgctcccctctggggcgctccaccttccagcgcgactgggaaaaaaaatacttattcttgccataatacctgaggcgacaaaaaattaaatttttaaaccccatgagggaaatcgtgcacatccaggctggtcagtgtggcaaccagatcggtgccaagttctgggtaaggtgaatcacgnntgatnngaacatggnctattcgaacccccccaccggcanncctaccacggggaacagcgaccntgcagctggaccgcatctctgtgtactacaatgaagccacaggtggcaaatatgttcctcgtgccatcctggtggatctagaacctggngacccaattggggaaacctttccgtgggtttttccggggctttccaag

SEQ ID NO: 635366 - DNA, 196 bp, Homo sapiens
taacagtttatctagattacttttgaaaaccgagatattagacaccatcatttaaggtgagttattttcttgttaaccatttttttaaaatagccaatgaacatcatatgctcacctaaataaaagcctcaaagttaaattcgtaggtattttggctgatatctcaaaaaatttagctgacaacattgaacttttc

SEQ ID NO: 635367 - DNA, 278 bp, Homo sapiens
gggatactggctagacatatcgaagaataaactggactcctacctctcactgtatgaaaattaactcaaaatggattaaagctttaaatctaaaacctcaaactataaaaatcacagaagaaaacctaggaaatatacttcttgacattggctttggcaaagatatgtctaagacccaaaagcaattgcaacaaaaacaaaagttgacaaatggaacctaattaaactaaagagcttctgcacagcaatataaattaccaacagaagcacccgtctga

SEQ ID NO: 635368 - DNA, 967 bp, Homo sapiens
aataccagatggaggtccgacactgcttgtctgcatactgccatcagcagctggtgatccttgtatcctggcaaaggctggatcttggtccggtccagacgcctaggggcatggagaagagaatgtccgatgagagttagaatttatagcaatatacttggccctgggtcgaacagatatagggtgggcacaagagatcttgacgtcactttgcaccttgtgacagcgaagcttattaagtgcgattaggaacagtgagaaccatgtatagtgtcagatgtgaaccaatgaactcataatgtgaattcacttagaggaacatggtagtgtgagaggggattgaagagaggttgggaatgccaagtgagaagggcatggagatcttagggtcaacagtggatttccacttcgtacaatataagatcactaacatctaaatgcagctgcaaggggttactctaaaagaagatcacatgccatataccatccaaatagatacccaactgatcgcaagtctgcacgtcaaaaaagtgtgcacaagacgaggtagtgagcaaatctgttccaactgtactcgcactcacgctatcgaggtgcgtgactgggtggctgctcaataaaagaagaggggaaacgcattgtcactgagacagcttttgaatgaattcgcccatgtactagttgtgctgtgcttatgaaattttaatggtaatttgtaagagacagttaaatgtggaaggtgaatgacatgacattgtatactggcctcggacattaatgagtgggtattccagattgggagaaggtgaactgctggtgtgaaaaataggcaagtgagcagggcaatgggacaactatttacatgagatacggtgagtcatgggtacaacaatatggaagtggtggttttgcggaccgtgggaagttactcagcaattggagaaaacatcgacagggaaagtagaag

SEQ ID NO: 635369 - DNA, 509 bp, Homo sapiens
  misc_feature (24)..(24): n is a, c, g, or t
acctgagagtgaaggtcaaaccanagaacacaagctcactcacaataatcacaaaaagaataaaatacttaggaatacagcaaatcagggagatgaaaaatctctacaatgagaattacaaaacactgctgaaataaatcagagatgacacaaacaaatggaaaaacattccatgctcatggagaggaagaatccatattgttaaaatagcaatactgcccaaagcaatttatagattcaatgctattcctatcaaactatcaatgacattctttacaagattaaaacaaaactattttaaaattaatatggaaaaaatgagcctgaatgaccaaggcaattctaaccaaaaagaacaaagctggaggtattactttacccaacttcaagctatactataaggctacagtaaccaaaacaacatggtactgttataaaaacagacacataaaccaatggaacagaatagaaagcctagaaatatttcacacacctacaactatctgatc

SEQ ID NO: 635370 - DNA, 410 bp, Homo sapiens
aggagaaagctgtatagagacacatcaaagctagattaactagaacatggaaatagggttatagacaatccacctatgagaaacaaatctctgaacaaataattaaatgaaaccacgcccccccaaactgttcaagtggcagacaacataaataaccgtaacttatatgccaacacaccttattaaaaaacaacaacagcaacaacaaaaaaccaggagtcagaggataaccttagctcctccaggaagtgtgtaccactgcttctggcctgcaggctggggcggatcagggacctgtcacacatcaggatagttgcagtcctctaccgcggagctggcgtcggacaccaccgaggaactggccccgtggctgtcggggagattcacaccggagtcatgcccctggtagg

SEQ ID NO: 635371 - DNA, 250 bp, Homo sapiens
ccctttttcccccttttatcaaatcctttttggcccccccccaattccccgggaacatcctgaaggggtttccccccccccgagggtttttcccaaaccccaaggggaaaaaccggtttttttttttgattttttaataaattttttttaaagaaaaggccccagttttttcccccccggggttaagggttttattaagggggggcccccttaatgttttgaaaaaaaaaaaagccttggtttaaggcca

SEQ ID NO: 635372 - DNA, 1459 bp, Homo sapiens
  misc_feature (285)..(285): n is a, c, g, or t
  misc_feature (1173)..(1173): n is a, c, g, or t
ttgggcaccccccacgtggggggaaccacttgggggtctatgtgggataatgccacataatttgggtcccctcttggttgagtatgttcccccacgggctctctccactatgtagccacgatgtctttttgccctccattatgaggatgatgcgatataatgtgatgagtgttgttccccccatttcttctctttttgttagtgggttgctctcccccctcttctgtgttgtccctcccctggggattctcgttgcgctcggaaatatattatatttggtggccncttttggcgggcgggcttttcgtggggcggagagaacttataatatagaggagtacctctcttgaaaaatatgggtgtgttaatagatttaagagagaaatagtgggttttaaacaaagatgctccccccctcgctgctgttttggtcctccccttcgtcgagaaatatttttttaggatgtctccactatactcttcggcggggtgaactattatagagagatattttttgtccttggggagccaccacgcgatatattgtagggagaaggttgtgttaataggctctctcgaaatgtgtttctatactctcgtgtatagtttctcccctcctgaagatatctctcgctcgagatttgccacatctagtatgttggtagagatgatgtgcggctctgtttactcggcggagaagagcacacgcgtctgtgtggtgcttataataaacagcgctgcggggatcacacagagactctttggtgtgtcttctttttgggtaataactctcatcgccccacagctgatcactcttgatatatatataggtgaatatgatagcgctcctctgtgcgtgcgccgctcatcgggatgagcccatctctttatagagagagctcccacacatgtgtgtataagaaagatataaatatatatagtctctgtgtgtgctcagagactctctctgagagtatgtctctctacttgtctcacacaatagagtgtgtgttgctcctcttctgagaagagactcactcacagagagagagcacacactcttctcttgtgtgtgataagacgcacagctctgtgcacgcgtgccacacacacactctatatatctcttgtgtggggtgtgtggtgatatatatatatatgtgagtattgtgnggagaagagatatatttaaaacaacacaccatatagcgttttttaatatatatgtgtgtggtgagacaccacaagcatccattttctgccctgtgtgcaccatcatatttgcgtgtttacaccccatttaaagaagacccaataggccatattttaatgttgtataatatgtggtgtttcccacttagtgataataccccgtgtggatattgtgttgtggcccttttatattaactcgcccatcatgtttcttaaatttttttccaaaaaaggaaggaaaaagtga

SEQ ID NO: 635373 - DNA, 1159 bp, Homo sapiens
  misc_feature (51)..(52): n is a, c, g, or t
  misc_feature (73)..(73): n is a, c, g, or t
taataaatttaaaaacagctctaccttctctcctccccccagagcaattannaccaactaaaaggggctaggntctggggggaggacgagaaggtagagctgttctcaaatttattaaaaaaaaacaatataaaagggggaaacacacacaacaaaaccaacaacaaaagaaacaaaaaaaaaaaaaaaacacacaagaaaaaaaacacaaaaaaaagagaaaaaaaaaaaacaacacacaaacaaaaaaaaaagagagcagccaccgcaattcccaccccaacagacacagaaacacgccaacacccagagcaatcgacacaacacagcaccacacaacacagaggaggggaacaaacaagaggacaaacaaccacccaacaacaacaacacacgacacaaaggagcaaaaacaaacaagacaaagcgacaaaacaagagggaccaaccaacacggcagaaaggcgaaccagacaacgagaagcgaaccccactcacacacgaaaaccaaacaacgagacaaaaaaacaacaaaaaaacaaacaaacaacaagcaaaaagcaacgacaaacaaaaacaaaacacaacacgagacgaggacgcgaagagaaaaaaaagagaagccgaacaagaaaagaaagacaaagaaagaaaggaagacgccgaacaggagcgggccacagcaaacagagaaaaaccaagcacaagacaggcgcgaaaagcccagaaaaaaagagaagaagccacgcacggtgaagaaccgaaaaccaaacgaaaaagaagagaagaagaaagaaaaaaagaacaagaaacacaaaagaaagaaagcaagaagacaacgaaggaacaagagacaaagaaccgacaacaagaacaaggcgcaagaagaagaacgagaaccaaggaaaagaaaagagagcaagaaagagaaagacaagaggagcaagaaagacggaaacgaaggagaaaagaagaggcaccaaagaacaagaagagagaagcaagagacaaacggggcgagaagagaagacggacgacggcacagaaacgaaaaaaaaatctaagaaaagagcgaaagaagaaaaaacggaaagaacaagaacaacagagaagcaagaagagaaaaggaaaggaacacgagagcgacacaagaaaaaag

SEQ ID NO: 635374 - DNA, 309 bp, Homo sapiens
caggtctcaaacttcactctgtttacaacataagtaacaccacacccctgctagacaagcagctcgattcccaaccagcgcatttccactcatacgggggctctctcctgaccatgctcagcaagcaggaataaccaagtcccagatcaggctctgcctcctcctggagcccagcctctgttctaggtcatgctgaagagctgcctgtgtgctcaaccaagctgctaccctgtcacagatccccggtttagctcctccttgggtgtccacaggctcggtggggccaaggtggagcagcagggaaagaca

SEQ ID NO: 635375 - DNA, 437 bp, Homo sapiens
  misc_feature (170)..(170): n is a, c, g, or t
  misc_feature (172)..(173): n is a, c, g, or t
cgcacttctgtggtcctagctacttgggaaggctgaggccacggggaatcgctgaggcccgggaggtggagattgccattaagctgagattgtgccccttgcactccagtctggacgggggagtgagactctgtctcagaaaggaaagaaagaagggcttgggcaccggntnntcgcgcctgtggtcccggcgctttgggaggccagggtgggcggatcgcggggtcgggagttcgggaccggcctggccaacgtggtgaagcctgtctctactggaggtacagaattggccgggcgtcttgcgcgtgcctgtggtcctggctgcccgggaggctgatgcagaatagctggggctcgggaggcggagcttgcagtgagtggaggttgcgccgctgcactccggcctgggtggcggagtgggactctgtctcagaaaa

SEQ ID NO: 635376 - DNA, 220 bp, Homo sapiens
  misc_feature (109)..(109): n is a, c, g, or t
atttatgaataaagctgctataaacaccggtgtggaggttttggtgtggacacacattttcacctcttttgggtaaatcccaaaggggatttaccagggagtgtgattnccggatcatatggtgagagttttgcaagaagctgccaaactgtcttcccaagtggctgcaccattttgtgttcccaccagcaatgaatgggcgttcctgtggcttcacgtc

SEQ ID NO: 635377 - DNA, 526 bp, Homo sapiens
  misc_feature (51)..(52): n is a, c, g, or t
  misc_feature (73)..(73): n is a, c, g, or t
taataaatttaaaaacagctctaccttctctcctccccccagagcaattannaccaactaaaaggggctaggntctgggggggcagaaggcgctaggagtcgtaatcttcttcgtcctcttcatcagtgtgctggaggggcccgggggccgctggggggcaaaggcagagtaagaggcagaagggcagaaaagggtggtcggggggctctgaaatgtggggcagaggggtggctgggcctgggggtggggggttggtgatgtctcctcttccccatcagtttctggtggtcctcaagattcatcctcctgggtccgagtctggtcccgggaacagtttctggtcctggcgttttcggttcccatcccaccggttcttccgggccgccgttgcctgggtttccgggccccgtgtggggcgcctcttgttccccatccaggttggttgtcttcccggtccccctggttgtcgggaacagatgccaccaggtccttcaagaagtcaaacggctgctccagctcgatgca

SEQ ID NO: 635378 - DNA, 280 bp, Homo sapiens
tgagcagacggccgggcatagccgacctcagagtgaacacatgctctagactataacacgatggctgtggacagggcccttcatgtactgaccccgatagggccccaaagcagtaacactccagtaaccaagtctactagctcccggatcttggtttctgaataccattatctactacatggaaccaaggccgcatcccccagtgactggtactagggattggggctggacacatacaaggttgaggctagaccctcttgagtacaacctgccggtggcc

SEQ ID NO: 635379 - DNA, 215 bp, Homo sapiens
  misc_feature (111)..(111): n is a, c, g, or t
tcagctaaatttgtcttcagtggtctaagtaaaattttacgtgggctcctgaactttgagctaccctcaatctgagctaacttaaaacttcattctgtgcccctcctaagnacatgctgacttcagggtaaaacattctctaatctaaaatctaaccttttcaatctccaactgccattcccttcccaccttctctctaatcttttttgctccac

SEQ ID NO: 635380 - DNA, 121 bp, Homo sapiens
cactaagtgttcatgtggatgtgggtttgatttccggccttgcccagtgggttaaagacctggtgttgctgcaagctatggtgtgagtcacatgatgtggctcagaatctgagctgttgct

SEQ ID NO: 635381 - DNA, 217 bp, Homo sapiens
ctgtttacttaagtggaaaacaataccctaaacatagaatcaccatatgacacagcactccactcctaaatatatgctgaagaaagacgaaaacatatgtccacacaaaagcctgtataggcatgttcccagcagcgttattcacgacagctaaaatgcagacacagtccaaatgctggtaaaatatgctcatataacacgtgctctctatgcattg

SEQ ID NO: 635382 - DNA, 133 bp, Homo sapiens
gtcgacttagaggacccccatcggaacccaatgagcctacagaaacaagttgaagtacctgtttttcctccgcaagcggatgaacaccaacccttcccgaggcccctacccaacagctcattgggttccgatg

SEQ ID NO: 635383 - DNA, 499 bp, Homo sapiens
gctgactctaaggatccccatactgtcgagcaggttgcactggatgccatcaaagtcttactgcaacatggatgactggctgagacctgcgtgtatcccactcagagcccgtggtgggccaaaaggaactgttacatcagcgagaaccccgaggacaagaggcatgtctggttcggcgagagcatcatccgatggtagttccagttcgagctatggcggccaaggctccgagcctgccgatttgtgcactccagatgaccttcctgcgcctgtatgtcaccgagggctcccagaatattagctatcactgcaacgaacagtgctgtgcttagatggacagcacactggcaacctcgtgaaggccctggtcctcccgggctccatcgagatcgagatccgctccgagggtgacagctggttcacctacagacgtccctgtcgatggatgcacgattcactccgtagcctgtggtctgacagtgattgacttgcatatcat

SEQ ID NO: 635384 - DNA, 144 bp, Homo sapiens
agtcggtactgtgtacaataggaagtatgtgcctggaggggatccattgactctcacaatagagatagaagaactgaggagggtcaagaatattctgataaaactgagtaactagtccccgagatctaaaaggaagagcatggg

SEQ ID NO: 635385 - DNA, 179 bp, Homo sapiens
aggagatcaggacccacaggaggcacagaaagcatcatctgcaaccgagatgactcagtggggacagaaatctgactccgtcgctggacgctgagagtgtgacaagctccgccaagacatgacctgcacagtcttcggtatcaaggagaccatcccatcagtgccaggaccccatgacg

SEQ ID NO: 635386 - DNA, 485 bp, Homo sapiens
  misc_feature (267)..(267): n is a, c, g, or t
  misc_feature (275)..(275): n is a, c, g, or t
  misc_feature (279)..(279): n is a, c, g, or t
  misc_feature (314)..(314): n is a, c, g, or t
ctgcccctctttttctccgggtgcttgtggagtcggatcttttctccagcaattgggggaagaggctttttctctgaattcgcttagtgtaaccagcggcgtatatttttaggcgccttttctaaaacctagtagttatattcatttgttaatcttattttatttttgagctcaaactgcttgagaataccttgattccttaagtggaatgatttttttgcaaggggttcccgatttgagcttttttttcttccaccgtcatttctnactcttanaccnactcagttccatcatggtgatgttcaagaagatcnagtcttttgaggtggtctttaacgaccctgaaaaggtgtacggcagtggcgagaaggtggctggccgggtgatagtggaggtgtgtgaagttactcgtgtcaaagccgtttggatcctggcttgcggagtggctaaagtgctttggatgcagggatcccagcagtgcaaac

SEQ ID NO: 635387 - DNA, 226 bp, Homo sapiens
cttattccttctgcatcaggtattaactagaactaatctttgcaatggagagccaaatgctaagacccccgaaaatagacgagctacctcagaacagctcaaagagcatcatccgtctatatcgcataatagtgggaagatctataggtagaggcgaccaagctaccgagcctggtgatagctggttgtccaagatagaatcttgagttcaactttaaatttgccc

SEQ ID NO: 635388 - DNA, 1044 bp, Homo sapiens
gaaaaaaacattccaagaactttcatcagagattttacttgctggagtgcagcggcacgatctcggctcactgcaatctctacctcccgggttcacgccattctcctgcctcagcctcccgagtagttgggactacaggcgcccaccaccgtgcctggggtttttttttttttttttttgtggatatttttttaggtataaaagagggggttttcccctatgtgtttacgccggggatgtggttcttgggatttcctcctgtgaacctctcgtgtgtctccaccccactcttctcgggcctctcccaaaggtgtgctgggggcatctatccgcgaagcgttgtttttcccccatgcgtgcaacggacaagggtacctgtgccctctgtgcgggggccttcgtgatatgtgccccgttggcggcttttaatttctgtggcccccgtggccccttttataatgggctggatttccgggggggacccgttgttgacggcaaccaccacccacatcttttgtccgcgggatattacgcgggaggtttggccacccctttctgtggagaaactcttttgtgccacagtccctgtttggggggctgcactttcccagcggcgcggggagatgttgaatggcgccccccatgttgttaacaggggccactctcctttggacccaacagagattttgtcgcctcccaatatattttctccagcctcagaaccaggcgtgcccagaaacgagccttcctcatcaatcacggggggggggaggcttgtggtcagacgcggggacaaacttcccagcaaatactctcggtattgtggacactgttcctggggaacatcaatgttgcgtcgcccaccacaacttctgtgtgtggtcccccagcggaactacttatttcgggcaacagcgccggcgcgtattcttcttcagagacccagcaccacaacctcttttggccgaccccaccaagaaaccagcggcccgaagatttcccgccgagcccctcgcgggccccaagatcaccctgggggcaatg

SEQ ID NO: 635389 - DNA, 572 bp, Homo sapiens
  misc_feature (1)..(1): n is a, c, g, or t
ntcggtaccaacgatggtctcagtcgtgttagatatacttgccaagtctctgtcaggtttgtacctgccacagaaatatcttgaaagtttatctaacagctggagccatgaaaaaaaaaaaaaaaaaaccacgggagcttggtaaaacagggttgggctatgccaacaggaagagcccaagagaaagtacgaggttgccaccgtggttggttgccagaggtgccccaggtgggaggcagggaattggcagtttgggggaagctgggggtcccttctaccactgttccttccgggccccagtgatgtgttctctctttacggtgcacacattcttttcttgaagatgaccaagcccatacataaccggggcatgaacaccccactggggttttttctgcactcaggaacaagcgggtcctttggcccagctctctgctgtatgggcgagtatagagggggagatattagggactacttctcatggcactcctgttatttgccagccattagtaggggctttataggcagagccattgtgtttatgttctcaccacctggagaggtcgagtcct

SEQ ID NO: 635390 - DNA, 129 bp, Homo sapiens
gtcggaccactacttctggtgagcctgtgcggcaacttgaggactgcactcagtgagctgcatgcactataaaggcatggcctgtctcctcacttgagtgcaaggtccatcgaccaaagccctgttctg

SEQ ID NO: 635391 - DNA, 1481 bp, Homo sapiens
ttttttttttttctcaggaatcctttattctggtagtaatgaataattactaacaaacaggtgggggaactagggagaaaaaccagaaccatttaaaacgtggtgtgggtggctcgaattctctccatttcagggccctcttctttttctcgtggtgactgtggacaagtggtggagttgtgaagcgggtgtgtagaagaacactgtggaagaggccgcgccctctctctctcgaggggaaagagaggtgtggttagtgtgcacacaaagaacagaggcagagggacaaaagagccaaactctctcttagtgtgtggtgtgcctcttgtgtgagtatctctgtgtgagacacacctgtgagaggacatctccgggtcacatataccctgctcatatcacccacatatctctctcgccgctgtgagaactcctcccccacagaaggaaaacacctgtgagagacagtgtgacgacacacagagggtggtgcgctatacacactatagtagagagagctctctttatcattcatcacaacacacacacatatatattacacaccacatactacacacacaaatgtgtagagagagcgcctctctcttgtctcgcctgtgaggtcgtgatgtgcgcgagacagagagagagctccaggggggcatacgaggacataattcacacaacatgtgcgccgcataagagcccacacgaatacacccctaacaagaaataaaccacccgtgagggagcgagcgcgtggagtgggcgcaaatatctacccgcaatatacactgtggcacacaagtgcatgtgtgcgggaaaaccccccacagcgacagaagatgttccgccacagacgagggggccccccaacccgcggactaagccgccgcctcccgcgccgcaataggccaacagcgggaggagaagcagcctataggaggggagccgcccaacgaggtgggggagccatcgaggaaggtcaccacctatgtagacggcagaaaccggagcgggtggattaacagaaggatcccccccatggtagtagaagaacacggggggcgactatcccccaacgcgcccggttgtacgcgacacaatacacccaaggacatcgacgtggggtgcccccactggtgtgggggcccacaaaaagccaccacaccgagggggcaagtctccaagaggaccgtacccagttaacaaacggcaatacacgccaggggagagaaaaaacccccaattaaaccagttcgttatatccccccgccaaaaatttatccccgtgggggggggcgcccccccagagaagaaaaacggcgcgggaccaaccataaaacccacagcgagtcgagcgtgatgtgcgcccgcgtgggtggtaggcatcaacaaggaacgaacacccctctgttggtagagagaacgagaaaacacccccgcctattataccagggcgggcggacgcgagcaacggacag

SEQ ID NO: 635392 - DNA, 321 bp, Homo sapiens
  misc_feature (192)..(192): n is a, c, g, or t
ttgcccccgggggggtttttttttaagccccccccaaaatttttagccggtttgaaaaaccccccaccccgggggggttccccccggggagccaaaatgttttttgggggggggttagcgccccccataaaacaaaaaaagaattttggggaaaaaacccccttgttttttaaaaaaaaaaacccccccccntccttgggggggggaaaaaaagggggggtttttggaactttcccccccaaaattttggggaaggggggggccttttccccctttgggggttttggttagggttcccccccaggggcttttgttcccgga

SEQ ID NO: 635393 - DNA, 104 bp, Homo sapiens
ctcacacctataatcccaaagtcctgggattataggtgtgagccattgcatctggcctctataatatattcttgcactttgggaggcccaggcaggtgatcact

SEQ ID NO: 635394 - DNA, 101 bp, Homo sapiens
ttggtaggaatggcctgagtggcgtgtgggcaggctactggttgtatgatgtattagtagagcaacccattaatctttgtagttgtattaaacttgaactg

SEQ ID NO: 635395 - DNA, 117 bp, Homo sapiens
taggtagcaagactgacttctgggaggctctttctcattttgaagtgtcaattttgtggctgttctaaagcattaacaatgggagggcatggcgcatggagacttaggtatcatcta

SEQ ID NO: 635396 - DNA, 375 bp, Homo sapiens
gggggattaaaaagtgaaacctctatatgcacgtgttatgtgcattttgcaggatgagactgagtgtaaaagaatttttttttctcttcaaggtggtttgtgttttccatactcatcacaaggccttggttgagtgtcttatccctgagcaatctttcgatggatggagatgatcattatgtacttttgtgttaacctttattcctgtgaatatttctgtgaaaactcggagaacagagatgagatttggcaaaaaaaaattggatttaaaataacacagagtttttctaacataggaaaggccttcctatatatttctcttcttagattctccactgtgttaatcagggacagggcacaggtttctagcagtgt

SEQ ID NO: 635397 - DNA, 538 bp, Homo sapiens
tgggatgtccacagggcagagctaatcctgcgatgctcctcagatgttgatcataagcaatatgttcatcatggcgtaacttcaagttaattgataaaaaagctttaaaatttttctgttttgaccaggcacatggctcacgcctgtgttcccagcactttgggaggccagggcgggcggatcacctgaggtcgggagttcgagaccggcctgaccgacgtggagaggccccgtctctactaaaaatgcaaagttgaccgggcgtggtggcgcatgcctgtggtcccagctgcttgggaggctgaggcgggagaattgcttgaacccgggaggtggaggttctgggggtgtcgagatcgcgccactgcactccagcctgggggacaagagcgaaactccatctcaaaaaaaaaatgtcggtttcaatttccaatatgtgaactgtcaacagttataaacaccctccaaaaaccttgtgggaatcctcagtgagtttaacgaaactgatttgtaaccctgtggaacagtaggggatcct

SEQ ID NO: 635398 - DNA, 904 bp, Homo sapiens
ataatgaggatcagagctttttcccgtgaaaccagtatggtggccatatataagcctggttaaatggtcatctaaagctgtcaaataagacattctgtgaaaggtaaacatcgaaactggttataagtaaaatcatcagagccaacaacagggtctgggagataacctttgaagcttatggtactggcctgcaccagaagatgtctgcattactcattgctaagaatgtgtagcacagaactgactaggattaattgttttccaagaagaaatgtaaactctacgtgtggttttcacatacagcagtctattgaataagcatgcatctgaatttaagttgcccaggtatctgaataattttttcatgtgcatctttgtcgaatgttttggttcagagaaagaatgtttaaaggttttaaaaagacttcagttcttaaatgtaacgtgtacccttctgatggaaaatcataacaaaatggcgtgcagtagacttcttaggtggtatccagggccattgcagacgggtggttaatcatatgtacttgggtgtaggagtctagtgtctgggggtatgcatggggtgcttcatgtaaggattgtacattacaagtagaaaagggagtatactaactgatgcttgcggggtataccactttgggtcataatggacggtcaggggaagatgaaaggtgtttaaccgtagggaaattagggtgggtatgcaggttgtttgtaattaaacgtggagaggcactttgatcgaagcagcggtgaaaaataacaagtggaattgtgcgataagaagaataagtgctagtgaaacgaactgagttgtagcgcgcataacgggatattgagtgtttttttgtgtatagcataaaacgaaaactaaagaaacaaaaaa

SEQ ID NO: 635399 - DNA, 437 bp, Homo sapiens
tcctggtcgggcaggcgtcctcaccgggaaggtctgtcctctcccttcccagatggccgccagcaaaatatctactcatccttcagagcccggtgcaaacctcaactttcccgggaaggttgccttccaccaccaccaccacaaccaccaccatcaccaccagcaccaaaatcaatcaccctcgtctccctttccttcaaggttggtctctctctctctctcccccggtctgtttctctctctctctctctctctctctcggtctgggtctttctttctgtctctgtctctctctctctctgtgtgtgtctgtcttgggtcttaggtgtcgtactccgcgtgtgtgtgtgtgtggctctctgtgtgtgtctctctctctgtgtctctatactctgtgtctgtgtgtgagactgtgtgtctctctctgtctgggtgta

SEQ ID NO: 635400 - DNA, 518 bp, Homo sapiens
ttgatcacagcaacctgcaacccaataaatgttttgagtggaatatgagcattggttgataaacaaatcagctcggctgtcatgccctgattaagataatgttgcccatctatacgttgtaaaaaaacctgactattcagggatgcatctgaaaactggaaatacaccgaacgatgctgtgagagaaaacctatactctctaaaacttgggacatattattaaacattatgtttgttataaattgagacttaatcgattatattttataaaatgcgtacagatctgtctattttttatatcaattgcaatgttaatggctagtcggacaccctatccatacactaaaataaaaagctcaataattcagcgacctgtgccgctaactcatctttaaaactcatgaaatacacctactgcggagatagcagtgccaaagatctaaagtcgatcaaaataaaaataggcgtaattgtagcagatttataggtactgactagagatgttgagttgcatatcc

SEQ ID NO: 635401 - DNA, 273 bp, Homo sapiens
tgaacattctgtgtcgtttctgtagcaggcaggaatttgaagtagatggaagaccgacctggattactccggtctgaactcagatcacggtaggactttatatcgttgaacaaacgaacctttaatagcggcttcaccatcgggatgtcctgatccaacatcgaggtcgtgactgctattgccgttatgggactctagaataggattgcgctgttatccctagggtaacttgttccgttggtcaagttattggatcaattgagtatgacagta

SEQ ID NO: 635402 - DNA, 388 bp, Homo sapiens
tctctagacgaggagtcttctggaggagtccttagggttttctaggtatccaatcattggcaaacagagatcaccggacttcctcttttccaatttggatgccctttgtctctttcttttgcctgattcctctggttaggacttctagtactataatatgttgaatagaagcagtgaaagcgggcatgcttcccttgttccagtccttagggggaatactttcagcttctccttgttcagcatgatgctggctgttgagtgtgtcacatatggctttattttgaggtatgttccttctatgcctagttcgttgagggtttttatcataaagggatgctgaattttatcaaatgctttttctgcatttattgagatgatcatgtggttt

SEQ ID NO: 635403 - DNA, 367 bp, Homo sapiens
tcgtcgaatgaacaccggcacttgtgaggcatacaacgtaaaggttgccacatggctaatggtgagacgtccttcctggcatcctctgaggggtagcgggaaagacagacagctcccagggccacacgcaaatatacctctactcagattagagaaactccgagctcccattgccttatgcgtggagccgaggtgttacgcagatcgcctgttttgtttataacaaagagtttgcttcctccggccaaccttaaagtctggcattcacggctggcacggtatagggcccatccacttctctcccagcacgtgcgccagcagctcccatccggtccagagccaaatgacatgtgagtttggccatcca

SEQ ID NO: 635404 - DNA, 179 bp, Homo sapiens
tatgtatgagctcatgctgatctctaatgagctctgtgacagtcaagcacacactccacattgaccttctggggtactgtctgtggcagccacaggaaggagctggagatcccattaggactgtccaccacacttgaagcacaaaactgcagggattggggctctcactggtttggtcg

SEQ ID NO: 635405 - DNA, 365 bp, Homo sapiens
tataataactggacatatacttactcatttttattatgagtttacacatgacctctttcaggacaactgaagacactaccttctctcccacccataacttttagcaatccccactctcccaaacacttcctccagacccatagcttctagaacaccaaaggcatgagctatggcttcatttgctacattccattatgcttatttgtttatgtgacattctttctaataggctgcaaataccttgaagccatggactttgtcttattcatctcggtgtcctcagaatgtggctcaataaatgtatgttgaatgatgaattaatccctaaggctatgaataaatgacacttactgttaaaaaaaaaa

SEQ ID NO: 635406 - DNA, 972 bp, Homo sapiens
gcagtccaccctggcggggtcgcagggttgggatggcggctggaggcgatcatggttcgcccgagagataccgatcatctcgttgcctcccgctatgccaggccccgtgagtatgtgctatcagtgatttagcgacagggtataaggataccggacatgggcggcagagtgtggtctgtggcctggcggaggccagagtcagataggtgggctgtggcctaatcacagagtggaacaagatccaggaggatgaaatcaatgctgggccgaagccatgcgagtctcaagatggcccgctgactgcacagagaaacgtttacgaacaatgatgtgtatggctcacgtgcaccaccatttgggcatgtgttgtccaaaagctgcaaggcatcactcaccttgtgtgctagttctgtgctatgtgggagacaatacgtgacttgattattcttagaaatgcacttgacctgctgtttgccaaaggcttgccagaagtgatctctcggctggccgacttgcgtaaggaaccgagcagtctacccacatcaggttcacacatttccagcttgtgacagttgacccacagttgggcaaaacgtcgctgtcttggcattcaggatctggcgtgcatctccagaatttggaagcgtgtccggaatgacctggagcttcgggggagtaagggtacaacgtgcactcagggcaggttcgggagggccaccgggggggatcgccaaaagggagaaccgctgacacaccgggggggacaaggcggataaaaaagggttccctccccgcgggagctgttacccgaatggggattgaggcttggcttgcggggagcagggggctctccgccaagatgacagacaatcctctccgacacaaagaaaggggccctcgacacgaggggcagcgggcacaacagaccgtccagagagtcgcacacatgtgcgcacacacactcgccagcac

SEQ ID NO: 635407 - DNA, 455 bp, Homo sapiens
ggagacgggggtctcacggtgtagccaggatggtctcaatctcctgaccttgtgatctggcccatctcgggcctcccaagggtggctggggattacaggttgtggagccacggcacccgcccaaaatgtcttatagactggaagagtccggctactggcaaagtcagcatttttctgggcgtggccattgggtagaactgacatggctaaatctgattatcattagacaatacggtcaccctgaacatgacggggcttcccttggtggataagccccatgttcttaaattctccccatcttatgagctagagaagtaatttttttttttttttttttgggaaaacggttccccttggtacccgagaggggagtacaggggcacaatcggggtccagtggcacttctaccatgggggcccaaggtagatttgggggcctaagcctcccaggtaggg

SEQ ID NO: 635408 - DNA, 155 bp, Homo sapiens
ccaggggccctgatttcctcggatgtgctattggccccaggacttgaagcttgcctcccttcaccctggggactgtgggttccaagggataagagcaggggttgggatccatgggcctcctggaaggtgctcggccgtcttctccaatgaatcca

SEQ ID NO: 635409 - DNA, 1284 bp, Homo sapiens
  misc_feature (1284)..(1284): n is a, c, g, or t
gctcaggcggagcggcccgtgtcgctgtttttctgagtccggggtggtctggcagaccgagccgatggtacgaggtgtcgtgacgggggctgcccccggtggtggtggactgtcgatgctgggatgccttgtggctggttgagggaaccgctgtggcgctcctgcgattgctgctggtgctgctggccgccgggcgattccggtgagatcgcctgggcttcggcagtggaccggtcgttgggctggtcgtcgcgtggagtgtgccgtgtgcatgctcgcgacgagcggtcatttttggggctggtcaacccgtcagggtggaaggagcgtgcaatgtggatcggtgacagcggtgatccatcttacgcgtcataggagcgcgcttatgggaaggtcgcggggtgggtccgaggcacgtcgagactactggcagtgaataactgtcacaagtacctgacgtggccgagagcctgatgggatcgccaggaatcctgtaatccacagacgtggatgcgggtcacgaagttgcagggagaaccgtattgtgcctagtgaaaggtgcgccgagtactaaaggaggggaggggggatcttaccgttgctaggttcttggaacattttgcgagaagggtctacttttggcataggtccctcaggaaaaacgtgtattctagatcgtacagatttgaatggcacacagtcggtggttggaatggacttgggatatcttattgatcgggtgtttggggcataagcaaagctcacgaatgaacattataacctatgaacatccagaaaagggggaagctgagatgtccaaggcggggagcgtggtcccaccctacaacagggggacaaacgcctagacttggaagatatggtccaacgggcgtcactatgaactgatacacaaaggacctgggccacgccaccatccatggcatgcggacacctggcatgaaggtacccaaggtcaggctccatcggggaatgcgaagagagaaagcacagagagcagcacgacaaccgtactggaagcgctatcgcaaagagaggaggagataaagagggggagaagaaggagagagcagagagagaacatgaaaagaaagagatgagagaaagggtggagaaggagagtgagaagatagtgaaaggagaacagagaagtagaaggggggtaggaggaagagaagaaaggtaaaagaaggtgaacggaaaggagaaagagaagtacagaagaataagagaaagctgtggtagagctctcttttcaaagagtgn

SEQ ID NO: 635410 - DNA, 201 bp, Homo sapiens
acgcacattaactatgatcacataactagattgggcagtgagagtgagtaatacaatgtctagtgagcctagcggtgttgtgatctgtaaattaatgcgatcagtacggcaagggagcctacaacggtgtataatacgaactatgtgcctgccttcacgcgtgctggttggttcgtctcctcggcgctgatgatagccccc

SEQ ID NO: 635411 - DNA, 932 bp, Homo sapiens
ctctgggttgaagccgcgcccccacaggccggtccacactttttcgcagggtcgtgtagccaactcttctggggaacagggcactgttgtcccttcccgaagtcgtaatttcaaagggctctcccccctcgagggccagaaggaaaccaacgagaattgtgggggaggcaaccaccattatttctcttccgagcccgccacagttggtgtttccctaaagccttttgtgtgattttagaaatgcaacccttgattaggccctcggatataatgagaaccctccgcacactttttggaatttctgctaaagacactcccccaaggcgcccatttccccacaccccccggtgtggaagagaatgtataccctgggggatccactaaaatttcccccctccctcggagaagcctgggttgtcaacccttcacccccacttttttgcctccacccccctccccccccacgggagagtcgtaaatttgatgagagccctctttttcaccccgcttaggcgacagaggaactggtgctgaggagctcttgtgagagaaagtttttgaccccccccgagatgaggtacccaggccgcagtggtggatcgacttctttgtggatagagacaacgtttccttgtgacaagaatgctttcaggagcctggagcactgaagggggcccgggacgcccccctctccaggagaccctcgggcacgcacatttccacgcccacagattgtacacaacatcttttgctcttattttgttaaattttataccagcaagagagaagagcacagtcttttccttgaaaattttggccaagaaattgggggggggaaaaaaaaatgggttttcacaaggggattttaattttttcccccctaaaggccctttataaaaaaaaatataataaagaaatttttacactcccca

SEQ ID NO: 635412 - DNA, 1167 bp, Homo sapiens
  misc_feature (281)..(281): n is a, c, g, or t
  misc_feature (713)..(713): n is a, c, g, or t
tggtggtgtgtgtgtgtgtgtggtgtgtggagtggtggtgtggtgggggtgtggtgtgattgtgtggtgtagtgtgtggccgctcgtgttggttgattatgatatgcggcctatacccacgttgggaggagccaggtaggcgccctcctatagtgggatgtgcaacgaaagtccacgccactgaatgccgcaattttttttatagcggtggacacacaccccctctagttaagggggacaccttctcggatatgggaggatgcgcccacccacacaagagntgtgttggtgtagcaccaagaaaaagatccccacaagggccgtgtttggttgttatataccccgtccatgcgccacccatcgtgatacacgtatgttgtacccggggttctctctatatagggtattacctcgagagggcaccacttgtgggggtgtgtgcacgaaaaattttcctccgtggctcaactcgagaggggagagtctcgtcttgggccgcaacatagagcggttgtctctcaaactgtggggtgtccccccgcagtgggcagcacacgaaagagagccttacactgtgggggggataaacacagagattttcgggcgcacagagcgcccctacacacacttggtgtcccactctggcacagaggtgtaaacacagggccgcctctttgcgcgagctctcttgttggcctgtgtgagagccctcntcactggacccgtgcgcaacaccccagaggggccacatggcgcatctggttttctccgcgcacacctggtggcgcctttagaatagacctgcgctctcatagataggcctgtgttatactcgatagacactgcgtacacacacagctcagaccccggggggcgatgccacatgccacacaccctgggggccacacatttgccactagagcccacacctttgtatagcccatattttgaagaacactaccagagtacactgacaccccggacactttggaagagagaacatgtattctcaccccagatcttctccttatccaggagattctacatggcaccacactctgtctaagaacacccacccccgagtttccctgcaacggaatccggctccaactgggggtaccaaaataggggttttaaaccagaaaaattaaatgaatttagcgtgaa

SEQ ID NO: 635413 - DNA, 752 bp, Homo sapiens
gggcatccacagtttccagttgttactcagggtagaagtggatgaaaacgcttacagatgtggctctggcatgctagtatggtcagaggacagtcaagcagcttaagagacgacaccagaacacagaaccggtcgatccgaaggagcgagggacaaagccctgttctgagcggcataacggacaagacgacttagagtgtagatgacaggctctgtgtgcttaaactgaatggggagagacgtgtgctgtgttcatacaatgtcgtacaggtaattcgttttgcatcgtaacggggacgcgatcatagggattagctttatagccaagttgtaaccattgtgcatggtcttaggttgttctgttgtatctatatatttaaaggggaagactaaagatatacagattactgttaaaagttgcaggtccatgttatcttgtattaagacgaatatttctcgtgcgaattgcactgtagagacatggatagagccaggtgattactaaaagtcacagagccaaacatattctcatgcaaaggggtcttactccttaagcttcatggatttcatcagtggccttctaaataaccagatgtggtacgtatttacaatatttcaccaagaacttacgacattctcggcaaacgtgctggcaatgcctgccagtggttcactctagcataagccatggcagtgcaaaaagtttgaaacttggaaaatggggacccaaagaccatcaggaatggtaatga

SEQ ID NO: 635414 - DNA, 105 bp, Homo sapiens
ggttcaggtgattcatcggattctgtcacacgtctctttcaggtgtctgactacttggcctccacagccatctggaccatctccaaagctccctacaactcgagg

SEQ ID NO: 635415 - DNA, 666 bp, Homo sapiens
  misc_feature (636)..(637): n is a, c, g, or t
tgtaataaattgagaccaacttctggttaatgtaatcagaaaataaggtcattataatctgagttcaagtgattcacagaaatgaaggaaaaagtattgaaacagggcagaaaagaacagtagtcaagaggcactaaactgccaaactggcactaaaccagtttgagcaggaacgattgttcactccaccatcattactttactactgtaggacacaactgtagttgagtattatttaaacactaacaatggataccaacactttatatttgtctaccatgaccatactgattcatgctgtgaataaattccaactcttttttctttttccaccagattcaaaatcttggtaacatatctaattgaccatgtacggtttgcatgtctagctgccagcgtgtagtggagaaaacattaaacacattaggttttacagagaaagcagtggttcgtttctgaagaaagactcacacaatttcattgcccattaaaagagaaaggtggttggatgctgagctgataaaaatagcaaatgaccactcaaaaatatgctcattaaaaagccctagctgtatgtaacgatccagtatcctcaaacaataatgtagtggaacagattttgtttatagaagttgnngtattaaagtagaaacagcataagttctc

SEQ ID NO: 635416 - DNA, 171 bp, Homo sapiens
ctttgacaagatctccccattttgtccattcccattcccaagcaaccatattctactctctgcttccagctttgacttttttagattatacatatacgtatataatgtagtatttgtgtctctgtgcttggttactttcacacagcataatgccctccaggttcatccatg

SEQ ID NO: 635417 - DNA, 200 bp, Homo sapiens
cttgtgtggtgttccgtgaacagaacagaattgaatagaatagaacagaacagaatagagtagaacagaattgaatatatagaacagaacagaatagaatagaatagaatagaatagaacagaatagaacagaacagaacagaatagagtagaatagaatagattagaacagaatagaacacaatagaatagaatagaat

SEQ ID NO: 635418 - DNA, 123 bp, Homo sapiens
gctttgcctaagtatccacttttcccttcttacagcctgtataggaacccccaaccatacacctctgttatagccaatagtggaattgaactgattagttagcaatactaggcgatggcttga

SEQ ID NO: 635419 - DNA, 228 bp, Homo sapiens
gctggtacgcccccggagttacgggatcgacttatcaggcgccgggactgacgcgaagggcgtttgggtactgccgtcgccgcctggcccaggccggggcaggggtgcgttagatgtcagtgaagtcggagctgcagccgaggtcgtagctggaaccagctgggctaccccggcagaatgaaccacaagagacaagaagacgcatcccgcgtaggccaagcggagtgc

SEQ ID NO: 635420 - DNA, 139 bp, Homo sapiens
  misc_feature (120)..(120): n is a, c, g, or t
  misc_feature (128)..(128): n is a, c, g, or t
cgatctcaggactggcagctacggtcattaaaatatgataaatgtcactgttacttacaaaatatatcaacggtatgtatgggatgtaggttatattcttgatgttgagtacttgtcatncatcctgngcttttgttct

SEQ ID NO: 635421 - DNA, 386 bp, Homo sapiens
tctcatattcaggtacagctctacgactcctgcgccatctgttatgtactagcttgcctgcgctggggcttgaactaagtaaagaagcctaggtctgcagatctagatcgcagagaagtcagtctcattctaacacattgcaactactgctagagtccaccccatgaagctgttgcagattgtgtatctgcgactgaattctatgacgtatatgtagttcagactaaaacaaatgttgctagctaggttggctgtcctgtctcagtaggacattgacagacgccagctaacaccctcagcagacccttgacctaagatccagcatgcgttatgagacccgcgacgggctgccgcgctccgaattcgtgatcttggccatggctata

SEQ ID NO: 635422 - DNA, 1357 bp, Homo sapiens
tggctttttttggcttttggtaaaaaaaattgaaaatggtactctaagtcaaaaataagagtttggtaggtgggaccagaaaattacttaccgtgacatccaccccaattccccctcatccgtgcgtggggtggaaagttccagaaccgtgcgtgtcgaaggccttgtgttggctcagaacacccaggtgtccttccgtgcaaggggacggcaacggtggtagacgcagtagagagtgtgtagacgccatagagacgcccagggacccctgtaaccccgggccggctgtgctgtgcacaacgcctctcaagaaagggccaccacagggtgctcgcacgggcaagccacaccgagggccgcggagagccccacgaggaaattcaaggaattagcggcataagcgatttaacaccttaaagcgtggtgaaaggcgaggaggacaatagcggtgacgtgcattccatccgcgaccacttagaaagaaaccgtgatttcttcacacagtgtggtccctttacagtccaggggggcccgggaggcactcaaggagaccagtgaaccgtgggtgattctccgtgatgcccaccgcgtggttcccgagggtaacatgttgacagtggaaaccggctttgacaaggcgttgtcctcgtcttgggaaaaccgggggcagacaacacaaaacacaagggggtgctgcacaaaccgcgaggcacacacccagagacagacacaccaccagcagccgacaagcaacaccatagcacaaacacgagaaacaaagtaaacacaaacacagaacacaacgaaaacaccattcaacaacaaaacaacacgaagcaaacacagacacactactaaaataaaaccacccgcgtacggaaaggagcacatcaggcgcgacgccgataacaacgaatagaaagacacagaaacagcaacaaacaaagaaataaagcaagcgagatccgacgagacgtagaccaaccaaccatacacaagtcacagacgcggacggcaagaacacacagaaaacacaactacagagacaacccaccaacacgaaacaaaagacaaaagcaaggaacaacaggacggcactgcgcagccctccacacagataaagctgaagcacaaggcaagaaacagagtgcggtaggtcgacaaccaccaacaaaaaaaaaaaaacagacaacacaggcaagcatcaacaacgatcatgacacatacgacagaacaagacaagcaaacagaacgaacaacaccaacacacataacgaccaccgatacgacacccacgaacacaagacaccgaaccgtacgatgcaataaagcgaaacaaaagcaacgacaacacaca

SEQ ID NO: 635423 - DNA, 135 bp, Homo sapiens
cactctaaaggatcccctgtttccctgcgacccaactgttaagattggccctaagaagcccctgcctgaccggtgttcgcatacagggtacccagctcgggtagggggatttttttaaaactggtctcctcccta

SEQ ID NO: 635424 - DNA, 579 bp, Homo sapiens
gtacgcgaggaggccgcttgatggtcaactacaccagaataatttagtgtgcgacgcgcgcttcctcatcttctcctttgtctactgctacacccgactggatcctctatcccacccagatcctctacaccacatactacgagtcatcagcaacaggtgccccttcttcggatactacttcttcaacgggcttctgatgtggctgcagctgctgcacgtgtactggtcgttgcctcattctgcgcatgctctatagcttcatgaagaagggccagatggagaaggacatacgtagtgatgtagaagaatcagactccagaagaggaggcaggaggagcggaccaggaacctctgacagataaagaacgggacagcctggagggcccacgccagcaccccactgatggacctcggaagccgggtggcccgggcagtctgaccaacaggcacacaacaagccacacatagccgggcggggctggctgcaaggggttgccccaccgccacggaccgcgaacacccctgggtgcccaaggcactgcaacccctgggccacctcctgccaaccaagccaccccc

SEQ ID NO: 635425 - DNA, 893 bp, Homo sapiens
  misc_feature (443)..(443): n is a, c, g, or t
catcttcgggcccccaagactactacgagggcggtacttcaaggcgcgaccgtcaagttacccgccatcgaatacccatactctccaccagctggtttgcggttcctgactcaagatgtggcaccctaacatctatccatacgtggggatccgtgtgtatctccatcctaccattccgctcgagtgagtagctgactcaccgcagagacggggagctgccctcacatgaggatggaaccaccacgcagaatcgtcatggatccattgtctctcgtggagatgtgactctctcactccctgaaacgtatgccccaactgccgttgcatcgtaccacgacaaaactgtggtaccgccctaaccgtctgaatggttacaggaaagtgtgaaacgcatgaggacacaggcggaacgatctctagatacaatcagaccatcatccggnaagctggtcgctggcggtaccagatgagtggactgcggatgacgttgatcggcgatgataggtgcccacctaccgcctgggcctgagtacttgcgtgagaggaccattatggtgctctgcgttggccccgaggtagcgggctctaataccgtcttgcgtacgacgactcaactatccgattgactggcgatgtggacgaagacggccggacatggtttggcgatcaggggaacgagtgatcgatgagctcgtggtccggcacagagtccgtgatcaacgcgaccgatgaaagtataaccttgcctgatgtttcacctcactatggccggaccccgttgggctccctttggacggagcagtactacctcacggaggggacgtgcgtggtccccggcctccgtctggttgctgcgtcctgggcctcttctcccttccccatgtctgtcctgg

SEQ ID NO: 635426 - DNA, 200 bp, Homo sapiens
taagctctgcctgtctctcccgcatggctccctctatgcgactgctaggctaggctggccaggccatgttctgcggatctcaccgcataagcgaacacctttacacgctagatagtggggacatcatcaacgccctgtgcttcagccctaaccgctactggctgtgtgctgccacaggccccagcatacacgatctgggc

SEQ ID NO: 635427 - DNA, 595 bp, Homo sapiens
  misc_feature (237)..(237): n is a, c, g, or t
  misc_feature (292)..(292): n is a, c, g, or t
  misc_feature (380)..(380): n is a, c, g, or t
aggtccttggcagcaccgttgttgattcggcatggagagagtcacctgagcagggacagtgttgggcgcagggctggagagtgtctctgctgtgcatgcacccagagtgcacccacccattcactgacttcatggagctcccaagcctctgctcagtcacggcaggcacagcggcttgcagccagtggggagggcatggggatggctgctgtgggagggccaggtgcatggggtttncggcaggtgtgccgttgaggatgtgtgtgcttttaggcagggcaccgtgggcttngaggagtgtttctgagagattcgagtctgagggccctgagatcacgggtgcagtagtgagccccagggcgcatgggagacacctgggnaagctgcaggtctgtggtggggggcgctggggcatgtactcgtgcccactgagggcacgtgcacccaggctctcggctgtctgtgtggctccaagtgaggagggtgaccagggtgagggtaggggcaccgagggcatggatgagccctgaggggcgggtgtgacatgaatgtgtggggtgcctgccatgcgtggaatgccagggggatcctctag

SEQ ID NO: 635428 - DNA, 452 bp, Homo sapiens
tctggatgcaagtgtccagcgggagaagaatggctgcagagaacgaagcagaaagatgagctgagagagtaaggggggtgttagaagtcaacaggggataacaaaaccatctggggttgggatcactacaggaggctctacatggcatggtgcatgaacaacaacaagagtaaatttggctgactctgagcttgaggtaagctccttaaagtctctgtggagaaagagaggcccagagtgtgggctggagattaactgatcccagatgcaaagaaaattagaaaagcataggacatggtgcatttcttggataagctgaatgttgggcatttaaatggtatcatctgaggtgttgcagaagatatgattcctttatcaaatcaaatacaagtaaatggatatccctaaaatggtaacttaaagtaatgcgctaagacacttggcatccagag

SEQ ID NO: 635429 - DNA, 419 bp, Homo sapiens
ctttacttaaaaatgaggcagcagacttgatttgatccataggctataatttgctgattcctgttcaagaaaccaaacaaataaactgtttccaggaggaaagaattattgattgtatcaacttctgcttatttgtcaaaggtgaaactgaggaattgaccattagatttaacagcttggtagctgtattagtccattctcacactgttataaagaaatacctgagactgggtaatttacaaagaaaaaaggtttaattggttcacagttctgcaggctgtacaggaagcatagcagcttctgcttctggggaggcctcaggaagcttataatcatggcagaaggcaagggcaaacaaggttgtcttacatggccagagcaggagcaagagagagagtggggaggagccacacactttt

SEQ ID NO: 635430 - DNA, 852 bp, Homo sapiens
gttaatatatgctcacacctcatatctccctactatgcctagaacgagtaatactatcggtgtatcattatagctaactctcataaacctcataggacccactccctcttactcgcaatattgtgcctagttgccatactagatcatctgcctgctcatgctgcaaagtcatcgagtgtgtcgctagtcgccatacttaggtctcaaatcctcgctaaccgaccactacttggggcttgatagctagcggtagcaatacacacctaatagtctactccgacatgcgtatagaaactagatcggtcccagagcaagatcatacttacctagcgcagctgaagatgacttatccaatccaaaatcatcagtttgaattcaagagaaaccaaccccaagcagtgccgtaatctgattagctctcaatcccgtctattaattgtttcaaccaaaatcaagcatgctacctaatttaagctggttcctcaaactatttccgtccgaactccatagatcacaaccgcccatactgtcattcatataacgtaactcactaccattgccctatcactaatcatgcactaaggctcaaactcgcagcatattaatcacacagtgtagaccccactttggtcaacagtagacaaacaacaactcctcactcgtcttacgtgacttaccataggatactctcgcgtaactaaagtccttcctgtaaaatttgataattgttccctctgaccgcttgatactctgtccttttagtcatagtccttccgttcgaacttggtagtttaattcccgacctgggttttgatcgctccgtggaggccttgagctagagcgccttaaccg

SEQ ID NO: 635431 - DNA, 892 bp, Homo sapiens
ttactatgacagaccgtagaggttactcgcttgtctgtgtacatcatttctaaggatttcaatagtttagcttctatgtatgtgctgctaagagctttctccaggagagatatttgccctgtctgagcacactggtccagtcgtcccagtgggctgctcgttggtcgtcgtcccgagattagacctttgttgtgccgatggcgtcacacacatcgtaagtctgagtctgtctttgtccttcgttctgtatggcgagtctcccttggttcataaggaagctttctaaagcatactagagaagcctgcccagagccccgtcttgcttctcttccaggtgctctatcccctcgagaccctctggtgccaggcttgcttcacggtccatcttgtgttgtcactgcagagtttgcgaggccagttttccacagcctaaacagggaggagctgcagaagtggggctctggtctctgggcattcatttccctcatagaggctgagaataaagacaaggacttattcacacatgtgctagaaccccagaatggcccaagttacctgagaccagggtttctcaagcttggacaccattgacatttccggactgggtaatgactatggttcgtgcagaggcgtgatcctatggcacctgtacggagactctactgaaatataccgctggggctctacccaggtagtaacactaggcaactattacccaaccaggtggatttcggatattggtgaaatatccccatcgggtggcaacatgattccctgggtaagatttgtgggccaagaaatgttactgttccatgcccacattggagttgttcccttcgtttacccgtgaagatttcttaaagctctagaaacgggaaaggcacaatcacga

SEQ ID NO: 635432 - DNA, 216 bp, Homo sapiens
tctagaggtccctcataggtcgcaggctggtctcgaactcctgacctcaggtgatctgcccatctcgaccccccaaagtgctgggattacaggcgtgagctaccacgcccggctgaggatagacatttttaataggaaatctcattttgggctccctttagacttctcaagttccagtatgctactatagcctttcctcccgggcgaaccatatga

SEQ ID NO: 635433 - DNA, 1200 bp, Homo sapiens
ccacagctggcaaattcagtgcagatcagaatcaaactgcatggctgcaaggcgagtagacaggcatatggcacacagttttttgatgaccctttcagattctttctctggcaactgaaccagaggttcacaacaacaagtgtacgtaggttcgtttctgcgtcacatgcatcttggcactacaggtaagcttgcatttcatgccacagtgtttaaactgtacactgcccttcagcagtacttccagaatggtgagaaaaagacagcggaggatgctgatatggaactgacccagtcagcagcatgcagggtgcaaagcaacacaatggcaccaaagcaagcacactgcactgtcatcctgtcacagagcaagcaggcaggtcatcatcgcccgcaggcgccctctaggacccctacacaaaaccacagcccgcaattcctctctctttctactccacaccagtgcttcatctctgcctccaaagcacattgcattgagcactccaagcgcccctccaatcccagcctttccctctgccagcaacggcactcaaccacaaaatccggtacggaacatcttcatcccttgacccccccgcccgcaggccgccactcattctccacgctaactcaaacaccaaacctccggggtccacagcaagccacccaagccccaccaccacagctcctcctcccatcattcccgacacgccctgatcctcaccgcgaccccgacacgcaaccacaacgacccgccaccagcgccaacaggcccgcgagccctgacgcactcacccggccctgacacctgaaccgccctgacactggccggcccggcaaccaatccacaagcacccaccccccccgccacgcgccgcacccaccgaacgcacccaacagcccacgcaacacccccaccaccccaaccacgcacgcaaccgcccacacccctagcccccccacacaccccaccacaccagaccacacgccacaaacggaacaaacaggagcacacacggagaacagcaaccccgccacaggacacagaccctgtcacacacgaaagactgccaccccaacgccgacgacccaccacacacacgaaacacccccccacaccccccaccacacaccagaccacaacaaacacaacacacaacagacagatcaccccaccccaccgcgcgcaccaccaacacc

SEQ ID NO: 635434 - DNA, 163 bp, Homo sapiens
aatagtgatgctgactagaattgacctgcctgcatgaccacactttaccttgattgccaaaggtgaatcatacaaaacacaatatagagcaatgttagtaatgaatagaactattaacaagaggaggtacaaggtattaagccacgagaacaggaagaaaggc

SEQ ID NO: 635435 - DNA, 91 bp, Homo sapiens
  misc_feature (1)..(1): n is a, c, g, or t
nttcggcacaggtcgctttcgactctcactccaaagcagtagggccgcgttgctgctcactctctgcatagatggtctgcacctgggagat

SEQ ID NO: 635436 - DNA, 353 bp, Homo sapiens
cacttaagatccccaattcgtcttgcacaacgtgtcttttaaggtcagcctgataaggaaacagggatgcctggaagtgacagggggaccctttgtatgaagtaactttctaaagcccaggctgggacacattttgggggtggggagaaacttattctaaaacagtgctggcaggaatactgatgtgacttgacttgacttttgaaacctatctttttcttagacccctttaacaaccgtggtataaatgggcatcgctctgggtgaagctggaccggatggaaatatggtttacacacatgtgttcgctgaaaatggatacagaagtattgatagtttggaaacaatatgct

SEQ ID NO: 635437 - DNA, 273 bp, Homo sapiens
caaccaagctggaacattataactactgcagatatgtaaggcacaaaatgcgacttatacaaagtagacgatggaatcgcacgaattacccagcgccctctttattatattacagtgataccaaaccatccacttgcaaattcttaggtctcccatcagctggaattaagtaggtactgtgtatctttgagatcatgtatatgtctccacttaggtggatacaagacaggaaggcacgaacaagctgccaaagaagggtatcaaccagtgaaa

SEQ ID NO: 635438 - DNA, 272 bp, Homo sapiens
ttcacctcgcaggctcaagagatactcctgccttagcctcccaagtagctgggattaaaggcagctggcaacacacccacataatttttggtatttttagtagagacagggtttcaccactgttggtcaggctggtctcgaactcctgacctcaggtaatccacctgcctcagcctcccaaacggctgggattaacaggcataggccaccgcgccagctggtttagcttcttattgtttggtccatctgtggtatgtttattgacttgaggt

SEQ ID NO: 635439 - DNA, 160 bp, Homo sapiens
  misc_feature (12)..(12): n is a, c, g, or t
  misc_feature (111)..(112): n is a, c, g, or t
tgaggaaagacnagaggcttgcaaggccctgaagaggcgggagcatcatacagattcctttattagcccacattctgatgtccctggtgagacttgccccaagcaattgtnngtaaatgggggttaatttcttctccacctccctactgaacaaaaaaaa

SEQ ID NO: 635440 - DNA, 136 bp, Homo sapiens
  misc_feature (7)..(7): n is a, c, g, or t
cagtaantcgaggacaaggaatgttgctgatttctagttatttcactgtggtgaaggtcttcagctctaggaaagacagaggaagaaatgcaactttttgccactgctactgacctcccgatgattcccttcctct

SEQ ID NO: 635441 - DNA, 1417 bp, Homo sapiens
  misc_feature (645)..(645): n is a, c, g, or t
  misc_feature (676)..(677): n is a, c, g, or t
  misc_feature (681)..(681): n is a, c, g, or t
  misc_feature (689)..(689): n is a, c, g, or t
  misc_feature (691)..(691): n is a, c, g, or t
  misc_feature (695)..(696): n is a, c, g, or t
  misc_feature (703)..(703): n is a, c, g, or t
  misc_feature (706)..(706): n is a, c, g, or t
  misc_feature (708)..(708): n is a, c, g, or t
  misc_feature (712)..(714): n is a, c, g, or t
  misc_feature (719)..(719): n is a, c, g, or t
  misc_feature (721)..(721): n is a, c, g, or t
  misc_feature (730)..(730): n is a, c, g, or t
  misc_feature (734)..(734): n is a, c, g, or t
  misc_feature (739)..(739): n is a, c, g, or t
  misc_feature (860)..(860): n is a, c, g, or t
  misc_feature (872)..(872): n is a, c, g, or t
  misc_feature (914)..(914): n is a, c, g, or t
  misc_feature (936)..(937): n is a, c, g, or t
  misc_feature (1018)..(1018): n is a, c, g, or t
  misc_feature (1020)..(1020): n is a, c, g, or t
  misc_feature (1051)..(1051): n is a, c, g, or t
acaattagttccctgtaatgatttttttttgcgtatttatgtgtctctctcacaatatgttctgttgttggtgcgtcatttttcttttattgtacatttttgggtgttgataatcgttacaggaaattccttatatcatgttcctgcactggggattcctagtccttacaaaccatctaatctgtttataagcatgaacgagatgttacaactgtaacaacgtattcgcttttattacttacgagttgctgcaggcaaccttattgcaagcaggtaaatcattccgtcgccaatttcattcacctaatactgtgcatgaatttatctatagaattaaaatgatggcaaaacgtcacccaatgatgcaacatgtgtaatgctttcgagcctccctttctggttgaatctttgtttagtttgatgtgctcaatatgaggccaacgtaattacaaatgctggcagtccggtcatagtatgaaactaacaagccctactttataggtaagtttgctcaattttcaggctacctgaggccactgctgtgggactcgtcagtatgtgaatagagaaggattcacatacacttgacatatttcacatggtctgtaccttcatctgtctacttccagagtataacccgtggangatttgatgagggataaatgaacctatttcnnttgnacaacatnancaanncactttngcnanaagnnngtctngntatgtgtgnaaangatanttgtcaccaactcatttctttatggtccataatgaaataaaaattttgtatactgttaattctgtaaacagatgcatgttcaaaagatctatgatggtcttgtaatcttaatctaatatantttagatatttnaattttttccctcttggggaacacatttagtatagtgtaganaatacttccatgacattttcanntaaggttatataacttttcatacataaacatgaaatttgttgtagaaaattctttaaaccaaacatttaaatctaggactncnatttaatttgttccttgatctatttttatgnggcccttaaaaaatatccaaaaaacccattgctaatatagcaataaaaatactttgggtactgacagactctttggagtgtttatattacaaatttgtattcatattcttttctgtgatgtgtcgtactaaaatccaaaatggcttttgcaccatttttaagccaatttcttcctttgatgtggtaccagaattactattcagtgactgcctgcttcttgggggttaaaccactctcgcccggtgacccacctccccaccacgaaacaactacacttactccgactcacaccatttccacgacactagcgtcggcccagctacaccttccacctaccgttcctactcccgtgttacctcccgcaac

SEQ ID NO: 635442 - DNA, 241 bp, Homo sapiens
gccccaagtttttttttttggggcctttgttttataaaaacctggggtggggggggggccccaaactcccgccccctgaacccctccccattaaaagggggttggggtggggtccctttgggtcctgtcctgggaaaatcctttttttaaagagggcccccccaggggtttttaaattttctgaagtttttggggccattttggttgttggctaaatttcccaataaacttgtttttccca

SEQ ID NO: 635443 - DNA, 1118 bp, Homo sapiens
  misc_feature (645)..(645): n is a, c, g, or t
  misc_feature (676)..(677): n is a, c, g, or t
  misc_feature (681)..(681): n is a, c, g, or t
  misc_feature (689)..(689): n is a, c, g, or t
  misc_feature (691)..(691): n is a, c, g, or t
  misc_feature (695)..(696): n is a, c, g, or t
  misc_feature (703)..(703): n is a, c, g, or t
  misc_feature (706)..(706): n is a, c, g, or t
  misc_feature (708)..(708): n is a, c, g, or t
  misc_feature (712)..(714): n is a, c, g, or t
  misc_feature (719)..(719): n is a, c, g, or t
  misc_feature (721)..(721): n is a, c, g, or t
  misc_feature (730)..(730): n is a, c, g, or t
  misc_feature (734)..(734): n is a, c, g, or t
  misc_feature (739)..(739): n is a, c, g, or t
acaattagttccctgtaatgatttttttttgcgtatttatgtgtctctctcacaatatgttctgttgttggtgcgtcatttttcttttattgtacatttttgggtgttgataatcgttacaggaaattccttatatcatgttcctgcactggggattcctagtccttacaaaccatctaatctgtttataagcatgaacgagatgttacaactgtaacaacgtattcgcttttattacttacgagttgctgcaggcaaccttattgcaagcaggtaaatcattccgtcgccaatttcattcacctaatactgtgcatgaatttatctatagaattaaaatgatggcaaaacgtcacccaatgatgcaacatgtgtaatgctttcgagcctccctttctggttgaatctttgtttagtttgatgtgctcaatatgaggccaacgtaattacaaatgctggcagtccggtcatagtatgaaactaacaagccctactttataggtaagtttgctcaattttcaggctacctgaggccactgctgtgggactcgtcagtatgtgaatagagaaggattcacatacacttgacatatttcacatggtctgtaccttcatctgtctacttccagagtataacccgtggangatttgatgagggataaatgaacctatttcnnttgnacaacatnancaanncactttngcnanaagnnngtctngntatgtgtgnaaangatanttgtcaccaactcatttctttatggtccataatgaaataaaaattttgtatactgttaattctgtaaacagatgcatgttcaaaagatctatgatggtcttgtaatcttaatctaataggtctacccacacttaaagcatccttggatcgttcacccatgtaaggagtgtgcaataatcagttacagggcgtattcatataagggaaggaaaggttgggtacagaaagattgaatatggggtaggagactccttgccccacccggcaggattggagctgtccaaaagccatggcctttaagtcaattgtgaagtagccctttaaggagaggagaatgtgcgggtggcgtaatagcaataaacacgctccgggtgtcgcc

SEQ ID NO: 635444 - DNA, 320 bp, Homo sapiens
cggagggacgacgacaatagtgcagactcccgcctttggggaggtctggaccacccagtgcctccactgccaccttggcttggcacgggcgacctgtgtgtgtcgtcttagctttaaaacagtcacagttcttgctctatcatagatgaacaaatcctttcttgatcattctgtcagacccggcggttgagtcagcgatgatccacccgcctccctattcatccaccctgtatccagctgtacaccaagagccagctgctctgtcgacccttggatcccgccgtgggatccagcctttgttaacccgcgacatatcacca

SEQ ID NO: 635445 - DNA, 130 bp, Homo sapiens
tcccggtcatctgctacacaatgagttaagtaaggatttactctcagaaaaatctttatagttatcctaagaaggataattacagtagcctagcaaagatttatccaacattcctatatacatcatgcat

SEQ ID NO: 635446 - DNA, 287 bp, Homo sapiens
  misc_feature (13)..(13): n is a, c, g, or t
  misc_feature (236)..(236): n is a, c, g, or t
  misc_feature (242)..(242): n is a, c, g, or t
  misc_feature (250)..(250): n is a, c, g, or t
atttcggcacagnaaggatcttactctttctgtttaggatcaagctcaaatagttaagggttataaatgaggatgacgtggccggggcgcggtgactcacgcctgtaatcctagcactttgggaggccaaggcgggtggattgcctgagctcaggagtttcagaccagcctgggccacatggtgaaaccccgtctatactaaaatacgacaacaaaaaaaattaggccagggcgtngtggtnggcgcctnttagtcccagcttgaggcttgaggcaggagaactgct

SEQ ID NO: 635447 - DNA, 931 bp, Homo sapiens
ggaaaaaatggcttaggtcgaggcctggtttgaattgtcactgaggcggagactcgcgttatggcgccccgaacctcatctgctgctctcgttgagccctggccctaccgagacctggtgcctgctcccactccatatagggtatttctacacgcgccgtgtcccggcccggccgctgagagcccctgcttcatcgcagtgggctacgtggacgacacgcagttcgtgcggttctgacagcgacgccgcgagtacatggatggtgacgcctgcgcggcgccgtgttgtgtgttgctaggacgtgttggccgtgagttatttgggtacctggtggagactctgattgttcatagcgcctaggcacatgactgtacctgtagtgcagcctgtggaacgcttcgcgttgtactatcggatcggctaggatgcgtaaggccgtggtcttcacacgcctccaggtaggatgtataggcttgcgaaccctgggagcccgacgggctgccatcgctccggcgaggtatgacctatgttcgtccttatcgaacggcgcatcgattacgtctccgctttaacgatggacctgcggctcctttggatcgccgcggacacggcggctcagatcaccgcagcgcaatttggatgcggccgtgcgggggttgcagcagaagagtctaccttggagggtcgactctgcgttggagttcggtcctgtgatcccttggagaacgggaatgaagacgctgtcagcggcgcgtgaacacgctatagactacactgttgtaccacctattttgtctcttgaccattgagggtcgccctttggtggttggccctgggcttctaccctgcgggagatcaccccttagctcggcagcggcaggcgcggaccacactctagtaaccgcgcttttgtggaccacgccgcagcttg

SEQ ID NO: 635448 - DNA, 271 bp, Homo sapiens
tgaacggtttttttcattattaaagccaaattggggtggtatatattcgtataccaggggttagatggaagcatttcctatccagggctgaatacaaccgaacagtggtacgtaaattattataaagccgagtgatatttcagtggcaggttattctaccacagcggtgctgtgtgggtttttcccagtgacggtatggcttttatacaatgtacaacatcgttcctggcaatgtacgagacccttggttggcacagcattaaataaagaa

SEQ ID NO: 635449 - DNA, 1280 bp, Homo sapiens
ttaatccccttcgtgggcccctcaatctggagcggataaattcttggcgcttctccgggggttgtgctctaccgtactcggatcgctctcttaggagtatcctaatctgctcggtgggagagaactgtcgccctaaacctggggttccgatccaggaactgggaagttcgaacagcttggcgtgcctggctccatacgatcgtagcctttctccgactcaccgatctctatttcatgttctccaaggcattgtcgagtaggctttcagcgcccagaggtagagctgacatgcgccttgggctagctgcgctccggcacgtagctagagaccaataatgtccaccggcaggtctaatcaaagacttttgtcaatcattcactaataattacggtgagggtagtacctatatatatgttgttatgtttcatcctgtccttgttcaacacgtatgcatggtcaatatgtatgcacgtcatagaacgtgtatacatttcagggcagcgtataaaagtagggaacacgtacttttcccacctggccagtggaaatacttaccatgacattcttggctacttattgctttatattgccgaagtagattacgtcgatgcatttccaaaaatttcttgattgagacaaacctagctccgtggtaggggtttgcgcaatcagtaatgtgaacccttctaaatagtaccgtctaaattggcttaatgggcgcaagataggggtttggaatttgaatagccaaaagcagtatgtacctactttttgccgcgtcaataatcaactaccgcaagtccccttttgcccccggtggggtccccttgttctgaaccaacgatgacaccttcctcggtctattaacagttctccgaacatatggctcgacttgtcttggttgctttgttgaagcacccacaggcaccaaagggaaaaatcttggccttggatctaaatcccaatatccggggaataggaagccaccaaggccgatttggggtggaagacaaaccctagggggggacattattccctggaggcagcgtgttcttggcaggatcgtaaagagacaaagtggcacccgcaaagcaaaccaggtggtgtctacatttggcgcgtagacgggtgtagatataggcccattgctgtggggacacagttttcttaagtatactttccctcgaacataccgggaaaaaccagacaatttctgtaaacacctgttgtccctcatgggagcaacggcatgtaaggtcttcctgagattggatcccag

SEQ ID NO: 635450 - DNA, 109 bp, Homo sapiens
gatatgaaatctcactctttttgcccagggtgaagtgcagtgactgagatgggccactgcactccaccagcctggatgacagaacgaaactctgtctcaaaaaaaaaaa

SEQ ID NO: 635451 - DNA, 140 bp, Homo sapiens
tgtcaccattcggctcatggctcagtgcccaggtgcttgtgagtttactagaggtcccttgtgagattgggcctctgtttgggcctctgaaatctctgtctcagtgtagctttccatggtgcgtgtatagggtggtctcg

SEQ ID NO: 635452 - DNA, 151 bp, Homo sapiens
agtgtaacgacggccgtgtaaacgacggccagtgatacacgacggccagtgttaaacgacggccagtgttaaacgacgtgccagtgtaaacgacggccagtgtaaacgacggccagtgtcaactgacgtgccagtgtaaactgacggccag

SEQ ID NO: 635453 - DNA, 922 bp, Homo sapiens
catttacacgacatggtacccatagccatattaggtgcactatagcacagtgtgacacacaacaggtggtcccttcgtattccccgaattcatcgaaacacgcggttcgtccaacgtcgcagggtatttgtaggtgacgcacaacagctttgtgttatagaaagtttggtatagaaatgcaaagggtaaaattatctgttcgtatgccaactgttgcccgaagagtgtggtgtctgtcgatcgcttttgatattatagtgagcatccccgaaacacaatgtgtggcccctgagattgaaagggaaggatgggggcaacccacgcgaggtttagccccgtgagtgtctgtgtatggaatgtgccgattaagtgaatgctgagaggctataaagaagggcgcacggaaccactgggacacttgagcccttgaaattcccgcggtcttgggcgtcgggcttcagagtaacgctcactggcttagggttataagcgggcccgtttagttccaaatgccgctggctatgaccaatgcggggagaaccacccctggcacggtgctcctctccttggccaagtcactgtgagtatcccgagttctacgatggttaactgaaggattggctaatgttttgaaccccccgtgtgactgggtgtttttgtttgggggtgggtttggggttttgttgcgttttgaggtcctgaaggttacccgatatggactggctaatactcccttgttctgcttgttgtaatggtgaatgctttaagaaaaaaaagtgtaatttctaagaataattcatgatctggttatgcgatactcccttttgttaccatttttttaaaaaaactatttttgttaaagtaaagtaaatatttccgagccaattttttaaacttattgcactataccggctctgtacca

SEQ ID NO: 635454 - DNA, 577 bp, Homo sapiens
actttagtacttctggtccccagtaacggagagagaataaatctttcttgttttaaggctccaacaaattggtagtcacttgttacagcaaccacaggaaatgtatacagcttctgatacttctgaaaacctcacacagccaaagggtacatccttggtatagaggctcactcttactcaccagccaggcaaggaaggctcaatcctttggtgttagagagatagatgttgggttttcaaatttcaacatagagaaatcagtcatttgcaatgcttttgagaaagtactgtgtataccctacgagcctgcactccttatgtgtgagactgatgaccattggttggcttattatccattccactaagtgacaaaatcccactgactattcaaatccaggctcctggcatgcctgtaccttagaatcacaaccagctgcaattccaggatggagttcaaactaattgtgggggcatgtgcttcttacatgactgctagattgttcccagatggggaaggttgccctgataagcaacttaaatgaaaataataaatgtattgtttggcctctttaaacag

SEQ ID NO: 635455 - DNA, 422 bp, Homo sapiens
  misc_feature (301)..(301): n is a, c, g, or t
gtcgaccaaagagaaaaattcaataatccgaagtccaagtatcactgtcaatagtagttgataaattgtatgtcaatgcaacaagtgtaagaattagtgaatgttggctgggtgcagtggctcatgcctgtaatcccagcactttgggaggcctggacgaggcaggtagatcacgaggtcaggagatcaagaccatcctggctaacacggtgaaaccctgtctctactaaaaatacaaaaaaaattagccaggcgtggtggcgggcacctgtagtcccagctactggggaggctgaggcangagaatggcgtgaacccgggaggcggagcttgcagcgagcagagattgcaccactgcactccagccagggcgacagagcaagactccgtctcaaaaaaaaaaagaatcagtgaatgttgaa

SEQ ID NO: 635456 - DNA, 295 bp, Homo sapiens
  misc_feature (276)..(276): n is a, c, g, or t
tgctggtaacagtgaataagggccttgtgggtgggcaggacgtgtacttccacacgttgaatcccgtcgccgcgcgcgtgaggcaggcggcggccctgcgcatgcgcgagaagcacgtgcatccgctgagctacgacgaaattccagcgatatttcgcaaggccgtaatcgccaccgaggaccggcgcttctggtccgatcccggcatcgatccgattgggatcgctcgaagcgtcgtggtggacgtggagcgcgacggttacgtggaagccttantcactggtacgcagcaaca

SEQ ID NO: 635457 - DNA, 861 bp, Homo sapiens
gagccgagatccgagattgcaccactgcactccagcctgggtgacacattgagactcattctcaaaaaaaaaaaaaaaaaaaaaaatttttgggaaaagcccaagttccttttgggtgacctctccctggatggctattcctccttcttggtgtccttctccacacaccttggggggaacctctggtcctaatgccgtatgttttttataccaccaatggtcctatggcgtggtggttattttttttaactcttctcggggcctctttaacgtggtcactttatggttgctccattatacatcgggtcgaacacatttggtttcttaataacattggcgctctttttccaatggcacacaaataggcatttcgggcaacatttcactaagttaaatctcaagttattatcaatcaatcatggtcggtaaacgtccgttgggcgctataataaatctgggatacagaaggacactttatccacaaggggggtcgcgtcaaatccgggggaaagttcggtccagaacgtgttgtccccttctgtaccacacggtataatttacatattggtcgcatttttactctctggtaacattaaccggtacgggaattggcccccctttaaattttttcctggtcccccaggcgcctcccgtagagggttaattcatgggtcttccacgcatttaatagatcgccaaagggcctgcacgtggggggggacgcatataggcgaaacccggctggataataccccaagttgccttaagtgtgggaaaaacccccccttttttcacaaggtaagcgcaaggaattttatcttaatggccctacaagtttggggagctcctggccatttcaaa

SEQ ID NO: 635458 - DNA, 403 bp, Homo sapiens
gcttcgctcctggccaggatgcaggcagatttttagtgctgtggggctgctttctacccaggttgggagacaatcccttccatgttgaagaaccgagtccccggctcctgctgcatttatgtttgtgtgggctgtgggcttcctttcaacgagaaggcgatcctttaggagggctgtgtggccagcttgggggctggctgaggaaaaatgtgctggtggtagcttcagcggcccttggtcttgcttttctcccggttttgggggttgtctttgccccccgcctcgtgtagagtttccggagtggttttttggtgatgtaggggtctggtctcctcaagcctcctcatatgggggagtggaatagaatcctacaggtttttcaattaaaagaaatattttttca

SEQ ID NO: 635459 - DNA, 268 bp, Homo sapiens
tctaatttaattccttctggcattgtagagggcagactaagttcctaactagatgactcttaagcaatatttgaagttctgctatttatttgaaatttggacagaacaagtgagcatgccctttagaaaatttgtacctagaaatgtattccaatacttctatctggggatgccaacaaattcctcttacatattcactggacagtctgttatgtggaaaactcaggagatatgcagactaatatgtcaggattagaagcccgcttct

SEQ ID NO: 635460 - DNA, 858 bp, Homo sapiens
gacacggtctttgagctgagtcgaggtggacccttgtgaacgcagtcgccctacagccgctgattccccccgcatcgcctcccgtgaagcccaggccgcttcgcagttttctcccttgtggtctcaataaccaatgtccaccaacgagaatgctaatacaccagcttgcccgtccttcacagattcaagaccaggggacaggacagtacagacaatgagggtcgcagaatagaggtcaatgtggagctgaggaaacgctaagaaggatgacagatgctgaagaggcgccaatgtaagctcatttcctgatgatgctacttctccgctgcaggaaaaccgcaaacaaccagggcactgtaactgggtctgtgatgacgtggtcaaagggcataaatagcagcaatggtggcaaaatcagctccaagctactcaagctgccaggaaactactttccagagaaaaacagcccccatagacaacataatccgggctgttgatcccgacaattgtgtccttcttggggcagaaactgattgtagtccccattcccaggttttgaatctgctgtgggcacttcactaacatggttcctgcggacatcagaacaaacaccaaggtttgtggctagctgggggtgccatccccagcttcatttctctgtttggcatatcccccattgctccacctcagttggcacaagctggtctgggtccagacaacattcgcaagtgatgctccagggtcccgaggaactggtataaacgtaccgtgcagttgacccatggggggcccttggaggctggattggcatttacatggggcttagaactcacggccttttatttggccaaagatctc

SEQ ID NO: 635461 - DNA, 195 bp, Homo sapiens
gcgaacactctgaaccttccgcagtaccgggatccgtgccttcaccaactggcagcccttcatcctcaactacctcgagcaccccgtcacccaacgcctacacggagagcctgaacagcctgatccgggtgatgaaccgactggggcgtggctactcgttcgaggcactacgggccaagattctgttcaccgagc

SEQ ID NO: 635462 - DNA, 97 bp, Homo sapiens
acagggaccagggcaggggggccaaagactgatgccttcccattaggttccaacttcattcctgcttcccgtttaaccctaactttttcttttcggg

SEQ ID NO: 635463 - DNA, 453 bp, Homo sapiens
ggtcatgctgtatcaagaggatcccttcagcacattaagtacacactgatatctccaggctggacaatctgaccgggatgagaggtgatgacgagggttcggtggtcaagagtagatatgggcttctgggaagccacacagggcttcaacgagcggtatgtccatacacatgaaagggtctcctcctcgtcgagtaaaaacagcagggtccttctgatctaacacaaggataatatcgccgggctccagtccgggtcctgggtctccttcaacagggaatgtaatcttcgggccatctttcatgccttggtcaatatgaacttctaaaattttcttctctcgaactatcttccttccgtggcagcttttacatctatcttaaggacggatcggctccccagggcccgggcactccaggcacacagactaaaggtgcggaagggtaccggagct

SEQ ID NO: 635464 - DNA, 347 bp, Homo sapiens
  misc_feature (308)..(308): n is a, c, g, or t
gccaagagtcaggccctggggatttagaaatgggcatgacatggtaactgacctctctgcaagctcacactaatgtaatgtgataagtactttgccagcagtgtgactaaagctctgtgggaccacaggtggcagtgtgtccgctgagttgtgcacacacattagcagtgggttaaaaggaggtttatggaaagacttggtagaagctgtcttgaggttaggcttgagggccacataggtacagaaaggactgccaccttctgaggcctgagagcatgctgagactcttcagaagcttgagcactaantatttgtctcctttcacaaacgtactttccctcaaacac

SEQ ID NO: 635465 - DNA, 166 bp, Homo sapiens
aattcttattcctttgtcgttccccaccgcctattaggccttcttgttataaaattttctcctctgctctccctctctcacgtttatactccccctttatctattgtgtccactccgtgggcctgttttgtgcggaaaaccttcctactctttctgggcctctccg

SEQ ID NO: 635466 - DNA, 372 bp, Homo sapiens
  misc_feature (71)..(71): n is a, c, g, or t
ggtgtagttacatttttaaacatcagattacaaaacaatatgagaagcccatctccaggtggttgtccagngaaagttggcaactttcactgtgggaaattttcacttaaaaataggtcgaagttaagctgggagtggtggctcacgcctgtaatcccagcactgtgggaggcctaggtgggtggatcacctgaggccaggagttcgagaccagcctggccaacatggcgaaaccccatctctattaaaaatacaaaaaaaaaaatgggctgggcgtgggggcaggtgccggtaatcccagctactggggaggctgaggcaggagaatcactcaaaccggggaaggggaggtggcagtgagccaggatggca

SEQ ID NO: 635467 - DNA, 127 bp, Homo sapiens
ggaggcgaggacaaactcaggacaccgagctggtccagacagcacagcaggagacagaaccttcagaagtgggcagctgtggtggtgcttctggagaagagcagagatacacatgccatgtactgca

SEQ ID NO: 635468 - DNA, 480 bp, Homo sapiens
gtaaaatgatgcccggtgcacttcgaaacttagcaaaggcgagccagccacagagcataacactgtggctgagacacatgtccatgtgtggttcacgtacgtgggcatctgtgccacaagggtcatgtggcaccacagttcatcagctgtgtttccccttcctgccctgctgcagcgccacaggttggaggaaaagcctgcctgtgagcagggtcccggcagggcccacccacccaacagtggagatcgggcctcagagctgggcagtcatgggagttcagggcctggctcgcctcggcagcctggtcttaaagagggacttgcccgaggcctcgatgtaagtgacagtcatctctttggagctgatctccacataggcaaagccacccagtgagtcttcagtcccatagtggaagcgcagatagccggtggggaccttgcgctggtgccgctttgaggggtccatgaaaattccagccc

SEQ ID NO: 635469 - DNA, 175 bp, Homo sapiens
catcttccgaaacagcctctcattaggagatggtgtttgaggtggcagtaagtatcagctggcaggggatgcatgtcatttcccgcttgaaatccaagaacgagaaagaagggagaggcatgatttggtggaacagttacatgtttcccctttcctcctttctccaattaataat

SEQ ID NO: 635470 - DNA, 358 bp, Homo sapiens
gtaacttctctgccatctatactcatactggatcacgcatctacgatagaagatagcggctcaggtccacgccatggaggcagcgtccatctccacattgatactcaccacccacctggcctcgcagggcgttcatctcctcctacgtggtacttacttcaggtaggccagctcctccttgaggttctcaatctgcatctccaggtcggctctggccaaggtcagctcatccagaaccctgcgcaggccatatgatgtcggcctccacactcaggcgcagggcctgctctgtctcaaacttggtgcggaagtccatcagcggccagacgggcattgtcaatctgtagcaggatgtgtg

SEQ ID NO: 635471 - DNA, 471 bp, Homo sapiens
aagcaaatccccaactgccgttcccctccatgggtaattcttagggtctgggaggtgagctcgcccgccgaggcagaactaagcgagtcgcctggagaggcgtgaagggagcctgcacgtgtcccccgcggcttccccaccgccccaagagcggggcatgtacgagaccgcgctgtggggttcagatttaggaaggacgaccgcgtcgccctgcctccctccctcgcccagagccgggagcaatgctggggcacgaaagaggacttgggaaggatccggtccttactttccccgcgggtcccggacccgcagcccccgggttgtgaggcggaagccaaaggggcgaacccagcggagccggcgtgcacagaccctgccccgcggtccaagaggggtgcctccggcccgggacagcggggctcccggagcccgaaagccccacgagcggcgacagcggggcccggcgctgac

SEQ ID NO: 635472 - DNA, 667 bp, Homo sapiens
aaactgtttggatgttccttcccgtttcaatgtatctatattttttcagccctcaaggttattataaatgtcattataataacttcataaagcttcccctataatgagaatcttaccattctcctaactccaatagcactgtaatccacctctgttaggacacatcactcttcatcatgtgtgattattatttgcagatatcatcttcaaggctcttctctatttaccacctgccattcttgttctcacctctacatgaccttcacattttatttctctcggttttttggacaagctgcattcccttccacagagaaggcttccctgacccctttcacttggttggattaccttgctattcttttctatctttgtacattccttttcaaaatacttatctcccttgttgttacttataatgtctgtcttctttactcaagagtctagacaaaaagctccacgccagcctcggctgtgtttgtattgtttacgtctgtgttcctagtgcttaataaaatacctagcaagggttaataagtacttgttgactggaagggaatgacttccttcccttactagagagtgatttccttacaggcgagatgtgtcaaccttctatagcccacataaaataaaggacaatatctcctattgaataaaagacaaa

SEQ ID NO: 635473 - DNA, 360 bp, Homo sapiens
  misc_feature (355)..(355): n is a, c, g, or t
acttagacagaaaaagggagcagcaggcagagcccaccaggttccctgagaatagaggaggaggattgaaggcactgacgcggggcctggagctcacggacctcagtgcagcctgctgcccctacaccgctctggtggggctggtgggggagacgcccgcttccccatggcactgagtgtggcggcggcccatggcttttcctaacaaaggcctgggcagccttcctgggaggaggagagcctactcattggtcaggggcgggtgctgggcccatcaccctcactagctatgtggccgtggctgactgagcactgagtacacgtgggccacacggctgagatgctcaaagaaggngagga

SEQ ID NO: 635474 - DNA, 300 bp, Homo sapiens
  misc_feature (44)..(44): n is a, c, g, or t
ctgagcagaagcacttcagcctcgtctggcatttgatgaatttnattaatgtgtgctatggtaagtctattcccctgtataattttatgggagaggccatgtgcaagtctgaatttaaaaaaaaagaaaagaaaaagccttgtgcagaattattacctactcaatacattatatatatgccagagatggctaaagcagctatatgtcaaggtctgcaaaaacatgaagaagctggcatggaaattaacacgttggtggtctgcaatgtgttcaaagttggtgtttttaatgacacttaaa

SEQ ID NO: 635475 - DNA, 434 bp, Homo sapiens
atgcagggaggggcttttttttgagcctccttcatttgcccaaagacaaatcctcaaaaggaaattcaatcatcatgaatcccaaccccaagtatttcatcagccagggaagagtaagtgggatcccagggaaggatgttggcagcgaccccatcccaaacaggctcttacctcttttcctgaggggtgctccagacaacatttattacccaaaagaccttttgtttgaaaaccagccaagctttattcaggacccactttttgccttccctttcccccttccggggccccccccatgcaaaagccctaagcccccattctttcgatagctcccggtggggcatgagggtccatcatttgactcttttcggagtttcatattttgtgggactcctgggcaaacatatgttattaaaatttttttccccctgtta

SEQ ID NO: 635476 - DNA, 424 bp, Homo sapiens
ggtagcgctcgggttaaatcaaggtcagagtgctgctttctcctggaggctctggggcaagggggtccatttccttgccttttccagcttccggaggctgcccacattcctggctgatggtcccttcctccattttcttttcttttttttcttttgagacagagtcttgctgtggagcccaggctggagtgcagtggagtgatctcggctcactgcaagctctccctcccaggttcaagagattctcatgcctcagctggggtcacaggtgcctgccaccatgacctgctaatttttgtatttttagtagaaacggggtttcaccatgttggccgggctggcctcgaactcctgaccccaggtgatccacctaccttggcctcccaaagtgctgggattacaggcgtgagccaccgagcctggc

SEQ ID NO: 635477 - DNA, 783 bp, Homo sapiens
tactaggctctctgctctacagaaggttctgccgagtacccccagctactgggtacccggctactagcatcgcgtcgccatgatggggcatcgtccagtgctcgatgcatcagccagaacacaaagcgtgaatccggaagaaaagttcaatactggaaacatcaatgctgccaagactattgcaagatatcatccgaacaatgtaatgggaaccaaagatcacatgactgaagatgctattctgggagccaactgggacggccattgtgattgacccaaatgatggcacatgcccaatactatcagaagaggattcaagtacaagacatacaaaagggacaagatcacatagaatcggcaaatatagacgtgaaaaccccaggaatgaaaacacgagtagggaagactgaggaaccacaaatcacaataaacttcattcaattgacaaggagcaacactgcataacattagaaacatgacaaacctatatacttgtgaacacaaacgaaatataaccaccaacacaggagaggtgaatacacaagtggataacacgcagaagaagacaagggagagaacaaaaaataacaacaaaaaaaaaccgctaaataagcacaaaaataaaagaaataacgccaacagcaacataacgaaaagaacaagaaaacaaataaagatcaatggagaaaacccaacaaaacaaaaaggaaacaaatttacaataacaacaaaagacaacaagaaacacagaacaacccaaaagagcaaccaagacaatagccc

SEQ ID NO: 635478 - DNA, 347 bp, Homo sapiens
  misc_feature (140)..(140): n is a, c, g, or t
  misc_feature (306)..(306): n is a, c, g, or t
aaaccatcctcgcatccccagaataaatcccacttggtcattgggaaatatccttttatgtgctgctgaattcagtttgctagtattttgttgaagatttttgcatctgtgttcataaaggatattggcctgtaattttnttttcttgtggtgtccttgtctggctttggtttcagggtaatgctggccttgtaaaatgagtttggaaatattccttcctcttcaagtgttgggaagagtttgagaaggattgcattagttcttctttaaatgtttggtagaattcatctgtgactttatcaggtnctgagtttctttaaatgggagactttttaaagttactaatt

SEQ ID NO: 635479 - DNA, 858 bp, Homo sapiens
  misc_feature (198)..(198): n is a, c, g, or t
  misc_feature (246)..(246): n is a, c, g, or t
ccctttttctcccaaagacggggcggtcagtccggttgtgggggggggggggttaattcccagggcccctttcccttggctttttgtgccctataccagttgccaaaaagggtgggcgggtcggattccgggatatgggcccgggtgcggtccctccggggaagggcccccccccccccccgtgggttttgtaggggnatttttctcaccccacccaagctggggtgttggattcccgggggaacnccccggtggtgcccccccccctttgggggggggggggccctcccatatccgtgtggttggaaatattccccccgaggaggggtgtaccctccccgcggggggccccccccccccaaaccctcaattgggggggggggggccctttttatttccccccccccaaatttttttggcgcttggggggttttgtttggggggctttttcccccggggggcgccttttttcccctcccgggggggaaaagggggccccccccccccccccaaaaattttttaaagggggtggggttccccttttttggacccccgggtgggccccccccaaatttccccccgccggggggggcccggcccccccaggaaaaaggtcccccggggggggttcccccccccccggggttttcctttttttccccccccccgggggggggggggggttttttttttccccctccccccagcccccccccgggggggggcccggggggttttcccgggcccccggggggttttttttttttttttccccccgcgggccccgggggggcccctgaacccccccccccccttttggggttttttttctttttttacccggtcccggggtttta

SEQ ID NO: 635480 - DNA, 143 bp, Homo sapiens
tcggcctcctttaatcaagcagcggagaaggaatgtgaccagctaggtctggagtttcagcattggacactgagccaagcagacaacgcaaagcaagccaggacacaccatcctgcccaggcccagatatctctccatgacct

SEQ ID NO: 635481 - DNA, 933 bp, Homo sapiens
gtgccaagggggcaatggtggcttcctgtgttctactgggacactggggcaagtagagatgcctctgaatggtctggtgtacctggaagatgtgagcctggtcaggtaaaagtcagctgtcaagtatgcccattacggtggtaggctactcgccacattggtgtgctagctcatcttcaatgcataacatgtagccatgagcaattagcgcgtgcaggcccctaataggaaggtgcaccgtgtggcaccaaggaccaggcaggctgccttccgggcaggtagctagtattcgttgcactatcacaagcttgttggtagacaccaaagcaaacaccaccgtaggaatttggcagcctgctcctccgggaagactctggactgtacctccaaggtggcagcttatcgtggatcctgggtacccgtgatgcaacctggcctgtaatggcctatctggaagccgcggcgaatgcatcaaatcccacttatcaccccaaaagtacattgtctcgcattcggggtacttactgattgccgtaacgtacctttcctacaccctattttatcaaaggcatggaatttgggtacagtggctctgtgcaggtcgctggttggggcttaagggcactggctgcagtgcgctgggctcttgtccaatatttcacatcagtcagcgccaagaattgacgagagatttctcaggtgtgtgcccatccgttgccgatcccatggctgtcttttgcatgtggtgtggaattgcctctcacattacttttgtggttccttaaactgacgtctacgttggccccatcatgtaccatcgccctcgtgggccttgggggggtcaacgtggtcttattagacccatttgggggcttcctgctggactccgtggcctgggggggtggatccctgcgtgaagggctcgttccggct

SEQ ID NO: 635482 - DNA, 151 bp, Homo sapiens
tacctctgaaggacatctttactatcttccaagagttttctgaacccaattggaagccattcctgggccggtaggcaactactgatttgctttgtctatagattaaccttttctgaacatttcatttaaccggattcttccattttgtagc

SEQ ID NO: 635483 - DNA, 165 bp, Homo sapiens
  misc_feature (2)..(2): n is a, c, g, or t
gnctatgatgctcccgtcgtggctttgtggtagcaaatctgactagcatcatgaggacacaggttcgagcccgtggcttgctaagtgggttaaggatccagcattgccatgagcgtgtggtgtaggtcacagacacaactcagctctagtgtggctgtggtgtag

SEQ ID NO: 635484 - DNA, 103 bp, Homo sapiens
gtcaattgtgcatcgatggcccagcggcttactgctttaatggaatttgtttgaggcgacatgatcatgtgttaagcattatgatggaatgtgtcctctatga

SEQ ID NO: 635485 - DNA, 850 bp, Homo sapiens
  misc_feature (53)..(53): n is a, c, g, or t
  misc_feature (127)..(127): n is a, c, g, or t
  misc_feature (237)..(237): n is a, c, g, or t
  misc_feature (546)..(546): n is a, c, g, or t
  misc_feature (555)..(555): n is a, c, g, or t
  misc_feature (570)..(570): n is a, c, g, or t
  misc_feature (576)..(576): n is a, c, g, or t
  misc_feature (584)..(584): n is a, c, g, or t
  misc_feature (591)..(592): n is a, c, g, or t
  misc_feature (595)..(595): n is a, c, g, or t
  misc_feature (601)..(601): n is a, c, g, or t
  misc_feature (607)..(608): n is a, c, g, or t
  misc_feature (626)..(626): n is a, c, g, or t
  misc_feature (630)..(630): n is a, c, g, or t
  misc_feature (637)..(637): n is a, c, g, or t
  misc_feature (641)..(641): n is a, c, g, or t
  misc_feature (648)..(648): n is a, c, g, or t
  misc_feature (667)..(667): n is a, c, g, or t
  misc_feature (669)..(669): n is a, c, g, or t
  misc_feature (671)..(671): n is a, c, g, or t
  misc_feature (674)..(674): n is a, c, g, or t
  misc_feature (679)..(679): n is a, c, g, or t
  misc_feature (686)..(686): n is a, c, g, or t
aggccacttccggcgtagccatggcggtaacgctactaccaacccgtcgcagntgctgccgttagagcttgtggacaaatgtataggatcaagaattcacatcgtgatgaagagtgataaggaaatngttggtactcttctaggatttgatgactttgtcaatatggtactggaagatgtcactgagtttgaaatcacaccagaaggaagaaggattactaaattagatcagatttntgctaaatggaaataatataacaatgctggttcctgaggagaaggacctgaagtgtgaatgagtttcctgtgactaacactagatttgtttggcttataatgacaagaaaatggaattttttttcccactttctaatgtttaaatcccataaagctaagtttcccgtaaagggacagtgctttgaagatgcgtaccccattttgtgtaagtaactcatgattatcctggaaaaagaagaaaagagcttcttcttgcagatgaaaatacgggtgtttggttaactgtcatttgttatctactgcagtagncagggcacnaagttgtagttattngcactnacttctgncatatannctnatggtngtcatnncgtgaccattgatctcancaangtgtccnaccnaatgtgnacttgtttgacggtgtttnancnacnggaangtccctngaaatcataaagggtgtgtggaggagggatttgggtaatcctgagtccttgaaaacaagttgggtattgtgctttcagcgactcttgggtgaccgcgaaagattgtaatgcgagaccagatttggggaagggggaaaaaccggtttgtccaacttgcctctgcc

SEQ ID NO: 635486 - DNA, 133 bp, Homo sapiens
ccctccctcttcaggtctacattgcaactgtgaggaggggacgattcacgtgtggtgggggactgagtgtgtgcaggactcccaagcagtgacgggtctcgtctcttcgctcttgtgctcgttgctgtgggct

SEQ ID NO: 635487 - DNA, 619 bp, Homo sapiens
  misc_feature (53)..(53): n is a, c, g, or t
  misc_feature (127)..(127): n is a, c, g, or t
  misc_feature (237)..(237): n is a, c, g, or t
aggccacttccggcgtagccatggcggtaacgctactaccaacccgtcgcagntgctgccgttagagcttgtggacaaatgtataggatcaagaattcacatcgtgatgaagagtgataaggaaatngttggtactcttctaggatttgatgactttgtcaatatggtactggaagatgtcactgagtttgaaatcacaccagaaggaagaaggattactaaattagatcagatttntgctaaatggaaataatataacaatgctggttcctgaggagaaggacctgaagtgtgaatgagtttcctgtgactaacactagatttgtttggcttataatgacaagaaaatggaattttttttcccactttctaatgtttaaatcccataaagctaagtttcccgtaaagggacagtgctttgaagatgcgtaccccattttgtgtaagtaactcatgattatcctggaaaaagaagaaaagagcttcttcttgcagatgcgcctgctcggcccatccaacttttgactggagcaggtttttccttgccgccccgaatttgagcttcatttggccctttcccctattgtgggtcctattacaattcccgtcgcggcgttcg

SEQ ID NO: 635488 - DNA, 344 bp, Homo sapiens
ccgttactgggaggaattgaaagccttctgtgtatctgccgcgggataatggttattgtgtaaacatctctcgaaagctcacagctgaatgtcctcggtccgagctgggtcaaattgctcctacgggaaatgggtcccaacacagcagtttggtgtgggtttgcagtgctatgggaagcagcggatgatacccccacccctccaggagcaggagaggcgaaagcagctgcggacacgcgggggtccctacctttccttactctgtccggggttttgaggacgtgggcgcggccgagtggagaggaattagactctgacctgtgagctcgacaggagtatatgga

SEQ ID NO: 635489 - DNA, 1304 bp, Homo sapiens
cctgcgcggacgccggtgctgccaacggaagggcgggctctgctgccatgaaggtgaagattaaggtgctggaacggcgtgtccacttggttctgggtggccaacgatgagaactgtggtcatctgcaggatggcattataacggatgctgtcctgacgtgcaatgtgcccggtcgacgattgcccgcgtggctgtggggccagtggctcccacgtgtgttccacatgctttgtagtccatcgaagtggctgcacgcacaggaggtgcatgcagcactgcccctatgtgccgtcaggaatggaagttcagaggagtgacggcccgatcctggctctcggcgtgtgaggaggcatcctgagacatccttgcctcatggctggcgccgatggctgctgcggtgacatgcgccccgtgagctgcaatcaagggttgagaacactagtgggctgagatgctgcagttagtgtgagccaatcacgtattgtttgacaggtttgagtcgcgaaataaggttgatgaacctcattgaaatctagtacatagatgttgaaagaatgagagtagtaaacaaagagggtgggagggagtgctacacggaatgtaattccgcccacatgaagaggtggacgcctaaaggtagtgcactggcgtaattcgcccacacgcttttacattggtgagtttcatacagccacggtgtgtgttccccccccttaaattaaggcgagagattgatcagcataatttccaggagagacctcaaagaggggaccaaggagtggacgccggaccgagttgataaaacacaatgggtgttagcaatgcaacgctaggtggagacaaaaagacggtcggtgacaaagggcatgaggggcggacaactgccattgtggggacgtagaacgtgggagaagacccgtttagaaaataagtcaggagttggagtggtggttgaggcaacgattaagtatgtggtgcaaccaaataggcatatagactgccgttttacaggagagcaaaattttttaagaagaagaaggctcagctagaggggggttgaagtgatattatttgcacagaaaatgtttagaaaagagagggagggttaaatttaacagggggtgataatgtaaaaaaggatagcaggcggctgtgaaatttaattgtctgatgttgctcaagggcgacttgtggaggagacagagatatagtggcgcctatacacgaggacagttattatgaaaggaatgaggaacaaagacatgatttaatttacccccgggggagcctaggggtgtgaaaa

SEQ ID NO: 635490 - DNA, 593 bp, Homo sapiens
  misc_feature (397)..(397): n is a, c, g, or t
  misc_feature (495)..(495): n is a, c, g, or t
  misc_feature (562)..(562): n is a, c, g, or t
aattccgccagcgtggctggaaatgcgcactgcagcggtgctttccagcgaaccaagagaaaataaaccttgcggctcatcgccagcgacaacgctccgcgcttcatccactaacgcgagaatttgttggctatagcgtaaaaagttatgcccggcaggagagagacgtaaacgctgattctcgcgaataaacagatcaacccccagttctgtttccagctggcgcagacgggtagtgagattcgacggcacgcgatgcacttttgctgcagcctgggttagctgccagcttcgggcaaccgcgttgaacatctccagttgggtcagatccatagcattctcgatcgtgaataatggcttaatattatcatttaaagcaagagtaaatcgcgtatcntcataccatgactcataaaggagataccccgatgaccatactccggcaactcatgcatttcgataaatcctgccacggtgaacaactttctgtgctgncgtgggctggcgctgacgatatcgagcacttcagctggcgcagcaggctttcgcgactgggcgaganaatatagatatcgtgcgatgcggattcggtg

SEQ ID NO: 635491 - DNA, 226 bp, Homo sapiens
tcggaggaggactgaagctttgcaatacaaggttatctgccagcaagaatttggtctccattgacttggtggactcttttttcttctgcatgtatttaagaatttccaaagtatgtttaatcacaggaatctgaccttatagccttcttttcttttgagcaaggttgagttccataaacttatacttcttgtactgttcatccagcttctttaatacgtgtatctt

SEQ ID NO: 635492 - DNA, 317 bp, Homo sapiens
atttcaagaggatcccccctcgaaaccagtttatgtggccagtatttaaattttgcagttctatttacattcccgatgtaatcactttcagtaattctctataggctaagctgttaagatttccatttttatacaatatagcagagatattttgttctctttctttcttactttctttctttctttctttcggttctttcttgctattctttctctctttccttgccttccttgcctgcttgcttgcttccttgtctgtctgtctgtgtgagacaagagtattcgctcttgaacccaaaggctggagtaggagtagg

SEQ ID NO: 635493 - DNA, 773 bp, Homo sapiens
  misc_feature (144)..(144): n is a, c, g, or t
  misc_feature (155)..(155): n is a, c, g, or t
  misc_feature (158)..(158): n is a, c, g, or t
  misc_feature (194)..(194): n is a, c, g, or t
  misc_feature (247)..(247): n is a, c, g, or t
  misc_feature (253)..(254): n is a, c, g, or t
  misc_feature (257)..(257): n is a, c, g, or t
  misc_feature (285)..(285): n is a, c, g, or t
  misc_feature (307)..(307): n is a, c, g, or t
  misc_feature (336)..(336): n is a, c, g, or t
  misc_feature (348)..(348): n is a, c, g, or t
  misc_feature (352)..(352): n is a, c, g, or t
  misc_feature (361)..(361): n is a, c, g, or t
  misc_feature (380)..(380): n is a, c, g, or t
  misc_feature (435)..(435): n is a, c, g, or t
  misc_feature (537)..(537): n is a, c, g, or t
  misc_feature (566)..(566): n is a, c, g, or t
  misc_feature (570)..(570): n is a, c, g, or t
  misc_feature (624)..(624): n is a, c, g, or t
  misc_feature (643)..(643): n is a, c, g, or t
  misc_feature (650)..(650): n is a, c, g, or t
  misc_feature (670)..(670): n is a, c, g, or t
  misc_feature (712)..(712): n is a, c, g, or t
  misc_feature (752)..(752): n is a, c, g, or t
atccgcggctctctttatcttgtgggcttccctggcctccgaacgtaaggctggtgaagggggctcttgggtggtctgtaaaccgcggactaattggaaatggtttcacaacacgcagtgtcttcggggtgatcccattaaaanaataatgccancantgtctcctaaaatggaaaaaagaaaaattgtaaaanagctgaaaaaaaaaagtaaaacggtaaatgctggaaatgcatatatgtaaaantaaaannaanaaaactgtggttgccttaaatgcaaatnataatggaatcttggccaaaancgtggttaaaaaaaaaaataaaaaaaaanggctaagttcantaantggtttaanaataaaaaaaagaaaaaantgaaaacattttaaaaatcccaaaaacataagtcctccaccaccaatttcaaaancttcagagcctcgcgcctcaccagaaccacagatttccatccctgtcaagaaggaacacatacccgggacactacggttccgtttaagtccagctgcccgcnatattctggaaaaacactcactggatgcnagcnagggcacagccactggccctcgggggatattcactaaagaggatgctctcaaanttgtccagttgaaacaaangggcaanattaccgagtccagaccaantccagccccacagccactcccacagcaccttcgcccctacangccacagctggaccatcttatccccggcctgtgatcccancaatatcaaatcctggacaaa

SEQ ID NO: 635494 - DNA, 142 bp, Homo sapiens
cccaggtcgttgtagtgagctgagatcgcaccactgcactctagccttggaaccagtgcaagactgtctcaaaaacagcaacagagagcaggacgtgacacttctacctgctcactcagaatcatttctgcaccaaccatgg

SEQ ID NO: 635495 - DNA, 246 bp, Homo sapiens
aaatggagtttcgctcttgtagcccaggctggagtacagtggtgtgatctcggctcactgcaacctacccctcccaggttcaagcgattctcctggggggcaaaaactgcattgagccaagattgcaccactgcaccccaaactgggtgacaaaaagaaactatgtctcatagaaaattatgcaaatacttaatatctaaagatccttttcaaaatgaaaaaaattaaatttaattaatcaaataa

SEQ ID NO: 635496 - DNA, 111 bp, Homo sapiens
gaggtcttcttctcagaaacctactacaaatggacaaagatgtgacaaaaacagctgtttcgaacactgtagatactactactgtcaaaattcacagtgagaacgtcgatt

SEQ ID NO: 635497 - DNA, 506 bp, Homo sapiens
tcgacccacgcgtccggagcgggcaggactcctccagcaccatcacacccagtggcccgagacccctctgagaacagtgaggctggtcctcgtgccgttccagccggtgcccggccagtggggaggacacagcctaggaaccagctgcctgagaccaggtgcctctgggctgtcctcccgcgtggcggagaccccaagcacgcagcacccatttccggagctgcaggatagagcttcctcttgatctctgtttttaagcagaaattcattgtgcagacaaagtccctccaagaagcctcgtggtgggccaccggcttcggggatccggcttgggacccaccatggcctgggctggatcccgtgcccacgtggggcaggcccacatctaacccccacaagtcactgcctcactggcaccttgccaagggtctgcccttgtgctgctgagttccctgggcgagtcacacttccacggggaaggtttcccttgggggaaagaacaacgg

SEQ ID NO: 635498 - DNA, 353 bp, Homo sapiens
tgcctgctgtcacaattaagaagttagatttaaagttcacatgcctggtacgaggaaattagagattctttgctctctggtcatcatcaagattgttctgcagaaagacaaaagccaggagatcttgtctgtatatggggtaaggtctcccaggtcataaagagacgtttacagaagaggtggataagggctcaaagctacttccgaaacagttattgttcagtgaatatgtgctttggcctgctcactgggccatgcagtttgcagggatcattgcgtctctcaataccatgaccctgtgagatactattgctttccccctgtgccgtaaggaaaccagggctcagagagtt

SEQ ID NO: 635499 - DNA, 198 bp, Homo sapiens
tgcgttgacactgcacatactctgggcacagtgctacacgtccgcttgtttaacgtggtggaattaccccgcttatgggtggacaattcccatgtggtaccaacgcttgtctttggcgtcttctgggaagagaagtccgatcacgacaataatttgtgcccacgtatacaatgccccttggggcctgaccttttcacg

SEQ ID NO: 635500 - DNA, 1657 bp, Homo sapiens
  misc_feature (134)..(134): n is a, c, g, or t
gttgtctgactctcgccggttttttggtctaggccccgcgggggctgtggatcaccatgttttgccaacgggggtacctctcttggccatctgttgagcgcacttttgttggtgcacccctctgtgtggacagngttgtgtgtccccaagaaactccggtgctggtgtttccgctgctcggggatttttcgccgggggtaagaaaccatcgtgtcggtggtatgttgtgtcccacccacacttcgccccggcggggtctgttgacctgccgctcgctagaggaccggctgctattgtagctacacctattttgttacaacgtgctgtcaagtggtggtccacacagccggggggtgtattgtaagtcatacgccagccacgcccccgtctggggtgttttactcacacaaggcggctgtgtggggggacagacgattgctcgcgcaactaaccgttgtagtcagtctctacacttctgtggggggagcaccatactacacagaccgagtagtttgtgttggggcaatcccacaataggggaggcacaggctttggtgccttgagtaagcaagtaacactccagtgggcgtggacccgacgccgtgttggggcggaaagtaggcttcgttgttcttcgcctgcagtggtggtgttatactcgctacggctcgggctgtccctcttcccgaggtggtttcttctttcggcaggacagagatttttttcgctgggcgcttcgcccacattgtcacgggtgaaatacaattatgtgcccgctcgcgctgtgacccacgattttgtgtggagcgttccccagcgctctttgtgtggtctcaggcgggccagacgcatatatgttgtcgtgcgggttcccacacccctggggcgggcacgagcgacagcgccttcaatgatggtggttgtctggggtttttttctgctgccggtggatgggtcgcccctacactgtggttgacctgtctctttaggggtctgatgcgcccagagaggggtgccccccccttctggggtttcacatctgtggggtctcgcgcgccccctctcctcttggggagaggggatctttcttggagcgcctcacacagatgagcgccacacacactgtgggggggtgtgtcttctaaataaagagtgaagactgttttatctcctcgggggggacgcccggtgacaccagaatgcgccgctgtgtgatagcgcaagtattattcgcatgccgccgctttctatatgagcgcgggagggttgtgagggaacacccaccacacacacaccctcgccaagactctagagcctcacactcactcataggctacgtcccggggccgcaccgcaacgtaagttgtgaagcgctgtacagccctgaggcacagtgggaatctccccccagaagagtactcaactgcccgggtgctacacgcgcattatagggggcgcccctggaggagagaccagtggcgccccctacacagaagaagtttcatagggtctttaacaccttcacccccccccccggggtacatagatctgccaggagtcgcacgggggggggtttttcctcccaccccacagggattaaacccttttccccgcactccaaaagaccccccaaaaaaattttccttggtccatacca

SEQ ID NO: 635501 - DNA, 471 bp, Homo sapiens
tcggaccgcgtgcgctctgaatccagcgagtccaggtcggcaaaatcagatcatctgcccacgcccctgcttcccatttttaacaccacctgcgttgccaacaaatcggataattcttcttcaagacgggtgatatcgcgtgatttttcgaccttatcacgtggttttccggtggtattagattcagcagcggtctttgcaaccagtttttccgcttcacgcaccgacatgcgcttggcgacaatttgattcgccagctgaatctgggttgcgccatcggcagacagcagggaacgggcatggcccatgtcaatatcgcctgccgtcagcatggtctgcacaggctttgccagatttaacaagcgcagcagattggatacggcgctgcgcgagcggccgacggcatttgccgcctgttcatgagtgaacgaaaaatctgtgatcagacgatgtatgccttgcgcctcttcc

SEQ ID NO: 635502 - DNA, 828 bp, Homo sapiens
agcccacacccactccaccttactaacagacaaacttagccaaaccatttacccaaataatgtataggcgatagagattgatgcctggcgcgatatatatagtaccgtcgagggatagatgaaaatattataaccaagcataatataggcaaggactaacccctataccttctgcataatgaattaactagtaaataactttgcaaggagagccaaagctaagacccccgaaaacagacgagctacctaagaacagctaagagagcacgacccgtctatgtagcaaaaatagtgggaagatttataggtagaggcgacaaacctaccgagcctggttgatggctggttgtcccaagatagaatcttcgttcaactttaagtttgcccacagaaccctctaaatccgccttgtaaatttgactgttagtccagaggaggaacagctctaggacactaggaaacaagctgtgtagagagagtaataaatttaacatccatagtaggcctacaagcagccaccaataaagagagcgtgcatagctcaacacccactactaataaatcccatatatatgactgaattcctcacacccgattggatcaatctatcaccctataagaagaccgaatgttcagtgataagttgcatgcaaaacattctcctccgaaataagccctgcgtacagattaaaagactggactgacaattaacagaccaaatatctacaatcaacccactagtcattattacctgattgtcaaaccaaacaagggatgcgcctacggcaagttaacaagtcaacaggactcggaaacttacccgctgta

SEQ ID NO: 635503 - DNA, 336 bp, Homo sapiens
  misc_feature (2)..(2): n is a, c, g, or t
  misc_feature (279)..(279): n is a, c, g, or t
  misc_feature (314)..(314): n is a, c, g, or t
gnttttgctcttcctttgcctttcaccatgattgtgaggcctccctaaccatgtggaactatgagtccattaaacctctttttcttttcaaattactgggtatctcttcatagcagtatgaaaatggactaatacaacagcattcaccagggaagtgactagggaacacagagcttcaagctttgtgagggcacaagggtactgggggccatggataccaaatggcctcctgggaagccccagcagggagtcccagggtggtgtttcagcagcaaaatnagtcgtggccctggggaagggaccctcaagggctncacagccctgatgatccaattt

SEQ ID NO: 635504 - DNA, 1038 bp, Homo sapiens
  misc_feature (361)..(361): n is a, c, g, or t
  misc_feature (382)..(382): n is a, c, g, or t
agcgggactctaacctcgatgctttggtgagaagtgagcggccgtcgctcgcgtcttggctactggatacctgcttcctgcgttgtgccttgcaggcatcgttgctgtgcgctcacgtgtaggtggctccccgcacagagtgagcgtacacgccgtgagttcgcgcggaagcgcggtgaggccggggacgcacacgtgtccgcatggcgcatggcgaccttccgacgggttcggagaagatctgggcaccgagggaggacgttgccatagagattgagtgcgccgaagggacgctgacatggccatctcggcaacatacgcgcaagacggaagacgcttgaagagaatgtcatcgatcggntggcatagaatctgtgtcaancccatgcggatacacatctgagtgacacagcccgcattgagaatgagaggacgcgaacggttcgggtacatacacgtgggtagtaccgcttgtgctggcttaaccgttgtagacacttgtaacttggagactaccttggatgtagcgctaggacgagagagatgttggtatgcgctggcttgccagacgtgtcacgttggcaggttgccacttgctcgtctacaggactacgtaatcgcggagaagtaaactggcaactaagggcgtcttgcgaggtaggtgcacccaggggcaataggcgacttctgaggcacgtacgggaaggacatgagtgggcacagaggggactcaagggggcgcaaggaacggggtggaaagcaaccaagacgtagtattggggataacacgtcgttgcacgcgaggagaaagacgtctaggccccgggaggaatccagggtaagggtctttggaagggagctacgaaccattcccgcgtgcaactttacgcccatacgagcacagctgaacgcggattggacgtactcgaggatgtctcgggcctaaacttgtgagcgtggataattccgtgcactgggtgtgtggccactggagagcttgtaagtcacgggggagaaatccccctgaattattcctta

SEQ ID NO: 635505 - DNA, 867 bp, Homo sapiens
  misc_feature (41)..(41): n is a, c, g, or t
  misc_feature (61)..(61): n is a, c, g, or t
  misc_feature (64)..(64): n is a, c, g, or t
  misc_feature (128)..(128): n is a, c, g, or t
  misc_feature (141)..(141): n is a, c, g, or t
  misc_feature (150)..(150): n is a, c, g, or t
  misc_feature (182)..(182): n is a, c, g, or t
  misc_feature (205)..(205): n is a, c, g, or t
  misc_feature (208)..(210): n is a, c, g, or t
  misc_feature (270)..(270): n is a, c, g, or t
  misc_feature (299)..(299): n is a, c, g, or t
  misc_feature (319)..(319): n is a, c, g, or t
  misc_feature (324)..(324): n is a, c, g, or t
  misc_feature (337)..(337): n is a, c, g, or t
  misc_feature (346)..(346): n is a, c, g, or t
  misc_feature (348)..(348): n is a, c, g, or t
  misc_feature (355)..(355): n is a, c, g, or t
  misc_feature (385)..(385): n is a, c, g, or t
  misc_feature (404)..(404): n is a, c, g, or t
  misc_feature (417)..(417): n is a, c, g, or t
  misc_feature (421)..(421): n is a, c, g, or t
  misc_feature (438)..(438): n is a, c, g, or t
  misc_feature (447)..(447): n is a, c, g, or t
  misc_feature (512)..(512): n is a, c, g, or t
  misc_feature (581)..(581): n is a, c, g, or t
  misc_feature (584)..(584): n is a, c, g, or t
  misc_feature (639)..(639): n is a, c, g, or t
  misc_feature (783)..(783): n is a, c, g, or t
  misc_feature (789)..(789): n is a, c, g, or t
  misc_feature (818)..(818): n is a, c, g, or t
ggcagcgggtgaggcgaccctgagtgtgcccccaccccgcnatggcccgggtggtgcaggngtnctgccgtgctttccgcgtgctccgtggccggcttcgtttcgcagagccggggacaagagaagtngaagatggactgntatggtggnataagtgggacgcatttacgagtacggagccntcaccattgatggggaggagtanatnnncttgaaggagtatgctgggaaatacgtcctctttgttaacgtggccgaggtactgaggcntgacgggccagtacgattgaactgaatgnactacaggaagaggttgcancattnggtctggtcattntgggctttncntgcaacnaatttggaaaacaggaaccaggagagtaantcagagatcgcttcctacngtcaagtatgtcngatnaggtggaggttttgttnctaattttnagctctttgagaaaggggatgtcaatggagagaaagagcagaaattctatagtttcctaaagaantcctgtagttaaagatcggagctcctgggtagatttgaccgcgtcttctgggaaaccatgaaggtttanganatctgctggaactttgagaagttcctggtgtggccagatggtatacccatcatgngctggcaccaccggaccacggtcagcaacgtcaagatggacatcctgtcctacatgaggcggcaggcagccctggggggtcaagaggaagtaactgaaggccgtctccatcccatgtccaccatgtaggggagggactttgttnaggaanaaatccgtgtctccaaccacactatctanccatcacagaccctttcctatcactcaaggcccagcctggcacaatgga

SEQ ID NO: 635506 - DNA, 403 bp, Homo sapiens
tttctaaacttttattgaaaaaaaaacccagggggggtgctggatcccttttcaaaaaagccctttttttttccaatgggggctttggaccccccctttcacctgggctgaggacgttttttttttaaacttaagctccccaaagtacattatggcttttaaaaagggcaaaggtcaaatgtgggtagctggccctggaccaaccccttttcccatgttccagtttcccaagcttaccggacttgggtcaagcttttggccccaatgtcctggcatgagtgttggatgccccccatcaggtaagggacaaatttgtggattgaccctttgttctgcacagaaccaaacactccctgggccactttgattttgtcagcttcactgaaatatctgttttggctgc

SEQ ID NO: 635507 - DNA, 424 bp, Homo sapiens
  misc_feature (293)..(294): n is a, c, g, or t
  misc_feature (311)..(311): n is a, c, g, or t
  misc_feature (326)..(326): n is a, c, g, or t
  misc_feature (337)..(337): n is a, c, g, or t
  misc_feature (342)..(342): n is a, c, g, or t
ggagggctcaggcactggtgccacttgtggcctcttaggctacgaggccttcgggacgaggcccaccgacgcagcaaacgtgacggactagtcgtataggacgttcgtagcagacgacgatgcgacacgcacgaacctagcaacgaacgacaagcgagctagggggcgctagggagactccacactgctcagggtgtagacagcagtacagctaaggttgggggccgtggtggggtgagtcctagggggtgagggaagtctggactcaggtgggctccaggttctggtggtcnntgccagatcccgttgcnggaacgggttcagangagggtcaggngtcanactgcaggctgggcatcaccatatatcactcagttccttctggaggtcatccttccagcagccactggctccctgcggtatc

SEQ ID NO: 635508 - DNA, 215 bp, Homo sapiens
  misc_feature (84)..(85): n is a, c, g, or t
  misc_feature (102)..(102): n is a, c, g, or t
  misc_feature (117)..(117): n is a, c, g, or t
  misc_feature (128)..(128): n is a, c, g, or t
  misc_feature (133)..(133): n is a, c, g, or t
cctagagaatccccgaggagatcgtgaggatctagagggacagtcctggacataggatgcacgccctaagggttctggtggtcnntgccagatcccgttgcnggaacgggttcagangagggtcaggngtcanactgcaggctgggcatcaccatatatcactcagttccttctggaggtcatccttccagcagccactggctccctgcggtatc

SEQ ID NO: 635509 - DNA, 356 bp, Homo sapiens
  misc_feature (76)..(76): n is a, c, g, or t
  misc_feature (82)..(83): n is a, c, g, or t
  misc_feature (94)..(95): n is a, c, g, or t
  misc_feature (128)..(128): n is a, c, g, or t
  misc_feature (142)..(142): n is a, c, g, or t
  misc_feature (151)..(151): n is a, c, g, or t
  misc_feature (176)..(176): n is a, c, g, or t
tactaaattcgcggccgcgtcgacgtaatttttagtatgtgtgaaagccaaagaaaacaaaattggccatgggganctggcnnacatgcctgtnnaaccccaccactttgggagggccgtggcaggcnagattggcttgagnccctggcanttggagaaccagcccaggcaacatnggtgagaaccccgtttctccaaaaaggtgcaaaaatattagctgcgcatggtggcatgtgcctgtggtaccagcttctcgggaggctgaggcaggaggatggcttgagctcacgaggtggaggctgtagtgagcttaaatcacactacagcctgagcgacagagtgagaccgtgtctcat

SEQ ID NO: 635510 - DNA, 255 bp, Homo sapiens
acatcttttgacctctgattaactatgggactataccagattagggccctaaagagcataaagcactgtatctgtcatatcatctcatagtgataggaactgataaggcttagttgctccgataggaaacttagtcaggtgatcagtgatagcagctcttctttcaattacatttatagatatattatcaataccaatatttcaaaaattagatcatacattatcaatcatattttacgtgttatgttaaatcta

SEQ ID NO: 635511 - DNA, 104 bp, Homo sapiens
tatatcctttctgtgtaaaatgtatattctttcagtttggagcgcctctgcctggtgccacaccatctgggaagtgaggagcacctctgcctggcaccgtgcaa

SEQ ID NO: 635512 - DNA, 348 bp, Homo sapiens
gagcagaaattgtgatgcctttgatttaccccctagcattttatagtcttgagcaagtcataaccctatggtgccttattttctggatctgcaaggagccctgcctgcataaatgtttgcttaggaacttacgaaaatgacatactcctctctctgctttaagaaggccatgagccagctgcagctcatctcactcagcctgctcctgaccagagtcctttcctcttccaagagaaagcatggaaaagcagcaagcaagcagtcataccatggtaacaggagtgatctatcattgtcatcgagtccttaaacaaactgtaaatgctcttggcttcagcacctttattc

SEQ ID NO: 635513 - DNA, 667 bp, Homo sapiens
ctacctggtcggcggccatctgcaacctaacacatcaaagctggctggcgcagaggatgaaaaaagcggctggagttgactcaactctaggctccgaacttcatttaaagtgaacattggtcatacctatcacctgtgtaacattaaggaaatccaaaacagagtactaaacaccatgttggccaaaactggcatccatcattacagtgacaataactgtaaggcatgtagaaaatactacagagtttgtacactggctatcgttaacccaggtgattctgctatcattaaacgcatgaacctgggaggcagaggttgccatgagccaagatcgccccactgcactccagcttgggcgacagagagagactccatctcaaaaaaagaataaaataaaataataataataatgttacaataaaatcctggtttgtaaatatgtgcctgcatcactaattaattccttcagattcctagaaaaggagcaccgggtcataagatatgaattttcagtcacacaataacatgttgctaaattaccttctagataagttagatcaatttatatttccacattagtgcatgagtgattgaatcattcttcagtcaaagcaacagactcatgtaacatacctgtgtaaatgaatctagaagttctgaagattct

SEQ ID NO: 635514 - DNA, 702 bp, Homo sapiens
  misc_feature (612)..(612): n is a, c, g, or t
gtcctctcaagcttggcgttcgtttggtgaggttacacggcgggttcaacatgcgtatcgaaaaagtgttatttctgttcggggcccatctatccgtggacacggatgatgttcgtccgcaaggattgcagaggtgttcagattatgcaaactctaaatgtcatatataagctttacaaagaagcgcaatcctcgcaaagttaggtggaccagagcattccggaaagcagctggtaaagagcttacagtggataccattcatctgaagtttgagaaacgtagaaggtgaacctatcaacataccagcgagagctagggaataacaagtattgatgcgagtgagagagagttgaagaattcaaacgagaaggcgccatagtctagatttatacatggaacatgattgcacagaaggacatacaggagctacgagaaagttcaaggatatcgaaagaagtcaagcaaaagatccgatctgatccgagcccctctgtgcaggcacagggaaacagttggaagagaagatggtacagcagttacaacgaggagtgtggacaatggaagatgctccttgcataatctctgtaacccatttctttgtatgtacacttngaaaaatgccctttgatacttggaactgctaaagtgattttatcttcaccataaggcacttgaatgaaaacgattaaagacatcttcctg

SEQ ID NO: 635515 - DNA, 142 bp, Homo sapiens
cccttaggataccaggacctgttttcccttcggccctccagccccaaacctgccctagccagccctgcaaacatgccagtcttgtcacgcagtttgcacagctcaggcaaccccacgggcaactgcacgtgtggtcccaggg

SEQ ID NO: 635516 - DNA, 149 bp, Homo sapiens
cgggaccaaaccgcatacgaggaccaaaaggggccaggaccagagaagacgacatctccatgtgactacccacagctccagcagaaaacagggagtgaccttagaccctcagcatctgcctccactagctctcttgccaagggggaact

SEQ ID NO: 635517 - DNA, 212 bp, Homo sapiens
  misc_feature (11)..(11): n is a, c, g, or t
tgggatcatgntagtcacttcctgcccccaggccccgtgccaaagaatggatgccccctactcctcaggggactgtccagggggcccagtggtagtgagggaaagtgtttttgtttttttgctcagcctgctgggccctttgtgtttgaggatggttaatgattccagcctctccctgtgccttatgcattaaaatttttttgttacgagca

SEQ ID NO: 635518 - DNA, 182 bp, Homo sapiens
tgaccctaaaaggttgaaacacttctgttatgtgtatgtgaaatcacttttgccgggcgtggtggctcacacctataatcccaaaatgttgggaggtcagcatgggtggatcacttgaggttaggagttcaagaccagcctgaccaacatggggaaaccccatctctgctaggaacataaaa

SEQ ID NO: 635519 - DNA, 190 bp, Homo sapiens
  misc_feature (189)..(189): n is a, c, g, or t
gtgatgtatcccaacactgaaaacaggatgaaagcctgtttactgcaattccttttacccagtgtatcatgtctacctatcaacagaaaattaccaagcatacttaaaaggcagaaaatgcagtttgaagagactgaacaagcattagaaccagagtcagtccgtggctggaagtgttgggcgataacna

SEQ ID NO: 635520 - DNA, 254 bp, Homo sapiens
catgttgccctctgctagcgctacggtgtttccatagaagtcatagcagcatctatgccagtgctagggatggaacctgctatcggtatacttgtgtgtgttcttagtgtgttatcttacccagtttcatcttcttctaaaaatgcaactctggtgccttccctccctccaggaagactggcaaatatcccgttgcattacctgctgctgtggacgcgctgcgctctgccctaacctctttacggacttcacgc

SEQ ID NO: 635521 - DNA, 201 bp, Homo sapiens
caagggtcgaaccagttgtaaaataattccccgaaggtatcttgtctcggcacagtaataaatggcggtgtccgaggcttcaggctgctccccttccagtccgaggtgttgacaaggatgatgttttcgggaagctggtcatcggagatgaggatgtggttgagctggtcatacacagtccttcctggggatctgcagctg

SEQ ID NO: 635522 - DNA, 112 bp, Homo sapiens
tgtgttcgccagtcaaagtcaagcagtgaaggacaaagctgatttctgcatatcactatgccggcaaggtgaggagcactcacggggaggtgctggccagatctgaggtgga

SEQ ID NO: 635523 - DNA, 1036 bp, Homo sapiens
  misc_feature (52)..(52): n is a, c, g, or t
  misc_feature (65)..(65): n is a, c, g, or t
  misc_feature (71)..(71): n is a, c, g, or t
  misc_feature (81)..(81): n is a, c, g, or t
  misc_feature (92)..(92): n is a, c, g, or t
  misc_feature (109)..(109): n is a, c, g, or t
  misc_feature (122)..(122): n is a, c, g, or t
  misc_feature (124)..(124): n is a, c, g, or t
  misc_feature (127)..(127): n is a, c, g, or t
  misc_feature (162)..(162): n is a, c, g, or t
  misc_feature (165)..(166): n is a, c, g, or t
  misc_feature (205)..(205): n is a, c, g, or t
  misc_feature (211)..(211): n is a, c, g, or t
  misc_feature (235)..(235): n is a, c, g, or t
  misc_feature (244)..(244): n is a, c, g, or t
  misc_feature (255)..(255): n is a, c, g, or t
  misc_feature (323)..(323): n is a, c, g, or t
  misc_feature (465)..(465): n is a, c, g, or t
  misc_feature (491)..(491): n is a, c, g, or t
  misc_feature (527)..(527): n is a, c, g, or t
  misc_feature (562)..(562): n is a, c, g, or t
  misc_feature (564)..(564): n is a, c, g, or t
  misc_feature (592)..(592): n is a, c, g, or t
  misc_feature (601)..(601): n is a, c, g, or t
  misc_feature (605)..(605): n is a, c, g, or t
  misc_feature (617)..(617): n is a, c, g, or t
  misc_feature (642)..(642): n is a, c, g, or t
  misc_feature (651)..(651): n is a, c, g, or t
  misc_feature (653)..(653): n is a, c, g, or t
  misc_feature (670)..(670): n is a, c, g, or t
  misc_feature (717)..(717): n is a, c, g, or t
  misc_feature (722)..(722): n is a, c, g, or t
  misc_feature (725)..(725): n is a, c, g, or t
  misc_feature (736)..(736): n is a, c, g, or t
  misc_feature (743)..(743): n is a, c, g, or t
  misc_feature (759)..(759): n is a, c, g, or t
  misc_feature (774)..(774): n is a, c, g, or t
  misc_feature (799)..(799): n is a, c, g, or t
  misc_feature (828)..(828): n is a, c, g, or t
  misc_feature (837)..(837): n is a, c, g, or t
  misc_feature (839)..(839): n is a, c, g, or t
  misc_feature (859)..(859): n is a, c, g, or t
  misc_feature (874)..(874): n is a, c, g, or t
  misc_feature (899)..(899): n is a, c, g, or t
  misc_feature (907)..(907): n is a, c, g, or t
  misc_feature (911)..(911): n is a, c, g, or t
  misc_feature (913)..(913): n is a, c, g, or t
  misc_feature (928)..(928): n is a, c, g, or t
  misc_feature (932)..(932): n is a, c, g, or t
  misc_feature (943)..(943): n is a, c, g, or t
  misc_feature (964)..(964): n is a, c, g, or t
  misc_feature (975)..(976): n is a, c, g, or t
  misc_feature (1013)..(1013): n is a, c, g, or t
ctttttttttaattaaaaagaaaaaaaaagagagaaaaaaaattccacattnattaaaatctctntctctngaaaatttcnggtttccagcngactggatgagtttctnctgtggctgtgtnanccnctctgtatactttaatggttttatcagcctcagcngtnnagtaatcgactttaagactgaacaaaagcacaagcaaanatcccngaatcactgtccaaagacccaggnggcacagcngcgtgaacccnctgaaaattgtagccagtcctccagtcccaaagaggcatggggccattgtaagccccagaaacaagcnctccatcagaattaaccgtcaatgtgttaataaaagcattatgaccggaaagattttgaatgaaactcccatcagggaatttccactgccttatgttatctggagaaccagaagcaaatgtgttaagtcttggatgttaaancacagccctaactgattttttgtganttgttaatgttacttttgtttttccagccaccagancccataatcgaattgtagtttcaaggcttcctgtnanaatttgtggttttgcagcctgaaaactnaatgtagcnactncatttgtatgtncagaaaaagtgtgttcactggcttnagttcttanancccaaaaccgtgcagtngaattttgactacaggttaccaacaaaacgattgttgggtgcaaatncaaancanaaactgcactnaaatttncatgaaaatgccgtanaaccttattgtattngagaacccagcatttcacttgtttnttttctccacaagaaaacagaaatgggcnccttgtgcntnctataaagccccgcacagtncttatatgcccagtnaatgaaagtgtttaatttgccactngccaagtnccananctttatagttctgtnagcngaaccagttanaaaccacttaatttccagggnccacagcaatnnatcgaacccagcaaagaagcccactgaaaaccctgtngagtttccacggggggtgccaat

SEQ ID NO: 635524 - DNA, 224 bp, Homo sapiens
agtctttctctgtcgatctcagctcattgcgacctccaccttccgggtcctgcctcagcctcccgagtagctgggactacaggagtgcaccaccacacccggctaatttttttttttttttgaaacagaatttcgctctgtcacccaagttggagtgcaggggtgcaatcttgctttactgcaacctccgtctcctgggttaaagcaattcccctacctcagcc

SEQ ID NO: 635525 - DNA, 853 bp, Homo sapiens
tggcaaaccccaccgccgaggaaaaaccgggtcctattaagcccagggtcaaccccacgggggttcttcgaatatggccgtcaagcgggaagccctggggccgggttctccttggagcctggtttggcaagacaagggctcccaaaagacagcaagaaaattttcggtggctctggagcactgggaagaagaaagggatgtggtgttataagggtgtccctggtctttcacaagaatatatcccaggggttatatggtggtcagggggggtagactctacacaccgccataatgggcatctggtgtgggcaaatgtcccctattcatatggggagaagaatattttggaatagatgagaaaatctatccatcctcttaaacggcataaccggtgtccctgggctattctgtgtgtgccccatgtggcaaatattggctgtgggacccaaaacaacaaatatggggttcccccatgttttttcacatctgtggcacctgtgcgcaaagaagctgtagacgtgtggcgtgtgcgaatgtgcgccaacgctatgtggtgggggtgcgtggggcgccacaaagggggtgaacaaagaaaggggcattgtgaacaacatattgtgtggggggaggcgcctatgggaaacgcgctactagggggtgtcccaggggcatattggggcaaagaacccaacgcaaaagaaaagattccaccctatggggcgcgtgctctgggtgggggacaaactcccggcataaaagtttggagaccttcgggcgttttaatccttaaacccaaccaaagattacaattccctttcttgggtagctcacaagggaaaaaagaacccccttc

SEQ ID NO: 635526 - DNA, 870 bp, Homo sapiens
cccggatgattgtggcggaacggggggggtggtagagttgcgcgccaaggggggttgcacgtgtggggttccgtcgtgcccgggttttgcttgctgggggggcagggccgggatgccgtacgtgttggtgggggcagcttgggagggcctcgtgtcgggagcctctgtggtggggatggccccccgccgtcctgggagcgggtgtggtgagagtgccgggggccccgttggcgtggtcacaaggagttgtgtcaatccccgcgttcctgtggggtgcccatgtgctgagtgcccacgaaattgtcgcctgtggtggtggtgttggttcgcccccgtcgatctgctcgcggggtgatgtgagcgcactcctagtggggggcgtgtgcccacgcagcgtgtaggcccgctgggtgcgggtggtgcgcgccgcgtggtgggagacaccaacgggcggcgtttctgttgttgactgcagccgcgccgcctctaggggccgcgtcctttttcggccccgggcgcgagtgtgactccagatgggttctcgtcccggggtctcttcatctgtcggcggtagcaatgtgggtccgctgtgctaatcccggggcgtgttcgcccccattttgtgtctactcttgttcggcgggcctcctcctcgtgtaaactgcatcttatcgggccgcttcttttggaagcgtggtgccttcttcggggtggtggctgttactttcgcacgtggcgctcctctatgaccctccgctcacggtgctgccccatggcgcccgcgcccgcgcggggaactgctttttggggtctttaggtttaaaaaatgaaaacccccccccacaaaacaaaaaaaacggaacaaaaaaa

SEQ ID NO: 635527 - DNA, 1188 bp, Homo sapiens
ctagttctagatcgcgagcgacccgaagctggcatctttctctacggagacagattttagaaaatacttttcttgcccatgaatttctatcttctggttgataaatatcattttccctttacttacaagaaaataagattgcaaccactcctgctaatgatttagtagtacctaattcatttcagctataagtaaattaggagataaattctaagagttgactcaaaggatgatctatttaacagaactcacgtcaactcagcgaatgagttatgggtacacattcagcacgaaaataacctaatcccgtgggcaacggtttctcgcaaggcatggatgcacacatatacaaatcattaccacaaaaaatctcaacatacaagcgttattttaaacatcaccacacaccacacacaacacaaacaacaaacaaaaacaaaaacaaaaaaaaaacaaaaaaaaaaaaaaaaaaataagaaacagaggaggggaggaggagagagaactccacgcggcgcggggccctgatctctccccgcccaccaggtgaagaaaaatgagctccccacaggactcgctgtccagaggacgccgttactgccgcacaacaaacaaaggggcgggagagacgcagcactacagacaacagagacagaatgagggaagcacgaacaaaaaaacgctgggccaccccacccagccaccccacctcgcctacagagacgccacccgcctctgctccattctattacatactctatccatgcatagtgttactttcgtatctaatcgtcacctgcttggtgtggagggaatcgtcaagacagatagtgctatgacgtccggacacctcaaaagacatactcctcggggcggcatgagaatgaaatcatagataaaagacaagtacatagtcatgctagacatatgaagatacaaggtgcaggcgagcgccggggcaacgcgtaggagcagcggacgaagggcggagagagagcggaggtgacagagagcagtcagagcaagagactaccagagatgggcggacagcgagtgggcgggcgatggaagaagacgcgagataccgctagagaaagaggcggacgcagagacgctgcgcgagacgtagcggagaggacaggagacggagagggagcccgacgagagtcacgggaaaacagaggaacg

SEQ ID NO: 635528 - DNA, 295 bp, Homo sapiens
aaggctcgaaaagggggttagtggtacgaggatattgtgtttctaaaagggaaatgcagtacctacaatcattcccaggacgaggctctcagacagacctaccgaccagtaacattttgtatgtctgccacgctgggggtcatttgtatatgccatactatatcccaggtagcttatgctctcactacttatgggttgtgtgaccgtctttagcaacagtatttcacacatctacaactttattgaggacaagtcaactactctgagttagcagactcctgcggaggacagctcc

SEQ ID NO: 635529 - DNA, 319 bp, Homo sapiens
caaagtctgaaagactaattaacagactgggaaaaagaaaattatatgctgggcgcagcggctcgtgcctatatcccagcactttgagaggctgaggcggacggatcacaaggtcaggagttcgagaccagcctgaccaatttggagaaaccctgtctctactaaaaatacaaaaattacccaggcgtggtggtgcacacctgtaatcccagctactcaagaggctgaggcaagacaaaagcttgaacccgggaggcggaggttgtagtgagccgagatcgcaccactgcactccaccctgtctcaaaaaatgaaaaag

SEQ ID NO: 635530 - DNA, 506 bp, Homo sapiens
agctagagcagtatccatgcatctctaactagagcagtttctgtgatgaggacccagcttcagcagtcactcagcatgtagtctgagtgtaaactcactctggaattataattttatatattttgtgaaggagcctcagaggatcgaggtttttactctctgttgctttctttcttgtcgagcatttccactgcacatgggttggccaacttgcccctcagtgtggtcttacttgaattatatgatagagaaatcgcttctagtttttatttgtggatggtgttcatcccattttccagcgctagtaaattgtttccctacttttattcctttgctcatctcagtgggaattgtagaagggggttaaatggatgtgttgaaagggttttgaaccaaaggtctgtaatgatttttttttttagatcttatttaagtttcaaagactgattccaaaggcaaccaatattgacatctgtatagatagacttaagatgtgtagttcaagg

SEQ ID NO: 635531 - DNA, 184 bp, Homo sapiens
ggatgttaaccgtaacgccgaacaagaggagtaggactggtcttgtcacatgagactaaggctaaagtgtaaaaagtcccactagtaacaacgacagatacctctccgaaaagaacgagggtttctttggtcgtaactaccgacaacttgtgctcctgtaccttactgtacgtttttaccacta

SEQ ID NO: 635532 - DNA, 482 bp, Homo sapiens
ctagctcatgcctcccctcctgccgcagcccttccctacatctcctctccccatggccaagctgcgccacagacgcggcggggatggttaccgacaccgtgagccacagaagaacgattgagtcctgcagcgccggcttagcgccttcccggccgccggcgtcctcttccacttccaagccatcgaggaggactgatgtggctcttcccatggcggccttgaggttttgattgggtccttgcatcggttttgacggagcctgataggaacgccgggagagaagtagccttggattggagcatcgtgggcatttcatcctgtttgtggtggccacggggcaggccatcgtcgagatccatccctgtgagccgcagttcatctgcgatggggcattggggagaattcgtgctcgatccggctgccaccacacgccatctggtggggaagtagagggggtagccgagcggaggagcgggcgcggg

SEQ ID NO: 635533 - DNA, 744 bp, Homo sapiens
tgggaaaaaaaggaaggggttaattctcaagcgtctaagggttagcaaacgagggctatttggttttaaaaaggggcagggcgacactggcggcctgaggaggggtccatgggtctggggggctggcccgagccaccctcaggccccgtgcccacccggtccgccctcggccgggtccagagggatggctggtgacgaggggggaggtctgggaagaggctgggaggcaggagagactcccccaggctccccacttaacactgagggggggtgggggttgggcggacacacactcataaaacagaaaataaggttaacttaaaaataaaaccaggcagcccggcctcgggcctgtgctgggcccgtgggaccagccatgaaccttccgggaatcgcagaggcccccagggtttggatgcggggaggaaagggccaggcctgtgggacccccaccgggggaaccccctggccccggtaaaagggggccaaggtggcaagaagaaggtggcttccctccctgggggcggagagaagatgactctatgacttttaacccttgcggcgtttggtgactttcctgatactccagagtcaccggctaggtgagaggcggggtgctaccctagctggcccccacagcgcagccggttttgccctggggtggattctgggataccggtggggtaacactgtacgggggttcctgccttgttgctccccccagggaaaaccggctcttgtccg

SEQ ID NO: 635534 - DNA, 175 bp, Homo sapiens
atattagcgcatgttttttcattcggctctgcttatgctatgccttatatcaggatgcgcttgagtatggttttcactgactaccagagaggatttttccaggtcactgtgtgggttttttgtttgttttttttgagatggagtttcgcttttcttgcccaggctggagtgcagt

SEQ ID NO: 635535 - DNA, 763 bp, Homo sapiens
gtacagatgtgatgcgtatcaacgggcgtgatgttgtcctgtgccaacgtttgctacagcttataacagcatccctgggtctcgcagatctgtgcctatgatcatgcttgacattgccagtgttctttactggcgacgattcacggaacatgaaggtctcctgatatccagcgtgggagcaccagttcctgatgaagcgagttcgctagatgacccagggcaggttagctcgtgctggctcctcctccttagaaatgatatgcaagctccaatgagttccctgatgataccctgaacttcatcaagacgcacccgctcatggatgaggcagtgccctccatcttcaacaggccatggcttcctgagaacaatggtcagataccgccttacccaaattgcagtggacacagctgctgggccatatcagaatcacactgtggtttttctgggatcagagaagggcaatcatcttgcaagtctctacggcccgaataggaacatagtggtatgctaacatgacagccttttcctggcaggcagatgcagtgtctacaactcctgaaaaaacgccgctatcgatggatgtccgagaataacccgcgagtcatcgggccatgcccgcttggaacaggaacaaagccagctctcctgttactctctgcgttcctctaacctggttgttgaaccaagggtcccccttggccgaaggtgaaacgatcatgagaaagtgcacacaacctgtatcgctctcacagagaccata

SEQ ID NO: 635536 - DNA, 562 bp, Homo sapiens
cagccgcccgccagacgcgcccagtatgagggagatcgtgcacatccaggccggccagctgcggcaaccagatcggggccaagttctgggaagtcatcagtgatgagcatggcatcgaccccagtcggcaactacgtgggcgactcgggacttgcggcttggagcgtgcatcagtcgtcttactacagacgaggcctcttctcacaagtacgtgcctcgagcctattctgggtgtgacctggaagcccggaagccatggcacatgctgtccgtctcgaggggccttctggagcatctcttcagcgccgtgacgaatttcatcttgggtgtcatgagttggggggccgggcgaaggaaacttggtgcccgggggggttcacataactgcgggtacggggggccgggaggcttgggtcgccgatttcccgggtccccttgggcattcggtccggttggcggtgaaccggggccgtgggtggaagagattggggccgactttggccttgcaggggggctttcccaagcttggagccccactttccgctgggggggtgggcgggcg

SEQ ID NO: 635537 - DNA, 531 bp, Homo sapiens
cgacgagtcggtgatggtggtggaggatgatccggcggtacggatgctggtgctcaatgtcctcgacgagctgggttataccgtgcacccggcggcggacgcgcggaccgccttgccgctgctggaatcgagcctgcgcatcgacctgctggtgaccgatgtcggcctgccggggatgaacggccggcaactggcggaagtcgcccgccagcaccggccggggctcaaggtgctgttcatgaccggttatgcggagaaggctgccgagcgccagggttttcttgaaccgggcatggatttgatcgccaagccttttaccctggatgcactggcgaaccgggtgcgcgacatgatcgggcaaacgtcctgatcttcgggcataatcccgcgcccgccgcatgccccaaggtttcaaggtaaccaatcgatgaaagcccaagcccgtcatatcctggtcaagaccgccgaggaagccgaacaactcaggttacgtatcgtcaagggcgaagcctttgatgtgctggccaagaa

SEQ ID NO: 635538 - DNA, 360 bp, Homo sapiens
  misc_feature (228)..(228): n is a, c, g, or t
  misc_feature (249)..(250): n is a, c, g, or t
  misc_feature (263)..(264): n is a, c, g, or t
gatccctgtcgctcggacaagatcacgtcatgactccgaacggataattcagacaacaacaccatctttgtgcaaggcctgggtgagaatgttacaattgagtctgtggctgattacttcaagcagattggtattattacagacaaacaaagaaaacgggacagcccatagattaattgtgtacacagaacagggaaaactgtgcaaggctgaacgggagacggcaanctggtctcttttagatgaccnncacctctcagctnnaaagcagctattgacgtaggtattgatggtaaagaaaattctccggaaatcctcatcaagcgctctcatttgcatactcgactccgagcggaccgg

SEQ ID NO: 635539 - DNA, 313 bp, Homo sapiens
ctgagctcaggtgatccaccagcctggcaacatggcgaaaccctgtctctactagaaatacaaaagaactagtctgacgtggtggtgcgcgcctgttaagtcccagctactccgaaggctgaggcaggagaatcgcttgaacccggaaggcggaggtagcaataagccaagatcgcgccactgcactccagctcgggcgacggagcgagactccatctcaaaaacaaaaaaaaacaatgagttttcaacgtaaaataaggcccggaacagtggctcatgcctataatcccagcacctggggaaaccaaggcaa

SEQ ID NO: 635540 - DNA, 942 bp, Homo sapiens
catggtggcacgtgcctgcaatcccagccaatcaggaggctgaggcaggagaaccgcttgaaccccggaggcggaggttgcagtgagccgagatcgcaccactgcaactccagcctgggcaagaagctgagacaccatctcaaaaaacaagaaaatagggttcctcaaacaggcaaacctgtgagatgcacgttatattcctctctggggaagcccctgacacacggtaagttactaaagacagcctggctgtgacagtggacctggttgcaaaactagccctcctgcccacagacagaatagaaaaatatgaaacaacctctattcaggcaggtggacagctaggcaggaacgcacctgcaggctctgaaggcagtggaagttccaagcagcgaagcccacgatggatcaaccaccaactccttaccctggggatgtaaacccaaaaccaaaaccacacggtacttctgacgtgcaagaggcggagatcaaacatctactggcaagctaaagtgtgcccagaacacgggcccccagagagaaggggcaccatgtggacaaagcaggagtccacgaacgtcatgcaggaccaccaagtcaaacaaatgcgctgcatgcgacaggggacacccagggacctccaagagagacatgatggagatgtagcacgggtatgcaacgaggattggcagaaggacctggaggaggggagtctgacatggtaatctacacacagggggcgacgggagggcagacaaagggatgagatggcgacccatgaccgagaggaccggaacaagagggaaaaaggacgccagaaaaaaaaagaaaacggcgggagacaaaatcacaaggggggaaggacaaaaaagggaaaagaaggaaaaaagagataaacgggcgccgaagcgaagcagaagaaacaaggaaaaagggctatcc

SEQ ID NO: 635541 - DNA, 159 bp, Homo sapiens
caccctagcctggtcatattacatactcatatatcagtaagtaaagtatgtaatatgccagaaggggataaatgccttaagtgatagaaaagaaaaaagaagagccaattaaaggggagatgagagggtgcaaagtggtaggtgttattttaacgccag

SEQ ID NO: 635542 - DNA, 186 bp, Homo sapiens
  misc_feature (117)..(117): n is a, c, g, or t
  misc_feature (180)..(180): n is a, c, g, or t
cacggcctgggcgccttttggcagcacgcgcgggatgttgtccagcaggccgccaccggtgatgtgggccatggccttgaccgcgccggtgtccttgatcagcttcagcagtggctngacgtagatgcgggtcggcgccatcagcaggtcggtcagtggtttgccgtccagctggatgcnttcgat

SEQ ID NO: 635543 - DNA, 199 bp, Homo sapiens
tgagcaagatggaggctactgggcgtcagcgaagtcagtgcatagcggtcccgggctgatcggtagtggaacacaacacctgttacctccaagggcaccagtgtcctgctcatcctcgtatgcccctcacaacacccttaggctcactcaaacattctacatactcactctacactgccaccctgccagacttgctcag

SEQ ID NO: 635544 - DNA, 341 bp, Homo sapiens
  misc_feature (23)..(23): n is a, c, g, or t
  misc_feature (26)..(26): n is a, c, g, or t
ttacttgggaggctaaggcaggngantcgcttgaacccaggaagtgagccaagatcgcgccattgcactccagcttgggcaacagagagactccatctcgaaaaataaaacaaaacacacaaaaaaacatgaaaataagatattgtgggctgggcgcagtggctcatacctgtaatcccggcactttgggaggccgaggcaggtggatcacctgaggtcaggagttccagaccagcctgaccaacatggagaaaccccgtctctactaaaaatacaaaaacaattagccgggcatggtggcacatgcctgtaatcccagctaccgagaggcttgcagcagg

SEQ ID NO: 635545 - DNA, 854 bp, Homo sapiens
gattttaggggcgggcgggttttgcttgggtgatgctgtgtaggtcgtccctgtgggtgtgacgtggttggtgattgtgcaggatcctggtatccgctatacaggtcaaacatgcatgatcttcgtgataaacccattacctggcaagaccattcgacgccttgaggtggagcccagtgacacctatcgaaaatgtgaaggccagagattccagtgatacggaaggcattcccctcgacagcagagagctcatcgtttgcaggcaagcagctggaacgatggccagtacatctttctgactacaacatccagaatggagtcgaccctgacacctggtcctgcgtctgagaggtggatactgcaagactcttcgtgaagatcctgaccgggcaagatcatcaccctgggaagtggagcctcagagacatccaatcgaagacatgtgaatggccaggatccaggataacagaaggcatccactcccgagcagccagaggcttcatcttgtgcaaggcaagcagctggaaagcatggcctgcagtcttttcctgagtaacaaatccaaggaaggagtcgaaccctgcgaacttggggacctgccgtctggagagggtgggtatgcacgatcttcgtgaagagccctggagccggccgagggatcgagtcaagctcgtggaccgcttgggagctcctaatgtcacaacagtcgcaaatacggctggcaggcctgagaatttcagagatacaacgaaaggtcattctcgccgccgatcaggcagaagcggtatcctgtggcacggcaagcacgggtgggaaaatgggcgagacatcatagctgggaccacaaaatcaga

SEQ ID NO: 635546 - DNA, 306 bp, Homo sapiens
  misc_feature (233)..(233): n is a, c, g, or t
cgtccacacatgccataattagagacctagcgtttcttgccaagaacccaaaagtctctacaggtctcctggcatatccccacccctagatacagaatctgccgcaccaacctgtttttttccaccaacctaaggttctggacctcccggttataatctcatctgtctgcatgcaaacaaagataaatcagaaaacagccccacctgggccactatctgtaatgaaaatcagnccattcacctacattgcactctctcccacgcagggattttttttttttttctttttttagcttggattttggg

SEQ ID NO: 635547 - DNA, 893 bp, Homo sapiens
  misc_feature (250)..(251): n is a, c, g, or t
  misc_feature (386)..(386): n is a, c, g, or t
gaatagcccccttgcacttctgagtcccagaggttacccaaggcacccctactgacatccaggccttgctttcattctcacaatgacaagaaactatgccctccatctcatatcatataccaaaatcgtctctcctcacataaacagtaagcgcgttctccatcactcgtcttcaatcttaatccattcatagcaaggctaggttgagggtggaaataagagccaaaccacagccatacgactagaaatnnatcttagtcgactaacctccacctactacattctaacacgcgactaataccggatggaaactaactcaagcgatgattgcgtaacaccgtgaacaaaccactaaaacagtaaatcctactcttcatttacatttntgaaatctatattagtaatctattccctacaactaaactgatccggcattcccatactacgtcgaacattgatagacttccacagctagcacgacagacacactagctttactttatctctagcacgccatgaaagcacagccgtaagcaatggatctaaccactctctttaattctcctcgctagcctcttccatcttcccttaagtgaaggtccttggtctcacacctgactaaaagctcggggacttttttatggtccactaagatgcgggtcgcactataatccgaatgcaaattcgacaataagcaaccaattatgcctcaatctattcccacacacaatcgagtagcccatccatctacccgtcccttaaaccgtgctaactttcataacgcataacgccctaaatctaatcatcccgaccattcgaagtcactagctaacttcccccaattatctaaacaaacggtaaaaaatacaacaatggcaccaggtttggcaaca

SEQ ID NO: 635548 - DNA, 979 bp, Homo sapiens
  misc_feature (787)..(787): n is a, c, g, or t
aggtactgtctgttgttgagtggggaaagacatttttattacttacagggtagccataaagtttctaaaacggtaatatattaaagagggagagtggaaggggagaacagtatgaagtcaacaggaaatggctaaagatggagagctcaggtagaatagtttaaaaaatgaaaattgatagagtacctggtgtatttgaatacagcctagagagctttcattttccaaagagtgtggggataaattagtgaatgcatatttttcaaaattaagaaaacagaacatataattttgaacgctgagaaaaataaaaatttaaaaactacactgtatacacggtatacctcaactgtgaataatagtagtcatgtaaagtcagtcataattatgtaaatactgaatactgattttacaacaaatgattctataacgctgggaggatgggagaaaagagatgtgtgtgtgtgtaatggtggtgagccaatcaagatctgatatagaaaaatgcagaaaaaggagtatacacatgttttcttcggattaaaaaaactaataataaatcaccaagagtggtaaagttttaaatcaagatctgatatagaaaagtgcagaaaaagtagtatacgcattttttttttcaggaaaaaattaactaataaaccactaagaggggtaaagtgttaaccaatagttgcatgtgttctatattccactcatgtgtgtccagcaaacagtgttctatggctttaagtagtaaacatcttgcccccgtccaacaccatgtctnggcctaaagggtaatggtctttcctaagtctaatattcttgtctccaagcaaactccattggggcacattctcctatagcttttctacctgaaagatactctgggtttaaaagctaaagcataggtgcgctttttccattaaattttcctggattcccatggaaaaaaaaaaaacacaaaacaaacaaacaa

SEQ ID NO: 635549 - DNA, 699 bp, Homo sapiens
  misc_feature (356)..(356): n is a, c, g, or t
ggctggtgtggggttgagtcagttgtgggacccggagctgctgacccagcgggtggcccaccggaaccggtgtgacacgatgcggcagggcgttagggcgtcgggagcctgcgaggccttggccgtcgtcgctagagctctgggctgagcctgtggccgccgtctgtccccgcgtgccccgatgtcaggcagaaccctgcctgccggtggggcgcgccccgcgttctgcggcttgtctctccgagtgggcgtccggccttcaggggggcccatgtgcggaaagcaacgacagcaagaatcctgtgggtcccttcagaagtcgcggaccacaataagtagcccttcgaatatttatnactagggggccgccttttcacccggcagtgttcgggtcaatcttagcacagacttctttaaacgtgggcgaaagatccaattcgggacttacgaccacaggtggtgttcgcccaccacgctgacaggacctacgagggcatcctgcgcccgggtacgggtggtgacggccccacccggggtggacactccgtgtggcgcccggggctccgccgcgtgcccggttcccggtgcgtgctacccgcccctttggtctactgctcccggcttgacaccggggtaccccacgccggtgtgctggtccgggacacttcgttgctcccgcgagaggcgttccagattttg

SEQ ID NO: 635550 - DNA, 244 bp, Homo sapiens
agtctcttctcaccttctgtatcggcttccttagctttggtccgtagcgcgggtgtccaggcatgagcccgggctcgttcatctcttctcttgggagcctggcggccccgtccccgtgtctgtacaccacgatgcgccttacgccttcctgcccctattgtatgtggaagctatgactcaggacctcccatcagcccccaagactccctctccctaaatagtactgctttagagggaggcagtc

SEQ ID NO: 635551 - DNA, 1521 bp, Homo sapiens
gctgcgcaggagccgcaggccagtaggcagccatggtcgcccagccggaatggcatggtcttgaatgccccacttccacaaggactggcagcggcagcgtggccacgtggttcaaccagcacgggcccgtaagatccagcagacgtaaggcccgtgcaagccaaggcgcgccagcatctgcacccgaggcacaccagaagatcaaagagtatcccgatcacgggaaccaatctgtgcgcatgacactaccatacgagattacgagttaccaaacaatcagaacaagggatgccgccagcacggagaccagacaggggcttctacagtacccctgcggcacggaaagatcttacaaggagggactgaggcccagggacaatatttacacagcagaaagtggcacacgagatagcgaccacccagggaaccactaaatctggacgcaaactttattccagtgggtgttgaggacattcccccagaaggtgagtaactgagcacagcgacaaaaaccgaaacgggttgcacagacatggcagaacagaatcccccccatggaacaaagtggtaccgcacagcagcggtattgacacaaggtacgcgagcactacattggacaacaggggaaagctataaacgccgggtgttaccacacaagagcatcaacgtatccgtaatgtaacacccatttcacttaatacaacaccaacaaagagtggtgcaacatagggaccccccgcacagtatcccggagaggacacgacccaccacgaagacaacagacaaacaaagggagcgagaacacggacaacacgaaaggattaatgccaccatgggaacattatcgacaacaacaggaaaaacaagactcttgcgacacaagacacattaggtggagcgccacacagacggcccacacaaaaggaactgtgagggaaccagcacgcgcggaaaaccacagaggaggcagtccacaacatgtggcccaacccaagagaataccccacgggggacaaacaaccaagggaactcagccaattcatctttaaaacgacccaccacagcgcggaaagagtacacaacagacgggggcggaatccccgcagaaaggaatttccaaacatttcccacatacgcatttgggcatcagcgagggacaaaacatgggcaagaagccaaacaatgcgataacgaagagagttaagtggacaccacaaaacagaacaggagaacacacaattttagtcacgagacagcgagactaacaagagaatatccgaagatccaacgggagagacaaaatcgtggggagcacacaccccaggggatatgaagacccaaaagacagcgaggaaccacccccaccggagacagaacacccaactacaacacaagaggaagcacaacaaattacaacagggagtgagcgaccagcacaccagaaccacaaggacaaggagagcccacaacaaggcagccaaaaaatggcgcacgcaccgaagcaacgaagcaagggcaaag

SEQ ID NO: 635552 - DNA, 1057 bp, Homo sapiens
  misc_feature (151)..(151): n is a, c, g, or t
aggtgtcgcaggggcagtcttctggctgtttccgtcgcctgcgtggtccttgcagccccggtcttccattagcgtgcgcagacgttatgggcctaagcgctgggcgaggcgaggccttgcgccttccccgccaaagggcattctctggganctgtctttctggcgcgggagggcgatagacaagctgctgaagacggtgtcagcacgcacagagtctcctccgctttaatggcgctcccataagtgccgtcccccagtgggaaaacccgtggctactggtataatttggccatcttagtagcgagtaggagcaggcagggcttccttcccggggtcctaaggcggcggtgcagtccgtcgtagaagaattagagtagaagtcgtcggggtcggctctaaggacgcagccgcctcatgggggggtccaggggcctctggaagctgcctggaggtgctccggggcggcaggtcaagccccgaaagcgctggcaagggaagatcctggctgttggcatatcagcatttgggttaaaccaagcacttaaaggagtccggggatcgccagggaactcaatagaaattccgtcatctctcactgggtccatcgggtctgcaaactcctaaattcttccgcaattcagtccaataggcggggtaagactgggggaatgctccaataatggaagcaaacagaccttggggcaaacacacgtcgaacaacaggacttgcggtccaagaaccccaggaaacagaaaaaaacgttcttagaaaacctctttggcaaaggacaaaaggctataaaaggggggtctaaaagggccataacagttgcgccaacccccccttgttcccacattcttaaaaaaaaaaaaacccacaattttgtcgccctaaacacaaagacaataaaaaaaacctgcatacagagcaaactaataacattaagacgaacacacctcatcaccacaacttcatcaaaacatattacaatataaaggccacacaaatcatgacatgaaaaaaccccctccaaaattaaatataataaaaaacaac

SEQ ID NO: 635553 - DNA, 191 bp, Homo sapiens
ccgacatgcctgacagggaccgctacggagttccacctgagtttcctactggcttctgcccatgcccatggcacagttcaccatctttctgggtcctaacacgtgcgctcgtgctccacctccccggcgcggctgggctgagatgggcctggtggtgcgccctcgtgcggactgtctgggctagctcgggg

SEQ ID NO: 635554 - DNA, 1202 bp, Homo sapiens
gactagttctagatcgcgagcggccgccctttttatatttttttttatattttggaaacggagtctagtgctctgtggcccaggctggagtgcaggggcacaatcacagctcatgtgcaagctccgccctccggggttccagtgccgcatctatccgtgccataagccctcccaagttagcgtgggacacatacaggtgtgccacgcaaccagcagtatccgtttataatttatttggatatttatatagatacaacaatgtggggtcaaacaaccagaaagataacaaccacgagcgaaaatggatccatcgaaaaatcctccatgtgtaccacatcagcgaacacacacaacaaccaacaaaactacgcgacactcacaccaacacaacgcgccaagagcacacatcaaaaaagagcaaacaacacaaaaaaacaacaacaaccacacgaaacaaacaaaaacaactaccatactacaacacaaacaaaaaaaacaatagaacacacaaaaaaattatcaaccaaaatgaatacacaacaaatcactaacacaacacagcacacaacaatacaacaaagttacatcacacatataaaaaaaacgatagtagaaacaacaacacaattaccaagaacaaaaaaaaaaaaagaacaacacaacaaaagagaaagacaaaacaaaacagcaacaaaaaaacgagaacataaaaccagaaagaagaatcaataagagaaaagatacggagagcacaaaactagagacaacagcagaagaacaacaaactaataaaaacaaatcaaaaaacaactaatctaaacatcaacaacaaaaacttaatcaataaaaacaataaacaaaaacacacacactacaaataacaaacataaaacaaagaaccacgacaaaacaaaaaacaaaaaaaaaacaaacaaaataaaatacgaacaaaaaagcaacaagacacacaagacagccagaaacaacgacagaaaacagagaaggcgaagaagcacagagacgacaactaacaagagactcgacaacaaaagaagaaaaagcagagggacgaaacagaaagcaaaacgcgaccaaaacaatagaacaagcacaaaacaagaaaccacaacacaacacaagaaagcaacaaggcagaaaaacgacgaaacacacgagaagtacaaacaaaccgaacaaaacaa

SEQ ID NO: 635555 - DNA, 995 bp, Homo sapiens
ggacgcgtgggcggcgggtgcggtggctcacacctgtaatcccagcactttgggaggctgaggcgggtggatcacctgaggtcgagagttccagaccagcctgaccaacatgaagaaatcccgtctctactaaaaatacaaaattagccgggcgtgatggcgcatgcctgtaatcccagctacttggaggctgaggcaggagaattgcttgaacctgggaagcggaggttgtggtgagccgagatcatgccattgcactccagcctggacaacaagagtgaaactccatctcaaaaaaaaaaaaaaaaaagaaaagaaacgaaagaaaccccagctaggaatagaacaactcattggtcctcttggcctgtccagctggtgactgtaagccccagaaaatgctcaagggacttccccaggagagggacacccctcctaccttatacaccaggcggccaatgccatacatcctatccccccgggaggtaactataacacaacaaacccaccagtgcaacaacatgaacgggggggccacatccgagaacgagacgccggaaacctaaacacattcaaagacccacacgaaaccatatgatggggagaactgggcctagggaatagacaaccaactttcggacggagcaacaggggaaaattgggggacactccagaaggaaccccaccggatggaagccgacgaacagagcccaactccagggatggaacgtcggcacgtaagcaaccccagtggagaaaggccaccggcacgggcatataaagagaaagacaggaacacgaaacgccagaaaggacacacgggacgggagcacaagacagcgccacccaccccacaatcaatcaggaaaggaacagcgcacatgcccagtacaaccaacaacttagtaggcgccccgcatagataagtacacgaccatgagccgaggccaaggatcacaggtcaccacgcgctcacagacgacagcgaatagaca

SEQ ID NO: 635556 - DNA, 334 bp, Homo sapiens
  misc_feature (187)..(187): n is a, c, g, or t
tattttttgaaatagggtctcgctgggtttcccaggctggagtgcagtgagttgagcactgctcactgcagcctggacctcctcctgggctcaagcctctgcctccagagtagctgggacaacagacacaggccaccagcgcactaattaaaaaaatttttaaaaaaatttttgtattgattggggncccactctgttgcccaggctggtcttggactcctgggctcaagtgatcctccctcccaaagtgctggtattaaaccttaagataaagaatactgtatttgttttctgagattgcgccactgcactccagcctgggcgacagagggag

SEQ ID NO: 635557 - DNA, 101 bp, Homo sapiens
  misc_feature (98)..(98): n is a, c, g, or t
ggggtgatctagaggatcctctggtgatgatgtgggtgggtctctatgcctctcagtcttttttctggttgtcttgctattttttaataaaactaaanctt

SEQ ID NO: 635558 - DNA, 151 bp, Homo sapiens
agaaaacggccgccggatgagagctgggaaagtgagcacatttgggagctggagaacaggggttatcctaccctgtgactctgtacagctacataggtaccttactatactctagcatccatcatgacactggcagtctctgcatgtacac

SEQ ID NO: 635559 - DNA, 134 bp, Homo sapiens
gggctcactcacccaccacattaacaacataaaaccctcattcacacggggaaaacaccctcatgttcatacaacctattccccattcttcttctattcctcaaccccgacaatattacccgggttttctcttt

SEQ ID NO: 635560 - DNA, 363 bp, Homo sapiens
tatggtgcatatatcaacgattcagggttgggtttctaaccggactctcagattcatatatcctcacggactggccgtcgtttcaaatggacactgaggatgcagtgcgcaacacatggaggagctggggacaccgtgacagtggacaccatgatgaagcctgggcccacaacttatccaactacacgctcccggccttttatatggggaacttctccattcccagtgggatcccagacttgccccaggacacctttatccagtttcctggatggaccaagggccaggtctgcactaatggctttaaccttggtcgctattggccagcccggggccctcagttgagcttgtgtgtgccccagc

SEQ ID NO: 635561 - DNA, 468 bp, Homo sapiens
agcgatttactgtacgcatgataaccttgtccctttgtcgtcattggtccggctattctagcgcctgacccgccgaaaaggttgatcctgctcatgagccaagcccccctcgtcctggtggacggttcttcttacctgtaccgcgcctttcacgcgctgccgccgctcaccacttccaaaggcctgcctaccggcgcggtcaagggcgtgctgaacatgctcaaaagcctgcgcaaacagtacccgaacagtccgttcgcggtggtgttcgacgccaagggcgggacatttcgcgatgagctgtacgccgaatacaaggccaaccgcgcgagcatgcccgatgacatgcgcgtgcagatcgagccgctgcaccagagcgtgatcgccctgggcttcccgctgctgtgcgtcgaaggcgtggaagcggacgacgtgatcggcaccctggcccgcagcagcgcggccgct

SEQ ID NO: 635562 - DNA, 246 bp, Homo sapiens
atgttggctgaatccggatactggtatctccgagaatgggcagacccgatagcatgcccctctcgtggcttacacactgggtgtgaaacaagtaatatgtccgtgattacaaaatggattcctagctgagccggcctagagccagcaagagatatgaggaagtagttaaaggaagtctagcgcttacattaagaaaattggctacaaccccggtaagtgcaagggtatgggcccggtacatgcaag

SEQ ID NO: 635563 - DNA, 143 bp, Homo sapiens
acactctgtctggagagacaaaaagatgaaaaacacactacagatctggcagcagacactctgggcttgggctacttttctccttgtgttttcccagttgcgtcgtgtgtctttgtgtggatttcctttatgtatcctgcttg

SEQ ID NO: 635564 - DNA, 828 bp, Homo sapiens
ttcggaacccttgtgcgagcctgtgcggtactggcgttgttagacaccataggcgtgcttccgcagaagccggccacgactatggacgagcgccccaaatctctgtagctatcttgttagagtgtcgatgtagctctacgacaatgtcgcgggtttctcctgctgcctgcgaaagtgggtgtgttaggccgtaaacaaactaagggtgttaacaacggctttattgtgaaacggggcaacccccctgggggatctgcgttcaccatttgtagagggtgtatccccccccccccccccggcggcgaggcgcaacactcccccccggcatttggggaaacaaataaggaccaccccaaggtgaaacaccggtgtggtacccacaagagagggccccccaggggcaaccaacaatgtgctgggtacacacagagggattctgcgacaccaatttgtttggtcttaaaatataaaacaccgcggttgggatattttttcgcccaagttatagaaaaaagaaaagaaataatttctcgtgcgcaaaactgtaaaatgcttgggtggtgcccccctctaccccccaatggtactaatagaaatcagggcgttattacttggtggtgagttgcgtgaggcacacacagcttttggggcagaagaaaccgatatctaaacacacttggtataaaggtgagaagcacactttttgaaagatgggggaagacgccaaaaattaagaggcccccccaaccagtgctttcaaaaaaaaaagggaaaaaaaacttttcccgggggttcaaccccttaaaaaaaaaagaaaagggaaaaaaa

SEQ ID NO: 635565 - DNA, 431 bp, Homo sapiens
  misc_feature (8)..(8): n is a, c, g, or t
  misc_feature (28)..(28): n is a, c, g, or t
  misc_feature (34)..(34): n is a, c, g, or t
  misc_feature (74)..(74): n is a, c, g, or t
agttcganaacccacccctggccccaancatgantcctaacaaataaacattttaataaaagatgaatcccttncaaatacatattcctacagccccagttaaaaatgtgaaaaggcccatgaatcctacagacagcccatttataaaggtggatcagggcccggacacggtggcctcaacgtctgtaatcccggcactgtgggaggcccaaagcgggaggatcgcttgagcccaggagttcgagaccaacctggccaacatggtgagaccccatctttacaaaaaaatatatatatccaggcatagtggtgtgcacctgtggtcctgtggtcccagctactcaggaagctgaggcagttgaggctgcagtgagccacgttctggccactacactccagcctgggcatcaaagtgacaagaccaaaaaaaa

SEQ ID NO: 635566 - DNA, 486 bp, Homo sapiens
aaattcatcaatcaagtcagggtggcatttatgtggagcgtcggtctaggatctccattctggtcccatggttctaccatccaccaggtcaatgctacccggtcacaaggactgagattttttccttacggtattctcacgtagagcccagtaaaataatgacggggctgggagtcccatttctgcagggaatatagggggtgggaatcctgacaccagataaatcaggtatgcgggaaaaagatttcctatgtaaggcaaaagcttgatgggaggtgggcggcatcctttccgcatggtccatggcggtccagagggtggcggcgggggtgctataaatgctcccagcagctctcaggttttcttcccttcaagctagcctccccttaatttcccactccagccaaaaaaggatggccgggtatacgtctcggaggagggataccactcgtggagagggtatcattaagcttgagctttcagcaa

SEQ ID NO: 635567 - DNA, 803 bp, Homo sapiens
  misc_feature (659)..(659): n is a, c, g, or t
  misc_feature (679)..(679): n is a, c, g, or t
  misc_feature (693)..(693): n is a, c, g, or t
  misc_feature (701)..(701): n is a, c, g, or t
  misc_feature (721)..(721): n is a, c, g, or t
cccggggactttggcaaggctgctgcctacgtgaaatgatggaaaggtctaggctggccccaggtcctttctggcatggcctcaggatcttggcaggaggataacaatgccaggagggggtgggctgagtcatgtgcctcctctcaggggcctggctgcagtggtcaggggcagggtggctcatttagcgggcaccggtgccctgcacctggaggaggaccagcaacaggactagccaggtggccgcaggcccttaggacacaggggaggcccaggatttatgggaaggaaggagcagagcacctgagtctggggacatctcgggacaggcactgcccccagcagcctcagcttccccccataaaagggacagacgctgccccatgcctttagctccatcactgtccaggacagggactaaaccctagacccctcatccccaaggagtcttggactgcaggtccagctctgcagaggggctgcagggagcatccagggccatactcgtctgctcatctctcagtctctgtgtttatggaacaccaggggatgccagtgctgtgccaggaggggcggtcggtgctgagtgaggcctgcttcccaaatcaggcacattcttatgagactaagattgtccctgctcatggacattaaaaaantgtcaagacagcaggattangcggaatcacagtntcctgccnccagtcctaacagaataganaggaaaactagaaaatatcccagcgaaaaaaaaggcataccctttgaaattgtgcaagacaggtagtggtaagcctgaatca

SEQ ID NO: 635568 - DNA, 104 bp, Homo sapiens
gacctagaggatccccatgctgcgggggagatacatgatcacgaaggtggttttcccagtgcgaggcttatccattgcactccgaatgccaccccggatggggt

SEQ ID NO: 635569 - DNA, 847 bp, Homo sapiens
gcctggtgtgattccgtcctgcgcggttgttcctctggaagctagcgatgtctttatatctccgatccgtcggcttctctcgctacgctaatgtgcgtgccggcacccgatggaagattcgatggacatggacatgagccccctgaggtcgcccagaactatcttttgggtggtgaactaaaggtccgaacaaagattatcactttaaggtcggataatgatgaaaatgtagcactcagttatgcttgtagggaacggtacagatgtataggggctggtggaagaggatgagttcgcacgtcgttgaacgcagaggtaatagaattacgatagggcagctccaccttaaaagtaatcatctgggcatacctttctgacaaactgtctgtatcagctcaatcggtttatccctttgcgagggactttcgacaagtcataacatcccatcagctggatctttgagagtgtgagaccgtgtggcttcggggaccaggtgtcaatatttagttgggacgagcactttagctaaggcatcgtggggacgtgcaacggaatagtcacgaatgctgcccagaacggcgtcgcaacgacgggtagcgcagggcactgctgaaacacactctcttaaaggtactaaaacggggaaaaagccggtccactggtccctcgggaagagtggggacgccagggtttccccccgcgccagagagaaaagcccaagcacattgcgcgggtgggtcttaacacaccgtcgtcagacgagaacgactcccccttccgcccacagggctccacgttgtcaaccacatcagagcgccgccatctcccctgctccccgacgtccggc

SEQ ID NO: 635570 - DNA, 1109 bp, Homo sapiens
tcgtttcgcttctgtgaggtagttcaacaaaagaggagggaaaagagaaagacagtcaagtgttagttagtgagttgtcagaaagattgtgaccctcctcgagtcataagtgggttttcggcgcgacttttctgctatcagatgagaggttacttatgcccccccacaattctgatacgcgggataagttttgtgacctccccattcggcccgcgagatattctcgcgccgtgtatcacacgagacaacaaggggtagatggttatatgtctgtagatattcacgcgcggttgtatattcccccttcttcgtcttccttggcgcaaaaatagcgggtttataatgaaaggtttacacgccgcgcaatatggcaaaaaattttccccgtacgtttgttttcggtgttgggaaaatagaccccaagggcacttagcaaatttgaaagttgtataataaagctttcaggtgttacagaaatcgtagaccaagcacagggcacatgataacgtccaatagtgacccacctgaatagttactgctgcactttcactaagatgtaattgaacaccttggtgaatagggggtttatgttgtgttttttttcattatcgttttttttaattttgtggaagcacttgctatttagaactgcccaagtatatgttcacgcacgtgtgcccacggattgaaaggtgtaaatgggaccaaataaattgtgaaaggaagtgtagttgactgagaaactaccacgttgtaataagtcttccacctcttttataggatttttgaggcacaccattatcgccaataattttaatagtttattaaagtttacagtgggaattgtgaataagttttcacgtgggactattcttatcccttgaccaaaatattttgtcttttttctatgtaatttcagagtttttattttgttaccaaaagaccaaaatggaatatataaccacacatgaagttatttaacccagagttttctaaagcgtgaaattctttgtgtaaaataaggtattatcttgcaacttgttaaaaatatttattcagacattggatgttgtatttttaagtattttttaaaatattaataaaattta

SEQ ID NO: 635571 - DNA, 414 bp, Homo sapiens
  misc_feature (50)..(50): n is a, c, g, or t
  misc_feature (60)..(61): n is a, c, g, or t
  misc_feature (102)..(104): n is a, c, g, or t
  misc_feature (107)..(107): n is a, c, g, or t
  misc_feature (110)..(110): n is a, c, g, or t
  misc_feature (115)..(115): n is a, c, g, or t
  misc_feature (157)..(159): n is a, c, g, or t
  misc_feature (171)..(171): n is a, c, g, or t
  misc_feature (197)..(198): n is a, c, g, or t
  misc_feature (271)..(272): n is a, c, g, or t
  misc_feature (275)..(275): n is a, c, g, or t
  misc_feature (282)..(282): n is a, c, g, or t
  misc_feature (308)..(308): n is a, c, g, or t
  misc_feature (317)..(317): n is a, c, g, or t
  misc_feature (326)..(326): n is a, c, g, or t
  misc_feature (357)..(357): n is a, c, g, or t
  misc_feature (364)..(364): n is a, c, g, or t
  misc_feature (371)..(371): n is a, c, g, or t
  misc_feature (379)..(379): n is a, c, g, or t
  misc_feature (390)..(390): n is a, c, g, or t
gtcagatggcacaacagaagtcaccttgtaagtaaggcaaagaccttganggcattagcnnttctcattactaggtcaataacctgagggaatcaatggctnnntgncgntctanctcttgtgtatctctttgacttttctttctctgtctagtttnnntctgttctcagnttatattctatgctatcagtctctcnntccacagtccacaacatccatcctttctactgtgcaattctgtctctccctcttattatctttatttgtactnnttncttcctncctgtctaggcattgggcatgtgcancctcttagnctgtgaatnttgacacttaggactaatgataaattatttncagattnaatcagnccctggtnactaacccagntccaataagaagtatgttggtggg

SEQ ID NO: 635572 - DNA, 113 bp, Homo sapiens
  misc_feature (1)..(1): n is a, c, g, or t
ngtgtatcacaatgcgggcatgctccctgtaaagtatcgtcgacacgtgagcaccgtgcttgactcccaatatcgttaagctggagccctggtcgaactctatgaggaatcct

SEQ ID NO: 635573 - DNA, 149 bp, Homo sapiens
tctgtactacctaccctcgcttctcacagaaaggctgagaggctggcagaccccttgtatataccctgctcctttcgttttctttgagacagggtcttttaatgtcacccaggctggtctcaaactcctgacctcaggtgatccaccca

SEQ ID NO: 635574 - DNA, 481 bp, Homo sapiens
  misc_feature (5)..(5): n is a, c, g, or t
  misc_feature (118)..(118): n is a, c, g, or t
  misc_feature (131)..(131): n is a, c, g, or t
  misc_feature (133)..(133): n is a, c, g, or t
  misc_feature (223)..(223): n is a, c, g, or t
  misc_feature (245)..(245): n is a, c, g, or t
  misc_feature (260)..(260): n is a, c, g, or t
  misc_feature (268)..(268): n is a, c, g, or t
  misc_feature (270)..(271): n is a, c, g, or t
  misc_feature (273)..(273): n is a, c, g, or t
  misc_feature (275)..(275): n is a, c, g, or t
  misc_feature (282)..(282): n is a, c, g, or t
  misc_feature (309)..(309): n is a, c, g, or t
  misc_feature (321)..(321): n is a, c, g, or t
  misc_feature (323)..(323): n is a, c, g, or t
  misc_feature (325)..(325): n is a, c, g, or t
  misc_feature (418)..(418): n is a, c, g, or t
cactnaaaaaacttcttagagattcattgcacttctgagatttaatgtttacaacttggagttgtcgaccttcttaaaaaaaacattttggaagacaaaatgaaagttttctgtgaanttttagaagagtnanacaagaaggtacttcttggagccacacttgaaaatgacagccatgattacatcttttatctcaacccagcagtttcagatcaagattgtnctacagccacctccttagaatnggacaaacacctgtngtaaccanannangnatcaacncaactcagtaggtgtggctcccattanacatataacacntntntaatatttaaaaaccaactctcaaatgaacggttccaaaaaagtaatgctccaacagttaacagtgatcaaagtgatgacaacccggatattntcagtcaaaaccgagttccatacaaaggagcagaacagagatgtaataaaaattctcatagaa

SEQ ID NO: 635575 - DNA, 689 bp, Homo sapiens
  misc_feature (273)..(273): n is a, c, g, or t
  misc_feature (304)..(304): n is a, c, g, or t
  misc_feature (463)..(463): n is a, c, g, or t
ggctgtacggtccgagtttttggatcgacgcaggcagatcatgaggtcaagagacagagtccatcctggccacatggtaaaaccccgtttctgctaaaaatacaaaaattagccgggtgtggtggcaggcgtctgtggtcccagctactcgggaggctgaggcaggagaatctcttcaatcggggaggcggaggttgcggtgaggtgagatcacgccactgtacttcagcgtgggcaacagagtgagactctgtctcaaaagaagtaaaatanagatggaggtcatgctatgttgcccaggctngtcttgaactcctggcctcaagtgatcctcccgcttcagccttccaaactcttggattacaggcatgagccgctgcgcccagccagaaaataaacctttttattgcgaagcacccagtccatggttctttaatatggcaggctgagcagactgatgcanagggaacgtccttttacatcacggattgtgtccattgttggacacaatttccactcctccttatcgccttgcacatgcctgctttactcatcaacattgcctcaattctcttgacggtgtgtgagttatacctactaaaaaggctacttgtggacaaggtaagaactaattccatcttccaccaagctgaatgccaaactgttatcatcagggtgccttcccatca

SEQ ID NO: 635576 - DNA, 137 bp, Homo sapiens
tacatccatgtcaccgcagaagacatgatctcattccctatataataggctagcatagatatatccataggtagtatattatagacacattctaactttattcacgtactatcattgatagggcatttgggcataga

SEQ ID NO: 635577 - DNA, 274 bp, Homo sapiens
  misc_feature (69)..(69): n is a, c, g, or t
  misc_feature (103)..(103): n is a, c, g, or t
  misc_feature (222)..(222): n is a, c, g, or t
ataacagctcattctgaaaacaaacccctttctggcctggggaccagactgcctttttagggctagcanattagccacaagattagaaattacagtttaggantaatgcagctagaggccacaagattctaaacctccccaattgttcctaatggataatatcactattgtaaaacccaagattggtgctttaagatgtttttcagaccccgcactcatggntcagctggcatcactcagatggataaacttggctcatcctagtcctgtaggc

SEQ ID NO: 635578 - DNA, 263 bp, Homo sapiens
  misc_feature (142)..(142): n is a, c, g, or t
aactatttaaaaccaaagggtgtaatgtaaaggaattgttccattttgtagattggtatcattcagcttctttttttaaaaaaaactttagtggattgtgaaaataactgctttaaggacaaaattcttaattttaaatgcnacagaatttaagagcttgtttgaattaatgcaggacccagaactcattactgaacagtcactgagtatatatgatccaaacggcaaagggggtttattcttgaaaaagcaatcagcctagt

SEQ ID NO: 635579 - DNA, 392 bp, Homo sapiens
tacactcgaaaacaatacaattacatggcaattgaataacccactcctgaatgacttgtggataaataatgaaattacagcagacataaaagttttttgaaactaatgagatcaaatatacaacatactggaatctctaagacacagctaaagcagtgttaagaggaattatattttttgatctgggcatttagtgctacaaatgtttagcactaataaatttagtgctataaatgcccaggtcaaaaagttgcaaatatctcaatgtaacaacctaacatcacaactaaaagaacctggagaatcaagagcaaaccagttccaaagttagcagaagacaagaaataaccaaaaatgaaaactgatctataggagtggtgggggatcctcta

SEQ ID NO: 635580 - DNA, 104 bp, Homo sapiens
aatcgagtcggtcccctatgatcgcgcgcgtcaggccagtgactgaccatttctatttttagaacaagttcggtgcattttatctggataattcggatcagaaa

SEQ ID NO: 635581 - DNA, 480 bp, Homo sapiens
ccccccctgatcaagaggttgggccggaaaacgcccccgacgttgttccggggcagctccctgcagcagggggtcccgcatgggtatgctttttttcaagaagaacccggagctgttagtcaggaagaagtcatccgtgcttatgccccccccaaaaagaaatccaggaagaaataaaacatgaattttcctgactgattttaggaaaaaaattcagtttgttgcccccagtgttaacacatttttgtcagagaagacgggggtcagcagccaaaacaccaggaaacacttttttgtggccttagccaagcagtttgttagttacatattccctcgcaaacctggagggcagcccccaggggaagctatttttgcccccccaattggtttgcagggcttaccctaacttttgtttatgtcgttatgaagcattcaactgggctttgtgaggggtgaaattaaaaacattatgtttcccca

SEQ ID NO: 635582 - DNA, 237 bp, Homo sapiens
gctctagtggatccccttgggggtctcatactcgaatgggatacggggactcagcatctgggtggcctggctcctcaagggctattgctgtggaccagattacttctgcttggtcttctgctgtggctggttgctggttgtgactatatgactgggcagggctcagtgcaccttgttgttggcatggatctgtgaaccttgtggctggcagtgctacaggcactattggggtaggca

SEQ ID NO: 635583 - DNA, 131 bp, Homo sapiens
tcgactctagagatcccctgctattcatcggcaccacaggtgtagttgagccctagcaactccatcctcagcacccacaccaccctggagcactctgatagtgccttcagtggtagacagatgaggccgat

SEQ ID NO: 635584 - DNA, 106 bp, Homo sapiens
aaatggcacgaacagtgagttagccggctgcccccaggagctcatattacatggaacgattgattggtatgatgtacaggcatgtaaattaaagatagattgtgat

SEQ ID NO: 635585 - DNA, 181 bp, Homo sapiens
tcaccagcacaggctactatcacctacagtgccccctccaacacatacattgtagactgtggcagccctgtctctcagagggcgctgataacacatcatgaacgcccctaaaagattgggcccagagcaccgtgcatgaagcagaggaggaggaggaaggctctgtcccatagtactgagc

SEQ ID NO: 635586 - DNA, 1373 bp, Homo sapiens
ggcctacccgccgcactactgatcattctattgccccctctattggatccccacgctccagattatcgtcatctaatcttaccgactaatcaccagcccatacaatgactaactcaagactagacctcataaaagcgaaatcaatatccatacacaacactaagaggacgaacctgatctcttatactagtatccttagtcatttctatggtcgcacaccaaactaattcgctccttcgcgaacatcctcgtccctcaacttcatttctaacaccgcaagcttcaaccgcgaacgtactgctcaatacaagcccttagcgccccataggtccgaatccccctcgttagttgacgccgcggtgacgacccgttgcaccttcatatgccgtcggtttgtcctgcctccataagcagtatacagacgatgcccctagcgcccatgttccttagccgacgaagggccacaatccttaccaggccccactttagtccccgcagtaacgtaggcttctttaatgcggataaccacatcggatgccctatcgtcagtttcgacacccaaacctagccgcctttggcgcggctagcggccttatactctgctagagcactataacctgccaggccaaacctgtacatccattgacaatgcgtggatcttgagaaacagtctgccaagccccttagcaagagtcatcacaccgagttcacaactcgtttcgcacatcattacagcttaacttcagtctctcgaacgagattacttaaacttcgttacctgggacgtaatcgcgttagcaaaaatcggggtgctccggcccatttaaatcccgaaagccctcaagcttagtgaacaccaaccttccttaagtaaaggccgcgtccatactcatggcactgaatcaaaacgaacacaattaggagatgaaacacaaatctcttgaagccaaaaaccttcccaaaccaggcgtcttggtggttggggcccccgcgggagggcccttggcgcgcaatgaaagaacgtagtggttattacaatacactcactgcaaagatgtggggtccgccctcggtcgctacccccgacgtaaatcgttacaggagaggccaccatatctggtactgcccccaaggcagaacggttcccctgaagggggaccccctttgtccagctgattaccagtaggcgggcgtttgatgtccctaaggccataattacactacccacgccccggtgtagaacaccaagtgcgtttaagagaaatacccataaccacaaggtcatgtgtgtaccctaaggggtgacaatcataggagacttttattgaaccggaggcacacacacgcacgcacaagccatgtatcaaattgcg

SEQ ID NO: 635587 - DNA, 373 bp, Homo sapiens
ttgggcaactcaggtccctccgctcgcaagatgcgcagaaccaaaggacacgcagcagaattgtctcccaatgccaattaggcacgcatggaatgttctccaatcctcatctccttgacttaaaaagctcggttttttttttaaaagcagaacttcgcagttcctttagcggcggaatgtggcttagtgaatccccagcagaaggacacagaatgcagtgcttcataacccgtttttgacagaacatctattaatatctcccagaagaatattccttggatcacagtttggaaaatctggggagagtttatagcatatgcccaacaccatcattctctcttgtacaaggttagctaatattaaaccatttatt

SEQ ID NO: 635588 - DNA, 174 bp, Homo sapiens
cccctacttggatgcatatcaatgtggcatactgaagacatagttatgaagccagctaatttggccactgcgtacacttcctcaggtgaagcactagatgtttccatataagaggtagtaatatatagtataatggaagaggacagcatcctgaggtaccactcccactgccct

SEQ ID NO: 635589 - DNA, 620 bp, Homo sapiens
gcccgacactgaaatgtgttggagatgattatactgctgcctcaaggatgaagaacaatgaagtaaactcagcaatgctgggtaggtttgtaccgatatctgctaccaagacgagcaaaaagctcagggtgtgcagtccttttaaatagtttttcatctaacgcaagagaaatacacttcggcaaagttcaattttgaaccgcctcctgtggcttttacataaaaaagctttatgcatttatgtcgtaggactcaggcagttcatattagttgctgttttaggcactgctgtaagtactaaactacaacagactcaagaaatccagtttttcaaatatgattattaaatggctctcaaaataacgttatggaagttacactgtcagaaggatggtgacttgacatgtgatgcactaaacatgcaggttttaaattctgccttgtcctaaacatcatataatcaaccaaagtgtagatttgataatggacctcaacaaggctcacatttgagaaatgaaataacagagatgaatagacttataggttcatcatatcaaagaggtaatcatttgtgactttccaatattttaaggatacaagatcggataaacttacttcat

SEQ ID NO: 635590 - DNA, 475 bp, Homo sapiens
  misc_feature (63)..(63): n is a, c, g, or t
  misc_feature (113)..(113): n is a, c, g, or t
  misc_feature (120)..(120): n is a, c, g, or t
  misc_feature (132)..(132): n is a, c, g, or t
  misc_feature (146)..(146): n is a, c, g, or t
  misc_feature (165)..(165): n is a, c, g, or t
  misc_feature (187)..(187): n is a, c, g, or t
  misc_feature (210)..(210): n is a, c, g, or t
  misc_feature (219)..(219): n is a, c, g, or t
  misc_feature (288)..(288): n is a, c, g, or t
  misc_feature (445)..(445): n is a, c, g, or t
  misc_feature (466)..(466): n is a, c, g, or t
catttgtaagccacctcaacactagcccttacaaggttccatgaaaggaggaaaacattaaanctttcctgcctttgcctgatataatcccacatagtaataatttaagctanaatttanttttaaaatgantgcctcttgggaancttcttttctgttcctaanagttccctgttaaaatgaaaancttaggccagtgcagtggctcanacctgtaancccagcactttgggaggctgaggtgggtggatcacttgaggtcaggagttcgagaccagcctggccaanatggtgaaaccctgtctctactaaaaatacagaaaaattagccagggttggtgcatgtgcctgtaatcccagctactcaggaggccaaagcaggagaattgcttgaacccgggaggtggaggttgcagtgaaccaagatcgcaccactgcattccancctaagcaatagagcgagacnccctctcaa

SEQ ID NO: 635591 - DNA, 1166 bp, Homo sapiens
gacttccgggcaggcttcctgcgctggtgagtgcagtgtgggcatcccagcacgtgacgttctgccacgggagaatgccgagcccctcccgcaattacagccccgaccctgaattaacatccaccaaataataatacaaacaagaccatcttagccaccaaacaacaaaagaaaataagaaacacaaaaaaaaccatgaaaaacaaaaccaacaccaataatagacactatgacacctaccacaaagacacactactatcctaccaaacacacacaaaaacaaaaacacgacacgcccccaaaaccagtaaacaaaacaagatatacatcattatatcccaccatatcaacaagcacacacctaacaaacatcctaacattacaccccctcaccaccaacaccacaaatgataataatagtacaagaacaaaaacaataccacataaaactacactaacactaacaataccaaaaccccacctcgaacatctacgtatccacacacacactacaccccaaactcacagccaccacaaacaaccaccgacactcataacacaaatactcagaccactcaaatacaagaccaaacaacatgattacataaatacatagagaataaccacacttcaactaacaaccccaaagcaatcatgcataattctctacaactcgaatagaatcgaccatcatacacagcctatacagcacaaagtacagtatatcaactagcatcttctcagcacacaatcattacatccatcgatcagccaacggagactgagacccgaggtaagatgagaacagatacgtaggacaggaaagagaggagacagggcgggaggagcagagaggaagacagaggaacgaagcgggaaaacgcgcgaagcacagcacacgaacacacagagctaaaggcgacacaaaaaagaggacgagagaaaggagaagcgagacgacgcaaccagggcgccaacacacgaacagagagagcgacgcgacgaggagacaacaagcagaaagagacagagcgggggaggcaatcaaatggacagagaagacagggaactcggatcgaaagcgacgcagtatgcagacagagcggagcagggacgagcgactacggagcaggagcagacgcgcggctcgcttgagagatgagaga

SEQ ID NO: 635592 - DNA, 469 bp, Homo sapiens
  misc_feature (16)..(16): n is a, c, g, or t
  misc_feature (79)..(79): n is a, c, g, or t
  misc_feature (117)..(117): n is a, c, g, or t
  misc_feature (252)..(252): n is a, c, g, or t
  misc_feature (267)..(267): n is a, c, g, or t
  misc_feature (270)..(271): n is a, c, g, or t
  misc_feature (275)..(275): n is a, c, g, or t
ggggagggggggggcngggggggggggggggcggcgctccccctccccccccccccgcgtggcgggccgggcgggcganattttttgttgggggcccccaccaataataaatatatnctttttaaaccacccgcggggggggggtggggtgttaaaaaaaaaaaaagggggggggggggggtccccccgccccccccccccgtccgtgggggggggcccccccccccccgcgggggggggtggtcctgtttnccccccccccccccnccnngcgnggggggaggggggggggggggttttccccccgggggggggggggggggtgttttttccccccccccccacaaaaaaaaaaggagggggggtggggggggggcgcccccccctggggggggggggggggagaagaagcggcccccccccccccccgccgcgcgagagagagagggagattgttctttttttttat

SEQ ID NO: 635593 - DNA, 295 bp, Homo sapiens
gttgtcaggtatagacagaaaaaaataatcaaatgtatagtaggtagggattgttaaacctaaaaatcattaaacgaaaaccacgcaactagattcaaaagacgagacaaaaaaaaccgaaatgacgtaattaggattcaaacagaactacgggtattacaatcctactactctgttttcctacctaatacgcacgaaatgcggactttacgactgccccttactgtcctgtagacccaggtgcatctcaaagtattagcacaggtctactaggtatggacatataaatgaactt

SEQ ID NO: 635594 - DNA, 374 bp, Homo sapiens
  misc_feature (32)..(32): n is a, c, g, or t
  misc_feature (66)..(66): n is a, c, g, or t
  misc_feature (117)..(117): n is a, c, g, or t
ttccccccagggccttaactgtaggcccaggnaaaataatgcctaaagcacccaagtgtgtgcccntccttcattaaagcctcacaacacacctgtgtggtacatccttatcatcanccccattttacatttgggatgatcccccatttgcatttgggaaccaaggcttaaagagtgtaagtgacttactggacacagagctagtggaaccaggaaataaactcaggtctgagcttctcccagcattcccaccccacctgacaccatgttggcaatgtcttaagtcctggcccagttgagagctggtattcctaaattctctggggtgtctgtgggaatttactcccctgccctttttctctgggtagctggag

SEQ ID NO: 635595 - DNA, 1150 bp, Homo sapiens
tttctgagagacgtcgttgcgttgacgtccttgagtgctgattttggcgctattttatttaacagctttgtgtagagagttgaggcttgcgtgtgcggagttatgtgtcactttcgtgatctcacgtattatagcctggcgcgttcagagtgttgtaaaggtggggtgttgtagcattgttactcatgagcgccaatttgttggtgtctatttgtagcccgggcaagggtcatgagttacacttcgactgttcaagccgtaacaccagggcaagggttgagtaatgggtaagggtcttatgatacgttatgttcgtgaacttcgtcctatcttaccccgcctgttaaccttaatcatcacctctagcatcaccagtattagagtcaccgcctgcccagtgacacatgtttaacggtccgcggtaccctaaccgtgcaaaggtagcataatcacttgttccttaagtagggacctgtatgaatggctccacgagggttcagctgtctcttactctcttaaccagtgaaattgacctgtccgtgaagtaggcgggcatgacacagcaatgacgagaagaccctatggagctttaatttattaatgcaaacgagtacctatacagaagcctcatcaggctccgtaaatctacctataaccatgcaattaataaatgttcggttggggcgacctcggagcagaacccaacctccgagcagtacatgctaagacttcaccagtcaaagcgaactacgtatactcaattgatccaataacttgaccatacggaacaagttaccctagggataacagcgcaatcctattgctagagtccatatcaacaataagggtgttacgaacctgcgatgtctggattcaggatcatcgcgcgactggtcgcatgccgcgtatctaaagtgttcgtttgttcaacgagttaaagtcctacgtgactctgagttcacgatccggagtaatccaggtcggtttctatctacttcaaattcctccctgtacgaataggacgaagagaaagtaaggcctacttcacaaagcgccttcccccgtaaatgatatcatctcaacttagctactatacccacacgcacccagacggctgtgcggggggggggggggtggggtggggggtggg

SEQ ID NO: 635596 - DNA, 686 bp, Homo sapiens
cccacgcgatcgcaattttataatctgtaaaatggggacaaatatcagtgcttatgttaccagaaaaagttcacgatccagatcccaagagagggttcttggatctcacaaaagaaagaattcggtgcaagtccaaggagtaaagtaaaagcaagtttattcagaaagtaaaggaataaagaatggctactccataggcagagtagcagtttgggctgctggactaaggatacttatagttatttcttgattatatgctaaacaaggtgtggattacttatgagttttccaggaaaggggtgggcaattcctggaactgagggtttctcctctctttagccatatagggtaacttctggatattgccatggcattcgtaaactgtcatggtgctggtgggcatgtctttagcatgctaatgcattatatttagcatataatgagctgtgaggatgaccagacgtcacttttgccaccatcttggttttcatggatatgggcaaggcttctttaccgcagactgttttatcagcaaaatttttttgacctgtatcttgtgctcacctcccatctcatcctgtgactaagaatgcctcacttcctggcaatgcagccaataggtctcagccttattttacccagcactatccaagatggagttgctctggtttggacgccctggaatg

SEQ ID NO: 635597 - DNA, 491 bp, Homo sapiens
gcattcgacaatcgtgtcgacgccgagcgccttgatggcctgcacacattccacccagcgcaccgggccgaatgcctggcggtacagcgcatcgcggatgcggtcggcatcggtttccaccgccacatcgatgttgttgaccaccgggatctgcgcctgggaaaacaccgtattggcgagcttttctttcagacgctcggcagccggcttcatgaggctggaatggaacggtgccgacaccggcaatggcaaggcgcgcttcgcaccgttggccttgagcacctcacaggccttgtcgaccgccgccttgctccccgcgatcacggtctgcgcggggtcgttgaagttcaccgcttccaccacctccaaagtgccggcgccaaatgtggcttgggcctctgcgcagccagcaatcacgcgctgggcgtccatgccgaggatggcggccatggcgccggtaccgaccggaacggcttcctgcatggcggccg

SEQ ID NO: 635598 - DNA, 120 bp, Homo sapiens
cactgcttcaactcgtagccattatgggcatcacaatgatcggtattcgtcgaggtcaacgtcgaaaagattctgctggcggcggaaaaggttttcagccgagaagggctatggcagcac

SEQ ID NO: 635599 - DNA, 543 bp, Homo sapiens
agtcggagcagaacggtgtacaacgagctctgagttctccgtacgcactttgagtagttgaatggggctcagggcaagagttttgctgccctccccagcgtggtcacagggttactggacggccgtgcacttgtttctcatgcaactccagcattttccccagaagttgaactatggatagcagcttggtatggatttcctaaatcttaacatttgaagcagcttcttgaggctggcaactatcctggtttctgtcttggagggggtggtttgtttgctggggcccaacgtctgtcccaagtggtggggtgagagtaagttaactttggtgccaggtgagaggtgggggctctttgcttagactccctatcatggaaagatgggagttttctatgcagggcactggggaaaaggatggctgattctgactgaccctgatcagagagattaggatggtattttgacataggatttggaacccatctaaatgttgaagttccctgagacagctctccagctgctgagcctgcgccaggggctacg

SEQ ID NO: 635600 - DNA, 108 bp, Homo sapiens
catagaggactcgaggaggggagatatggagagggagaggaatatggaagggagaggacatatggagaggggagaggacatatggagaggagagaggacatatggaga

SEQ ID NO: 635601 - DNA, 465 bp, Homo sapiens
gggaggcgaggaggcagatcacaaggtcaggagatggagaccatcctggccaacacagtgagaccccatctccactaaaaatacaaaaaattagccgggcgtggtggcaggcgcctgtagtcccagctactcgggaggctgagccaggagaatggtgtgaacccgggaggcggagcctgcagtaagccgagatcgtgccactgcactccagcctgggcgacagagcaagactctgtctcaaaaaaaaaaaaaaggattggtttttccctcggcaggtgggttgtgggaattgaagaaaaggaatggggggatgatgccaaggtatgggcgctatgtacggggaaaggtggcgagcggaacgggtggggggaggaaattgaggagtcctttcctctcggggtttccttgccttccaattcaagggccgggaattttcaacagctaggcaggatgatggtctcgggg

SEQ ID NO: 635602 - DNA, 210 bp, Homo sapiens
  misc_feature (155)..(155): n is a, c, g, or t
  misc_feature (197)..(197): n is a, c, g, or t
actgttcatcagtagctctgtatataggcagagaggtcacaatgaatgacagttcagcgtgagtatgtagacttagcagaaggaacatgtttcgttgggagctagaactcaaggtgccctggtgtccgtgttgaaggagccaacgtccaagaggnccagaagatactcaacaacagcggactccccattacttcagncattgcactccgg

SEQ ID NO: 635603 - DNA, 323 bp, Homo sapiens
cctctgctcgtacaccagcataatctctgccctacaaccagcacaatctcttcccctacaaccagcacaacctctgctactacaaccagcacaacctctgccccgtacaagcagcacaacctccactccacattaccagcaaaacctcagctgctacaagcagcacaacctccagttctgaaactactcccagccacatcagggacaagccccacgctgccaaaatcgaccaatcaggaactgccaggaacaacggccacccagacgacaggtccacgtccaaccccagcaagcagtacggcgccaaaggttaccgagctcga

SEQ ID NO: 635604 - DNA, 110 bp, Homo sapiens
  misc_feature (12)..(12): n is a, c, g, or t
  misc_feature (102)..(102): n is a, c, g, or t
cccttggtttcncggctttgccctcttcctttttgttgttttttttcccgccctttctcccccttggcccttgttttttcggcctgggtttggggttggggntgtccttt

SEQ ID NO: 635605 - DNA, 325 bp, Homo sapiens
  misc_feature (163)..(163): n is a, c, g, or t
tatgcaaaccatgttacaagctttattaaatctatgctccaaaggccgggcacggtgctcgcgcctgtaatcccagcactttgggaggctgaggtgcgcggatcacctgaggtcgggagttcgagaccaggctgaccaacatggagaaactccatctctactnaaaatagaagaattagctgggcgtggtggcacacacttgtaatcccagctgctcgggaggctgaggcaggagaatcgcttgaacctgggaagcggaggttgtggtgagccgagatcacaccattgcactccagcctgggcaacaagagggaaactctgtctt

SEQ ID NO: 635606 - DNA, 155 bp, Homo sapiens
ggctcgcatgttggcaggctgtcttgaatgcctgtcctcaaggacacccacctcagcctcccaaggtgctgggattacaggcatgagccaccaagcctcaccagagtcctttttttttttttttggaaataaatttccactctgtgtggcccagg

SEQ ID NO: 635607 - DNA, 946 bp, Homo sapiens
aaattccgaatgtacaaagtagaactgatgtggtggtgtggtcgtgtctcgtgaaatcgctagcgtgtgcatgtgtttgaccagctgagtgaagatcagttcgcagatttcagatgactgctttggcactactttgacgaacatggtgatggcactataaacaacaatagtgatttgacgaactgtaatgagtatcgtcctgtggaggcagtaatgccctaccttaagctgtagtgtaccggcatcatggagtttctgaatgttagctttgctggcagtgggttaatggcacaattgtacttccctgaaattctcctcgtaataatggaatggggatgaataaaagaatgggcggacacatcactgtgacggaaggacaatggttatacacgctttcctcggtgtttgctaagggagggtaacgcctatattagtgctgcggaattttcgcctcgtgaatgacaaaccgcttggagcagaagtcctcgaggctgcaagcattgttggtgtaactcgcatcaagtggagaggcgagatattgagtggctagagtgcccaagtggagctagtgacgaagttcgtcattgatgacagaagtcaagacccgtatcagaatgtgttgaatctcttgtgctacagttgtttagtagccgtcccatgggtggaacctatcccttggggttctcccttcttgtcttcacactctgcaggtctcgtaattcgattcatgctcatggtttgttcctttctcggcatgtctgaccttctgtgacctgatgccgtcccggtgccggtggttacctggcttttagccgtgtgcactagtagtggggggcatagtacactggtggcgcgaaatttgcagacgtgggggggggtctcggtcggcgccatttggcgtctggggttccacttggcggccctggtgtggtcctccccccctctt

SEQ ID NO: 635608 - DNA, 602 bp, Homo sapiens
  misc_feature (520)..(520): n is a, c, g, or t
cccggggagagggggtctcaccagtgtcagacgggtctcgaactcctgacctcaggcaatctaccctcctgggcctcccaaagggcggggataacagacgtgagctactacacccagcctcagtatatttttaaaacatacacttattcgaagttttcctgaaagaaacagataaccgggtaaaggctaaaggctaagggagtacatgaaagtaaatgtcacactccaggcaagccaggtttttctttataaacagagagggacataattaacccaatatcatccattcattctttccatagacatttactattctcagcaaaaatccaaagaccacaaaattggagttctcttacggatattggggatgtaacactaactggtagatattcttactctctcagggtgggggggcttatagctatctaggttagaagagaaggtagctgtaaagtagggtaaaaagtaacaccggtatttcgccacttacttagctgaaggacttcagatatgatgtggntctgtgtctccacccacatttcatatgaaattgtacttcctaagtgtgggggagagacctggagggagagagtgtacgggcc

SEQ ID NO: 635609 - DNA, 546 bp, Homo sapiens
  misc_feature (546)..(546): n is a, c, g, or t
acccttttttaatgttattcagggagggggcctggttttgttgggagggtttgaggagcgagaggtttttttttttgttggggggcacaaaaaagccctttattaggttggacctagaatgcggggcgggcccccataagactaaagccccgttgtacttgaccccgtcggggacagacccgggcattttgcccttttacagggggaaatttttttttaaggcctgggtctttcgggcacccctcaatttatttcacagatttggtttttaaaccccggcgcctagtgtgtgaccctttaaaggacacccctattgctgcacaccttagtttttttcaaatgttctaagcccctcttcataccatgggttcccccccaggacagtaacgggaaagggcctccccccaacctctttgaagggtttttcttgggctttggagatgccaccccggaagggttgttttttcaagtggggggggcccccctcaggggttttgaagaatattttttgggctttggccaaatatttcatccgcggggttcacn

SEQ ID NO: 635610 - DNA, 366 bp, Homo sapiens
  misc_feature (22)..(22): n is a, c, g, or t
  misc_feature (39)..(39): n is a, c, g, or t
  misc_feature (49)..(49): n is a, c, g, or t
  misc_feature (54)..(54): n is a, c, g, or t
  misc_feature (74)..(74): n is a, c, g, or t
  misc_feature (78)..(78): n is a, c, g, or t
  misc_feature (115)..(115): n is a, c, g, or t
  misc_feature (210)..(210): n is a, c, g, or t
  misc_feature (232)..(232): n is a, c, g, or t
  misc_feature (263)..(263): n is a, c, g, or t
  misc_feature (266)..(266): n is a, c, g, or t
  misc_feature (280)..(280): n is a, c, g, or t
  misc_feature (293)..(293): n is a, c, g, or t
  misc_feature (296)..(296): n is a, c, g, or t
  misc_feature (316)..(316): n is a, c, g, or t
  misc_feature (341)..(341): n is a, c, g, or t
  misc_feature (346)..(346): n is a, c, g, or t
  misc_feature (356)..(356): n is a, c, g, or t
cgacgttgcatgaaccacaggnaacagaaactagttaantagtcttcantctgntccctatcaaatttaatacnaacnaaatgagataagtatacagtggtctcttcttcctgangtctaaatggactgagccatcttggatcctagagtggcagtacttgcttgatgatagaaatgagtacagagaagtcttgtcctgatgaagtcatnatcaagctcctgggggacaganctgtgcctattcaaaaaaaaaaaaacttttnaantgacctttatgtanccttctagagatnacntcaaggcctatgaggactcngtcacacctctcctaaatatccatnggctncaatactacntttcgtccac

SEQ ID NO: 635611 - DNA, 245 bp, Homo sapiens
aattttgcctcacagaattgagagtttgttcttacacacaagtttaatgccaccttcctcttgtcttgccattggaccaacaagcaattatattgcttgagttaaacttaccccacaagactcaaggcccagaaaggttcttcaccttcatctcttcctccgggattgtcttgtcacgggttcacctctggcatcaattttgcccctagaaccttaggtctgcctcggagttattctctctgctt

SEQ ID NO: 635612 - DNA, 363 bp, Homo sapiens
atttttcaactctacaaacttcccccattgttcctagaaccaggggacctgggactccttggggttgacaatcgagtagtactcccgattgaagcccccctttgtataataattacatcccaagaggttttgcccttatgagctgtccccccattagggttaaaaacaaatgcaatttccgggggtttaaaccaaaccccttttccggctacacggccgggggtatactacggtcaatgctttgaaatttgtggagcaaaccccagttttatgcccctggtcctaaaattaattcccctaaaaatttttgaaataggggcgggttttaccctatagccccccctttaccccctttaaagccca

SEQ ID NO: 635613 - DNA, 1649 bp, Homo sapiens
  misc_feature (697)..(697): n is a, c, g, or t
  misc_feature (1137)..(1137): n is a, c, g, or t
  misc_feature (1226)..(1226): n is a, c, g, or t
  misc_feature (1327)..(1327): n is a, c, g, or t
  misc_feature (1329)..(1329): n is a, c, g, or t
  misc_feature (1365)..(1365): n is a, c, g, or t
tttcgtcctgcttctctatctctctcctggtgattacgtgtcttacttgttttttttatgctctccttctctattacattctttatttagtctgtacttgcgttcgattgttttgctaggatgtgtctgtcgtgggtattgtactcatgtctatggtctaggtcttgttgctttaggatgtattcgcgtatttgtaatttatcggtcgttctcattgttgttgttgtcagttactgcattatgtctcgtttgttggcattctcttagttgtttgtgcagtgttcctgtgtcttttctattggtcttcttcattttttcttactatttctctgctgttggtggcgtgtgctacttcttacctgctggtctggttcttgttgcgtgatgtgtctgtctcgtcctgactgtgtcgcgtgggggttcgtaataaacagagatcttcctttttaagtgggaaccccgttcgaggattcctgccgctgtgggtgaaactcctccattcgccaccgcccgtggtttttgtgagaacccgttctccccgattagggagaggaaccacgccccggggggggctccgaagttctccacacgcctcttctccgggggactttttttagggctcttttaggcctccccctggggggacccgggaatttacacccaattttgtccgaccgcccacagggggtacaaccangcctttaattggacggctcattttaaagggcccctttaatattttaagggttggcacccactttatttagggtaacacaaagattttgggtgcacccaacaaaatagtcccagcgcccttgggtgaacacacgggttctctcgggaatatttcccccgggagatatttcttcgttctgaagcgcacacacccgcgggttctccgcgttgtaaaaaagcgcacatctttttttcgcacaaatagtggttctcgctcaaatgccccgcgccctctcacttggcgtctcgcgccgcaacaagctctgcgtctttctctcgcctcgcggcgcgcgctctctccttctctcgctccgtctccgccggacatctccggccagacgatttttatctgcgcacagagagattccccctgtagacatcttctcgcgcttgtctctgttnttttaatactccccctgtcgcatctcgggatctcacactgtgcgcgtgcgccccgacaccagtaggtctcagaacacgccagactccgnttagaacccccagcgttcccgaaattccacccacccacaaggagctttaaaaggtaggataagaaaggagaagtttttttggagaagagaggccaagagananatatgtgagatagaagaccgcccccctctgctctanatccgggagatatgctctaatatgagggagaaatatggggaggcacggagggctcgagccacatgagggtagacgcaaagaaagaggagaagaacgcgtggggagggaaagaaggaaggagggaaggaaagaaaggtgaatggtgaggaaagaaggaatggaagaatgaaagaatgaaggaaagctgagagtcagctacgggcaaacgggcaggctgaagatgatgaggatgacgatgtcgataccaagaagcagaagacccccgaggatgaactagacagcca

SEQ ID NO: 635614 - DNA, 945 bp, Homo sapiens
  misc_feature (898)..(898): n is a, c, g, or t
cgcgcatgttatatatcttcccgcttatttcaccacgaaagctacatatattatggtacccccgctaaatctaacaaatccggctcgcattccgtcgcttttatctttttgtaatcaacatctcctatcgcgtcggaccgcctcaattatatcccaccatctcgcctaatcttttttatctcacatctatagaaaaacgccccgcattacttaattaacccgcccaatcgaaaactttcgccagtctacctacagattccgttattagaatcccgggtcaccccatccccttcccagacagtgtaaggtgactaacaatcttcacggcgcagccaggttgtgtccgccgatgtcgtgtgggtttgcggttgccatagtaagactataccggctaattggtccccggggcagtccctcgagagtgggcggaggatgcacgctggagaagtgggaggtggggtggtcggggcgtgtagccgttccccacaatgtcggtgatacgcggccagtgggaagattgcggtccgttggtggtgtgcgggtgggtgagtgccacgatggcgttgattgagaggagggggcctcagaatgagccgcccggggggtgtacaaggaagcgggagggagagaatacagggacagctcaggaggacgggcgcgtgtcaggttaccggccggagaaggtatgtagaacgtagtacgtgagctatgggagtagggatataggttgcacatgccggagtacacccaataccgaaccaggtgtagcgtgtgcatgcacgcgcgggacacgatacagaatgaggagataggtggatggtgacgtgatgcgatgagcatatcaaagtagtgattcctgaccgtgatgtagtgttacaatgaggcgcgattgaccganacttctagcggctgttatatatgtatgggccagggagtgtggcgtgt

SEQ ID NO: 635615 - DNA, 304 bp, Homo sapiens
actatttaggtttcattgaattttttttcttaattgccagtctggtgaagtttatccacggtggctatgcaaccttgattatttatgctcgctattttgctggtgatggtggtctggtattatggtaataagcgacgggaagccatttcaaagcaagatgattatgtgtcattgaaggattatcgtaagcaactcatcaacctgtcaaaggatgacggcggaccaatttttgcgcgaatttgtctacattgcgcatatgcatcaaaatatatgctaaagcggtcaatgatctattcaattcttg

SEQ ID NO: 635616 - DNA, 838 bp, Homo sapiens
  misc_feature (404)..(404): n is a, c, g, or t
ggccatcgatggtcggtgccagtcgggaaagaacctttaccaggatggattgatgacttaaatggaccaagtggaacttgcatttattgctgggagggataggacattcgttcgaactaatacgtgctcatccatacgaatgcgccattagtcaggaatcattgttccatgctagatgtcatgtctcgtcaacggatgcagtcttgctggcagctctaggtattcctggtaggttaatagaccaagagaaaccatcatgggtggtatcaagttgtacaacgagtgcagcgacgtgaatccatgttccgagctggtgggtcgaaggttggaagtacctattgtacatttcgcgagcgtttcgaagcagcgaatcgcttctcagagagcgaggccttgtcaggacnggcccaatactgtataatcttaatcctctcatatcatcgttatagtatatcgagtgtgacgtgtggatttgcgtgtaaagctcaatatagggccacaagctatttccgtagtaattgattattctaccgtgcgaggactgagctgggaaggaaggcccgaaggtatgcactgaaaacaagtaacgtcgtcttcagcaaatgctatggatgtttctttgcaatcatttcacaacgtaattctatgggtatggaagtgactgagcaatgtcacatatgtgaaggaatcaagtaaaccctgaagataaggagagaccttcaagtattgatgtacggcagttggcttgggcagaatatagtggagaactactgcttgggaactaagaaggtacgtattgaatggaagaaatgtcttgggctccctggaggcaggaaaa

SEQ ID NO: 635617 - DNA, 145 bp, Homo sapiens
gacaatcatggaccaggaagtcatacatcacatacatagcataaatgggagagtaatatgagacctagagttaaattacacccatgaaacatcaaccacatgtcatatcaattacacgtgtgtaacattgatataatcgggtaca

SEQ ID NO: 635618 - DNA, 194 bp, Homo sapiens
tggctctgaaaacactttattacacaaattactttcagattctggaaaatagtggtcctaacagtgtacccatctaaaaataagacatcccaaaaacacaccaactggaaagaaaatttaaaaaaagaatttaaatagagacttttttattcccttcatggcaactataagtgttaggtgattttaaaaaaaaa

SEQ ID NO: 635619 - DNA, 974 bp, Homo sapiens
  misc_feature (541)..(541): n is a, c, g, or t
  misc_feature (589)..(589): n is a, c, g, or t
atggatcgtgcgagcgcaagtaggtctgccagaggctacgtccctgtagtcatagaaagagcttatcacctttcatgatcacgcccgtcagtggaatcatttgcacttatctgcttccatagttcctgtttgcccttgtggcctaactactcagcgaagggagatctgatagctaactactaacatctcgagtacgctcatggacatagaaagcgtctgacatcttagtcctgtcgccgtcccactcattcctattgcgcgtgcatactggtcgctgcccggtcacctgacggcattcctatgtatcaatataactagtagcagaaggatactcacgatactctcatctcactttatccattcataatcaatgggtgcacccgatgggtcactgtaactctacgagtgatcatcgacatacgagggggactactcgtatctaatcttccttacaaatacgtgtctcccactattatttccgtatgagacgctagtgctgaccttgctgagatcgtttgaagcgctttgacgagtcagatgntaagatacatctcctgatatccgaaagaccaaccatattccgtactcnatggttacatttttgacaagaccagtcttttgtcagcatccaattgatgctcgtctccccaagctatttgaggcgctcattatatataattaggattcgatagtttactcctgggaactgttaataataaacggaaacctgtttatttcaccggcataacagcatgaaccgggtgggtgatacataaggaagtgctcattgctccttgaagatgctggttggaagctaaaacaccgactagttctttatcgccccatcggtacttatgaactttgtagttaccccttttgaagtccttctgacaataggggcccggaattttaccctaattagaaccccctttttaccccccttctaagagaccagaaaaaattttttaaaaaga

SEQ ID NO: 635620 - DNA, 321 bp, Homo sapiens
  misc_feature (85)..(85): n is a, c, g, or t
aaggctactctcccagagcatcctttcctcccgcctggggcattatccatctggtgttgaaggtcatatcaacctgactgggganaggggaccatgcctaagaggacggagaggctgatgatcactgcaaagagctcccattgcatcatgccaggattgagaacatgtctctgccggtgcccgtgcgaaccagcgctattagagcatggatgaggggtgcataaaaaaagatctggggtccagaatggagggttcctccaagttcacatgaggctactcctcttataggcttagtacttgttccttagtaacaataagagc

SEQ ID NO: 635621 - DNA, 92 bp, Homo sapiens
  misc_feature (89)..(89): n is a, c, g, or t
gcggccgcctactactactactgctcgaattcaagcttctaacgataatctggggacatgtaataaaggtgtttattgttttgttcccnttt

SEQ ID NO: 635622 - DNA, 405 bp, Homo sapiens
  misc_feature (26)..(26): n is a, c, g, or t
  misc_feature (75)..(75): n is a, c, g, or t
  misc_feature (121)..(121): n is a, c, g, or t
  misc_feature (136)..(137): n is a, c, g, or t
  misc_feature (199)..(199): n is a, c, g, or t
  misc_feature (208)..(208): n is a, c, g, or t
  misc_feature (214)..(214): n is a, c, g, or t
tgggggaaggaagcccccccccccanaaccccttttctgggcgggtctgcaggggctgggagaagggcagggcgnttgtgagagagaagacctgttccataaggaggacaggtaacttctntgccctgggaactcnnttggcgggggggaggggggaccactggcccagaggcgctactgaaatgtatgagaagctggntgctgggcntggggnggaaagggggttgtggcagaaacagggaaggaggtaggtctcttcccccaggaggggtgggaccggcaggggtgacttgaggggctcctactcctgccccacgttgacaatcagtatgtctgttatgtgcgatttttcaccccgttgtgttttgggtcaggattttaaagaaagatatttttatggtaaaa

SEQ ID NO: 635623 - DNA, 126 bp, Homo sapiens
agcacgttaccacctcaactcccaaagcgctgggattacaggtgtgagccaccacacccagcccaacaaagattgatcttattatcccattttatagatacgaaaattgaggcctagggaaatttg

SEQ ID NO: 635624 - DNA, 246 bp, Homo sapiens
atccctgcccgcaggccagtcatagtggctgcagcatcacgttcgttcctgcaggccacagtgagaagtaccctgtgatttgatgaagagtaggacgtcggggaagggttttggcaggcagcaccatgtctggtttctgtgccggctgtggtcaccatcaccacttggttccaggcaagttgtactggtggcctgcgctcagcgtgttgccacagagggcacaggtactctcttggaggcagatta

SEQ ID NO: 635625 - DNA, 833 bp, Homo sapiens
  misc_feature (497)..(497): n is a, c, g, or t
cgcggtggctcacatctgtaatcccagcacttgtgggaggccaaggcgggcggatcatctgaggtcagttggagaccagcctgcctaacacggtgaaacccctgtttctattaaaatacaaaatattagctggtgtggtggcacgtgcctggaatcacagctactgtgggaggctgaggcaggagaatcgctgtgaacccgggaggcggaggttggcagtgagccaagatcgcgcatgtgcactccaactggggcaacgagagcgaaaattctgtctcaaaaaaacccaaagaacaaaaaaacgaaccaaaaaaaaaaaaaaaaaaaaaacctggggcttccctcgagtttcccatttcaggttatggtttactcatcctcttctagtcatttcccttgtgcctcagaatcgtttacagaaaagacagtctaagtttaaaagttcagctatagtaagagccttgtttattaaaaaattatcatttcccatgcttganaagaaaactagagtgaaactcaaaaggagatattcaagtcacctcagtaagtctaatatgttgtaatgctgtaagtttaactttttaatccacttggaagtatattaccaataaatcatttaagatcaaggaaaactcattctatgtgacagaaccattaatttccagtggtctcaccttgttttaagggaagatgtagaagttacactttttggttaagaaaggaatttcccggtgaagataagagccaaatttgggggaagcgggacactcttttggtcaaggggtgggggggagtatagcgcacacacgggaaaaggaaatcctgggcaactg

SEQ ID NO: 635626 - DNA, 133 bp, Homo sapiens
ttgttgctgacaagaactgttcacaactacacttcatacctcctaatatttattgttgtgatgctgggacagctgcagacacagacatgacaaaccagctcatttcttccaacctggagctccactccctctc

SEQ ID NO: 635627 - DNA, 336 bp, Homo sapiens
ctctcttcactcctgagatactgcttctggaagcggctgtcacttcctctctagtacctcttctcttctctgaagtgtgtgactatctcctagtgtttaaatttggcagtaactcgccatgtatgtcagcatataaaaggaaatgtttttaccttatctcctggctggatgatagaacctttaatgaaatggccattagggttcaatatccctggtttaaaaaatcttgttcatagattaaaggtgctgctgtggacaggagggaaaaaaaaaccctctacatatcgaaaggcaccaaatgtaatatctgacactgataagatgcccaaatgagca

SEQ ID NO: 635628 - DNA, 135 bp, Homo sapiens
tgttgtactgtggtggtgagtgagcccattgtgtcgtgggtaatatgtagagggagtatagggctgtgactagtatgttgagtcctgtaagtaggagagtgatatttgatcaggagaaacgtggggtaccgagct

SEQ ID NO: 635629 - DNA, 332 bp, Homo sapiens
  misc_feature (161)..(161): n is a, c, g, or t
actagaggatcccccaggcgcttgtggacccatatggggcaccgtgatgttgcctatattgtggtgtgtccagaaaatgagtgcttgtccgaagggagcaaaactttcttcagggacttgagtgccgtatacgagatgtgtaggcttgggcagcacacgcncatctgcaaagtactacgtgacgggatcatgcgcgtgggaaaaactgtggcacagaagctgacagatgagcttgtgagtgagtggtttaaccagccttggagcggcgaggagaatgacaatcattccagactcaaactttatgcgcaagtttgccgccatcaagcgcctgg

SEQ ID NO: 635630 - DNA, 521 bp, Homo sapiens
  misc_feature (68)..(68): n is a, c, g, or t
  misc_feature (70)..(70): n is a, c, g, or t
  misc_feature (74)..(75): n is a, c, g, or t
  misc_feature (80)..(80): n is a, c, g, or t
  misc_feature (89)..(89): n is a, c, g, or t
  misc_feature (93)..(94): n is a, c, g, or t
  misc_feature (97)..(97): n is a, c, g, or t
  misc_feature (111)..(111): n is a, c, g, or t
  misc_feature (147)..(147): n is a, c, g, or t
  misc_feature (259)..(259): n is a, c, g, or t
  misc_feature (274)..(274): n is a, c, g, or t
  misc_feature (289)..(289): n is a, c, g, or t
  misc_feature (300)..(300): n is a, c, g, or t
  misc_feature (321)..(321): n is a, c, g, or t
  misc_feature (347)..(347): n is a, c, g, or t
  misc_feature (355)..(355): n is a, c, g, or t
  misc_feature (357)..(357): n is a, c, g, or t
  misc_feature (376)..(376): n is a, c, g, or t
  misc_feature (402)..(402): n is a, c, g, or t
  misc_feature (408)..(408): n is a, c, g, or t
  misc_feature (413)..(413): n is a, c, g, or t
  misc_feature (416)..(416): n is a, c, g, or t
  misc_feature (418)..(418): n is a, c, g, or t
  misc_feature (447)..(447): n is a, c, g, or t
  misc_feature (460)..(460): n is a, c, g, or t
  misc_feature (462)..(462): n is a, c, g, or t
  misc_feature (487)..(487): n is a, c, g, or t
attcttccttcccccaaaacggaaacttgttagcaacttccaaccaaaaaattttgccagtgttcacnangacnntcagnggtcatgtntggnnatnagtgcccagggatntgcccaagtatgccttgtcctcttgtcctgtttgcntttcactgggagctgcactatgcagctccagtttcctgcagtgatcagggtcctgcaagcagtggggaagggggccaaggtattggaggactccctcccagctttggaagcntcatccgggtgggtntgggtagacaagctntggttttgtcncccaggctggagtgcagtggngcaatcatggttcaatgcagttttgnccttttgngntcaagtgatcctcccaccncagcctcctgagtaggtgggaccatnggctcncaacnccncncctggcaaatttgattttttttttttttncagagacggggtntngcaacattgcccagacttcctttgngttagttaataaagctttttcaactgcaaaaaaa

SEQ ID NO: 635631 - DNA, 953 bp, Homo sapiens
  misc_feature (496)..(496): n is a, c, g, or t
  misc_feature (515)..(515): n is a, c, g, or t
  misc_feature (550)..(550): n is a, c, g, or t
  misc_feature (738)..(738): n is a, c, g, or t
atagtcaagatatgaactaagaaattttaatgcaagatacatacattccctgtaacagacggggaacttacaattactaagtattattatcttgttgtaaaatggatgtacgaggtggtgcccatgaacgtggagaaatagtgtgtacgggagtttcttaagatctcagagcagtatatcgccatagtggcctgtgacgcattgttacagaccattcatgagcctagaggctcaaccatattcgaagaaggcgacaattgtacctgagtagataaattgtactgcaagaagctatagtttcccgtaattatcttgcacaacgtatttatcaaaattagaattacatttcaataaatttaaggaagtaagaatagaacgtgatgtgagagcactcgaggtcaggcaaaatgcaggtatttacatatacgaaggtcaataccgcgtggtttaattttctctctataacttggtgaaattgtttggtgaactttcgttntctctatcagatgcctggngtagcattttcggggctggatctggtactgtattnggaacttcagcgtggagtttttgaagagaaggcgattaagtagtggccgtaatagctggagacaggggaatacgagggcgtggttgtagagttcacgggagcttttgtggagaaagagccaagagacacgtggtgacgagctgttatttaacgagggcattacactaagcaggggaaagagataatcncatttagatctttgaaggcgttgggcaagatgcggggtaacaagtactgggaataatcagagactcgtgggacaaagcgaccgaaaactttccctttgtggggagaggaggggatttccgtgatctaatataaagcgacaatattttttagaactttaacaatattttatacattttcgcaggtaaatggttgacctttggtaacttatatttaa

SEQ ID NO: 635632 - DNA, 173 bp, Homo sapiens
tcgataatcttctggtcttgggatataggttcttcaaactcctggtagtgtcatggccagctagtgcgccgatgggcttggagcatagcgtgctcaaaagcctggataatcggaacggtttggacggcaccagcctcttgaagccagggcaggcagacctgagcaagccaggc

SEQ ID NO: 635633 - DNA, 760 bp, Homo sapiens
  misc_feature (214)..(214): n is a, c, g, or t
ttgggccctagaagggggtaaagggggtgctatagggtaaatacgggccctatttcaaagattttaaggggaattaattctaggacgatgggcatgaaactgtggttggccccacagattttcagaagccatttgaccgtagttatacccccggtctcggtgttagcggtgtaaaaggtggttgggttatagaacgtctccgggaatatgtgcntctcgtgtttttataagccctaagtggttgggaacagcctcagtgagtgtgcacagaacgctctgggtgagtgttaatttatttattacaaatgtgggggctctcaatctcggggagagttacatacctcgaatgtgtgctcaagcgtctcagaggaagtctcgccaggtctccgccgtggttctcatagagaaattaaagtcgggggcacagttaatgttagcgaagtcttgaagaatttagtctcccgcccgatagtccaggggtgatcctctcgtataagagttctcaggatcacccatgtgtgggtgtgcgcccatgtgtgatttgtggacgtggatacagggagaagggaactccgtttgagcacccctccggtcgtggtatatgtgttacaagggagagtcgcgtataagggaattgtgagaaggggcgagaattagagcgcaccctaggggatgtgcagtgcgcgggcgccagagaatataggtctcaaacacggggttcccatattttttcccgtgaaagcgggtctttggaaacttt

SEQ ID NO: 635634 - DNA, 1459 bp, Homo sapiens
  misc_feature (344)..(344): n is a, c, g, or t
  misc_feature (485)..(485): n is a, c, g, or t
tctgggaggcaaattctccctttgtcaccagggtggagtgcaggtgggtgccatgtcttcgtgcttcagtgtggaggcatcgtgtgtcttcgggcctcagtgtggagcctctcgcgccttcccgttatttcaaggcagattcgtcctgttgtcctcaggcctccgtgagttagcgtgggaacatacgaggtgtgttgcaccaccatggcccgcgggcataattgttgtgagtatttgttaccgtataaacaaagcgaggtgtatttcatctgtgtgtgtgtgtggcacaagagatgtggtgtcctcatatctctctcagacccctctcgtgtgtatctctctgnccacacctctgtgtggtctctctctcacaaaaggtgtgtgtgtgagagattataacagggggtgtgtgtgacctctacacacatgtgtcccacaggccaccttatatgttttatctctcttatattctcccacagctcttnttctgtatctctcacatatatagaaaacatctctcttgtatcttatatatcttcgtcgcctgtgtaaaaccccatatatgtgtagagatagatagatataatagtctagcgcgcgcgtgtgagagagtgcgtgtgggcccacgccgagtgtgggtcttcacctcctccacaacagagaaagtataatttctcccctgtgtgtgcgtcagaaatatgtgagacaactgtctgtgtgcgtcccccaaatgatgagacagtgatgacctgtggtgtgagagccgattctctacacaaggagggtgtgacaccaaatttgtctccctgttgtgtgtggcccccagaatgtgtgtgtgtgtccacgtgggagaacaaacgggtgtgggtttccccccctgtgtaagaggggcctagaaagtggcccataagcttgtgtcgccgaagaaagaaaaagctggcgcaatagttgtcacatagtttccccaaacccgttgtcgcggaaacgctgtgaaataaccgcggtggggctatccgtagggggacgatataaaagggccaaattgtgggggtgtaaacctgtactataaaatcctctgttgtttccccccaaaatagtgggggggggtgggcgacccctttatatcccgtagaaagatgtgggtcacaaggtggaattctcccctgttttggaaacatcttacctataaaatctttaaccataattttcccaagactaaatttgggggcaccttggagtagttgccccccttggagaggtacattcccaacgcgaaacaccgtctcgtgtgggcacctctaattccgagggggaaataaatgtgtttgggacaaagcctgaaaccttttcgcggataataacacagttgttccatgtaattaacgagagaaaccaaaacagagctgttccaaacacaagaacacacattgcgctacacatcttcagctcgtcacgaacg

SEQ ID NO: 635635 - DNA, 447 bp, Homo sapiens
gctaacgagcaccctcctctttcccccaacacttgcaggcacgtgtgcgcgcccaaaaacacacacacaaacacaggcacacaaacagatgcacagtctggtacaccccgctggtgcgtccatgactgctgggcattgctgggaaaatcctttccaccttagggatctccccagggccagggccgggtggtcattgctggaccacgccactgcaggtggggttctggcagggttcacattcccctgggatggccatggctcccagaacctagcacttaccatattttcctttaattctcaagaggatgaaggctatgaagatgagggagccaaggaggagaattcccagaacgatggaggggatgaggagcattagctcccgagattccttgtgctctattttcactgtcacagaagattctggaaactagaattccaattcaggaa

SEQ ID NO: 635636 - DNA, 149 bp, Homo sapiens
tgcctctccagagactcgtcgtgccgcgcaaagactccaggtcgcaggtcaaggactgcaactggcgccgtgtagtcgttggcttcgatgcttggcctggcggagcagctccgcgttgcgggcagtagtgtctgtcaggtctgcaaact

SEQ ID NO: 635637 - DNA, 1024 bp, Homo sapiens
  misc_feature (308)..(308): n is a, c, g, or t
cgcaggcgtactgatcattgtatcatcgccctcgattgatgcctctcctccacatatctcatttagcaaccgtactatttaccacaccaactctgactagtcaaacttaacctcaagtcaaatgtttggcttccgcaaacacatgggggacgagcaccttgattctcttgtcctcttatccttaatcgcttgcctcgtgtcaagtagccacctcgaaactcctacctcatgcattcccctgcatgcagccaaacaatctattccactagcacatggacactcacccttccactagaagcggagagacnagtgatttggttaataatagcttaattggcatctcaatgattcaatatttgtgctcgtagtcgctcgacatgacgtgtgaagcgacaaagggaactaacgtgatcatacacgcatatgaatcccgcgcaaatatctacgcatggtaatcagtaagacctagtcagtctctacatcattccatatccgaataatgaccgtgcgatccgtatgcctctaatgcaatgacattacttgctgagccatactacatccgtgcatcccttgtcggagagcgccacctcttagacctgatcatagcactcttatttcttcgccttcttactggcattatctatccgttcaccgagaactaagtatctcctggactatcctatgaatgtctggtgtcggccttacatcctttgctgacgttatctgtgttttgttcagcctctaccgtgcacagacacgcttaagacaagaagttgggtgggtggcactgcgttgcctgttgggccgaaaagttctgaaaaccggtgggttgccaaggggggctgagggcgactgttttaaagatgtactttctcaggattgtaatggtctacctatggaaattgcgattgggattgttggaagagggtaattggggggggattactgaactccgggaatggggtctggtagttcaattacgttgtggtacaaccgaatgcggttggagtggcgattttagatt

SEQ ID NO: 635638 - DNA, 282 bp, Homo sapiens
cctgtactctgtcacagcttatctcgggagcctgaggcaggagaatcgcttgacctgggaggcggagtttgcagtgagctatgatctgcgccactgcactccaaccaggcgtacagcaagactccatctcaaaaaaaaaaaaaaaagaaaattcacctttaacttggttgttaggtgctatttgaaactcagggcttgcttaatatccgggttctcccattttttctccccttagagtgaaaaagttcgctgtgaggaggggctctctctcttaaagtctca

SEQ ID NO: 635639 - DNA, 868 bp, Homo sapiens
cgatgtcaacgacctgttgaagtttattcggccactgcacgaaggcaccctggtgttcgtggcatcctacgacgacccagccaccaagatgaatgaagagaccagaaagctcttcagtgagctgggcagcaggaacgccaagggagctggccttccggggacagctgggtgtctgtcggggccaagggtgtgcacgaacaagagcccctttgagcagcacgtgaagaacagtaagcacagcaacaagatacgaagtgctggcccgaggcgctggagatggaaggctgtatcccgcggagaagcacgggccaagctatgcacggtccagatgccaggaccgggccgaggtgaggccagaccatgggaggcgcgcgcgctgccgggcggacagaggctgaggctcacaaccccaggaaccctggagcaggagacgctccctggctcccaatcaacatctggtgctccgagtgcagtgaccaagaaccgtggtctcaaggtggtgggggctatgggtgcttgcagggggtagtcctgccgtactttgttcacgggagcccagggtacccgctccttttcgtaagactgttcccccccggtcaggtccatctagccctgtgctccgattccttcacgccagtctccgtccccgatcttgagtcctgtgtaacggcccttggtgcctgcccctcagtgtgcaagtctgggagcaggcctggcgggttggggctgtcttccagaaacctctcccttttgagcactctgcgctgcgggctaaacctgtttccgtgtgattccttcagtgagccgaacccggggggtggttttgagccttgattgctctcgcctggtcttcagggaagggcgcctt

SEQ ID NO: 635640 - DNA, 246 bp, Homo sapiens
  misc_feature (86)..(86): n is a, c, g, or t
  misc_feature (100)..(100): n is a, c, g, or t
  misc_feature (191)..(191): n is a, c, g, or t
  misc_feature (196)..(196): n is a, c, g, or t
  misc_feature (234)..(234): n is a, c, g, or t
ggacaggcagtgttcctcccgatcagatcccggagcccgagcgcagcaggagcgccatgaagagtgatggtgtgtgagtctgattntgagctgggagagngcagataagttggtgcatggcggccctgcgcaagcatctcaccctaccaagtgcctctacaatgggccattgtctgtggtggggtcttatncatcntgtgggtctacagtgccactgaaaaacgatcttcaggnttctgggagata

SEQ ID NO: 635641 - DNA, 852 bp, Homo sapiens
aattctgttgatcctcatcatcaccttcatagtctggggatcgtctgagagaactagtgagagggactcatgccctggctatcaggtgtggtgaagattgtcgtggttgacataggacaacgcacgtggaggcgacggaaaacgcgaagatgttggatagatgacttgcctgagggtcgctcgcctcgctcactgatacattgaatggcaaagagagcgagacatagctcgcacaaggtctgctggacgtccgtcgtgggtgtgacccggtcgcgtcttccctcccattcttgtccacgcggcatttcatccttgttgtgttgtgcgcgaggatggaatgtagggtaatacgagaataagacacgggatcaaaataacacggattcacatccagaaacgtaaactatgaagacgggacctcttctcacacgcgtcatgtcgtggggcaagaaggagccagctggttagtggaaatgaaagttcccacttgtttctgctccacggtgcgatgtgtgtgtgaacagcacctgggatggcttccaatgaacttcctttagttcgcgaagggcttggataaggacaattacaaggtgttagatgacgatgagctaatcgcatgataccagggaagatgggcgtgttcgtatgcgaaaatatggcgatgtgggtaaacgcatgtacatcggggcaagtggcttaggattgctcgggacatcatttggacattatttccttatagggacttgtgggggggcatacatagggaagcatgaggttcctaattgaaggggaaagaagtaaggggccaagatgtcccccaatggttgtgaaaggaattgcctttattaataa

SEQ ID NO: 635642 - DNA, 352 bp, Homo sapiens
  misc_feature (73)..(73): n is a, c, g, or t
  misc_feature (325)..(325): n is a, c, g, or t
  misc_feature (328)..(328): n is a, c, g, or t
attttattctttaataagagcaaccatttcttttatcaacagactgtttcttagcaaaaagggaggacgtatngatgtcactgctttccattctactaagttggtatttgtgttcagatttagggattcctgtttgcccgaaccgttcatttatcttttaccttgtaattgtcccaacagccctgtgaggtaggataattatccctattttaaaattaggtaaggaagactaggagagcataaatgactatgtaagaccccttagcccaacagcagtggggcccaaggttcaaatctagacttcctgggtgaggactctgggttngtngttaaacttaagctgtgggtggca

SEQ ID NO: 635643 - DNA, 498 bp, Homo sapiens
atcgtagtcggtagcccggacggggcttaataagggctctggtgtactctgtgttagagacacggagatggcttcaacgtcatggggtttcccagcaattagtctcagagcaaacatgcagcaaacaggattactgagttccttcctgcccctcctccaccccaagtgaccacttggtcggctgccactagggtcagagctggatgtggttcccaacccctcctccataggaggaggacagtcttgagagcagggaactggcttggtcaagaccaggtcaaatgtactcaccactggccttgtacccacaaagccccttttcgtacctggtaatacctggctctccagccacaggaaggcagagagggaacacctgaggctcaggcctgacttcccacactgctccttagctgccaagggaggaggaccgcgtctagaacacctcacattgaattcccaaaaagctctacactagccccaagtgacccctctatacgg

SEQ ID NO: 635644 - DNA, 274 bp, Homo sapiens
ttcctggagaactgagggtgaggggagtagatgctcgcagcacaggggcattcagagtctagaccattgaagatggaaacaaacaaaacaccttagaaccagagatcgacccctcaagcaatacatcaaaatacccttcacaagaaacgtcggggctacatgagtatctgtgtagaatgcggtctgaaatgatcctatggattatcccggctggttgccactgctgtacaacattcagtgaccacatccacctgtgccattacgcttatatgag

SEQ ID NO: 635645 - DNA, 448 bp, Homo sapiens
aactctcatagtgtccagagagcagctcctagaaggtcccgcagagaaatgaacgagcgtatccataggggtgtggacacatgtttgaagctgatcccagagtaaccgtgatcaaccagcagagctccaggctcggtaggataggcgcctatgcgcatagattatcacagcagtttgctacataaacggacgggctgacgtagctgatctgagagagctagtaggctcagagagggcaagacattggctgtcagagcgtcgtagtccatagggaattcagtacgcagtagggataagggttagtccaagcagtacaaagcaggggaatgggacacactctcaccgttgcagaagagtctctatcgcgctagcgctctctctctctctgtctctctctctctctctctctctctctctctctctctctctctctctctctctctctctc

SEQ ID NO: 635646 - DNA, 1331 bp, Homo sapiens
  misc_feature (474)..(474): n is a, c, g, or t
gagagaactagtcttgagttttctttttgtttttccattgggtccctaaaaaagggaattgtttccaagaaaaaataaaataaaggggccttttcaatttataaaaggcagagttttcccttggcgaggatttaactccattcccagttcaccatccgtgggttgcagtctcagagacaagtttcacccgcgtgtggcttcagagagacattcgtgctatcgctttgtgccggagaaggcttgaaggcagccactccttgaagggtcttggggcaaacgcgcggaaaacttaccggtgcctgtcaggtggtgtccacgacctgttctgaacacaattatttgttctccctggacatggggggcttcgacaaccgagcggcgttaccacaagcccggttgtaaaggcccatttccttggaacagttacattctccctttaaagaagtcgctcgagaccacaggcagtgtgcgccnaatattcgcgccatacttgccctctcacgtgctcttaaacgggcccgtgagaagagaataaggcagggagcactacaatgcccgcgggtgtgtggccccaccacatgacggggacacagtgttttctgcccaaatcaagacaaagatatcatggaaatttgccggggctcacgataaaccttatctggtcgacaagttttgcaaacgcggctggcctgcacaccgtctggcaacggtatttgactccttctgtatcccccgtgggcgaccacacagtactcctccttaccaccaagggtaagaacctagtcacacgcccaccaattcacaccagtatgacaacgcccccagagccctctgggcatggtctggtacataccaaccctttccccccatcaaattggtgcgagcattgtcacgacatcaagtactctcttccccacgaagtagaactacagctggccatcttcacccttccgacgccacccagtccgatgaggcaacacaacggtatctaacaggccccccctttttacgaaccgcgcccagcctagcaagagtgtttaccacaaacatctcacaccttccccattccgcagaacggcccccccacatgtgtctaagcagaacaactctcgttgaacaaggagatagataaaacacccttcgggaacacacgtaggagatattcccccaacttcgtgtgccaaaataagtgggagcaccaacgagaccacacccgtttaataacccccgtataatagactactgcagccgccctgcaaaatgctgccattacccccacaagaccaccaagtgaggagtccttggtgtatatgaagtaacttaccacaaca

SEQ ID NO: 635647 - DNA, 1181 bp, Homo sapiens
atgagcccaatacgcaaaatataaacccctaatacaataaatataaaccactacaactacatcagacctaccccaccccatccaaacatctccgcatgactgaaactatcgagactcactacctatggcagcctgacctgatcctaccaaatacaacacaggactcattcctagacacaatagacactattttcagccagacgacctacaagcggacaaattcatcaatcgcaccacatacactacgcagaccgtaacataatggctgaatacatacacgacataaacttacacgcccactggcggcaccatcagagtcataccctttagtcatgcacctccttccctaacacattcgaggccgagcgcctactaatatacggcatcaatattcgtcatactcacgcaaaacccagaaacaatcgggaacacataagcgctacctgcctagcaaaactactaagcacaccaagccctgacaatcccgcagtaaagatacagccacgagggagggccacagagaatcaagaaccgcgagagagggccacacaagaaccaacaacccgcacagaaaacaacaacagacaaagaccagatgacaaggaggaccacgcaccaaaacaacaaaaagaaaatcggaaaacaagcaaacgcggaagaaacagaggcaaaaaagcaagaaaaggagacgaaaagcagaagccacaacaaaaaatgaacacacaaaaaataaggacgacgaaggacaagactacagagagaagaaaacaggacagcgaaacaaccggaagacaaaaaagaggccaaagagagaaaaacaccaaaacaaggcagagagaaacagacacaaacacacgcgaagaaccaacaaaagaaagcaggaccacggaggaactaagacaaacataaacagcggaaggaaagcagcaaagaaccaacacaacccaccagcgagcaagcaggggcgcccggagcagcagagaagacaggcaccaagaaaccagccagggcaaggcacgaaagagcgagacaaaaaagagggaaaagcagagaaagaaagggggaacgaaggagagaagaaagcagaaacagagcaaaaaggagacagaacagaagaagaaaaaaaggaacaacagcaaggcagaagaaaaacagagacggcgaaggcgaagagacataag

SEQ ID NO: 635648 - DNA, 277 bp, Homo sapiens
tgccattcaacccagcaatccttgtaatgtgtatctacgcgaaggaaaagaagtcgttaagtcaaaaagacaactagacatgtatgttgagcaaagcacaatgcacaattgcaaagatgtggaatcaacctaagtgcccatctgacaatgattggatatagaaaatatgatatgtatgtatacaccatatctatacacgatatatatatcatatatataaccatatatatcagatatatacccatctatctatttcatgaaattgtacttcgctgta

SEQ ID NO: 635649 - DNA, 150 bp, Homo sapiens
tctatatacggtagtcacttcaacttcgacaaggagtcataataaccactggacaatttgacgttcatgaaatttagttcaaaaacatcccctacaggagtgaaggatgtcttctggaggacagtggctctggaagcaacagatttagca

SEQ ID NO: 635650 - DNA, 152 bp, Homo sapiens
ctcggaccggatagacaacctggcagaagataattaagaaaatagaggttggggctgggcgcagtggctcacgcctacaatcccagcaccttaggaggccgaggcaggtgaatcacgagctcaggagattgacaccatcctggccaacacgg

SEQ ID NO: 635651 - DNA, 149 bp, Homo sapiens
cgactctagaggatccgccgagctggcactcgagggggcagaaggacaggtggagggaagcgccccagacaaggaagctggcaaccacgccagagcagcgtagggaccacctcgtcttgatctgacttgtcagagctgacgagagactc

SEQ ID NO: 635652 - DNA, 174 bp, Homo sapiens
gtattcccatgagcagcagagtcgagtgttagagtgcaggatcagagcggggagaggctgggcggagttggcggcctggaggctgcgccctgcgttacttggctgacgtgcagagcctctctctgggcgcgctgcagctcactcttggggcggagcctggcactcagcatgccc

SEQ ID NO: 635653 - DNA, 753 bp, Homo sapiens
  misc_feature (1)..(1): n is a, c, g, or t
  misc_feature (157)..(157): n is a, c, g, or t
  misc_feature (184)..(184): n is a, c, g, or t
  misc_feature (187)..(187): n is a, c, g, or t
  misc_feature (189)..(189): n is a, c, g, or t
  misc_feature (207)..(207): n is a, c, g, or t
  misc_feature (213)..(213): n is a, c, g, or t
  misc_feature (245)..(245): n is a, c, g, or t
  misc_feature (268)..(268): n is a, c, g, or t
  misc_feature (312)..(312): n is a, c, g, or t
  misc_feature (319)..(319): n is a, c, g, or t
  misc_feature (348)..(348): n is a, c, g, or t
  misc_feature (351)..(351): n is a, c, g, or t
  misc_feature (365)..(365): n is a, c, g, or t
  misc_feature (372)..(372): n is a, c, g, or t
  misc_feature (378)..(379): n is a, c, g, or t
  misc_feature (381)..(381): n is a, c, g, or t
  misc_feature (385)..(385): n is a, c, g, or t
  misc_feature (388)..(390): n is a, c, g, or t
  misc_feature (398)..(398): n is a, c, g, or t
  misc_feature (403)..(403): n is a, c, g, or t
  misc_feature (412)..(412): n is a, c, g, or t
  misc_feature (416)..(416): n is a, c, g, or t
  misc_feature (427)..(427): n is a, c, g, or t
  misc_feature (430)..(431): n is a, c, g, or t
  misc_feature (434)..(434): n is a, c, g, or t
  misc_feature (439)..(439): n is a, c, g, or t
  misc_feature (450)..(450): n is a, c, g, or t
  misc_feature (456)..(456): n is a, c, g, or t
  misc_feature (460)..(460): n is a, c, g, or t
  misc_feature (475)..(475): n is a, c, g, or t
  misc_feature (482)..(482): n is a, c, g, or t
  misc_feature (486)..(486): n is a, c, g, or t
  misc_feature (499)..(499): n is a, c, g, or t
  misc_feature (505)..(505): n is a, c, g, or t
  misc_feature (511)..(511): n is a, c, g, or t
  misc_feature (524)..(524): n is a, c, g, or t
  misc_feature (527)..(527): n is a, c, g, or t
  misc_feature (529)..(529): n is a, c, g, or t
  misc_feature (612)..(612): n is a, c, g, or t
  misc_feature (614)..(614): n is a, c, g, or t
  misc_feature (644)..(644): n is a, c, g, or t
  misc_feature (732)..(732): n is a, c, g, or t
ngggaggctgaggaaagcagcattttcaccaaattggtgtaaaaataaaatggggtccacacgtgtacactggcagctacagtaaatttaaaaatctgagcagcaatttgaaccatttcttggaaaaacaaacactgacaaacactgagttggtgcntggcgcggcccgcaggcttgggaggcnagnancgcatcatgggtgcagcnccgcantgtgggcctgcatccggggaatccagcaccanaggggaggtggccgggtgaccgnccacgcaggcatgagccaggcctggctgagagggggccgcagcnagcaggnccggatggcctcccgcgcctgcagggganatncaggaaatgggtgnagtgtgngggaanngnatgntgnnngaggagtntttgnagggtgganaggnttgggagtatntannagnaatgnaataaataagnaaatanaagnggagaaagaacaagnacaaacnccantggcacacaaggnccagcncggttnctgcgggcgtcanggntntacacagaacaggagtatccaagtaggcggctccggtgttcccgacgtgccaagggaggcggcgggtgggtgggacacgcctnangcccacgtctagcagcctcggggggcagtngcactgggcctggcagggtcccatcggcaggacccttccagctctgctgcgcggcggtgaggtggggatggcggacgggtctccagtngcaggtgggggcgagggccta

SEQ ID NO: 635654 - DNA, 164 bp, Homo sapiens
agcgtccatgtgtgtacacacaaattgctctgaatcccagtgtccatctgtgcaatagggcagtgtgcagtctttctgtcagggtcagcaacagacagcctcactcacccagccacacccagtcagaccccaaccagttgcaaaaaccactagatgaccagcac

SEQ ID NO: 635655 - DNA, 373 bp, Homo sapiens
aggagtagaaaactaacacttattttatatgtgacagatataccacaaggatataacatcagtgcaatataattcacaataatctatattacagctagttaatcagtttatgaattgttcccgtcagtcacattttttgtccctcataagttcattccttatgatttcaacctactctctatttctagctaccttgaagttaataatgattattagaagctttcctaaggagttctgaaatctttgtataccagaggccaatctatcatcacctctagtctgctctcatcaactgcccttgtttttttcagggagtattctctctgatgaaagtccgacaccaatgtagtcactatctcccatgtcaaatcta

SEQ ID NO: 635656 - DNA, 435 bp, Homo sapiens
  misc_feature (108)..(108): n is a, c, g, or t
  misc_feature (123)..(123): n is a, c, g, or t
  misc_feature (126)..(126): n is a, c, g, or t
  misc_feature (140)..(140): n is a, c, g, or t
  misc_feature (146)..(146): n is a, c, g, or t
ggagactgccttttgcaggtgcagagatcggccttgcagtttgcaataatgtctgaaccaatcagagtccttgtgactgagcagctggtcaaattgcatattcactgntgtacagtattgganatngatctgtctttggnaaagancagcccatcattcttgtgctgttggacatcacccccatgatgggtgttctggacggtgtcctgatggaactgcaagactgtgcccttccccttctgcaggatgtcattgcaacggacaaagaagagattgccttcaaagacctggatgtggctgtcctaagtgggctccatgccaagaagggaaggcatggagaggaaggacctacttgaaagccaatgttgaaaatcttcaaatcccagggcacagccttggagaaatacgccaagaaaatcagtttaaggtcattgt

SEQ ID NO: 635657 - DNA, 384 bp, Homo sapiens
  misc_feature (375)..(375): n is a, c, g, or t
gcgcaccgagcgggtcggcgccctaaggagcggcactttttaaaagtgcaccggagaccagcctaagccgctgcatctgtatcagcgcaggtctgccagtccagctgcggcgcccccagtccgcacccgttcggccaggctaagttagcctcaccatgccggtcaaaggaggcaccaagtgcatcaaatacctgctgttcggatttaacttcatcttctggcttgccgggattgctgtccttgccattggactatggctccgattcgactctcagaccaagagcatcttcgggcaggaaactagtattaataattccagcttcttcgacaggagtctatatttctgatcgggagccgggcgcccgtcagtgatgngctggtggg

SEQ ID NO: 635658 - DNA, 723 bp, Homo sapiens
gggacttgagcgagccagtgccggattattctatttcccgctccctctctcccgccccggtatctcttttcacaccttctcccaccctcgctcgcgtagccatgggggagccgtcggcggccatcagtcgcattccatcctccatcgtcgtccttcggagccgagccgtccgagcccggggagcagagagagagagccccaggagcctgacccctgaccatggggacgaagagctgctagtctccgtcctgctgcggtgcacagatgctgattctcatggacgacgatgtgaaggaacgagctggagattcgctgccatatcacagagccagaacccaacctgtcggttgaattccatggcgttggtaagtcaccctgagcagcgagtatcgacgtggtacatcgagaggtggtagctgtaacctcatcactggctcatatctcatctgatcaccactgcaagcttgtcagagatctgaccaagtccgatcatcccaagctggtacagcaaggtcagaaagaaggccatcgccattcaaagcctaccttggacgtagacgattactcatgtccatcagaagctttcacataattacatgaatgctagccatggtgcacatcaaaagggccctgaaacactcaatattcgactcattactggtagaacgatctgctgagtaccttgaagctggactgtctatcatgtggctgatgcccatatgt

SEQ ID NO: 635659 - DNA, 410 bp, Homo sapiens
  misc_feature (100)..(100): n is a, c, g, or t
acattttctttatccaatccacatgatggacactaggtgatccacgtatctgctatcgtgaatagtgctgtgattagcatacaagtggcatgtctctttngtgtaaattatttattgtcctttgggtatatacccagtcatgagattgccgggtcaaatggtagttccattttaaattcttggagaaatctccaaatggctttccacagtggctgaactagtccacattcctacgaacagtatataagtattcccttttctctgcagccttgccaacatctgttatttttggacttggtaataatagccattctgatgggtgtgagatggcatcttatggtggtttggatttgcatttctttgatgttgacataatcaccaaaaacgtaaacatttcagtagctattggt

SEQ ID NO: 635660 - DNA, 197 bp, Homo sapiens
acaacccgttgcagcgcacgctggtccacagcacgagctgcgggtccagcttgccggcttcttctcgtggttggggatcctgcagcggacacagtaggggtacgtgtacctcagcgtacgccttcagcttgtgccagctgctccttgtaaacgctgacaccacagtgcgaaacatgcccttccgcgtcttgaaggcc

SEQ ID NO: 635661 - DNA, 1698 bp, Homo sapiens
gctggtgcgggggcggcgagcccgggatcgagctaccgcggtccgagcgcgccggccaccgcctgcaccgccctttccgcccgccctccggacggccgcagccctgcgggtctccgcgtccagacccacccaacgagaccagcccgacgcgccttctgaacgacctcattccagagaaccacagaattgaccgcagccaggaaacgcaccgaacagacacggaaagaatcgaccgacacgaaacggaagaaacacacacgaacacaaagaattacagggcacgaccgagaacacccatccgcgcgacacagaggcacacaaaaccgaaacatagggaaacacggaggagcacaaaggacaaacgacccaggcagagacatccgagcacacacgaagacacacagatgagccaacgagaacgcaaaaagacacaagcggcagaagtagacagagaccacaggcacacaacacccgagacacaagcacaaagacaaagcaggacagaagcgagacacaggaacgaaaatacaacgggggcggggcagcaccgaccgcgccgcgaggcacccggccgcccggaacagcacggggacagggcgcgacagcgagcgacagccacgggccacggcgaccgacgcagcacacacaaccggggaagcagcagacagaagccgacgaagagagacgcgaagcggagcagaagcgcgacggagagggccacagagagggagaagacaaccgcagagcagcgcaagcgacggacctgagcgagcagggggacagaacgaagcacgcggaacaagcaggcgaccgcacagcgaagacaaaagaagagcaaaaccagacgccgcacccggaaacacgacaggcgaaggacgacaagaaacacaccagagcagacaagcgagatgccagaccgagacacaatgacaaccgacacaccgacacgacgagaccaggcccgcgggcgcgacagcgaagagagggcggccaggcacgagccacagacaagaaggagccgaagcgaggagcacgacgcagcagcggacgaagaagcgacgagggagtcaccacacgagcggcgcacggagaggacaagcacgcaccggcgagcgagacggaggcggagaaggcgagggcgccaaaggaacgaggcgacggaccagcggcgcacagacgcggcgaacgagcgcggagagagacagcagcggcaggcggcgagaggaaggcgcgggacagaacgagctggacgcacgatgaccgaacaggagcacggacacggcgcacagagcgccgcacacacaccacagacggccgagagcaggcaggctcagcgcaagcgacagtccaaggcagacatcgaagatagccacaccgcccgcgctgccaccgctccacccgagctccgcgccgaccaggagggagagaagagaacgccacgaaccgccaccacgctcgacgccgacgcggaagccgagccgatcggggagcaccatatgagacgactacgccgaccgcccgcagcccgcgcacaacgggggagacggagagtggcgaacaggacgacacgcgaggaaggacagagagacgacagagagcgccgcgagctacgaggcgcgactagcgacggcaagcagcgccacgcgaggcgcctctaggaggagccgagcgggcgcacgaagagaccgagacagagac

SEQ ID NO: 635662 - DNA, 1306 bp, Homo sapiens
atcgggacaacaaggccgacctagtcagataaaagagcacgtacgattgtccaggacagcacagtccctcatggcgagacatgtacaactcaggtttttattgattcgatggcagcagcatccgctcatcaagcatcgaatgactgctgaaatgcaaatattctactggcccaattatggtctgccatatcatgtgccccaagcacatgcaaccgacaaaagtcccagtgagcaacattctgtgcagaggcaagcacggaggatacgacccttaaccgagaccacaacactaaatcaaaccagggaactcagtgcttgctacgtacactaagacctgtctagatttgagatctagtctgggaactatgctcttttctggctttccttatacattgtttaactataccaattggcaaatttggcagacagtattgatagcccagtcctcgcgagatagtgcaacgtatccccaaaagcaagaggacgttactgagtagcagatcacaagttgacgtaacatagcaggagagttaatgcttatacgctggtattcgtaggcctttaagttgttcgcaagttaagcaatggcactggcgttccccgtccgttgacttacatggtttcaacgcgaattcaggcgaaacacacacttgagtaaactaattgtggaacaaatgtgctttcctccatcacgcgacacgcggtctcacgcgcgcgggcacaactacaatatttccttcaatccaacctaagggcaacattataaggcaacccacatggaagtggtccttggggtgtccccctagacaaccaaagatgtagaagaccaaggcgcccgatctatcgttcgccaaacaactctcggagttttaccaaggaactaacgctacgaacccccttggttaggacaacatacaaatacgaaacaacatttttcgggagacattgtttacccataaagacaataattcgtaggcaggaggcacttttcatctgccacaacaaaaatcgccatctatcacatcttcgggcatctacataacagcacaaaccgggggaaagggatactttgcccgtaacacacggcatataagactgtcaaactagctacggtcgacaatgacaagggctcccactattacgctatcatttgcccaagcggcgaccaaacaaagatttgaccttcccagatatgctgcctacccccacctgtggttatgccccgatgggcttcatttctctgaaacacacacttgttcataaccgatcatttccccaacgaaattggcatcgaacctcaccacat

SEQ ID NO: 635663 - DNA, 245 bp, Homo sapiens
  misc_feature (168)..(168): n is a, c, g, or t
  misc_feature (178)..(178): n is a, c, g, or t
tgaactcgtgccgaacttgatgatgaccggcatgccgatgcccaaccgaagcgtcgctgtagagcatctcgacgacgttgacggcgccatcgatgctcttgatgtttttggtcaccgtcgttgtcgagccagcatgggggtcggtattcgagagaggtcgcagcgacngtgtaagagngtcttgagactccaaggtttcgacgggggcacactgcggtccttgaaaatgccgtgacttcgctgcc

SEQ ID NO: 635664 - DNA, 1008 bp, Homo sapiens
gttctgactccactgcaaagctgaagcggatcctgccctgccatgcctacgtgaaccaaggtcgagaacctggagaccgattcagtggctggcagaagctgatcatgcagtctgatcccgcagcagctgctgaccaccctgggcccctgttccggaactcccagttgggacagttccacttcaccaacaagagactgcggacatcgtctcatataggggctcgtgccggctatcgatgggcttacggcttcgtgggctgtcatggcatgttcccactcatcgatctccccctgtgagtgtgcgcgatgctcatgctcctggtattcttcctacataagcaagatctttatgggcctcatcccctactaccagagcggcttcttcagtgccatcccggtaggtttatcaccacccgctaagcaggcagttgtggacctggttggtgtcaactcagtgcccagtccagatctgtcgaacaaaccaagtattctgggcgatggaagtggtgtcatggagtggtcgaggaagcgcaaggtctgaggaccaacagtacggtccaagaggtgttgccctcccacgtctacttgaaccaggtgatagatcctgatgaccgagcttgtggcccaaggaagttgtacatgcagctcatcccgcagcagctgtgaatcaccctagtgccggtgttcaggaacttgcgcccttgccaggttacacttcgaccgacggaccgttgtgatactgaaagctttcctgatatgtacactgtctccgatgcgtcattcctacgagcattgtaagcagggtgtaatgcctgcgtctaggacggaatatttttgctctccccatgcggggagttgtaaaggacgggggtgtcacaagacgggttcatgaatgcgcgccatcaagggggtgtcccgggcctaggagtagggcgcaatgaagaagcgctaagaaggagttgccccccttgaaaacgtgtgtgtctgctttgtctcaaggaacataaag

SEQ ID NO: 635665 - DNA, 154 bp, Homo sapiens
attggatgcatttggatcttgttgttgactggactatgagccaaaaggaaattacgcaggcctttcctagtatctacaactgattgtacttatgcattttgtaccagtggacctttttatactggagattaaaaaaaaaatggacatttctgtg

SEQ ID NO: 635666 - DNA, 1410 bp, Homo sapiens
gtggcgaggccgcgtcgctcagttctggccgtctagtgtgcccctgtaaggatgagagcgcagaggacgcagtggccgctggagtgcgcagtgtaactgaagctagtgtgtgcggttgtggacctgcgtgctgagctttttcctgtggaccctgtgtgtgcttgaactggatgagtgactggagacgaagcctgatgcctgctggctcctagcggcaggcgccgatgctctgagctgtagctgccagtgcgaggatgtgtgtgagcgcatggctggcgcggggtaaatgagaggtctcgggccccaaggaccacactggtggcccggggatgaagtaaggcgagggacagggacgcaggggggcacaagaagcacgaccgatgacgggggccgaagagcagaacggacagaacgggccggcaccaggacaccagttccaggtgcaagaaagcaaggatgagtcacattaaccagaaagcaccggaggcggacatgcggacgaacactgggacccatgggaaggaaacaatcgaagggtacacaggcaatcaaaaaagcaagaggggaaagggatgcgtaaaagtccatgaaagggcagcgggtgggatggaacggcacgtggaagggactagagaaacgctaacatgggagaggcaaagcaaaaggggagcaggaacaaaaacgcgaacagaaccgaagaatggacccccatccggtacgccgaaacgcagatctggagttggggagaggacgagcaaacacgcagcagaccgtgaggtagcccaggagcgaggagccggcggggatgggagatggacccaaaccgccgtacatagcaggagaacgggtgggcggagacagagaaaagaggacaaccaaaggggtgtataggagagaatataagatgaggaaccaggaagggacagcgacagcagccagagcggaggacaaaagatgagagacgggagggaaacccgggcgacgggggatgaaacaaagcaagaaagtaagacgcggaaccgatcaggaaagtggagaaaaaaggccagacgacatggggggccacacggggaaagatggagggccggacgggcacagggcggagcagcggagccagagagagacagaacgaagtagtgcagacaacgaggaaggagagcgcaggagattagaccagcgtagccgcgcacgatagcgtaaggcaggacgtagcgagacacaaggcgagaggaggaggcagagtaggcacgagcgcgggggaagatcaacgaaggagagcgacgaacggagggtgacaagcgcagaagggagaagaggggaggggggggcacggagaaggagtaaagaggagagagtgagagagagcaaagaagaagccagagactagctttgaggcgaagcagacggcag

SEQ ID NO: 635667 - DNA, 548 bp, Homo sapiens
  misc_feature (317)..(317): n is a, c, g, or t
  misc_feature (515)..(515): n is a, c, g, or t
  misc_feature (539)..(539): n is a, c, g, or t
taccattgttgtgaagcagaagtccatatatgtgtgggtctatttctagatactgttccattgatctgtttgtctgtcttgatgccattaaggcactgctttattattatagttatctaataagtgttgaaatctaataagtgttgaagtcatatagtgttagttctctaactttgttctttgtcgaggtgttttggccattagaggtcctttgcatttccatatgaattttagaatcagtttttcactttctacaaaacacctcctgggagtttgattgggattgcattgaatataatgaccaatttatggagaantgacaaatatacagagtcttttgacccatggacatggtagagctccccatttatttagatatttattaatttccttcagcaatgttttgtaatttttactgtgcagatctttcacacttttcctcagatgcatctaaaaatttcatctttttcatgtataaatacttaataacttatgatacttgtaataataaacantaaatttccagtttttgctgaaanaaaaaaaaa

SEQ ID NO: 635668 - DNA, 853 bp, Homo sapiens
  misc_feature (195)..(195): n is a, c, g, or t
  misc_feature (199)..(199): n is a, c, g, or t
  misc_feature (378)..(378): n is a, c, g, or t
  misc_feature (399)..(399): n is a, c, g, or t
  misc_feature (425)..(425): n is a, c, g, or t
  misc_feature (428)..(430): n is a, c, g, or t
  misc_feature (432)..(432): n is a, c, g, or t
  misc_feature (760)..(760): n is a, c, g, or t
  misc_feature (849)..(849): n is a, c, g, or t
tgtcttacggtacgatgttctttctttgcaatacttttaatatttaaaccttttgagtattatacctatattaatttgttttttcttcattttttaaaatgaggaaggcagttcttaaagtatattccacatgatttactgaggaagaaaaaattccatggttaaaaaagtttagaagaggtgtacatattgtcncccncttggagagtcatttggcacattgtgagggttctgagaagtcctacaattaaaaaggaaggtaggaggggaggagaagagagacttctttacctttattcgacttaatttacctgaatttgactttaatttacctgaattcgacttcttttttttttgataacaaaaacatttgtattnggggaattgctttcttaacanacctttgtttttggattagatataanaannnanacacataaccaaaatggaaaaatcctttccccctttttttgagacggagttccatcccggtcgcccaggctggagtgcggtggcgcgatctctgctcactgcaagctccgcctcctcggttcagcgattctcctgcctcagcctcccaagtagctgggattacaggtgcatgccaccacgcccggctcatttttgtatttttagtagagacaaggtctcaccatgttagccaggcaggtctcgaactcctggcctcaagtgatatgcctgccttggcctcccgaagtgctgggattacaggcgtgcggcactgtgcttggcctatatnactgatatttaaacattgattgaaacaagatgaaaatatggagaaacttagtacatttctttatctttttgtttaaaatgtagcataanaatc

SEQ ID NO: 635669 - DNA, 1219 bp, Homo sapiens
agcggactcgcgccgtgggggagtatctgtcctgtcgccttcgcccacgccctgcactccggtgaccagtcccttgtcgcgctcctgtggtctgcatccttgtgccctgcggggctgtgctggctgctgcttgctcttcgtggctgcttgggtgttgctcggtcgccgtccccggatggtggttgtcgatttatcctgatgtcccttcctgaccaattgatatacaaggatagagcccatctgcaactccctcgagagatagatccctaggtggctggtgagcgattgcacgttttgcatcgtgtagggagatagtctggtagttgtgagtcggacgtaaccactgtatcgtagctcctacttgaagacaagccgtacaccgcaagcgcctaagagctcgtatgcctcgaagatccaagaactcgctacctaactctatgtgttcgctccgagtatatgcgtcttgtctagaattgccttgaccttgccggaaattggcgcgcttaccaggggtggagatacggaaacaagggtagtgcaagatgtatgagttgtgatggtcaggacgcatcgaagtggatagagcacagggggaataagatgggccagagtctggcttgccagtgcggcttggtcgcgcccagagggaaatttggtagcgcggcggctttgtcaggcttgtgtccgagaccggagttgggcttagcgaatagcctattcttccttacgcgtttcaattttgcgttttatcccatgatacataagaagaaaaggctaattggcgtttcctaaatgccataaaatttgcattgaatacaaccgggggggcacgtggttgtgagcgcaatttggttaggaagggtccatctccggggagacattttggcccaagagcagtccacgtagggccccgaagactttgttttctcgagggctggttaacgtaccatcttctgacgcaggaaatcgctttagtcaagaggcaattcggatccgggcgaggacaaaacaaaggccgcccaagcggccggtttgggggcgcaggccaaagcggtggttaagaagacaagtagtggcccctgtaggggcctcccttccccctgtgtacacgggggactaactcgttgaccttggatgaaggccagacagcgcatttggaacggtcccctgcttgtttcaaccggtcggtgaaatttccttatggggtttatagaagttg

SEQ ID NO: 635670 - DNA, 970 bp, Homo sapiens
gctcctgcgtactgacgggtttagataggtggtgcgtgcctagtcccaactgtccccctctctgtctcgcttacctggtagatacccaaagcctgtgtgagctacagttgatggagagtgagcagtttgagatgcggagtaccacgattgtgatactgggcttcgcgtggaatctcggagcatcagtttggcacgagtctagctacagtaggatgtccttgatcgagacttctaggtatcagatcatatgcaagcgaaatacgctcagtggaatgctcgactatagccgccaacagattggcctattcgtctactgttcgtatgttgacaggggacgatgaagtgctgacttacgttggacaaagcatgggggtatctagtgactagccagacatcgaatgagacagcaccattgtatgctagcgtctgctgatagcaaaggcttggcacacggtggttgcacttactggctgatgtggtatctgccagtcccggctaacagcatgattgacgtcgcagatgatcagcgcgatggcggtccagttgtgagactggaggacctgaagctgcgtgctgatccagagccagtactcaagcgagatgattcatgaagcggcttaccagggagaacacagtaggcctccagcgtttctgacccacagaaaacgtagcaaggatcaaccgagaggtgcctgcattcctatctgaggaactactacactcccgaccggatggtgctggccggtcgtgggcgtggagcacgagccatctggtggactgtgccggaagtacctactgggggtccagccgggctggagggagcgcagaggccgtggcatattggccagatcttgtggccccagtccactggcgggatagccaacgctatgaaacgagaattgtcccatctccagcctgggccgaaccccattcccggactcaagcaccatcacatgagacacctgaaaag

SEQ ID NO: 635671 - DNA, 606 bp, Homo sapiens
cacagaccagttctcaccctatgcgcactactaatctaacttactgtctctatggacttgcctattctggtcctttcttataaatggaacgacgcaacatgcagcccatagttttctggctgctttcactgagcataatattttcaagattcacccatgttgtaacacatatcagtgcttcattcctttttatggctgaataatactccattgcatggacagaccatatttgtcttatctgttcatcactgacagacatttgggtttgttccatttttgggctgtcatgaataatgctgtcagcatgtatgtatgtacgcggtttccttagtttttatctaatgtcattttcctgttccaggatccccttcaagataccacattatgtttagctgtcatgtttctaggctcccttggctgtgacatttctcaggttttcattgtttttactgaccttgacagttttgagttctggtcaagtatttcatgaaaactccctcaattatggtttatctgatgttttcctcatgattaagctgggttatgtatttctgggaggaagaccagagaggtaaagtgccaccgtcatcacatcatgtcaggagt

SEQ ID NO: 635672 - DNA, 318 bp, Homo sapiens
  misc_feature (285)..(285): n is a, c, g, or t
gcgctgtactgcattatcacattcaaatcacacctactatattttcgctgcttaatgatactttcaatctttgcaattctgattatctctacatagctgcttctaattatcactaattcactttcaccacccctactcacctatttactgtttctttctcctaacacattttttaaaatggtgttagggctatgcgactaaatacagattcatttagataagctattatgtccaatcatcgaatggcttagcattattcattttcttctttgaacatcttacttnatgtgttttactatgtgctactggcccattgtg

SEQ ID NO: 635673 - DNA, 492 bp, Homo sapiens
acgacggcagtgtatcgtcttctcggtcatatctcgattgcccgaggtgtaatgcccgtccgtgtgtcccctttcgatggtcttctggctatccattgtcaccttggatggagccgactctggtgacgtgagtcatgatcctggtccctgcgtcgggtggtgttaactagagaattccgactgtgctccctgggactaacggaatagaacatagctgtgtggctgacttggagggctaacctgggagcactgaggccgtgatgagggacacacatagatccccttacagagggctcaccctggtggcatgggaacccactggcaatagctctgaacttctggcagagagaacctcaggccactgcgggatgggggctcccttttctaggccaaggcaggaagagcatggctgacatttcgcccacgagcaccaacagcctggacaacctgttctcacctctgggcatgggccatcggggtccgagctcgaat

SEQ ID NO: 635674 - DNA, 279 bp, Homo sapiens
tatcgcccaacacaagaaagcaagtacatgaatgtttttggttcccaatgcatataaaagtatgtttacactatactgtagaccagcaagagtgcaatagcattgtctaataaaacaatatacatacctaaatttaaaaatactttattgctaaaaaatgctgattatcaatctgagccttcggcgagtcgtactctttttgctggtggagggtcttgcctcgaggttgatggttgctgactggtcagggtggtggctgctgagtgttggggataacat

SEQ ID NO: 635675 - DNA, 238 bp, Homo sapiens
tgggccacaccagcctatgctatagagctaaagttctcatttgatcgacttaattttcacttaacttttaagcagccacatgtgactagctggctaccatttggaaagtgtagttctagccttgaccactaatacacaagatggcatattttttttttgtgacaaaatttggctcttgtctacctaggctgaattgcagtgcctcatccttagcttcttcctgccctagacaaggagt

SEQ ID NO: 635676 - DNA, 888 bp, Homo sapiens
  misc_feature (530)..(530): n is a, c, g, or t
gcccggggggcaatcctgccgtgcttatgaggacggggtcggaatagggtggcgcggagtggtcggacgcccgcagtgtgtgtgcaagggccttgggagtgatgtacagtagccaaagtgcgtccaatccagcgaatgagtggttaggttgtgacatcacacagcagcgggggactaatatcccagggacgtccctgggtgcaagccccatcgcatcatttggtacacagacgccagtacatttgatggcataagcagggtgagttgatgaagggagaccattgtgaagtaagtctagaagcgagtacccgtcgcttgttcctgggggatgtcccaatcgcacaagtaacggcggatgcatggaccgggaagctggggcgagagatcattgggggtctgggtccatgacatacctgatcctcttaggaatggtccaccatgatgtggtgtccgcttaggaagaaacattggttctgcgtgccaaagcaagaatgaagctaaaaccgatggtatgcaacaggattcgcttngaacggtgttgaaggggtcgtccgttggaagcttccaggtggcttcacaaattcttggcacgatgcttgccatggatagaattcaacctacgttataagaagtgggggttttgggcgtacacggtgaaaggatttgctcgtctctgcttatagactttagcctatagatatgattttccccgtcgtacataacgcgctgttcccggttcccacagcgttccggccatttggacattcatggagggtctccccaataggtgtgggccggaggggggatgaaccatggctaaggtgcgagcaccgaatgctccaagtgagtccgaaaggtggagcaacaaacctcgcagggccacgcagt

SEQ ID NO: 635677 - DNA, 344 bp, Homo sapiens
acggatcccggcactctagtccagttactggttgaacattgtttgttggtgtatatattgtaattgagattgctcgggggcaatcaggttcatgtgcattcaggcagtcaggtttcaggcatgcagtgggcaagcaagcaaagcagcaggcaagtaaagtttcaattcatgcctttttgggttgaggtgcatgcatggcaggtggcaggtttggtgctgtgcaaattgttttcaggtcacatagcttttctagtcaggttcaggtctaggaggagtaggggcaggttttggctcgtaagcaaggcctagatatgggcattgtgcggtgtgtggactagcagtgg

SEQ ID NO: 635678 - DNA, 873 bp, Homo sapiens
  misc_feature (592)..(592): n is a, c, g, or t
  misc_feature (601)..(601): n is a, c, g, or t
  misc_feature (611)..(611): n is a, c, g, or t
  misc_feature (679)..(681): n is a, c, g, or t
  misc_feature (684)..(684): n is a, c, g, or t
  misc_feature (689)..(690): n is a, c, g, or t
  misc_feature (692)..(693): n is a, c, g, or t
  misc_feature (696)..(698): n is a, c, g, or t
ggagattccggactggagctcccatggccgagcagaccttgggacctgtgagcgctgcatccaatgtaacgcatgggaagggtcagcaccagccaccagccccattaggtgaggactctgcctggggctctgctgatggttccgaatcatggagctgcagatgagctccttccatgcctggagacgttcttggtgaaaggcgtgtggtctatactccagccgtgctcttcgctgcgacattgtacttccatgaggggtgcctgcccccgctgactcacggagctcctggtgctgcagccggcacgaatggggaggtgggccctctgatgtggccttatcgtggaaggcggtgttgaccctggggctggtgcttctctagctacgtgcttcgtccatcgagcatcaccttactacaaactaagtgagctgagcaaagagacttccatttacccccgtcttcatgacgatgctgcacctggccgtgatcttcctcttctccgtcctgtccagggcgctggttcaggtgctccagccacagggcccgtgtggtgctgagctgggccgactacctcagaagagtggctcccacagntctggcganggcgcttgangtgggcttgtccaactggagcttcctgtatgtcaccgtctcgctgtacacaatgaccaaatcctcacnnnccncttcnncnngannntctctctgatcttcaagctggaggagctgcgcgcggcactggtcctggtggtcctcctcatcgacgggggtctcttcatgttcacctacaagtccacacagttcaaccgtggagggcttcgccttgcgtgctggggggcctcgttcatcggtggcattcgctggaccttcaccac

SEQ ID NO: 635679 - DNA, 542 bp, Homo sapiens
  misc_feature (105)..(105): n is a, c, g, or t
  misc_feature (117)..(117): n is a, c, g, or t
  misc_feature (168)..(168): n is a, c, g, or t
  misc_feature (187)..(187): n is a, c, g, or t
  misc_feature (263)..(263): n is a, c, g, or t
  misc_feature (354)..(354): n is a, c, g, or t
  misc_feature (358)..(358): n is a, c, g, or t
  misc_feature (365)..(365): n is a, c, g, or t
  misc_feature (388)..(388): n is a, c, g, or t
  misc_feature (441)..(441): n is a, c, g, or t
  misc_feature (519)..(519): n is a, c, g, or t
tttttttctttccacctccttcctgatctgaatttcttggcggtgatgggctcggtgttgggcttttggcctttttgaccggtacagctggtgaccagtttgtanacggtgactganactggacgggggatggaggtgctgggggctttttagctgctggctcagganacccggagacagatcgggnggatgagacccttcttacagactgtgggcttggggaagcagccttttttatctttttaggttccggagtcctgganactctcctaatgggcctagtacttggagacggggactgccttctttggggtgatgacgacgctcctcttccaacgggttggaggacttgangaangtctgangaactcccaagcccgtggttganggcgaaatgcccgtttgtttggttgttggttgatccgggcctccccgggtttnaaccggcttggggaaaaaaccctttccctatgccttggaatgaataatgaaaggttgaaacgtctccttgggttgaantggggaaacttcctttttgtttc

SEQ ID NO: 635680 - DNA, 214 bp, Homo sapiens
taatcttgtagattgacctttccatggtgtgttgtttgtgaaccaaaagtaagattgagtaccaacatagcatggtgagagcgtgtggattgtcctgattaagaggcaggagtggaacttgggacaagggagctgggttagtcccgaatccaggaattggtagtccgtggattggtaatcaatcatctaggctctctgaggtctggtcctggcc

SEQ ID NO: 635681 - DNA, 155 bp, Homo sapiens
agctcgatagtcttgaaaagcatgctagtgaggttatcgtaactgttccgtggtagctttgaaagaagcccttccttacctggtgtgtagtgctataaatcttcataggtggtaggatgctctctctctctctctctaagtgtttgaaaaataaa

SEQ ID NO: 635682 - DNA, 219 bp, Homo sapiens
  misc_feature (1)..(1): n is a, c, g, or t
  misc_feature (16)..(16): n is a, c, g, or t
nattacaggtacccgncaccatacccttaagaaccatagacctacaaaagctttatcttccctagcagcatgaggggctgttttcttaacataaaacccgctccagactcctggaaggtgtgtggtgcctctgtatcgcacaaagtacaaatacaaaacacatgttcagtaaaaagaccctggcttaaaattaaaaaaatgcatggattcgatatagaa

SEQ ID NO: 635683 - DNA, 438 bp, Homo sapiens
  misc_feature (310)..(310): n is a, c, g, or t
  misc_feature (318)..(318): n is a, c, g, or t
  misc_feature (326)..(326): n is a, c, g, or t
  misc_feature (343)..(343): n is a, c, g, or t
  misc_feature (434)..(434): n is a, c, g, or t
gtaactacagtattaaatgactcaaaactacaatcctatgataaggtaaataataagagtagttactggtatttgatcccaataatcatgaaagtgacagcacccattaaaggatctgctgaaggcctgagccaaaacaaaaatgaagacaagcactgttttaaactcagtatcacattgtataaaacaggagactaacaccttccaaagcatggaaagtataagcaacattaacaataaaatccttaagtaacacagaaggactgttcagagaagtgaataaatggacaacagaataaatggacaacanaaaaggtnagggctanaaagaaatatgactaanatatgatggattgccaggtagacagctatgctttaacagacgaagataattcacaaggtagttccctttaaatatttgacttatcaccagnaaac

SEQ ID NO: 635684 - DNA, 446 bp, Homo sapiens
atgcactttcagctcactgcaaccttcggctcccgggctcaagcgattctcctgcctcagcttcccggagtagctgggatcaacaggcatccgccgccatgcccagataatttttgtattgttagcagagatgaggttttgccatattggccaggttggactcaaactcccggcctcaagtgatccgcccacctcagcctcccaaagtgatggggagactgcttgaacctagaagtttgatcattctgggcaacatggtgaaaccccatctctattaaaaaaaaaaatacgaaaaactcgccaggcgtgatggtgcacacctgtggtcccagttactcaggtggttgggatgggaggatcactcgagcccaggaggtcaaggctgcagggagccgagatcgcgccaccgcactccagcctgattgacagagcaagaccctgtctca

SEQ ID NO: 635685 - DNA, 365 bp, Homo sapiens
ccaccatgcctggccgagttcaacttttttagattccacatgtaagtgagatcatgtggtatttgtcgttctgtgcctggcttatttcacttaacataatatcctccaggctcatccatgttgtctcaaatggcaggatttccttctttttgaaggctgaatagtattccattgtgtacatacaccacattgttgctggaagtttaatggaggccagttgggggaggatggggagaagattcactctaagtctagatgctccagtacccacccaggatgtgtgcaaggaagtgcaggatgctcctggtcttgcaaactgtggtttgtgggactccaaagcccctatccttccacgatgctttctg

SEQ ID NO: 635686 - DNA, 393 bp, Homo sapiens
cagccatgagaaatcataggttctccacatgccccggtgacctggggtagaggtgaccctgacgatgaaagtggccagttggtagcacaggcgaccagaaggttcagatttcatactacggacccaagactccaccagtcatagctctactctatctcaccgaggtggtaatctccttgtgcgcagacatcacccgcaccggcaaagtgaagccaaccagagctgtgaaagatcagaggacctggacctggggcccttgtggacagggtgccatcctgctggtgaactgtgacagagacaatctcgaatcttctgccatggactgcgaggatgatgaggtgcttgacagcgaagacccttgcaggacattgtcgctgattaccctgagcacga

SEQ ID NO: 635687 - DNA, 281 bp, Homo sapiens
tccatagagagacgagtctcatgatgttagcccaggctggtctcaaactccttaccctcaaaagatcttcctgctgcttgagcttgggaggttgaggctgcagtgagccatgactgtattactgtactccatcctggtcaacagagtgagaccctgaaaaaaaaaaaaaagttcttcctactttggcctcccaaagcattgagtatcaaggttgtgacgccatggtgtctgggcccttgattcttttggtcagtgcttaagtccgggtaagggatcgctgg

SEQ ID NO: 635688 - DNA, 370 bp, Homo sapiens
tccttcgttacccgggcgcttctggattctcagttcagctaccagcacgccattgaagagtctgtcgtcctcatttatgatcccataaaaactgcccaaggatctctctcgctgaagggtacagactgactcctaaactgatggaagtttgtaaagagaaggacttttccccctgaagcattgaaaaaggcaagcatcaccctttgagcacatgtttgaagaagtgccgattgtaattaaaaactcacatctgatcaatgtccttatgtgggaacttgagaagaagtcagctgtggcggataagcacgaattgctcagtcttgctagcagcaatcatctggggaagagcctccagctgctgatggaccgg

SEQ ID NO: 635689 - DNA, 557 bp, Homo sapiens
  misc_feature (439)..(439): n is a, c, g, or t
ccacaattgtcagggaaagggagaaaaaaaaaaaaaaaactaccacgtggcattatacaaagccaagatttcacaacatttttgaaaattccaaatgacttacatgtttacaaggaccaaaaactttttgatattttaaaataagctttatcctttttaaccaccatgcagcatgctgtgccatcatgatggaagcctgatggctaatgtgaaataatgttggcatgtcatttaaaaggttaacagacatgaaaattgggaagtttaatattgtttaatacaaataaaattgtttttgaaagaaaggcatctgtgttgagcgtggcttgcttgaaaacttctcctgtctatcatctctgaacattattttgctcctcttgactttactcaaggggcctaatcctacagtgattcagggaggtttgagaaagcaggactnatgagactaaaaattaggaaactacataatcctgccaagcaatgggacacctctaaggctaccacctcacctaaaacttcattgaatcagaaaattagctgaactttccacaccagtc

SEQ ID NO: 635690 - DNA, 414 bp, Homo sapiens
  misc_feature (16)..(16): n is a, c, g, or t
gtacggccgggcctgnccatggcgctgagcgggtcccccaagccctgggggcagctgtccatttcctccatgggggtagtgggcccccccgaggacaaccgcagccccagggcccccttttttgagtttctcccccaggagctagccctggggcagggccggaaacttatccgctttttccccttggggtcctggccgattggcaaaataggggcggtcatggcttttttatgattgggcccggaggggtcccgggcatctgtgaactggctgctttttccagagaggtctcttggcagagggaggggctggggataaccagctttgggttttcccgcaggcccccttcctgtggtcccataatcctttttttcatcctcctatgaaataaatgaaaagagcttcctcattcca

SEQ ID NO: 635691 - DNA, 471 bp, Homo sapiens
  misc_feature (130)..(130): n is a, c, g, or t
tttttggcggccccccgttttttccctttagtttttttgtccggtttttagacaccaggtttgtctttgaactgggatggggcttcgtaaacagcccatgaatgaaattgggggccccttccctagactnctaaaagtttttggtccgttgttcaaatcccggggtcccttttgggacagaatgaaaaagcccctgccccttttgggttggatacatgtattttttataaaatatgttgagaatccccccccagtttttaattgtgaaaggagaaaattttccaatttctgcctggatgctgtttgtggttcccctgtttagcccccgttttttggctcgtccgtagcaggcccacccccccctggggatttttaatcttttccagcttaatttgaacgggttcctttatttctgtgatatcctttccccccttttttgttttgttaaataaaaaccccgctggggcccca

SEQ ID NO: 635692 - DNA, 265 bp, Homo sapiens
tatatgcgccatctacatctgactatactgcgtctgttctcatactgatgccctactatgcactggatattccgtgaccctaattcattgttcactcatatgaaactgtaaagagtgggggacatccacatgaaagatataaattattacttggagatgcaaataacttatagagcactctcctcccacattgtcaagagcttggtgtattctcattcatgatcgttctgcttcaaatccagagatgagactgagaagttttagt

SEQ ID NO: 635693 - DNA, 559 bp, Homo sapiens
ccagtagatgtgttggccactctgaggccagaggttcatcagcgtgatctggaagcccgacgggggcccctggtatgaaactggaagagcataggggaagagaagacaagaacgaggtaagaagacgagtaagacatccgagtgcacgagagtggagccggagccacgtggagtgcaggggcggcccgtctatctgttgttgatgctgtggagagccggtaccatcactcctcttcctccttgtcatccttcatgccttacaaggctctggcgagcaaagtcctcaattacaatgtcgtcatcacttggtgggagagacaagtaaaatgtggtgtgtgtgcaggggcctgggagagtcggcttatccagaggccctgacagatgtgactcagagttatggctctgggtgcggggagaagcagcctctctgagttctctggcctctgtggtgctgaccatgagcagaaaggcctgtatggctggcactatgtggatgccacctgtggcggtgggggacagtcactagtccgtagtggcccggggttccgagctcgacttc

SEQ ID NO: 635694 - DNA, 169 bp, Homo sapiens
gggggttttttttttttcccggggggggccggggcaggggggcccttttgttccccttttgggggggcccgggccccccctttgccccccctttttctcccctgtttttgtgggggccctccaacctttgccttttggggtttttaaaaggggccccccccccccccca

SEQ ID NO: 635695 - DNA, 131 bp, Homo sapiens
tacaggactctaggtggtgtggtaggggcgagtgggatcgcctcaggaagacggtgagtgtggctgtgaagtgcctgaagcccgatgtctgagccagccagaagccatggacgacttcatcctgggagggt

SEQ ID NO: 635696 - DNA, 166 bp, Homo sapiens
  misc_feature (24)..(24): n is a, c, g, or t
ttgatacggggcagagctcacagntaatgctctgtgcagtggggctggagctcacacatgtaatgctctggcagggtggctggagctcacacatgtaattgcttgtctgggcttgcgtgggcttgtcggggcttagtcgggggggggtacctgagctcgaaattcg

SEQ ID NO: 635697 - DNA, 450 bp, Homo sapiens
  misc_feature (44)..(44): n is a, c, g, or t
  misc_feature (54)..(54): n is a, c, g, or t
  misc_feature (91)..(91): n is a, c, g, or t
  misc_feature (299)..(299): n is a, c, g, or t
attgttaaaaaaaaatgttttgcatgcctgtttctagtgttacnctgtaatccncatcaaagctgagctggtgtccttccatcttcaaacncctcaggggcctcgagcaatgcctggaatgtgcttgttaataagtatttgttgagtgaatttgcgagcgcacaaagactcgtgcagttagaaaacacgttttaccaagatagagagttgcctggtggcttccaggattttttttctctctctagaaagcattatataatctctttgaatgtaatattatttaaattttaaaaataacncaagtttaatatagatcttcataaatgattgcaaaagatagcagaagctttgtgatctttcaaatgataatagagttcaagataaatatttgcactatttccatagtgaatgctatgaggaaatgtacagcaataaattttgatgctttca

SEQ ID NO: 635698 - DNA, 575 bp, Homo sapiens
cgccctctccattataccggagaatgcaagtgtcccgcatctcaagattaaactgagcctcggttttactgacgtaaccagtaaccctatctacttctcacactgcggaggccggcagggcagcggctgccgccaagcacaccactcatcagagcctgccccgttccacccccgcgtttcagtcatgctttccagaaatggggtcactcactcagtaactattacacacacgcagcctatcatcctgtaatcccctaaagtccgctgcggggagagaaggcagcaaaaagtcaagaaggaagaatcacagacgcgccaccatcaggaattgattttccactccggagaggagcggtgataccttggaacgggtcttgtctggattattttcgcagaccccgagttgttctgggataggggcggttcaggaaagctcggtgtagtgatgcgcccggggaaattctgttttgccctgtttgggtatattgtttgggttttgggcactaggatgggtgactcagggacggtcaccagatcccgggcgaggaaaaccagaaagccttttacggcggccg

SEQ ID NO: 635699 - DNA, 164 bp, Homo sapiens
cgatgcggccacgcgtcgcctgggcgctgctggtgccgcggccctggggcttggggccgcggggtgcgcggcgcggtggcccttgccgacttctacccgttgcggccgagcgcgcgacgccgtcacccccaagcaggacgacggcggctcggggctgcgggcgc

SEQ ID NO: 635700 - DNA, 150 bp, Homo sapiens
gctctgaggatcccggaagatgtgggcggcgtgatggctatgtctgtatcccacactttggtaggctaaggtgggcggactcacttgagtcaggagttcaagaccagcctaagcacgtggctataccctgtctctactagccatgcaatt

SEQ ID NO: 635701 - DNA, 215 bp, Homo sapiens
tagcagagaactttaaaaaataaaaatatcaagtcacgattactttttttacattaattcaaatgtccaaagcacagtacagtagggtctatttaatagttcacataatttaagatttacatatacacttagcacttgtaaccaatattagttggctagaacagggatttaggaagttactcagacatttggctattgaaacttctaaaactagg

SEQ ID NO: 635702 - DNA, 249 bp, Homo sapiens
tctaatctatcagcaataccggtggtaatattacgttatcgttggttttatagtagttatattggatttttaaaaatacttatgaacatatgatctaatacaatttcaatgtcttctgaggattttatacataaactgctataggggctatagataagcgtgctacatagaatttatacttaggcaagggaaggacagaaaagtcgagtgtctttacctgtcagattctaatagaactctgctttaggc

SEQ ID NO: 635703 - DNA, 249 bp, Homo sapiens
ggcaggcacggaatgagccaggatgaagccagggcagcttccgagtcagggcaggtcccttccgccccacactggaaaagcgtatagctccaggcaccagcgagaaaggccaggtggagccatctgcgctccagctccatggcacatggcggttgctagctgagagccacatccacctgcctccccccctagcctgggccaccaagtctgaagaagagcagagagccatggtccagagagagcagggtg

SEQ ID NO: 635704 - DNA, 1060 bp, Homo sapiens
  misc_feature (33)..(33): n is a, c, g, or t
  misc_feature (153)..(153): n is a, c, g, or t
  misc_feature (155)..(155): n is a, c, g, or t
  misc_feature (171)..(171): n is a, c, g, or t
  misc_feature (176)..(176): n is a, c, g, or t
  misc_feature (250)..(250): n is a, c, g, or t
  misc_feature (276)..(276): n is a, c, g, or t
  misc_feature (279)..(279): n is a, c, g, or t
  misc_feature (284)..(284): n is a, c, g, or t
  misc_feature (313)..(313): n is a, c, g, or t
  misc_feature (368)..(368): n is a, c, g, or t
  misc_feature (374)..(375): n is a, c, g, or t
  misc_feature (420)..(420): n is a, c, g, or t
  misc_feature (426)..(426): n is a, c, g, or t
  misc_feature (432)..(432): n is a, c, g, or t
  misc_feature (482)..(483): n is a, c, g, or t
  misc_feature (492)..(492): n is a, c, g, or t
  misc_feature (782)..(782): n is a, c, g, or t
  misc_feature (829)..(830): n is a, c, g, or t
  misc_feature (911)..(911): n is a, c, g, or t
  misc_feature (968)..(968): n is a, c, g, or t
  misc_feature (1038)..(1038): n is a, c, g, or t
aaggcaacacaagtggaagcaaaagtcgcaacnagcgagggattctcattcaaaaagcatggtgggagccgccagtcattggaaaaggaaggcagcagggacgtgtgatcagagtacaagcagtttgaagtcagggtggcagggacgtagtgnanttgctctagagaggancaccngcgcacacagcagcgaaggactcccgaggaaccagagagctcatgtacgtcgcggtagagcggacagcacgcanagcgggagcgtgggaggaattaggcngancaggncggtcttcagcacttggaaggcacaaaangtcggaaaggcgcaaaaggagcgtgcgcgtggggagaaacctattctggtgtgtngttganncgtccaggtcatacagaaagcagtcacggtggcgcgtggtgaggnaggggngggtcncagcgttcgtgggtgaggccgcggaatggaacaggtgggaggtgacaggnnagcaaggcntctgaggccagggtgcacacgcaccttgggagatgacccactgggcctctggacaggagaatgggatttcgatggagaaagctgaagctgaccacctgctagattgaatccagctgcctcccttgaaactctcttcccaatcaagggctcccaaggagctgcaggccaagtcctctgctcctatttagcaagaggcaggcggcaattcgggctgatctccccatcacccttcatttaaccgcaaaaaaagtcaccaaccaacttctcagaccccctgggcaatccagggnttcttgtttcctaagctcctatggaacaagcaatcagttctttcttnngacttttggttcaattccttctcattcagaggaaatatggttgccgtgtaggcagatgtctcctaggagcgtgtgtgtgtnagagcctgtgtgaaattcagccaggttagcaccaaggcctggctgatggggaaccanaaatgtgccttcaggatgggtacagcctctttggcaatgaagaaatatatttatcagtgaaaaaggggantctggctccatctttgcaggac

SEQ ID NO: 635705 - DNA, 668 bp, Homo sapiens
tgggggttttttttttaacccctctttagtttaatgcgttccaaaaaccaatttaaacccccccccaatgtaaccgggggggcgggcaaaggcaaaaacgcgagaaccgctgggaaaccacaagttctggcccccggcaattaattggcccggagtggaattggggtattcaactggtgcaccctgggggcatggggatagcgctagcaggaggtggacgccgtcggcggggggagacactgtcgccacgggaagcccctctgtggggagaatgtcccacgagggggagtcgcgaacaagcgccaacgtgtcgggcgacgtgagcattcttgggggacaccagggcgtggggccccacaaaaagattatgtggagaggggaggaagaggaggggggtattgagccaacgagggattccactctctacgagggtgcatccaggagaggggatgcactcgcgagagcgacccaagagcgagagaggggggcactcacgtggagagagacccttagaaggtaagtgcccacgaacagaagacaacgagcggggcctcaaacacaggggtagtgttacaacacacaaaggggttccccaacacagtgcattggtcaccatgaggaagtaccgaacatcccggaaaccacattaaaaaaaacacttcccctac

SEQ ID NO: 635706 - DNA, 430 bp, Homo sapiens
aaaccaaccctcaaaagttttttaaaatttgaattcatctcagatatcttttcggcccacaagggaataaatttagaactcaatccaagggattttgtggaaccggcacaaacacgtggatattaaccacacaggtctcttgaatacccattgggccattgaagattttaaaagggaattttaaaaatttctgggccaatatgaaaatagaaaaccacctccccaaaccccttgggatccacgcaaaaccggttataagaggccggtttataccaataaccaatggttttcaaataaccaccctaccatggcttttaaaaaaaacttggaataccaagaaaacccaacccccaatttagtaagggtaaagaaatattgtttcagaaaagaattgaccaaaatagggcccaaaaaatacaaaagatgaaca

SEQ ID NO: 635707 - DNA, 129 bp, Homo sapiens
tcattgagtcatcctttttgcctgctgctgtaaggttttttttcttctagtaactgtatgatccagagcgacccagcaaggactcaatcgatcaccaactgatgcagaactgtttcatatctagaaatg

SEQ ID NO: 635708 - DNA, 100 bp, Homo sapiens
gctgcgaccgcgctccctgtgaggtggcaagcggcgaaatggcgcctccgggagtctttcaagttccccttggcaattccttggtccttttgcctttggg

SEQ ID NO: 635709 - DNA, 209 bp, Homo sapiens
tgtacagtgaaggaagaggggtgctgtccctgtggatgctgaggaaaggtggtgacaggaagaggggtgatgtgacctgtggattcttgaggaagtgtcggtgacaggacgaggggtggtgtgacctgtggatacttgaggaagggctggtgaccggaagaggggtggctttgaccctgtggactacctgaggaacgcactcgtggtga

SEQ ID NO: 635710 - DNA, 856 bp, Homo sapiens
gcaacatccactcagctgcttgatgaaggcttttgttctgagaaaatttataagagatcaatgaggacatggcgttgcagagtggcagggataacttctgatgctaatgtgctgactaatgaatctaaggcctgcatatgctcagaaggtatttatatacagtatcaggagaccaatatcttgtgagcagttggttacagcgcggtgtgactatcaaagaagttttataactcaattatggaggaaaacgtcccgtttggtgtatcattgctgtagattggtctgggataagcactatggctttcagctctatcagagtggagcctagtggaaattatgggggattggataggcacatgacttaggaaatagtagcgatgcagctgtgtgcacatgttgagacgtagattatcaaagaaggagaaatgaggcttagaagtccagaattgtgtgttttgctatcaaagtggtagataagaccatggatgtgagtaaactgctctgttgaaatagtggggatagataataacatgagagaagtggacggacgagcatttagaggtcctcatgcaaaatgcatggtggcagcactggatcaaacacgcaccgcaggagtaaagaacccaccggatgacggctagacggcccgcaaaggaacacaaggcaccgggatactttgaaccgaagaaaagcacgcatgggggcccatccagcgcgaccagacactctctcccttcgaggcccgtgcaccgacgggggcacagctactccgatggccgcaccgccaagcacaaggagcaggacgcagacaccgcagacactggaagacagccgccaaacacaacacgccccaaac

SEQ ID NO: 635711 - DNA, 189 bp, Homo sapiens
gacgtgatgggaaagttgtgagacaagaaagctatggaatttagtgctagatacaaaattcacacagtgaaaaggcactggactctggggagactgggaatgtgtcctcagccattcagcaccatgctggactgagctcttcatagtttgatacaaccatatgctgtcctcatgccctgccaccagggt

SEQ ID NO: 635712 - DNA, 236 bp, Homo sapiens
ccccccccaaccccccccccccagggtttggtggagaaaaggaaagggcaaggcccagtgcctgtccctcaagcgggggcatgggccccatccccctttgttttcctttcccagggtccaggggatggggtgggccaggggagggatgttagggagggggtggggggccctgggggccatgggttccaattcatggggggggttgagcccccccccccaataaacccctttttcca

SEQ ID NO: 635713 - DNA, 3538 bp, Homo sapiens
  misc_feature (3237)..(3237): n is a, c, g, or t
cggcgcaggactcccacaccaccaccacgacgaaggactcctcctcctcctgtcgaacggggctcggttggtttctgctagggttgagataaatcatattatggctaggggtcaggatgtaaagattattcaaatgtgctcttgtgttgtgattagggttgatagagtatatgatccatttattaggagtactgatagtaggatgattgctagtgttacttcatatgagattgtttgggctactgctcgtagggccccgatgagtgcgtattttgagttggatgctcatcctgatcataggatagagtagactgctaggcttgacatggctagcatgaatagtactcctagatttatgttgattagagggtagggtattggtagtggaactcatattgttagtgctagggataaggctaggattggtgcaataatgaacatggagattgaggatgtggctggtcgtaggggttctttggtgaatagttttagggcatcggcgatgggttggagtaggccgtaggggcctacaacgttgggtccttttcgtagttgcatataacctagtacttttcgttctactagggtgaggaatgctacggccagtaggataggaatgattaggcttagaatgttaattatgaacatgctattagggagaggagttgaacctctggtaataaaggtttaagttttacgcaattaccggtctctgccaccctaatgtgccctgttctagggctggatttattatgagttaattaggttaagattatatcattaattatctctgagacgcgtttgtgaggttggtcccatttctcttgtcctttcgtactgggagaaatttataatagatagaaaccgacctggattgctccggtctgaactcagatcacgtaggactttaatcgttgaacaaacgaacctttaatagcggttgcaccatttgggtgtcctgatccaacatcgaggtcgtaaaccctattgtcgataggaactctagaataggattgcgctgttatccctagggtaacttgttccgttgatcaaaattttggatcaataagtgatgttatggttattttgactggtttgtctagattaaaatcactcggagggttttttgtactccgaggtcaccccaaccgaaattgctagtccatgttaagttatgttttatccctttgtggttgaattgtttaacttttggaatagttaattaaagctccatagggtcttctcgtcttatttttttattcccgcctcttcacgggaaggtcaatttcactgattggaagtaagagacagtaaaaccctcgtgtggccattcatacaagtccttatttggagaacaagtgattatgctacctttgcacggtcagaataccgcggccgttaaactggtgtcactgggcaggcattgcctctaatactagtaatgctagaggtgatgtttttggtaaacaggcggggtttgtgtttgccgagttccttttacttcttttaatctttccttggtgcactcctgtgttgggttaacaatataattaataaacgctttagtgttgttttggtttattgattgttaattatcagtatattattagttactgatgtaagcgtgtgcgaggagaaaggcttcttgttactcatattaacattattgcttctatgtttcaatagattagtccggtattgggctaggagtttgttattagtttttgggattatgttggtgaatttgttgagctttaacgctttctcaattgatggctgcttttaggcctactatggtagtattaagattttactctctagtcaaggttgtatccgtttctaaaaagctgtacctttttagactatctcttaaaaatacattggaatttagggtttttggggtatttttaaggttgaactaaaattctttctcggacaaccagctatcaccaggctcgttaggcttttcacctctacctacaagtcttctcactattttgccacatagatgagttggttcttttaaactgctcataggtagctcgtctggtttcggggtatctagctaaagttctctttgttagattttttctggttaaaccattatgcaaaaggtagaaggggtaatctttgcttttttttacttttattttattctttcatctttcccttacggtactatctctatagcgtcaggataaaaatttctatctcctatactttaatgttaggtgaatgttttattttattttggtgtatttttgtatttgtttagtatgttgagctagctttggttcaaagtacccatacattgtgggatcttctaggtgtaaactaggtgctttagtttaagctatgctttggtaatccaagcacactttccagtatgcttaccttgttacgacttgtctcttcttgcatggttgtgtaattgaatataggttatttttattactacatgcttgaggagggtgacgggcggtgtgtgcgtgcttcatggccttattcaatcaagcactctattcttgatttactgctaaatcctcctttggtttttagtttcataaaaactttcgtatggtgggtattcttatgtagaaaatgtagcccatttctttccaacccataagctacaccttgacctaacgtttttatgtgttatgattgtgcttactattgttcctttttagggtttgctgaagatggcggtatataggctgaattggcaagggttggtaaggtctatcggggtttatcgattatagaacaggctcctctaggtggatgtgaagcaccgccaagtcctttgagttttaggcagttgcgagtagtactctggcgaatagttttgttatgtaactatttgggtttagggctaggcatagtggggtatctaatcccagtttgggtcctagctatcgtgtgtcaggattattagagtcactttcgtgggttattttattttaactagggctttttacagcttagttataatttaactctattgtggtttttttttcttaaacactctttacgccgtggatctattaatttgggttaatcgtatgaccgcggtggctggcacgagatttaccaactctaattaatataacttagtcaaactttcgttcatggcttaatttttatcactgctgtttcccgtgggggtgtggttgagcaaggcgttatgagctaccgttataggtgtgcttgatacctgctccttttgatctttangatctggagggcattctcaccggggcgcggatacttgcatgtgtaattttattaagaattaatagaaaggccaggaccaaacctgtgtgtttatggggctgtgaggctcatctaggcattttcagtgccttgctttgataatttaagctacattaactataagctatattcagattgtgggcgtatgcttaataggtgcttatattctgggaggttattgtgttgtaattctaaactaatcttgtgctaggtttgtcctccaaatctagggtgatacgtgtgtccgaagtacggcccaggt

SEQ ID NO: 635714 - DNA, 3194 bp, Homo sapiens
  misc_feature (2893)..(2893): n is a, c, g, or t
ccgagctggacccggaagagcggcggtagggtattggtagtggaactcatattgttagtgctagggataaggctaggattggtgcaataatgaacatggagattgaggatgtggctggtcgtaggggttctttggtgaatagttttagggcatcggcgatgggttggagtaggccgtaggggcctacaacgttgggtccttttcgtagttgcatataacctagtacttttcgttctactagggtgaggaatgctacggccagtaggataggaatgattaggcttagaatgttaattatgaacatgctattagggagaggagttgaacctctggtaataaaggtttaagttttacgcaattaccggtctctgccaccctaatgtgccctgttctagggctggatttattatgagttaattaggttaagattatatcattaattatctctgagacgcgtttgtgaggttggtcccatttctcttgtcctttcgtactgggagaaatttataatagatagaaaccgacctggattgctccggtctgaactcagatcacgtaggactttaatcgttgaacaaacgaacctttaatagcggttgcaccatttgggtgtcctgatccaacatcgaggtcgtaaaccctattgtcgataggaactctagaataggattgcgctgttatccctagggtaacttgttccgttgatcaaaattttggatcaataagtgatgttatggttattttgactggtttgtctagattaaaatcactcggagggttttttgtactccgaggtcaccccaaccgaaattgctagtccatgttaagttatgttttatccctttgtggttgaattgtttaacttttggaatagttaattaaagctccatagggtcttctcgtcttatttttttattcccgcctcttcacgggaaggtcaatttcactgattggaagtaagagacagtaaaaccctcgtgtggccattcatacaagtccttatttggagaacaagtgattatgctacctttgcacggtcagaataccgcggccgttaaactggtgtcactgggcaggcattgcctctaatactagtaatgctagaggtgatgtttttggtaaacaggcggggtttgtgtttgccgagttccttttacttcttttaatctttccttggtgcactcctgtgttgggttaacaatataattaataaacgctttagtgttgttttggtttattgattgttaattatcagtatattattagttactgatgtaagcgtgtgcgaggagaaaggcttcttgttactcatattaacattattgcttctatgtttcaatagattagtccggtattgggctaggagtttgttattagtttttgggattatgttggtgaatttgttgagctttaacgctttctcaattgatggctgcttttaggcctactatggtagtattaagattttactctctagtcaaggttgtatccgtttctaaaaagctgtacctttttagactatctcttaaaaatacattggaatttagggtttttggggtatttttaaggttgaactaaaattctttctcggacaaccagctatcaccaggctcgttaggcttttcacctctacctacaagtcttctcactattttgccacatagatgagttggttcttttaaactgctcataggtagctcgtctggtttcggggtatctagctaaagttctctttgttagattttttctggttaaaccattatgcaaaaggtagaaggggtaatctttgcttttttttacttttattttattctttcatctttcccttacggtactatctctatagcgtcaggataaaaatttctatctcctatactttaatgttaggtgaatgttttattttattttggtgtatttttgtatttgtttagtatgttgagctagctttggttcaaagtacccatacattgtgggatcttctaggtgtaaactaggtgctttagtttaagctatgctttggtaatccaagcacactttccagtatgcttaccttgttacgacttgtctcttcttgcatggttgtgtaattgaatataggttatttttattactacatgcttgaggagggtgacgggcggtgtgtgcgtgcttcatggccttattcaatcaagcactctattcttgatttactgctaaatcctcctttggtttttagtttcataaaaactttcgtatggtgggtattcttatgtagaaaatgtagcccatttctttccaacccataagctacaccttgacctaacgtttttatgtgttatgattgtgcttactattgttcctttttagggtttgctgaagatggcggtatataggctgaattggcaagggttggtaaggtctatcggggtttatcgattatagaacaggctcctctaggtggatgtgaagcaccgccaagtcctttgagttttaggcagttgcgagtagtactctggcgaatagttttgttatgtaactatttgggtttagggctaggcatagtggggtatctaatcccagtttgggtcctagctatcgtgtgtcaggattattagagtcactttcgtgggttattttattttaactagggctttttacagcttagttataatttaactctattgtggtttttttttcttaaacactctttacgccgtggatctattaatttgggttaatcgtatgaccgcggtggctggcacgagatttaccaactctaattaatataacttagtcaaactttcgttcatggcttaatttttatcactgctgtttcccgtgggggtgtggttgagcaaggcgttatgagctaccgttataggtgtgcttgatacctgctccttttgatctttangatctggagggcattctcaccggggcgcggatacttgcatgtgtaattttattaagaattaatagaaaggccaggaccaaacctgtgtgtttatggggctgtgaggctcatctaggcattttcagtgccttgctttgataatttaagctacattaactataagctatattcagattgtgggcgtatgcttaataggtgcttatattctgggaggttattgtgttgtaattctaaactaatcttgtgctaggtttgtcctccaaatctagggtgatacgtgtgtccgaagtacggcccaggt

SEQ ID NO: 635715 - DNA, 4087 bp, Homo sapiens
  misc_feature (55)..(55): n is a, c, g, or t
  misc_feature (174)..(174): n is a, c, g, or t
  misc_feature (204)..(204): n is a, c, g, or t
  misc_feature (852)..(852): n is a, c, g, or t
tgttagtaggggtactctaggttgttagtgggtgaattctgttggtggtcagaanctcctaattcgggtgttggtgctaggcttgagtggtagaaagctcaaaagaatccagtgaagaacagaacctcggaaataataaataaaattataccgtatcgtaagcctttttggacnactgatgtgtggtggccttggaaagtgctntctcgaataatgtctcgtcaccattggtatattgtcaaagtattggttaatagtcctagagatagtaagagtatagagttaaagtggaatcatataattaggcctgatgttattaaaagggctgatagggctccggtaagtggtcatgggcttgggtttactatgtggtatgcatgtgtttggtgggtcattatgtattgtcgtgtaggtataagcttactagcagtgtaaacacataagcttggatcagagctactgcaaattcaagaatagttaataggatgaggatagtaaatgtgataagggtagtgtagataatgggattaattagtatgggaagggtatgaaccaacattttcggggtatgggcccgatagcttagcttagctgaccttactgtagaatgtggtgtattttggtagcacggagaattttgaattctcaggtttaggttcgagtcctattgttctagaaataagagggtttgaacctctattttttactctatcaaagtaactcttttatcagacatatttctatgattgtgggggaatgcttgctgttataatagggagtgagatgtgtcatatacatagagctagtgttaggggcaggaagctttttcatagtaaatgtattagttggtcntatcggaatcgtgggtatgatgctcggattcataggaaggtgattgttaatgcgagtgtttttagtacgaagttgattgtatatagttctgatgtgtgtgggtcgtggaatgctcctaggaagagaattgctgtgaatgcatttattatgatgatgttggcatattctgctatgaagaatatggcgaaaggtccggctgcatattctacgttaaagcctgatacaagttctgactctccttctgtaaggtcgaacggggctcggttggtttctgctagggttgagataaatcatattatggctaggggtcaggatgtaaagattattcaaatgtgctcttgtgttgtgattagggttgatagagtatatgatccatttattaggagtactgatagtaggatgattgctagtgttacttcatatgagattgtttgggctactgctcgtagggccccgatgagtgcgtattttgagttggatgctcatcctgatcataggatagagtagactgctaggcttgacatggctagcatgaatagtactcctagatttatgttgattagagggtagggtattggtagtggaactcatattgttagtgctagggataaggctaggattggtgcaataatgaacatggagattgaggatgtggctggtcgtaggggttctttggtgaatagttttagggcatcggcgatgggttggagtaggccgtaggggcctacaacgttgggtccttttcgtagttgcatataacctagtacttttcgttctactagggtgaggaatgctacggccagtaggataggaatgattaggcttagaatgttaattatgaacatgctattagggagaggagttgaacctctggtaataaaggtttaagttttacgcaattaccggtctctgccaccctaatgtgccctgttctagggctggatttattatgagttaattaggttaagattatatcattaattatctctgagacgcgtttgtgaggttggtcccatttctcttgtcctttcgtactgggagaaatttataatagatagaaaccgacctggattgctccggtctgaactcagatcacgtaggactttaatcgttgaacaaacgaacctttaatagcggttgcaccatttgggtgtcctgatccaacatcgaggtcgtaaaccctattgtcgataggaactctagaataggattgcgctgttatccctagggtaacttgttccgttgatcaaaattttggatcaataagtgatgttatggttattttgactggtttgtctagattaaaatcactcggagggttttttgtactccgaggtcaccccaaccgaaattgctagtccatgttaagttatgttttatccctttgtggttgaattgtttaacttttggaatagttaattaaagctccatagggtcttctcgtcttatttttttattcccgcctcttcacgggaaggtcaatttcactgattggaagtaagagacagtaaaaccctcgtgtggccattcatacaagtccttatttggagaacaagtgattatgctacctttgcacggtcagaataccgcggccgttaaactggtgtcactgggcaggcattgcctctaatactagtaatgctagaggtgatgtttttggtaaacaggcggggtttgtgtttgccgagttccttttacttcttttaatctttccttggtgcactcctgtgttgggttaacaatataattaataaacgctttagtgttgttttggtttattgattgttaattatcagtatattattagttactgatgtaagcgtgtgcgaggagaaaggcttcttgttactcatattaacattattgcttctatgtttcaatagattagtccggtattgggctaggagtttgttattagtttttgggattatgttggtgaatttgttgagctttaacgctttctcaattgatggctgcttttaggcctactatggtagtattaagattttactctctagtcaaggttgtatccgtttctaaaaagctgtacctttttagactatctcttaaaaatacattggaatttagggtttttggggtatttttaaggttgaactaaaattctttctcggacaaccagctatcaccaggctcgttaggcttttcacctctacctacaagtcttctcactattttgccacatagatgagttggttcttttaaactgctcataggtagctcgtctggtttcggggtatctagctaaagttctctttgttagattttttctggttaaaccattatgcaaaaggtagaaggggtaatctttgcttttttttacttttattttattctttcatctttcccttacggtactatctctatagcgtcaggataaaaatttctatctcctatactttaatgttaggtgaatgttttattttattttggtgtatttttgtatttgtttagtatgttgagctagctttggttcaaagtacccatacattgtgggatcttctaggtgtaaactaggtgctttagtttaagctatgctttggtaatccaagcacactttccagtatgcttaccttgttacgacttgtctcttcttgcatggttgtgtaattgaatataggttatttttattactacatgcttgaggagggtgacgggcggtgtgtgcgtgcttcatggccttattcaatcaagcactctattcttgatttactgctaaatcctcctttggtttttagtttcataaaaactttcgtatggtgggtattcttatgtagaaaatgtagcccatttctttccaacccataagctacaccttgacctaacgtttttatgtgttatgattgtgcttactattgttcctttttagggtttgctgaagatggcggtatataggctgaattggcaagggttggtaaggtctatcggggtttatcgattatagaacaggctcctctaggtggatgtgaagcaccgccaagtcctttgagttttaggcagttgcgagtagtactctggcgaatagttttgttatgtaactatttgggtttagggctaggcatagtggggtatctaatcccagtttgggtcctagctatcgtgtgtcaggattattagagtcactttcgtgggttattttattttaactagggctttttacagcttagtaaaatacaaatacccagaccgctctaccgggtatcactcggtcgtatca

SEQ ID NO: 635716 - DNA, 861 bp, Homo sapiens
  misc_feature (34)..(34): n is a, c, g, or t
  misc_feature (41)..(41): n is a, c, g, or t
  misc_feature (66)..(66): n is a, c, g, or t
  misc_feature (81)..(81): n is a, c, g, or t
  misc_feature (83)..(83): n is a, c, g, or t
  misc_feature (85)..(85): n is a, c, g, or t
  misc_feature (91)..(91): n is a, c, g, or t
  misc_feature (109)..(109): n is a, c, g, or t
  misc_feature (148)..(148): n is a, c, g, or t
  misc_feature (157)..(157): n is a, c, g, or t
  misc_feature (160)..(160): n is a, c, g, or t
  misc_feature (168)..(168): n is a, c, g, or t
  misc_feature (170)..(170): n is a, c, g, or t
  misc_feature (173)..(173): n is a, c, g, or t
  misc_feature (178)..(178): n is a, c, g, or t
  misc_feature (183)..(183): n is a, c, g, or t
  misc_feature (187)..(187): n is a, c, g, or t
  misc_feature (190)..(190): n is a, c, g, or t
  misc_feature (200)..(200): n is a, c, g, or t
  misc_feature (209)..(210): n is a, c, g, or t
  misc_feature (226)..(226): n is a, c, g, or t
  misc_feature (230)..(231): n is a, c, g, or t
  misc_feature (236)..(237): n is a, c, g, or t
  misc_feature (241)..(241): n is a, c, g, or t
  misc_feature (243)..(243): n is a, c, g, or t
  misc_feature (246)..(246): n is a, c, g, or t
  misc_feature (252)..(252): n is a, c, g, or t
  misc_feature (257)..(257): n is a, c, g, or t
  misc_feature (263)..(263): n is a, c, g, or t
  misc_feature (276)..(276): n is a, c, g, or t
  misc_feature (300)..(300): n is a, c, g, or t
  misc_feature (317)..(317): n is a, c, g, or t
  misc_feature (333)..(334): n is a, c, g, or t
  misc_feature (346)..(346): n is a, c, g, or t
  misc_feature (350)..(350): n is a, c, g, or t
  misc_feature (352)..(352): n is a, c, g, or t
  misc_feature (354)..(354): n is a, c, g, or t
  misc_feature (357)..(357): n is a, c, g, or t
  misc_feature (361)..(361): n is a, c, g, or t
  misc_feature (366)..(366): n is a, c, g, or t
  misc_feature (371)..(371): n is a, c, g, or t
  misc_feature (378)..(378): n is a, c, g, or t
  misc_feature (382)..(382): n is a, c, g, or t
  misc_feature (390)..(390): n is a, c, g, or t
  misc_feature (395)..(395): n is a, c, g, or t
  misc_feature (397)..(397): n is a, c, g, or t
  misc_feature (418)..(418): n is a, c, g, or t
  misc_feature (421)..(421): n is a, c, g, or t
  misc_feature (430)..(430): n is a, c, g, or t
  misc_feature (471)..(471): n is a, c, g, or t
  misc_feature (502)..(502): n is a, c, g, or t
  misc_feature (601)..(601): n is a, c, g, or t
  misc_feature (621)..(621): n is a, c, g, or t
  misc_feature (635)..(635): n is a, c, g, or t
  misc_feature (644)..(644): n is a, c, g, or t
  misc_feature (710)..(710): n is a, c, g, or t
  misc_feature (837)..(837): n is a, c, g, or t
ggacgcggaccggcgctggggacggcggcgccangtctgcnggtcctcccgccaacccggccgganaaccgaagccgctcngncngcggcngcggcggcggcgggagcngaaacgcatctcgcccagaaaccggaacaacggcactgnctggtaaanacngcgcccananccnctgtntttanaganagncagcggcaanccttaatannctcactgccgccccgnaacnnctgtnnaaantnatnaaaacnccccngaagcngggatcggaaaantcgcacagaataaacacgggtttntacacgcagatgggggnggtgggtgtatttttnnaagctcctcacngggnangngangggnggggnggggngggggcnggtnccgcaacnctggncngaaaataaaaagggcacgganggnaaaattaanttgatgtagggtaagaaccgcacacagaattacagcaacangctagctttgttcggcatggccgcgcggganggggtgcttcccgccactggggggagggcgtcctcccgcgttgattcatcttccccggagcgagctcaacgctccactggctccactcgcactactgancacactcgccgtcacacaancagtgtggcacaanttccggggngcgatcacacaacaccgcgttcacgcacggggcgcctcatttcctcgagtgaggccacaggtctancgcacacacacaatggctgttggtcattccattagactcatacacacggccacctgtcacccagggtactgggtgggagccttgcgtacacacccaggcacagctacgcactcaaaacagccatcgnggatcacagcatggacatcaactc

SEQ ID NO: 635717 - DNA, 4102 bp, Homo sapiens
  misc_feature (55)..(55): n is a, c, g, or t
  misc_feature (174)..(174): n is a, c, g, or t
  misc_feature (204)..(204): n is a, c, g, or t
  misc_feature (852)..(852): n is a, c, g, or t
  misc_feature (4001)..(4001): n is a, c, g, or t
  misc_feature (4007)..(4007): n is a, c, g, or t
  misc_feature (4060)..(4060): n is a, c, g, or t
tgttagtaggggtactctaggttgttagtgggtgaattctgttggtggtcagaanctcctaattcgggtgttggtgctaggcttgagtggtagaaagctcaaaagaatccagtgaagaacagaacctcggaaataataaataaaattataccgtatcgtaagcctttttggacnactgatgtgtggtggccttggaaagtgctntctcgaataatgtctcgtcaccattggtatattgtcaaagtattggttaatagtcctagagatagtaagagtatagagttaaagtggaatcatataattaggcctgatgttattaaaagggctgatagggctccggtaagtggtcatgggcttgggtttactatgtggtatgcatgtgtttggtgggtcattatgtattgtcgtgtaggtataagcttactagcagtgtaaacacataagcttggatcagagctactgcaaattcaagaatagttaataggatgaggatagtaaatgtgataagggtagtgtagataatgggattaattagtatgggaagggtatgaaccaacattttcggggtatgggcccgatagcttagcttagctgaccttactgtagaatgtggtgtattttggtagcacggagaattttgaattctcaggtttaggttcgagtcctattgttctagaaataagagggtttgaacctctattttttactctatcaaagtaactcttttatcagacatatttctatgattgtgggggaatgcttgctgttataatagggagtgagatgtgtcatatacatagagctagtgttaggggcaggaagctttttcatagtaaatgtattagttggtcntatcggaatcgtgggtatgatgctcggattcataggaaggtgattgttaatgcgagtgtttttagtacgaagttgattgtatatagttctgatgtgtgtgggtcgtggaatgctcctaggaagagaattgctgtgaatgcatttattatgatgatgttggcatattctgctatgaagaatatggcgaaaggtccggctgcatattctacgttaaagcctgatacaagttctgactctccttctgtaaggtcgaacggggctcggttggtttctgctagggttgagataaatcatattatggctaggggtcaggatgtaaagattattcaaatgtgctcttgtgttgtgattagggttgatagagtatatgatccatttattaggagtactgatagtaggatgattgctagtgttacttcatatgagattgtttgggctactgctcgtagggccccgatgagtgcgtattttgagttggatgctcatcctgatcataggatagagtagactgctaggcttgacatggctagcatgaatagtactcctagatttatgttgattagagggtagggtattggtagtggaactcatattgttagtgctagggataaggctaggattggtgcaataatgaacatggagattgaggatgtggctggtcgtaggggttctttggtgaatagttttagggcatcggcgatgggttggagtaggccgtaggggcctacaacgttgggtccttttcgtagttgcatataacctagtacttttcgttctactagggtgaggaatgctacggccagtaggataggaatgattaggcttagaatgttaattatgaacatgctattagggagaggagttgaacctctggtaataaaggtttaagttttacgcaattaccggtctctgccaccctaatgtgccctgttctagggctggatttattatgagttaattaggttaagattatatcattaattatctctgagacgcgtttgtgaggttggtcccatttctcttgtcctttcgtactgggagaaatttataatagatagaaaccgacctggattgctccggtctgaactcagatcacgtaggactttaatcgttgaacaaacgaacctttaatagcggttgcaccatttgggtgtcctgatccaacatcgaggtcgtaaaccctattgtcgataggaactctagaataggattgcgctgttatccctagggtaacttgttccgttgatcaaaattttggatcaataagtgatgttatggttattttgactggtttgtctagattaaaatcactcggagggttttttgtactccgaggtcaccccaaccgaaattgctagtccatgttaagttatgttttatccctttgtggttgaattgtttaacttttggaatagttaattaaagctccatagggtcttctcgtcttatttttttattcccgcctcttcacgggaaggtcaatttcactgattggaagtaagagacagtaaaaccctcgtgtggccattcatacaagtccttatttggagaacaagtgattatgctacctttgcacggtcagaataccgcggccgttaaactggtgtcactgggcaggcattgcctctaatactagtaatgctagaggtgatgtttttggtaaacaggcggggtttgtgtttgccgagttccttttacttcttttaatctttccttggtgcactcctgtgttgggttaacaatataattaataaacgctttagtgttgttttggtttattgattgttaattatcagtatattattagttactgatgtaagcgtgtgcgaggagaaaggcttcttgttactcatattaacattattgcttctatgtttcaatagattagtccggtattgggctaggagtttgttattagtttttgggattatgttggtgaatttgttgagctttaacgctttctcaattgatggctgcttttaggcctactatggtagtattaagattttactctctagtcaaggttgtatccgtttctaaaaagctgtacctttttagactatctcttaaaaatacattggaatttagggtttttggggtatttttaaggttgaactaaaattctttctcggacaaccagctatcaccaggctcgttaggcttttcacctctacctacaagtcttctcactattttgccacatagatgagttggttcttttaaactgctcataggtagctcgtctggtttcggggtatctagctaaagttctctttgttagattttttctggttaaaccattatgcaaaaggtagaaggggtaatctttgcttttttttacttttattttattctttcatctttcccttacggtactatctctatagcgtcaggataaaaatttctatctcctatactttaatgttaggtgaatgttttattttattttggtgtatttttgtatttgtttagtatgttgagctagctttggttcaaagtacccatacattgtgggatcttctaggtgtaaactaggtgctttagtttaagctatgctttggtaatccaagcacactttccagtatgcttaccttgttacgacttgtctcttcttgcatggttgtgtaattgaatataggttatttttattactacatgcttgaggagggtgacgggcggtgtgtgcgtgcttcatggccttattcaatcaagcactctattcttgatttactgctaaatcctcctttggtttttagtttcataaaaactttcgtatggtgggtattcttatgtagaaaatgtagcccatttctttccaacccataagctacaccttgacctaacgtttttatgtgttatgattgtgcttactattgttcctttttagggtttgctgaagatggcggtatataggctgaattggcaagggttggtaaggtctatcggggtttatcgattatagaacaggctcctctaggtggatgtgaagcaccgccaagtcctttgagttttaggcagttgcgagtagtactctggcgaatagttttgttatgtaactatttgggtttagggctaggcatagtggggtatctaatcccagtttgggtcctagctatcgtgtgtcagtatcattgatgtcctatggtttntacggntaaggctgcgttattaatttcgtctattatataaaggattcgtaatgatggangggcaataagaattagaataatagcgggtaggattgaccacg

SEQ ID NO: 635718 - DNA, 3989 bp, Homo sapiens
  misc_feature (55)..(55): n is a, c, g, or t
  misc_feature (174)..(174): n is a, c, g, or t
  misc_feature (204)..(204): n is a, c, g, or t
  misc_feature (852)..(852): n is a, c, g, or t
tgttagtaggggtactctaggttgttagtgggtgaattctgttggtggtcagaanctcctaattcgggtgttggtgctaggcttgagtggtagaaagctcaaaagaatccagtgaagaacagaacctcggaaataataaataaaattataccgtatcgtaagcctttttggacnactgatgtgtggtggccttggaaagtgctntctcgaataatgtctcgtcaccattggtatattgtcaaagtattggttaatagtcctagagatagtaagagtatagagttaaagtggaatcatataattaggcctgatgttattaaaagggctgatagggctccggtaagtggtcatgggcttgggtttactatgtggtatgcatgtgtttggtgggtcattatgtattgtcgtgtaggtataagcttactagcagtgtaaacacataagcttggatcagagctactgcaaattcaagaatagttaataggatgaggatagtaaatgtgataagggtagtgtagataatgggattaattagtatgggaagggtatgaaccaacattttcggggtatgggcccgatagcttagcttagctgaccttactgtagaatgtggtgtattttggtagcacggagaattttgaattctcaggtttaggttcgagtcctattgttctagaaataagagggtttgaacctctattttttactctatcaaagtaactcttttatcagacatatttctatgattgtgggggaatgcttgctgttataatagggagtgagatgtgtcatatacatagagctagtgttaggggcaggaagctttttcatagtaaatgtattagttggtcntatcggaatcgtgggtatgatgctcggattcataggaaggtgattgttaatgcgagtgtttttagtacgaagttgattgtatatagttctgatgtgtgtgggtcgtggaatgctcctaggaagagaattgctgtgaatgcatttattatgatgatgttggcatattctgctatgaagaatatggcgaaaggtccggctgcatattctacgttaaagcctgatacaagttctgactctccttctgtaaggtcgaacggggctcggttggtttctgctagggttgagataaatcatattatggctaggggtcaggatgtaaagattattcaaatgtgctcttgtgttgtgattagggttgatagagtatatgatccatttattaggagtactgatagtaggatgattgctagtgttacttcatatgagattgtttgggctactgctcgtagggccccgatgagtgcgtattttgagttggatgctcatcctgatcataggatagagtagactgctaggcttgacatggctagcatgaatagtactcctagatttatgttgattagagggtagggtattggtagtggaactcatattgttagtgctagggataaggctaggattggtgcaataatgaacatggagattgaggatgtggctggtcgtaggggttctttggtgaatagttttagggcatcggcgatgggttggagtaggccgtaggggcctacaacgttgggtccttttcgtagttgcatataacctagtacttttcgttctactagggtgaggaatgctacggccagtaggataggaatgattaggcttagaatgttaattatgaacatgctattagggagaggagttgaacctctggtaataaaggtttaagttttacgcaattaccggtctctgccaccctaatgtgccctgttctagggctggatttattatgagttaattaggttaagattatatcattaattatctctgagacgcgtttgtgaggttggtcccatttctcttgtcctttcgtactgggagaaatttataatagatagaaaccgacctggattgctccggtctgaactcagatcacgtaggactttaatcgttgaacaaacgaacctttaatagcggttgcaccatttgggtgtcctgatccaacatcgaggtcgtaaaccctattgtcgataggaactctagaataggattgcgctgttatccctagggtaacttgttccgttgatcaaaattttggatcaataagtgatgttatggttattttgactggtttgtctagattaaaatcactcggagggttttttgtactccgaggtcaccccaaccgaaattgctagtccatgttaagttatgttttatccctttgtggttgaattgtttaacttttggaatagttaattaaagctccatagggtcttctcgtcttatttttttattcccgcctcttcacgggaaggtcaatttcactgattggaagtaagagacagtaaaaccctcgtgtggccattcatacaagtccttatttggagaacaagtgattatgctacctttgcacggtcagaataccgcggccgttaaactggtgtcactgggcaggcattgcctctaatactagtaatgctagaggtgatgtttttggtaaacaggcggggtttgtgtttgccgagttccttttacttcttttaatctttccttggtgcactcctgtgttgggttaacaatataattaataaacgctttagtgttgttttggtttattgattgttaattatcagtatattattagttactgatgtaagcgtgtgcgaggagaaaggcttcttgttactcatattaacattattgcttctatgtttcaatagattagtccggtattgggctaggagtttgttattagtttttgggattatgttggtgaatttgttgagctttaacgctttctcaattgatggctgcttttaggcctactatggtagtattaagattttactctctagtcaaggttgtatccgtttctaaaaagctgtacctttttagactatctcttaaaaatacattggaatttagggtttttggggtatttttaaggttgaactaaaattctttctcggacaaccagctatcaccaggctcgttaggcttttcacctctacctacaagtcttctcactattttgccacatagatgagttggttcttttaaactgctcataggtagctcgtctggtttcggggtatctagctaaagttctctttgttagattttttctggttaaaccattatgcaaaaggtagaaggggtaatctttgcttttttttacttttattttattctttcatctttcccttacggtactatctctatagcgtcaggataaaaatttctatctcctatactttaatgttaggtgaatgttttattttattttggtgtatttttgtatttgtttagtatgttgagctagctttggttcaaagtacccatacattgtgggatcttctaggtgtaaactaggtgctttagtttaagctatgctttggtaatccaagcacactttccagtatgcttaccttgttacgacttgtctcttcttgcatggttgtgtaattgaatataggttatttttattactacatgcttgaggagggtgacgggcggtgtgtgcgtgcttcatggccttattcaatcaagcactctattcttgatttactgctaaatcctcctttggtttttagtttcataaaaactttcgtatggtgggtattcttatgtagaaaatgtagcccatttctttccaacccataagctacaccttgacctaacgtttttatgtgttatgattgtgcttactattgttcctttttagggtttgctgaagatggcggtatataggctgaattggcaagggttggtaaggtctatcggggtttatcgattatagaacaggctcctctaggtggatgtgaagcaccgccaagtcctttgagttttaggcagttgcgagtagtactctggcgaatagttttgttatgtaactatttgggtttagggctaggcatagtggggtatctaatcccagtttgggcggatgtggattgggggatactctagagctg

SEQ ID NO: 635719 - DNA, 3725 bp, Homo sapiens
  misc_feature (55)..(55): n is a, c, g, or t
  misc_feature (174)..(174): n is a, c, g, or t
  misc_feature (204)..(204): n is a, c, g, or t
  misc_feature (3424)..(3424): n is a, c, g, or t
tgttagtaggggtactctaggttgttagtgggtgaattctgttggtggtcagaanctcctaattcgggtgttggtgctaggcttgagtggtagaaagctcaaaagaatccagtgaagaacagaacctcggaaataataaataaaattataccgtatcgtaagcctttttggacnactgatgtgtggtggccttggaaagtgctntctcgaataatgtctcgtcaccattggtatattgtcaaagtattggttaatagtcctagagatagtaagagtatagagttaaagtggaatcatataattaggcctgatgttattaaaagggctgatagggctccggtaagtggtcatgggcttgggtttactatgtggtatgcatgtgtttggtgggtcattatgtattgtcgtgtaggtataagcttactagcagtgtaaacacataagcttggatcagagctactgcaaattcaagaatagttaataggatgaggatagtaaatgtgataagggtagtgtagataatgggattaattagtatgggaagggtatgaaccaacattttcggggtatgggcccgatagcttagcttagctgaccttactgtagaatgtggtgtattttggtagcacggagaattttgaattctcaggtttaggttcgagtcctattgttctagaaataagagggtttgctgaagatggcggtatataggctgaattggcaagggttggtaaggtctatcggggtttatcgattatagaacaggctcctctaggtggatgtgaagcaccgccaagtcctttgagttttaggcagttgcgagtagtactctggcgaatagttttgttatgtaactatttgggtttagggctaggcatagtggggtatctaatcccagtttgggtcctagctatcgtgtgtcaggattattagagtcactttcgtgggttattttattttaactagggcttttatctctgagacgcgtttgtgaggttggtcccatttctcttgtcctttcgtactgggagaaatttataatagatagaaaccgacctggattgctccggtctgaactcagatcacgtaggactttaatcgttgaacaaacgaacctttaatagcggttgcaccatttgggtgtcctgatccaacatcgaggtcgtaaaccctattgtcgataggaactctagaataggattgcgctgttatccctagggtaacttgttccgttgatcaaaattttggatcaataagtgatgttatggttattttgactggtttgtctagattaaaatcactcggagggttttttgtactccgaggtcaccccaaccgaaattgctagtccatgttaagttatgttttatccctttgtggttgaattgtttaacttttggaatagttaattaaagctccatagggtcttctcgtcttatttttttattcccgcctcttcacgggaaggtcaatttcactgattggaagtaagagacagtaaaaccctcgtgtggccattcatacaagtccttatttggagaacaagtgattatgctacctttgcacggtcagaataccgcggccgttaaactggtgtcactgggcaggcattgcctctaatactagtaatgctagaggtgatgtttttggtaaacaggcggggtttgtgtttgccgagttccttttacttcttttaatctttccttggtgcactcctgtgttgggttaacaatataattaataaacgctttagtgttgttttggtttattgattgttaattatcagtatattattagttactgatgtaagcgtgtgcgaggagaaaggcttcttgttactcatattaacattattgcttctatgtttcaatagattagtccggtattgggctaggagtttgttattagtttttgggattatgttggtgaatttgttgagctttaacgctttctcaattgatggctgcttttaggcctactatggtagtattaagattttactctctagtcaaggttgtatccgtttctaaaaagctgtacctttttagactatctcttaaaaatacattggaatttagggtttttggggtatttttaaggttgaactaaaattctttctcggacaaccagctatcaccaggctcgttaggcttttcacctctacctacaagtcttctcactattttgccacatagatgagttggttcttttaaactgctcataggtagctcgtctggtttcggggtatctagctaaagttctctttgttagattttttctggttaaaccattatgcaaaaggtagaaggggtaatctttgcttttttttacttttattttattctttcatctttcccttacggtactatctctatagcgtcaggataaaaatttctatctcctatactttaatgttaggtgaatgttttattttattttggtgtatttttgtatttgtttagtatgttgagctagctttggttcaaagtacccatacattgtgggatcttctaggtgtaaactaggtgctttagtttaagctatgctttggtaatccaagcacactttccagtatgcttaccttgttacgacttgtctcttcttgcatggttgtgtaattgaatataggttatttttattactacatgcttgaggagggtgacgggcggtgtgtgcgtgcttcatggccttattcaatcaagcactctattcttgatttactgctaaatcctcctttggtttttagtttcataaaaactttcgtatggtgggtattcttatgtagaaaatgtagcccatttctttccaacccataagctacaccttgacctaacgtttttatgtgttatgattgtgcttactattgttcctttttagggtttgctgaagatggcggtatataggctgaattggcaagggttggtaaggtctatcggggtttatcgattatagaacaggctcctctaggtggatgtgaagcaccgccaagtcctttgagttttaggcagttgcgagtagtactctggcgaatagttttgttatgtaactatttgggtttagggctaggcatagtggggtatctaatcccagtttgggtcctagctatcgtgtgtcaggattattagagtcactttcgtgggttattttattttaactagggctttttacagcttagttataatttaactctattgtggtttttttttcttaaacactctttacgccgtggatctattaatttgggttaatcgtatgaccgcggtggctggcacgagatttaccaactctaattaatataacttagtcaaactttcgttcatggcttaatttttatcactgctgtttcccgtgggggtgtggttgagcaaggcgttatgagctaccgttataggtgtgcttgatacctgctccttttgatctttangatctggagggcattctcaccggggcgcggatacttgcatgtgtaattttattaagaattaatagaaaggccaggaccaaacctgtgtgtttatggggctgtgaggctcatctaggcattttcagtgccttgctttgataatttaagctacattaactataagctatattcagattgtgggcgtatgcttaataggtgcttatattctgggaggttattgtgttgtaattctaaactaatcttgtgctaggtttgtcctccaaatctagggtgatacgtgtgtccgaagtacggcccaggt

SEQ ID NO: 635720 - DNA, 169 bp, Homo sapiens
ttctgtctgctacccgttctatcagactctagagccggaggcataaggctgtaaggctccattatacaaagtactctatggaaaggagtgtcaataccaatagtagagaaccctgacagagaaaatcattcaaagtctggaaggattacaccactaaagatgccactgt

SEQ ID NO: 635721 - DNA, 3172 bp, Homo sapiens
  misc_feature (2871)..(2871): n is a, c, g, or t
actagtgctactagcagtggtagggatcctgctagggtgtagaataggaaataaagtcctgcattgagtcgttctgtttggtttcctcagcgtgtgatgatgattagtgtgggtactagtgttgctttttagggtttgctgaagatggcggtatataggctgaattggcaagggttggtaaggtctatcggggtttatcgattatagaacaggctcctctaggtggatgtgaagcaccgccaagtcctttgagttttaggcagttgcgagtagtactctggcgaatagttttgttatgtaactatttgggtttagggctaggcatagtggggtatctaatcccagtttgggtcctagctatcgtgtgtcaggattattagagtcactttcgtgggttattttattttaactagggcttttatctctgagacgcgtttgtgaggttggtcccatttctcttgtcctttcgtactgggagaaatttataatagatagaaaccgacctggattgctccggtctgaactcagatcacgtaggactttaatcgttgaacaaacgaacctttaatagcggttgcaccatttgggtgtcctgatccaacatcgaggtcgtaaaccctattgtcgataggaactctagaataggattgcgctgttatccctagggtaacttgttccgttgatcaaaattttggatcaataagtgatgttatggttattttgactggtttgtctagattaaaatcactcggagggttttttgtactccgaggtcaccccaaccgaaattgctagtccatgttaagttatgttttatccctttgtggttgaattgtttaacttttggaatagttaattaaagctccatagggtcttctcgtcttatttttttattcccgcctcttcacgggaaggtcaatttcactgattggaagtaagagacagtaaaaccctcgtgtggccattcatacaagtccttatttggagaacaagtgattatgctacctttgcacggtcagaataccgcggccgttaaactggtgtcactgggcaggcattgcctctaatactagtaatgctagaggtgatgtttttggtaaacaggcggggtttgtgtttgccgagttccttttacttcttttaatctttccttggtgcactcctgtgttgggttaacaatataattaataaacgctttagtgttgttttggtttattgattgttaattatcagtatattattagttactgatgtaagcgtgtgcgaggagaaaggcttcttgttactcatattaacattattgcttctatgtttcaatagattagtccggtattgggctaggagtttgttattagtttttgggattatgttggtgaatttgttgagctttaacgctttctcaattgatggctgcttttaggcctactatggtagtattaagattttactctctagtcaaggttgtatccgtttctaaaaagctgtacctttttagactatctcttaaaaatacattggaatttagggtttttggggtatttttaaggttgaactaaaattctttctcggacaaccagctatcaccaggctcgttaggcttttcacctctacctacaagtcttctcactattttgccacatagatgagttggttcttttaaactgctcataggtagctcgtctggtttcggggtatctagctaaagttctctttgttagattttttctggttaaaccattatgcaaaaggtagaaggggtaatctttgcttttttttacttttattttattctttcatctttcccttacggtactatctctatagcgtcaggataaaaatttctatctcctatactttaatgttaggtgaatgttttattttattttggtgtatttttgtatttgtttagtatgttgagctagctttggttcaaagtacccatacattgtgggatcttctaggtgtaaactaggtgctttagtttaagctatgctttggtaatccaagcacactttccagtatgcttaccttgttacgacttgtctcttcttgcatggttgtgtaattgaatataggttatttttattactacatgcttgaggagggtgacgggcggtgtgtgcgtgcttcatggccttattcaatcaagcactctattcttgatttactgctaaatcctcctttggtttttagtttcataaaaactttcgtatggtgggtattcttatgtagaaaatgtagcccatttctttccaacccataagctacaccttgacctaacgtttttatgtgttatgattgtgcttactattgttcctttttagggtttgctgaagatggcggtatataggctgaattggcaagggttggtaaggtctatcggggtttatcgattatagaacaggctcctctaggtggatgtgaagcaccgccaagtcctttgagttttaggcagttgcgagtagtactctggcgaatagttttgttatgtaactatttgggtttagggctaggcatagtggggtatctaatcccagtttgggtcctagctatcgtgtgtcaggattattagagtcactttcgtgggttattttattttaactagggctttttacagcttagttataatttaactctattgtggtttttttttcttaaacactctttacgccgtggatctattaatttgggttaatcgtatgaccgcggtggctggcacgagatttaccaactctaattaatataacttagtcaaactttcgttcatggcttaatttttatcactgctgtttcccgtgggggtgtggttgagcaaggcgttatgagctaccgttataggtgtgcttgatacctgctccttttgatctttangatctggagggcattctcaccggggcgcggatacttgcatgtgtaattttattaagaattaatagaaaggccaggaccaaacctgtgtgtttatggggctgtgaggctcatctaggcattttcagtgccttgctttgataatttaagctacattaactataagctatattcagattgtgggcgtatgcttaataggtgcttatattctgggaggttattgtgttgtaattctaaactaatcttgtgctaggtttgtcctccaaatctagggtgatacgtgtgtccgaagtacggcccaggt

SEQ ID NO: 635722 - DNA, 3184 bp, Homo sapiens
  misc_feature (2883)..(2883): n is a, c, g, or t
acgcaatactcggggacaacagacacactacttccatcctcttcatggccacattgtttcaaaacacgtatttctctttttggggtgatgaaagtgttctaaaattgattgtgggatggttgcacaactctgccaatatgctcaaagccactgaagatggcggtatataggctgaattggcaagggttggtaaggtctatcggggtttatcgattatagaacaggctcctctaggtggatgtgaagcaccgccaagtcctttgagttttaggcagttgcgagtagtactctggcgaatagttttgttatgtaactatttgggtttagggctaggcatagtggggtatctaatcccagtttgggtcctagctatcgtgtgtcaggattattagagtcactttcgtgggttattttattttaactagggcttttatctctgagacgcgtttgtgaggttggtcccatttctcttgtcctttcgtactgggagaaatttataatagatagaaaccgacctggattgctccggtctgaactcagatcacgtaggactttaatcgttgaacaaacgaacctttaatagcggttgcaccatttgggtgtcctgatccaacatcgaggtcgtaaaccctattgtcgataggaactctagaataggattgcgctgttatccctagggtaacttgttccgttgatcaaaattttggatcaataagtgatgttatggttattttgactggtttgtctagattaaaatcactcggagggttttttgtactccgaggtcaccccaaccgaaattgctagtccatgttaagttatgttttatccctttgtggttgaattgtttaacttttggaatagttaattaaagctccatagggtcttctcgtcttatttttttattcccgcctcttcacgggaaggtcaatttcactgattggaagtaagagacagtaaaaccctcgtgtggccattcatacaagtccttatttggagaacaagtgattatgctacctttgcacggtcagaataccgcggccgttaaactggtgtcactgggcaggcattgcctctaatactagtaatgctagaggtgatgtttttggtaaacaggcggggtttgtgtttgccgagttccttttacttcttttaatctttccttggtgcactcctgtgttgggttaacaatataattaataaacgctttagtgttgttttggtttattgattgttaattatcagtatattattagttactgatgtaagcgtgtgcgaggagaaaggcttcttgttactcatattaacattattgcttctatgtttcaatagattagtccggtattgggctaggagtttgttattagtttttgggattatgttggtgaatttgttgagctttaacgctttctcaattgatggctgcttttaggcctactatggtagtattaagattttactctctagtcaaggttgtatccgtttctaaaaagctgtacctttttagactatctcttaaaaatacattggaatttagggtttttggggtatttttaaggttgaactaaaattctttctcggacaaccagctatcaccaggctcgttaggcttttcacctctacctacaagtcttctcactattttgccacatagatgagttggttcttttaaactgctcataggtagctcgtctggtttcggggtatctagctaaagttctctttgttagattttttctggttaaaccattatgcaaaaggtagaaggggtaatctttgcttttttttacttttattttattctttcatctttcccttacggtactatctctatagcgtcaggataaaaatttctatctcctatactttaatgttaggtgaatgttttattttattttggtgtatttttgtatttgtttagtatgttgagctagctttggttcaaagtacccatacattgtgggatcttctaggtgtaaactaggtgctttagtttaagctatgctttggtaatccaagcacactttccagtatgcttaccttgttacgacttgtctcttcttgcatggttgtgtaattgaatataggttatttttattactacatgcttgaggagggtgacgggcggtgtgtgcgtgcttcatggccttattcaatcaagcactctattcttgatttactgctaaatcctcctttggtttttagtttcataaaaactttcgtatggtgggtattcttatgtagaaaatgtagcccatttctttccaacccataagctacaccttgacctaacgtttttatgtgttatgattgtgcttactattgttcctttttagggtttgctgaagatggcggtatataggctgaattggcaagggttggtaaggtctatcggggtttatcgattatagaacaggctcctctaggtggatgtgaagcaccgccaagtcctttgagttttaggcagttgcgagtagtactctggcgaatagttttgttatgtaactatttgggtttagggctaggcatagtggggtatctaatcccagtttgggtcctagctatcgtgtgtcaggattattagagtcactttcgtgggttattttattttaactagggctttttacagcttagttataatttaactctattgtggtttttttttcttaaacactctttacgccgtggatctattaatttgggttaatcgtatgaccgcggtggctggcacgagatttaccaactctaattaatataacttagtcaaactttcgttcatggcttaatttttatcactgctgtttcccgtgggggtgtggttgagcaaggcgttatgagctaccgttataggtgtgcttgatacctgctccttttgatctttangatctggagggcattctcaccggggcgcggatacttgcatgtgtaattttattaagaattaatagaaaggccaggaccaaacctgtgtgtttatggggctgtgaggctcatctaggcattttcagtgccttgctttgataatttaagctacattaactataagctatattcagattgtgggcgtatgcttaataggtgcttatattctgggaggttattgtgttgtaattctaaactaatcttgtgctaggtttgtcctccaaatctagggtgatacgtgtgtccgaagtacggcccaggt

SEQ ID NO: 635723 - DNA, 3140 bp, Homo sapiens
  misc_feature (2839)..(2839): n is a, c, g, or t
acagttcacccggaataccacacacttaaaatcaactggctcaaactaaactcatcataccctactctcccttcatgttcttatatttgttcctttttagggtttgctgaagatggcggtatataggctgaattggcaagggttggtaaggtctatcggggtttatcgattatagaacaggctcctctaggtggatgtgaagcaccgccaagtcctttgagttttaggcagttgcgagtagtactctggcgaatagttttgttatgtaactatttgggtttagggctaggcatagtggggtatctaatcccagtttgggtcctagctatcgtgtgtcaggattattagagtcactttcgtgggttattttattttaactagggcttttatctctgagacgcgtttgtgaggttggtcccatttctcttgtcctttcgtactgggagaaatttataatagatagaaaccgacctggattgctccggtctgaactcagatcacgtaggactttaatcgttgaacaaacgaacctttaatagcggttgcaccatttgggtgtcctgatccaacatcgaggtcgtaaaccctattgtcgataggaactctagaataggattgcgctgttatccctagggtaacttgttccgttgatcaaaattttggatcaataagtgatgttatggttattttgactggtttgtctagattaaaatcactcggagggttttttgtactccgaggtcaccccaaccgaaattgctagtccatgttaagttatgttttatccctttgtggttgaattgtttaacttttggaatagttaattaaagctccatagggtcttctcgtcttatttttttattcccgcctcttcacgggaaggtcaatttcactgattggaagtaagagacagtaaaaccctcgtgtggccattcatacaagtccttatttggagaacaagtgattatgctacctttgcacggtcagaataccgcggccgttaaactggtgtcactgggcaggcattgcctctaatactagtaatgctagaggtgatgtttttggtaaacaggcggggtttgtgtttgccgagttccttttacttcttttaatctttccttggtgcactcctgtgttgggttaacaatataattaataaacgctttagtgttgttttggtttattgattgttaattatcagtatattattagttactgatgtaagcgtgtgcgaggagaaaggcttcttgttactcatattaacattattgcttctatgtttcaatagattagtccggtattgggctaggagtttgttattagtttttgggattatgttggtgaatttgttgagctttaacgctttctcaattgatggctgcttttaggcctactatggtagtattaagattttactctctagtcaaggttgtatccgtttctaaaaagctgtacctttttagactatctcttaaaaatacattggaatttagggtttttggggtatttttaaggttgaactaaaattctttctcggacaaccagctatcaccaggctcgttaggcttttcacctctacctacaagtcttctcactattttgccacatagatgagttggttcttttaaactgctcataggtagctcgtctggtttcggggtatctagctaaagttctctttgttagattttttctggttaaaccattatgcaaaaggtagaaggggtaatctttgcttttttttacttttattttattctttcatctttcccttacggtactatctctatagcgtcaggataaaaatttctatctcctatactttaatgttaggtgaatgttttattttattttggtgtatttttgtatttgtttagtatgttgagctagctttggttcaaagtacccatacattgtgggatcttctaggtgtaaactaggtgctttagtttaagctatgctttggtaatccaagcacactttccagtatgcttaccttgttacgacttgtctcttcttgcatggttgtgtaattgaatataggttatttttattactacatgcttgaggagggtgacgggcggtgtgtgcgtgcttcatggccttattcaatcaagcactctattcttgatttactgctaaatcctcctttggtttttagtttcataaaaactttcgtatggtgggtattcttatgtagaaaatgtagcccatttctttccaacccataagctacaccttgacctaacgtttttatgtgttatgattgtgcttactattgttcctttttagggtttgctgaagatggcggtatataggctgaattggcaagggttggtaaggtctatcggggtttatcgattatagaacaggctcctctaggtggatgtgaagcaccgccaagtcctttgagttttaggcagttgcgagtagtactctggcgaatagttttgttatgtaactatttgggtttagggctaggcatagtggggtatctaatcccagtttgggtcctagctatcgtgtgtcaggattattagagtcactttcgtgggttattttattttaactagggctttttacagcttagttataatttaactctattgtggtttttttttcttaaacactctttacgccgtggatctattaatttgggttaatcgtatgaccgcggtggctggcacgagatttaccaactctaattaatataacttagtcaaactttcgttcatggcttaatttttatcactgctgtttcccgtgggggtgtggttgagcaaggcgttatgagctaccgttataggtgtgcttgatacctgctccttttgatctttangatctggagggcattctcaccggggcgcggatacttgcatgtgtaattttattaagaattaatagaaaggccaggaccaaacctgtgtgtttatggggctgtgaggctcatctaggcattttcagtgccttgctttgataatttaagctacattaactataagctatattcagattgtgggcgtatgcttaataggtgcttatattctgggaggttattgtgttgtaattctaaactaatcttgtgctaggtttgtcctccaaatctagggtgatacgtgtgtccgaagtacggcccaggt

SEQ ID NO: 635724 - DNA, 2617 bp, Homo sapiens
  misc_feature (33)..(33): n is a, c, g, or t
  misc_feature (2316)..(2316): n is a, c, g, or t
actcgtactgtggtgtacgtgtcgcacatttgngtgtctgatccaacatcgaggtcgtaaaccctattgtcgataggaactctagaataggattgcgctgttatccctagggtaacttgttccgttgatcaaaattttggatcaataagtgatgttatggttattttgactggtttgtctagattaaaatcactcggagggttttttgtactccgaggtcaccccaaccgaaattgctagtccatgttaagttatgttttatccctttgtggttgaattgtttaacttttggaatagttaattaaagctccatagggtcttctcgtcttatttttttattcccgcctcttcacgggaaggtcaatttcactgattggaagtaagagacagtaaaaccctcgtgtggccattcatacaagtccttatttggagaacaagtgattatgctacctttgcacggtcagaataccgcggccgttaaactggtgtcactgggcaggcattgcctctaatactagtaatgctagaggtgatgtttttggtaaacaggcggggtttgtgtttgccgagttccttttacttcttttaatctttccttggtgcactcctgtgttgggttaacaatataattaataaacgctttagtgttgttttggtttattgattgttaattatcagtatattattagttactgatgtaagcgtgtgcgaggagaaaggcttcttgttactcatattaacattattgcttctatgtttcaatagattagtccggtattgggctaggagtttgttattagtttttgggattatgttggtgaatttgttgagctttaacgctttctcaattgatggctgcttttaggcctactatggtagtattaagattttactctctagtcaaggttgtatccgtttctaaaaagctgtacctttttagactatctcttaaaaatacattggaatttagggtttttggggtatttttaaggttgaactaaaattctttctcggacaaccagctatcaccaggctcgttaggcttttcacctctacctacaagtcttctcactattttgccacatagatgagttggttcttttaaactgctcataggtagctcgtctggtttcggggtatctagctaaagttctctttgttagattttttctggttaaaccattatgcaaaaggtagaaggggtaatctttgcttttttttacttttattttattctttcatctttcccttacggtactatctctatagcgtcaggataaaaatttctatctcctatactttaatgttaggtgaatgttttattttattttggtgtatttttgtatttgtttagtatgttgagctagctttggttcaaagtacccatacattgtgggatcttctaggtgtaaactaggtgctttagtttaagctatgctttggtaatccaagcacactttccagtatgcttaccttgttacgacttgtctcttcttgcatggttgtgtaattgaatataggttatttttattactacatgcttgaggagggtgacgggcggtgtgtgcgtgcttcatggccttattcaatcaagcactctattcttgatttactgctaaatcctcctttggtttttagtttcataaaaactttcgtatggtgggtattcttatgtagaaaatgtagcccatttctttccaacccataagctacaccttgacctaacgtttttatgtgttatgattgtgcttactattgttcctttttagggtttgctgaagatggcggtatataggctgaattggcaagggttggtaaggtctatcggggtttatcgattatagaacaggctcctctaggtggatgtgaagcaccgccaagtcctttgagttttaggcagttgcgagtagtactctggcgaatagttttgttatgtaactatttgggtttagggctaggcatagtggggtatctaatcccagtttgggtcctagctatcgtgtgtcaggattattagagtcactttcgtgggttattttattttaactagggctttttacagcttagttataatttaactctattgtggtttttttttcttaaacactctttacgccgtggatctattaatttgggttaatcgtatgaccgcggtggctggcacgagatttaccaactctaattaatataacttagtcaaactttcgttcatggcttaatttttatcactgctgtttcccgtgggggtgtggttgagcaaggcgttatgagctaccgttataggtgtgcttgatacctgctccttttgatctttangatctggagggcattctcaccggggcgcggatacttgcatgtgtaattttattaagaattaatagaaaggccaggaccaaacctgtgtgtttatggggctgtgaggctcatctaggcattttcagtgccttgctttgataatttaagctacattaactataagctatattcagattgtgggcgtatgcttaataggtgcttatattctgggaggttattgtgttgtaattctaaactaatcttgtgctaggtttgtcctccaaatctagggtgatacgtgtgtccgaagtacggcccaggt

SEQ ID NO: 635725 - DNA, 225 bp, Homo sapiens
gagcactgagtgaacgagactccgtctgcaatctcggcctcccaaagtgctgggattacaggcgtgacacccgcgcccggctagacaatttttttgtagagacagagttttgctgtgttgccaggatggtctggactcctgggctcagcaatcctcacacctcagcctccaaggtgttgggattacaggcgtaccacttgtgcccagctcagttttcattaaaaa

SEQ ID NO: 635726 - DNA, 666 bp, Homo sapiens
aagggtcccagagaagcttggtgccggacacctccttctcacctattcttagctagaggtcaccttttggctcttgcattcccaacctcaagtccgttcttggccttgttccacctttaatccttaggtaggtgggaggatcagggttaatccaggggcaacagctgtccttccttctgagcacctaactgctgagagagcaggcatggaatctaacccctcacttgtcaaccaagggctgagtcccttctagttcttcacatcccagagtcctatggcttccatccctcaacgcatccctaggcacgctctgagccttccctgagcacggttgggtcctgtctgtatttctgctgtctctagctagctgcttcttccctgccacctgactctggctcctggtcacatccctctacaacactgcagtatgggtccctttgagagagggctgtcccctgctccaggtcagcccacctgagtaagccactgctggctctgttctcaccacaccctctcaccagcattcacttggtgtatggtggctagctggatagctctttgctctgttccctctgggcctttctgtctcccatccccaccccaggcctgactgaggattcctggacttgagaaagcttctgtgctgactcaagagaacacaccaaa

SEQ ID NO: 635727 - DNA, 209 bp, Homo sapiens
ggtaatggtagctgtcactggaagttgtcacagaatagtcttttatccactgtgaacttaggcctaagaataattgtcctgtgtgacttcattttatgaacttttactttttaccgaaatcataacaatcggtctgtatctttagaagatactaatatctatgctttacaaagtgagaggagttgaagagggggctttcgttcatccct

SEQ ID NO: 635728 - DNA, 729 bp, Homo sapiens
tctgccatgcgtcgcaggtgcatgcctggtgctgatgtgctggatgcatgtgggtcccatggcctgttgacaggagagtgacacgtggcccttttgggatggtggggtgcaaaggtgagggtgcccccgatggaagctgggagaggtcctgtgatggccacctgtcaaagtggccactggtgtctactgaggatctgtgaccctgcttggtccggagaacatgtgctgggggctgatggctggttttaaagccaggagggatgagatccagtctgaagtgtagtgtcacttggtcctatttcgtataccttctctgtgggagtatccagctctctcagagggcatgaagacccgggataataggagacatgaatggaagggaacgcatgggaaggggcctggtgcacgtgcggaacgtgggaagagctcacgtggctgctgtgccagcaggggagccatgtgtgcacaccctccatgcggcagctgccagcgatggccccctgtgcttggcacaagcggtgccaaatggcctgcctctgctttcctctaacaattgtatttctgtttttcacttggttttccctgttctctaacactgagtgtcttattagactaaaactggatatagccctacccagtgactgtagagtcacggacggccttaaaactcttttcagcacttgaaactcttctgggcacctgctgtgtgttacgagacgagaggcttgc

SEQ ID NO: 635729 - DNA, 824 bp, Homo sapiens
ggcggcgaggacctgggcggctgttggcagaagctggccgagctggatgtggcccgccaggtgagtgagctgctgcgggagaacctagcgcttactgggatgctctgcctggtgctgggcgaagaatggggcccccgcggcggcccagctggcgccgggggatcagtgagccgggcagcacccggagctttgtcttgcccccgtgctgggccccgtgacctagtgcggattgtgaagctccagcactggcatggatgtgggcatgtcctggatcagttgcccctggcctgttcccccgatgatttgacaaggcaacttgttccctccaatgcatgacgcccgccgggatttgctccccgagtccccctgggtggaactgctttgtggacctcggggacttggactgcctgtccttggcttgctgcatttggaggggcctgctggcattggggttaataaaatcctggacaccaatgaacggggacccctctgacttctttgctttggcatgtgccatgaatttgtgaattgaatggctggagcggatgggagttgctgtggggtgggattgtggggtgaattcaagccctggacggaagcgggaccaagacaaggaacgcaaagactctgaacgtccaaagaaaaagaaaaacgaccgaaaagcaatagacaaacacagcgaataaataaagagatatcacgcgaaaaatatgagagacgcacacaagtatagagacgctgaacaaaccacaatgcaccaaccacatgtaccagccagagatgggaaaagacaatagacaaaagaaacccgaagtgaacagagg

SEQ ID NO: 635730 - DNA, 1507 bp, Homo sapiens
  misc_feature (449)..(449): n is a, c, g, or t
tcgaaaccagccttctgcttcattgggatgtcacaataagcctaatgcccatgactcaccatagaattgtcagagacccaccattatagactgtgctctgtctttcggagacacgaagcgtttgagatccttttataaacctggactgttaaaaaacaaagataaccagagtggcaatttcttctagaacgcacctggttgtccagagaaactctcatacaagagtgtggtcatcgtcacactaattacgctgtgaatatatatcgctcttaatactctctcacacagacaactggggtgagcatacttccacacactgtcacaatacacactggtgtgagagaggtgcacccatagatttgtgatctcacacagaggagataagtgctgatatcacccaaagtgtgtctctgtgtcacactcatcactgatgtgcgagtggcgcatgngatgatggtcacaccaactctataaaaatgtgtgtgtgagtttgtgtgccccactctatatacagacacatctgatgtgagaaacggccaaagaaatgagggcacaactccacatcccacctgcagggttaaagaaggggcgcccaccacacttttattataagattcccatcatacacttggtgctgcgtgccgccacacaatcttttttactatacacaggcgtgtcacaactcgtggtcacacaggttatgaataggtgctacaagcgagacagacctgtcccaataagacccagacatacccctctacaatacggcgtgtggaggatacagtggtgtggtcccgttgttgtgctccaaccgagatataatcttctgtatagaacgaaaacacgaattgttttggcgggaccctttattttcgcaacagcgagacggtggtttttccaaaccccagaggaaaaattgtttctgtgggcacgacccctcttatatacactaagtaagcggcttttatcataaccgcagcgtcgagtgtggacaaattctcccccgtaaatctttctcttcataaccgcgcgagaaaactccaacggctaacccgcaagggtgtgttctccataacaaacactctctcataaaaccccccttatgatatggcgaggtttcccccggacacacactagggggaggatactccaccgacaagactaatccacccccccaccttcatcgttggcaaggaccggccccctctttctctagcccgccctcccacatacaccaccctgtacgggcgacacctcctacgcacgcacagccatcccaccccagggccgcgccctccacgcgcgctggtaaccaacccctctgcctcagacaagtccctccgacacagctcattactcaacgtgctgccgtcggcccccccgacaaaagcaaacagcgcttctgtgccaacaccaaccactcctcccctgcgactccccccccacccaccctaatacacagcggcaacaacacacccatcgcgggccctctccctcaacaacctac

SEQ ID NO: 635731 - DNA, 121 bp, Homo sapiens
atgtgcacaaattattgtggtacatgtaagacgtgactggaacagaaatgtagcagcagtatacgaacatgtatactatttcaccatatgccaataaaaggcgggtggagagctctcaagg

SEQ ID NO: 635732 - DNA, 314 bp, Homo sapiens
  misc_feature (10)..(10): n is a, c, g, or t
  misc_feature (63)..(63): n is a, c, g, or t
acggctgtancccacctctgcggataggcagagtttgtatgctttttgaaatatgtaaaattnacaaacaaagctcatcagtataatataattaaaagggccatttttccttggcactggtaattggaaaattttttggcctaaccgtagccctgtgctgtatcatgggcatagtatattgtaacctttgtctaaatcattggatttattgtgtcacttctgaagtttcacagacattgattgaattttattccatcctatgataagaagtgagataatttatgggagtgggaacgaattatagaccttgaatt

SEQ ID NO: 635733 - DNA, 141 bp, Homo sapiens
gtaacgccattaccgtccgagccgcgagagccttagccgacggaaactggacactggagcggcagcgcccatgagactcctcccccgtcttgctgctgcttctcttactcgtgttcccgtgccactggtcttgttcctgag

SEQ ID NO: 635734 - DNA, 1023 bp, Homo sapiens
  misc_feature (168)..(168): n is a, c, g, or t
gggcgggagtgtccgcggtggtggtcggtgcagagaggagcgtgaaggtgagcgcgctggaggagtcgtcgcgaagattctcaggctcgagtcgaagttagcgccagctgcaggcgagctggcggtcgccgagtcgcgtaatgacgtgaacacctgagatggctcgcngtagatgtgcagtcgagtcaccacgtggaccatgaagagtgcaatcttatcgtgttcgcccaaaccagcagatcaagaacacaatggtttgtggtgctaggagcacagcgagcccgagtcgccctggcgagcatggttttggcgagatgagtgcagaagcgggtggggcatctccgcgccgtccaagtttcgatcactcgcttgcacagcggggcttctgaccaggtatgatgtagaatgttcacggggctaggcctgtcagtggcagagctctgatcggaggggcgtcgggcgtcggccggcccaatgcctcctcgtctgaacccgccggcttatatcagctccatccaggcccggggcccccaagaccatcggtgcggggcgagctacaaggttgccaagaatcgatggggtgccctcgaacgcatgctttgcgtgagtacggaggtttgagaacgatgtcgagtgatcgaccgcatccaactccctgtcggagagacaagccctgctgcgcccgacccgtgcccgcctagggacaatgcggatgccagaggagtccgggcaccatcggccagagggggcccagggaaggcaggcagtcgaggccggttcgccggtcacagcgaggcgtgtggcggcagtggtgacaggcgacgggcggtggcagagaagaggcccaagtcttccagggagggctcagggggtccccaggagtcctcccggggacaaacgcccctctcggggctgattgttcggacccccaggctgctggtctgcgcagtggggcgaaactggcagttggccggcctttaacactacccgggaggttggacgggacaccattccggggttgcc

SEQ ID NO: 635735 - DNA, 805 bp, Homo sapiens
  misc_feature (344)..(344): n is a, c, g, or t
ccgagtgtctagaggagcatgatgacccatggcacccgcgagctgttcaccgtcagtcggcgcaatggtcagggcgccaggtcgggtcccggagcggaacatcctggagggcaggagtcaatagtacgagagtctaagaaacgctgagtgggcagggcagtctcctacaagtgctgccgatgaatgggaccaagtaaagtgggcctgactgatatgcggtgactatcggctcccttgagagtatgtatgttgaacgtgtggtattctctgctgacactggatcaggccaaaaggaaaggaagaggaaaacacgatcagagaaatcaagaagctcgctctcgagnccaggcaccgaagtggacaacaccatgaaaatagggcctatatacccatatgcatggcactgggcacgtgctagacaccagagtatgcgcctacgttcgtgcgcgtattcgtctggatactcccaagggtggagcagaacatagaacaggtctacacgcgagaaagatttactcgggaaggtccttgggaacggctcctgtatcaaagtcctgttggccgggatgggacaacaccgggcagcgccaacaccacaaaatgccgtaacaaaggggggcaacccaccaatggtgggcgcaccggcgcaacgttgcagcaacgacgcccttggaacagggtctcccgcatagaaaagggcccacccatggggcaactcgtcttcataacaccgtaacggcggagaggcgtttttaccccgggcacccgggtacctttgacccctacccgggaggaacaaccgcac

SEQ ID NO: 635736 - DNA, 154 bp, Homo sapiens
actctgcatatgggacaagtgaacaattttattaactcctgaattttccagttgactcttcctttacaagtagtaacaagttctaactagttgtgtaaatttcttcaaggccaagttttatcattgtggctaactatcctatagacgctgaagc

SEQ ID NO: 635737 - DNA, 161 bp, Homo sapiens
actcctcccccgccctgcacgcgcaggaccgacgcccaccgcatccgggccgccgacacgaggtgcgtgtgctccgactctgcaccgtcacacagcgtggcggcgacgatcctagctgcacgctcgcacctgagttagcagctcgcccctgggttagccgc

SEQ ID NO: 635738 - DNA, 136 bp, Homo sapiens
ccgagaatcgcaccactgaactccatatttgagggacagatcaagactccgtctcagaataacgaaaagtttgcttggggtccgggcccctgacaggcatatctctcctggtggctgccctgccctgtagtcacag

SEQ ID NO: 635739 - DNA, 205 bp, Homo sapiens
cacgagggatgccaggatggtcgcagggaacactttactggtagaaaggaagagatacaggggacatagatgtctcggtgtggggatgttggtcatcttgggctggttcacacaggcgagatcactaactgctatacacaagtttctacatttctacaacgatgatttcagccacaaaggcaaccacgtcaccatttccaaatta

SEQ ID NO: 635740 - DNA, 545 bp, Homo sapiens
ccctttttatccgtcacacacgagaagccacgtgacagtcatataaggatgcagtaacgacagatatactacgaagaatgaccatgatagtgatggatacatattctcccaaggaataccaagtataccaacacgatgaactatagcatatttgtatttctacttataaaaaagcagctataaactgtacaaaatgtataaaacaaagtcaatatagctccacgttgtattagctataattcccctatgagaagatatttggatctccccaatacattgataaaggtataataaatgtagaggctgtattgcaaacttaacttgcaggaatggtatgactgtgttacctactgctattcttctgtaaccaagaattgtagcaccatgaaacagacctctgggtcgcagtgggcatatttacccctttcaggatgtaggaggacatgtctagtatgtcaaacactgcaaggctatttcccaactttaaccttaccagcatgttaatatccagtcttattatagttaaaaagttaaagtgcctcata

SEQ ID NO: 635741 - DNA, 2655 bp, Homo sapiens
  misc_feature (1700)..(1700): n is a, c, g, or t
ggtgcagcagagtgcgttcctcgtctgccagccggcttggctagcgcgcggcggccgtggctaaggctgctacgaagcgagcttgggaggagcagcggcctgcggggcagaggagcatcccgtctaccaggtcccaagcggcgtggcccgcgggtcatggccaaaggagaaggcgccgagagcggctccgcggcggggctgctacccaccagcatcctccaaagcactgaacgcccggcccaggtgaagaaagaaccgaaaaagaagaaacaacagttgtctgtttgcaacaagctttgctatgcacttgggggagccccctaccaggtgacgggctgtgccctgggtttcttccttcagatctacctattggatgtggctcaggtgggccctttctctgcctccatcatcctgtttgtgggccgagcctgggatgccatcacagaccccctggtgggcctctgcatcagcaaatccccctggacctgcctgggtcgccttatgccctggatcatcttctccacgcccctggccgtcattgcctacttcctcatctggttcgtgcccgacttcccacacggccagacctattggtacctgcttttctattgcctctttgaaacaatggtcacgtgtttccatgttccctactcggctctcaccatgttcatcagcaccgagcagactgagcgggattctgccaccgcctatcggatgactgtggaagtgctgggcacagtgctgggcacggcgatccagggacaaatcgtgggccaagcagacacgccttgtttccaggacctcaatagctctacagtagcttcacaaagtgccaaccatacacatggcaccacctcacacagggaaacgcaaaaggcatacctgctggcagcgggggtcattgtctgtatctatataatctgtgctgtcatcctgatcctgggcgtgcgggagcagagagaaccctatgaagcccagcagtctgagccaatcgcctacttccggggcctacggctggtcatgagccacggcccatacatcaaacttattactggcttcctcttcacctccttggctttcatgctggtggaggggaactttgtcttgttttgcacctacaccttgggcttccgcaatgaattccagaatctactcctggccatcatgctctcggccactttaaccattcccatctggcagtggttcttgacccggtttggcaagaagacagctgtatatgttgggatctcagtgagtggggttgaagagcagagcctgggttgagttgggatgtctggtgggaacctcccagctgattcatcttcctgcacccccttccctagtcagcagtgccatttctcatcttggtggccctcatggagagtaacctcatcattacatatgcggtagctgtggcagctggcatcagtgtggcagctgccttcttactaccctggtaggtatatacaggcccccctcctcgggtatctccagcccctagtccccagttttgaagctccttagggagagttctatgcagtgttctcccacaggccattctgtgggtccaggttaggagtgggggaggtctgtcctgtacagttgtacaggtagtgagctttgcaagaacacctagtcggagtgaaaaatgggggctgtaatctggcctgggctccacttgccacgctgagcacctccangcagggttacttcctcttagagcaagaggccttttcttattcatgtgaaggtcccatatcctcactgagctgtgtacccatggtactgcaagcttccagagggccacctcttctcattaacacagaggcccgttaggtgggtcagtcctcatggctgtcactactctgcgcaggtccatgctgcctgatgtcattgacgacttccatctgaagcagccccacttccatggaaccgagcccatcttcttctccttctatgtcttcttcaccaagtttgcctctggagtgtcactgggcatttctaccctcagtctggactttgcagggtaccagacccgtggctgctcgcagccggaacgtgtcaagtttacactgaacatgctcgtgaccatggctcccatagttctcatcctgctgggcctgctgctcttcaaaatgtaccccattgatgaggagaggcggcggcagaataagaaggccctgcaggcactgagggacgaggccagcagctctggctgctcagaaacagactccacagagctggctagcatcctctagggcccgccacgttgcccgaagccaccatgcagaaggccacagaagggatcaggacctgtctgccggcttgctgagcagctggactgcaggtgctaggaagggaactgaagactcaaggaggtggcccaggacacttgctgtgctcactgtggggccggctgctctgtggcctcctgcctcccctctgcctgcctgtggggccaagccctggggctgccactgtgaatatgccaaggactgatcgggcctagcccggaacactaatgtagaaaccttttttttacagagcctaattaataacttaatgactgtgtacatagcaatgtgtgtgtatgtatatgtctgtgagctattaatgttattaattttcataaaagctggaaagcagctgcctgtt

SEQ ID NO: 635742 - DNA, 425 bp, Homo sapiens
  misc_feature (215)..(215): n is a, c, g, or t
  misc_feature (295)..(295): n is a, c, g, or t
ctcccttcccttgttgacatcatccctcacggacccgtcggctcctgtacccccagcagccagctactacatgaggaacagtgtgtctcctgtgcctgccccagcggccagctacgtgcggtgggccatgctaggggggtgacctgacacagtgctaacggagcctgccccagccctgttgggaatggctacgtcagtgctcgggcttcccaacncaggggcgagctgcaactcaggggcgagctgcaactcaggggcgagctgcaactcaggggcgagctgcaactcaggggcnagctgcaactcaggggcgagctgcaactaaggggcgagctgcaactcaggggcgagctgcagctcatggggcagagctgccaattagactctatttgtgggtgctttttggccggctttccaccggggtg

SEQ ID NO: 635743 - DNA, 722 bp, Homo sapiens
ttctggagtatgtatagcttgtacctgaagtgatccttcaatgtggcctgacttagaatgaagggatttaatcgtgttgaagttactttaatcaattaaattagctactcgaatatagaccctacgcctagattaaggttgaatatatgctattattcgtgcttcatatcctccttccattcataagtatatacttgacaagtacatctgttaggccaatgatttgagtctctttgaagttctgaggaagaggcaaagtacttaagactattaggaatctagatttcagatgtagtcattccagaacctgtctctttatgagttcacctgcataggtacaattctccacaagttggaatggcatgggtgtgtactgtaattcctgccaaagggccttcacaagagttgttacatctatcaagtgttccactttgactcgcaagaagaactggtaatataaacgaagagtatgtgtctttatttgtattggaaaatactgtctttaacatttgtggtcttgttgactactcctcagaatggtaatattacccgaattagacctgtttaatggatgggagcttggagcataggaaagaagttggaggatttgaattcccattaccagttctcattgtgttggtgcttaaaaatatattaatcgggataatgtaataaaggtttaaaaggtggtttaaatgtgaatagcagtttctggatatcgg

SEQ ID NO: 635744 - DNA, 803 bp, Homo sapiens
cgggtcccagcatcgggccaacccccaatgtttggtttttgtcaaaaatttgccttcttagaatgcaaaaaagttttatttctagttaagggccggttgttctcaaactgcggggtcccccggctgtaagaaattcgccccccgtgggcaatgggaacgtcaaaagatggcaaaaaattggaactttctataaagacccagatctcaaaaattaggttcctgaagaaaaggtcaccactaggttaggtctgctgtccaactcttaaaggtgcgaaagagcccgtctggagcaatgagtggtccttaggggtgaagtaccggaaaataagccatctagaaagatgttaaaggtacagttctccccccacatccctacagagccatctgggttccagtgttttatcagacagtttcctaccacactgtgatgtgttttcatgttgaaagtacttttggatttttcctttgagtgcccatttggcactagtagatcttctcaaggcagcatggtatcctggcatggattttaactatgagtgtatagtgtgaattgaaacaggcaccttttgtgccatgcgctttcatgtgagggacagaagcagtgtgatccagttgagttccatcatttggttgcgctgacctaggaaggttggtcagatcaaacattaaaaatgaccactctgtaaactgaaattagcttttgtatgtttatgggggtatgtactgtccagtaatattagatatgccagacgtttgtcagggactgcccttcccctcaatcttggggtgcaataaagaacgtt

SEQ ID NO: 635745 - DNA, 3604 bp, Homo sapiens
  misc_feature (55)..(55): n is a, c, g, or t
  misc_feature (174)..(174): n is a, c, g, or t
  misc_feature (204)..(204): n is a, c, g, or t
  misc_feature (852)..(852): n is a, c, g, or t
  misc_feature (3534)..(3534): n is a, c, g, or t
  misc_feature (3537)..(3537): n is a, c, g, or t
  misc_feature (3578)..(3579): n is a, c, g, or t
tgttagtaggggtactctaggttgttagtgggtgaattctgttggtggtcagaanctcctaattcgggtgttggtgctaggcttgagtggtagaaagctcaaaagaatccagtgaagaacagaacctcggaaataataaataaaattataccgtatcgtaagcctttttggacnactgatgtgtggtggccttggaaagtgctntctcgaataatgtctcgtcaccattggtatattgtcaaagtattggttaatagtcctagagatagtaagagtatagagttaaagtggaatcatataattaggcctgatgttattaaaagggctgatagggctccggtaagtggtcatgggcttgggtttactatgtggtatgcatgtgtttggtgggtcattatgtattgtcgtgtaggtataagcttactagcagtgtaaacacataagcttggatcagagctactgcaaattcaagaatagttaataggatgaggatagtaaatgtgataagggtagtgtagataatgggattaattagtatgggaagggtatgaaccaacattttcggggtatgggcccgatagcttagcttagctgaccttactgtagaatgtggtgtattttggtagcacggagaattttgaattctcaggtttaggttcgagtcctattgttctagaaataagagggtttgaacctctattttttactctatcaaagtaactcttttatcagacatatttctatgattgtgggggaatgcttgctgttataatagggagtgagatgtgtcatatacatagagctagtgttaggggcaggaagctttttcatagtaaatgtattagttggtcntatcggaatcgtgggtatgatgctcggattcataggaaggtgattgttaatgcgagtgtttttagtacgaagttgattgtatatagttctgatgtgtgtgggtcgtggaatgctcctaggaagagaattgctgtgaatgcatttattatgatgatgttggcatattctgctatgaagaatatggcgaaaggtccggctgcatattctacgttaaagcctgatacaagttctgactctccttctgtaaggtcgaacggggctcggttggtttctgctagggttgagataaatcatattatggctaggggtcaggatgtaaagattattcaaatgtgctcttgtgttgtgattagggttgatagagtatatgatccatttattaggagtactgatagtaggatgattgctagtgttacttcatatgagattgtttgggctactgctcgtagggccccgatgagtgcgtattttgagttggatgctcatcctgatcataggatagagtagactgctaggcttgacatggctagcatgaatagtactcctagatttatgttgattagagggtagggtattggtagtggaactcatattgttagtgctagggataaggctaggattggtgcaataatgaacatggagattgaggatgtggctggtcgtaggggttctttggtgaatagttttagggcatcggcgatgggttggagtaggccgtaggggcctacaacgttgggtccttttcgtagttgcatataacctagtacttttcgttctactagggtgaggaatgctacggccagtaggataggaatgattaggcttagaatgttaattatgaacatgctattagggagaggagttgaacctctggtaataaaggtttaagttttacgcaattaccggtctctgccaccctaatgtgccctgttctagggctggatttattatgagttaattaggttaagattatatcattaattatctctgagacgcgtttgtgaggttggtcccatttctcttgtcctttcgtactgggagaaatttataatagatagaaaccgacctggattgctccggtctgaactcagatcacgtaggactttaatcgttgaacaaacgaacctttaatagcggttgcaccatttgggtgtcctgatccaacatcgaggtcgtaaaccctattgtcgataggaactctagaataggattgcgctgttatccctagggtaacttgttccgttgatcaaaattttggatcaataagtgatgttatggttattttgactggtttgtctagattaaaatcactcggagggttttttgtactccgaggtcaccccaaccgaaattgctagtccatgttaagttatgttttatccctttgtggttgaattgtttaacttttggaatagttaattaaagctccatagggtcttctcgtcttatttttttattcccgcctcttcacgggaaggtcaatttcactgattggaagtaagagacagtaaaaccctcgtgtggccattcatacaagtccttatttggagaacaagtgattatgctacctttgcacggtcagaataccgcggccgttaaactggtgtcactgggcaggcattgcctctaatactagtaatgctagaggtgatgtttttggtaaacaggcggggtttgtgtttgccgagttccttttacttcttttaatctttccttggtgcactcctgtgttgggttaacaatataattaataaacgctttagtgttgttttggtttattgattgttaattatcagtatattattagttactgatgtaagcgtgtgcgaggagaaaggcttcttgttactcatattaacattattgcttctatgtttcaatagattagtccggtattgggctaggagtttgttattagtttttgggattatgttggtgaatttgttgagctttaacgctttctcaattgatggctgcttttaggcctactatggtagtattaagattttactctctagtcaaggttgtatccgtttctaaaaagctgtacctttttagactatctcttaaaaatacattggaatttagggtttttggggtatttttaaggttgaactaaaattctttctcggacaaccagctatcaccaggctcgttaggcttttcacctctacctacaagtcttctcactattttgccacatagatgagttggttcttttaaactgctcataggtagctcgtctggtttcggggtatctagctaaagttctctttgttagattttttctggttaaaccattatgcaaaaggtagaaggggtaatctttgcttttttttacttttattttattctttcatctttcccttacggtactatctctatagcgtcaggataaaaatttctatctctaatactagtaatgctagaggtgatgtttttggtaaacaggcggggtttgtgtttgccgagttccttttacttcttttaatctttccttggtgcactcctgtgttgggttaacaatgtaattaataaacgttttagtgttgttttggtttattggttgttaattatcagtatattattagttactgatgtaagcgtgtgcgaggagaaaggcttcttgttactcatattaacattattgcttctatgtttcaatagattagtccggtattnggnctaggagtttgttattagtttttgggagtattgtgtgatanntgatagtggggaatcctctagacgt

SEQ ID NO: 635746 - DNA, 2145 bp, Homo sapiens
ggtgcagcagagtgcgttcctcgtctgccagccggcttggctagcgcgcggcggccgtggctaaggctgctacgaagcgagcttgggaggagcagcggcctgcggggcagaggagcatcccgtctaccaggtcccaagcggcgtggcccgcgggtcatggccaaaggagaaggcgccgagagcggctccgcggcggggctgctacccaccagcatcctccaaagcactgaacgcccggcccaggtgaagaaagaaccgaaaaagaagaaacaacagttgtctgtttgcaacaagctttgctatgcacttgggggagccccctaccaggtgacgggctgtgccctgggtttcttccttcagatctacctattggatgtggctcaggtgggccctttctctgcctccatcatcctgtttgtgggccgagcctgggatgccatcacagaccccctggtgggcctctgcatcagcaaatccccctggacctgcctgggtcgccttatgccctggatcatcttctccacgcccctggccgtcattgcctacttcctcatctggttcgtgcccgacttcccacacggccagacctattggtacctgcttttctattgcctctttgaaacaatggtcacgtgtttccatgttccctactcggctctcaccatgttcatcagcaccgagcagactgagcgggattctgccaccgcctatcggatgactgtggaagtgctgggcacagtgctgggcacggcgatccagggacaaatcgtgggccaagcagacacgccttgtttccaggacctcaatagctctacagtagcttcacaaagtgccaaccatacacatggcaccacctcacacagggaaacgcaaaaggcatacctgctggcagcgggggtcattgtctgtatctatataatctgtgctgtcatcctgatcctgggcgtgcgggagcagagagaaccctatgaagcccagcagtctgagccaatcgcctacttccggggcctacggctggtcatgagccacggcccatacatcaaacttattactggcttcctcttcacctccttggctttcatgctggtggaggggaactttgtcttgttttgcacctacaccttgggcttccgcaatgaattccagaatctactcctggccatcatgctctcggccactttaaccattcccatctggcagtggttcttgacccggtttggcaagaagacagctgtatatgttgggatctcatcagcagtgccatttctcatcttggtggccctcatggagagtaacctcatcattacatatgcggtagctgtggcagctggcatcagtgtggcagctgccttcttactaccctggtccatgctgcctgatgtcattgacgacttccatctgaagcagccccacttccatggaaccgagcccatcttcttctccttctatgtcttcttcaccaagtttgcctctggagtgtcactgggcatttctaccctcagtctggactttgcagggtaccagacccgtggctgctcgcagccggaacgtgtcaagtttacactgaacatgctcgtgaccatggctcccatagttctcatcctgctgggcctgctgctcttcaaaatgtaccccattgatgaggagaggcggcggcagaataagaaggccctgcaggcactggggacgaggcccgccgctctggctgctcagaaacagactccacagagctggctagcatcctctagggcccgccacgttgcccgaagccaccatgcagaaggccacagaagggatcaggacctgtctgccggcttgctgagcagctggactgcaggtgctaggaagggaactgaagactcaaggaggtggcccaggacacttgctgtgctcactgtggggccggctgctctgtggcctcctgcctcccctctgcctgcctgtggggccaagccctggggctgccactgtgaatatgccaaggactgatcgggcctagcccggaacactaatgtagaaaccttttttttacagagcctaattaataacttaatgactgtgtacatagcaatgtgtgtgtatgtatatgtctgtgagctattaatgttattaattttcataaaagctggaaagcagctgcctgtt

SEQ ID NO: 635747 - DNA, 306 bp, Homo sapiens
  misc_feature (7)..(7): n is a, c, g, or t
  misc_feature (30)..(30): n is a, c, g, or t
  misc_feature (89)..(89): n is a, c, g, or t
  misc_feature (213)..(213): n is a, c, g, or t
  misc_feature (253)..(253): n is a, c, g, or t
tgaaaanaccattggggacgtgcgaagctntagcgaaggccagggtcatggatgcctctgcctttgagatcttcagcaaattcccgccnaccctctaccaggacgatacactcacgcttgcaggctgcaggccttgtgcccaaaaaagcactgctgctgcgggcacgccgagccccgaagtccagcctgaaattcagtcctggtccctgtccnggtcccggccccagtccctgtcccggtcccggtcccggcnccagtccctgtcccggacccagtcccagcccccaataaagcacccgccccctc

SEQ ID NO: 635748 - DNA, 3401 bp, Homo sapiens
  misc_feature (55)..(55): n is a, c, g, or t
  misc_feature (174)..(174): n is a, c, g, or t
  misc_feature (204)..(204): n is a, c, g, or t
  misc_feature (852)..(852): n is a, c, g, or t
tgttagtaggggtactctaggttgttagtgggtgaattctgttggtggtcagaanctcctaattcgggtgttggtgctaggcttgagtggtagaaagctcaaaagaatccagtgaagaacagaacctcggaaataataaataaaattataccgtatcgtaagcctttttggacnactgatgtgtggtggccttggaaagtgctntctcgaataatgtctcgtcaccattggtatattgtcaaagtattggttaatagtcctagagatagtaagagtatagagttaaagtggaatcatataattaggcctgatgttattaaaagggctgatagggctccggtaagtggtcatgggcttgggtttactatgtggtatgcatgtgtttggtgggtcattatgtattgtcgtgtaggtataagcttactagcagtgtaaacacataagcttggatcagagctactgcaaattcaagaatagttaataggatgaggatagtaaatgtgataagggtagtgtagataatgggattaattagtatgggaagggtatgaaccaacattttcggggtatgggcccgatagcttagcttagctgaccttactgtagaatgtggtgtattttggtagcacggagaattttgaattctcaggtttaggttcgagtcctattgttctagaaataagagggtttgaacctctattttttactctatcaaagtaactcttttatcagacatatttctatgattgtgggggaatgcttgctgttataatagggagtgagatgtgtcatatacatagagctagtgttaggggcaggaagctttttcatagtaaatgtattagttggtcntatcggaatcgtgggtatgatgctcggattcataggaaggtgattgttaatgcgagtgtttttagtacgaagttgattgtatatagttctgatgtgtgtgggtcgtggaatgctcctaggaagagaattgctgtgaatgcatttattatgatgatgttggcatattctgctatgaagaatatggcgaaaggtccggctgcatattctacgttaaagcctgatacaagttctgactctccttctgtaaggtcgaacggggctcggttggtttctgctagggttgagataaatcatattatggctaggggtcaggatgtaaagattattcaaatgtgctcttgtgttgtgattagggttgatagagtatatgatccatttattaggagtactgatagtaggatgattgctagtgttacttcatatgagattgtttgggctactgctcgtagggccccgatgagtgcgtattttgagttggatgctcatcctgatcataggatagagtagactgctaggcttgacatggctagcatgaatagtactcctagatttatgttgattagagggtagggtattggtagtggaactcatattgttagtgctagggataaggctaggattggtgcaataatgaacatggagattgaggatgtggctggtcgtaggggttctttggtgaatagttttagggcatcggcgatgggttggagtaggccgtaggggcctacaacgttgggtccttttcgtagttgcatataacctagtacttttcgttctactagggtgaggaatgctacggccagtaggataggaatgattaggcttagaatgttaattatgaacatgctattagggagaggagttgaacctctggtaataaaggtttaagttttacgcaattaccggtctctgccaccctaatgtgccctgttctagggctggatttattatgagttaattaggttaagattatatcattaattatctctgagacgcgtttgtgaggttggtcccatttctcttgtcctttcgtactgggagaaatttataatagatagaaaccgacctggattgctccggtctgaactcagatcacgtaggactttaatcgttgaacaaacgaacctttaatagcggttgcaccatttgggtgtcctgatccaacatcgaggtcgtaaaccctattgtcgataggaactctagaataggattgcgctgttatccctagggtaacttgttccgttgatcaaaattttggatcaataagtgatgttatggttattttgactggtttgtctagattaaaatcactcggagggttttttgtactccgaggtcaccccaaccgaaattgctagtccatgttaagttatgttttatccctttgtggttgaattgtttaacttttggaatagttaattaaagctccatagggtcttctcgtcttatttttttattcccgcctcttcacgggaaggtcaatttcactgattggaagtaagagacagtaaaaccctcgtgtggccattcatacaagtccttatttggagaacaagtgattatgctacctttgcacggtcagaataccgcggccgttaaactggtgtcactgggcaggcattgcctctaatactagtaatgctagaggtgatgtttttggtaaacaggcggggtttgtgtttgccgagttccttttacttcttttaatctttccttggtgcactcctgtgttgggttaacaatataattaataaacgctttagtgttgttttggtttattgattgttaattatcagtatattattagttactgatgtaagcgtgtgcgaggagaaaggcttcttgttactcatattaacattattgcttctatgtttcaatagattagtccggtattgggctaggagtttgttattagtttttgggattatgttggtgaatttgttgagctttaacgctttctcaattgatggctgcttttaggcctactatggtagtattaagattttactctctagtcaaggttgtatccgtttctaaaaagctgtacctttttagactatctcttaaaaatacattggaatttagggtttttggggtatttttaaggttgaactaaaattctttctcggacaaccagctatcaccaggctcgttaggcttttcacctctacctacaagtcttctcactattttgccacatagatgagttggttcttttaaactgctcataggtagctcgtctggtttcggggtatctagctaaagttctctttgttagattttttctggttaaaccattatgcaaaaggtagaaggggtaatctttgctttttttattgaggtataaaatgtaagtaccttaaaatttccttcccttatatgaacactgtgtttgagtaattttgctggatttttcaaacacgtagtttcaaaaaccaagtgagtaactctaacatggaaactaaagcttgagcccagtgtctcagagctaaggctaatattgagcctacaaaaggaggttattaacaggaccagctagtttattt

SEQ ID NO: 635749 - DNA, 590 bp, Homo sapiens
  misc_feature (41)..(42): n is a, c, g, or t
  misc_feature (45)..(46): n is a, c, g, or t
  misc_feature (51)..(51): n is a, c, g, or t
  misc_feature (540)..(540): n is a, c, g, or t
  misc_feature (547)..(547): n is a, c, g, or t
  misc_feature (553)..(554): n is a, c, g, or t
gttgtaacaagcgccggtcagtgaccatgcacgaacttctnnagnngagtntagaggatgcccccactttaatactgcttgtctggctggatgatccactttaatactgcttgtctggctggatgatccactttaatactgcttgtctggctggatgatccactttaatactgcttgtctggctggatgatccactttaatactgcttgtctggctggatgatccactttaatactgcttgtctggctggatgatccactttaatactgcttgtctggctggatgatccactttaatactgcttgtctggctggatgatccactttaatactgcttgtctggctggatgatccactttaatactgcttgtctggctggatgatccactttaatactgcttgtctggctggatgatccactttaatactccaaggatgcaaccagatgtgtgcaggctacctcttccagccagacaagcagtattaaagtggatcatccagccagacaagcagtattaaagtggatcatccagccagacancagtatntggatnntccagccactttaagtggtatccgggccggctcttt

SEQ ID NO: 635750 - DNA, 2475 bp, Homo sapiens
  misc_feature (2174)..(2174): n is a, c, g, or t
taacttagcatgtactagcaatttcggttggggtgacctcggagtacaaaaaaccctccgagtgattttaatctagacaccccaaccgaaattgctagtccatgttaagttatgttttatccctttgtggttgaattgtttaacttttggaatagttaattaaagctccatagggtcttctcgtcttatttttttattcccgcctcttcacgggaaggtcaatttcactgattggaagtaagagacagtaaaaccctcgtgtggccattcatacaagtccttatttggagaacaagtgattatgctacctttgcacggtcagaataccgcggccgttaaactggtgtcactgggcaggcattgcctctaatactagtaatgctagaggtgatgtttttggtaaacaggcggggtttgtgtttgccgagttccttttacttcttttaatctttccttggtgcactcctgtgttgggttaacaatataattaataaacgctttagtgttgttttggtttattgattgttaattatcagtatattattagttactgatgtaagcgtgtgcgaggagaaaggcttcttgttactcatattaacattattgcttctatgtttcaatagattagtccggtattgggctaggagtttgttattagtttttgggattatgttggtgaatttgttgagctttaacgctttctcaattgatggctgcttttaggcctactatggtagtattaagattttactctctagtcaaggttgtatccgtttctaaaaagctgtacctttttagactatctcttaaaaatacattggaatttagggtttttggggtatttttaaggttgaactaaaattctttctcggacaaccagctatcaccaggctcgttaggcttttcacctctacctacaagtcttctcactattttgccacatagatgagttggttcttttaaactgctcataggtagctcgtctggtttcggggtatctagctaaagttctctttgttagattttttctggttaaaccattatgcaaaaggtagaaggggtaatctttgcttttttttacttttattttattctttcatctttcccttacggtactatctctatagcgtcaggataaaaatttctatctcctatactttaatgttaggtgaatgttttattttattttggtgtatttttgtatttgtttagtatgttgagctagctttggttcaaagtacccatacattgtgggatcttctaggtgtaaactaggtgctttagtttaagctatgctttggtaatccaagcacactttccagtatgcttaccttgttacgacttgtctcttcttgcatggttgtgtaattgaatataggttatttttattactacatgcttgaggagggtgacgggcggtgtgtgcgtgcttcatggccttattcaatcaagcactctattcttgatttactgctaaatcctcctttggtttttagtttcataaaaactttcgtatggtgggtattcttatgtagaaaatgtagcccatttctttccaacccataagctacaccttgacctaacgtttttatgtgttatgattgtgcttactattgttcctttttagggtttgctgaagatggcggtatataggctgaattggcaagggttggtaaggtctatcggggtttatcgattatagaacaggctcctctaggtggatgtgaagcaccgccaagtcctttgagttttaggcagttgcgagtagtactctggcgaatagttttgttatgtaactatttgggtttagggctaggcatagtggggtatctaatcccagtttgggtcctagctatcgtgtgtcaggattattagagtcactttcgtgggttattttattttaactagggctttttacagcttagttataatttaactctattgtggtttttttttcttaaacactctttacgccgtggatctattaatttgggttaatcgtatgaccgcggtggctggcacgagatttaccaactctaattaatataacttagtcaaactttcgttcatggcttaatttttatcactgctgtttcccgtgggggtgtggttgagcaaggcgttatgagctaccgttataggtgtgcttgatacctgctccttttgatctttangatctggagggcattctcaccggggcgcggatacttgcatgtgtaattttattaagaattaatagaaaggccaggaccaaacctgtgtgtttatggggctgtgaggctcatctaggcattttcagtgccttgctttgataatttaagctacattaactataagctatattcagattgtgggcgtatgcttaataggtgcttatattctgggaggttattgtgttgtaattctaaactaatcttgtgctaggtttgtcctccaaatctagggtgatacgtgtgtccgaagtacggcccaggt

SEQ ID NO: 635751 - DNA, 1945 bp, Homo sapiens
ggtgcagcagagtgcgttcctcgtctgccagccggcttggctagcgcgcggcggccgtggctaaggctgctacgaagcgagcttgggaggagcagcggcctgcggggcagaggagcatcccgtctaccaggtcccaagcggcgtggcccgcgggtcatggccaaaggagaaggcgccgagagcggctccgcggcggggctgctacccaccagcatcctccaaagcactgaacgcccggcccaggtgaagaaagaaccgaaaaagaagaaacaacagttgtctgtttgcaacaagctttgctatgcacttgggggagccccctaccaggtgacgggctgtgccctgggtttcttccttcagatctacctattggatgtggctcaggtgggccctttctctgcctccatcatcctgtttgtgggccgagcctgggatgccatcacagaccccctggtgggcctctgcatcagcaaatccccctggacctgcctgggtcgccttatgccctggatcatcttctccacgcccctggccgtcattgcctacttcctcatctggttcgtgcccgacttcccacacggccagacctattggtacctgcttttctattgcctctttgaaacaatggtcacgtgtttccatgttccctactcggctctcaccatgttcatcagcaccgagcagactgagcgggattctgccaccgcctatcggatgactgtggaagtgctgggcacagtgctgggcacggcgatccagggacaaatcgtgggccaagcagacacgccttgtttccaggacctcaatagctctacagtagcttcacaaagtgccaaccatacacatggcaccacctcacacagggaaacgcaaaaggcatacctgctggcagcgggggtcattgtctgtatctatataatctgtgctgtcatcctgatcctgggcgtgcgggagcagagagaaccctatgaagcccagcagtctgagccaatcgcctacttccggggcctacggctggtcatgagccacggcccatacatcaaacttattactggcttcctcttcacctccttggctttcatgctggtggaggggaactttgtcttgttttgcacctacaccttgggcttccgcaatgaattccagaatctactcctggccatcatgctctcggccactttaaccattcccatctggcagtggttcttgacccggtttggcaagaagacagctgtatatgttgggatctcatcagcagtgccatttctcatcttggtggccctcatggagagtaacctcatcattacatatgcggtagctgtggcagctggcatcagtgtggcagctgccttcttactaccctggtccatgctgcctgatgtcattgacgacttccatctgaagcagccccacttccatggaaccgagcccatcttcttctccttctatgtcttcttcaccaagtttgcctctggagtgtcactgggcatttctaccctcagtctggactttgcagggtaccagacccgtggctgctcgcagccggaacgtgtcaagtttacactgaacatgctcgtgaccatggctcccatagttctcatcctgctgggcctgctgctcttcaaaatgtaccccattgatgaggagaggcggcggcagaataagaaggccctgcaggcactgagggacgaggccagcagctctggctgctctgtggcctcctgcctcccctctgcctgcctgtggggccaagccctggggctgccactgtgaatatgccaaggactgatcgggcctagcccggaacactaatgtagaaaccttttttttacagagcctaattaataacttaatgactgtgtacatagcaatgtgtgtgtatgtatatgtctgtgagctattaatgttattaattttcataaaagctggaaagcagctgcctgtt

SEQ ID NO: 635752 - DNA, 122 bp, Homo sapiens
tggatctcctggctagatactggaggatggaagctgagactgaaggagcaataaaaccaggtttgcagcgaatgtctggcttaacttaccccgctggttacacaagagaaggtccaggtatg

SEQ ID NO: 635753 - DNA, 2776 bp, Homo sapiens
  misc_feature (55)..(55): n is a, c, g, or t
  misc_feature (174)..(174): n is a, c, g, or t
  misc_feature (204)..(204): n is a, c, g, or t
  misc_feature (852)..(852): n is a, c, g, or t
tgttagtaggggtactctaggttgttagtgggtgaattctgttggtggtcagaanctcctaattcgggtgttggtgctaggcttgagtggtagaaagctcaaaagaatccagtgaagaacagaacctcggaaataataaataaaattataccgtatcgtaagcctttttggacnactgatgtgtggtggccttggaaagtgctntctcgaataatgtctcgtcaccattggtatattgtcaaagtattggttaatagtcctagagatagtaagagtatagagttaaagtggaatcatataattaggcctgatgttattaaaagggctgatagggctccggtaagtggtcatgggcttgggtttactatgtggtatgcatgtgtttggtgggtcattatgtattgtcgtgtaggtataagcttactagcagtgtaaacacataagcttggatcagagctactgcaaattcaagaatagttaataggatgaggatagtaaatgtgataagggtagtgtagataatgggattaattagtatgggaagggtatgaaccaacattttcggggtatgggcccgatagcttagcttagctgaccttactgtagaatgtggtgtattttggtagcacggagaattttgaattctcaggtttaggttcgagtcctattgttctagaaataagagggtttgaacctctattttttactctatcaaagtaactcttttatcagacatatttctatgattgtgggggaatgcttgctgttataatagggagtgagatgtgtcatatacatagagctagtgttaggggcaggaagctttttcatagtaaatgtattagttggtcntatcggaatcgtgggtatgatgctcggattcataggaaggtgattgttaatgcgagtgtttttagtacgaagttgattgtatatagttctgatgtgtgtgggtcgtggaatgctcctaggaagagaattgctgtgaatgcatttattatgatgatgttggcatattctgctatgaagaatatggcgaaaggtccggctgcatattctacgttaaagcctgatacaagttctgactctccttctgtaaggtcgaacggggctcggttggtttctgctagggttgagataaatcatattatggctaggggtcaggatgtaaagattattcaaatgtgctcttgtgttgtgattagggttgatagagtatatgatccatttattaggagtactgatagtaggatgattgctagtgttacttcatatgagattgtttgggctactgctcgtagggccccgatgagtgcgtattttgagttggatgctcatcctgatcataggatagagtagactgctaggcttgacatggctagcatgaatagtactcctagatttatgttgattagagggtagggtattggtagtggaactcatattgttagtgctagggataaggctaggattggtgcaataatgaacatggagattgaggatgtggctggtcgtaggggttctttggtgaatagttttagggcatcggcgatgggttggagtaggccgtaggggcctacaacgttgggtccttttcgtagttgcatataacctagtacttttcgttctactagggtgaggaatgctacggccagtaggataggaatgattaggcttagaatgttaattatgaacatgctattagggagaggagttgaacctctggtaataaaggtttaagttttacgcaattaccggtctctgccaccctaatgtgccctgttctagggctggatttattatgagttaattaggttaagattatatcattaattatctctgagacgcgtttgtgaggttggtcccatttctcttgtcctttcgtactgggagaaatttataatagatagaaaccgacctggattgctccggtctgaactcagatcacgtaggactttaatcgttgaacaaacgaacctttaatagcggttgcaccatttgggtgtcctgatccaacatcgaggtcgtaaaccctattgtcgataggaactctagaataggattgcgctgttatccctagggtaacttgttccgttgatcaaaattttggatcaataagtgatgttatggttattttgactggtttgtctagattaaaatcactcggagggttttttgtactccgaggtcaccccaaccgaaattgctagtccatgttaagttatgttttatccctttgtggttgaattgtttaacttttggaatagttaattaaagctccatagggtcttctcgtcttatttttttattcccgcctcttcacgggaaggtcaatttcactgattggaagtaagagacagtaaaaccctcgtgtggccattcatacaagtccttatttggagaacaagtgattatgctacctttgcacggtcagaataccgcggccgttaaactggtgtcactgggcaggcattgcctctaatactagtaatgctagaggtgatgtttttggtaaacaggcggggtttgtgtttgccgagttccttttacttcttttaatctttccttggtgcactcctgtgttgggttaacaatataattaataaacgctttagtgttgttttggtttattgattgttaattatcagtatattattagttactgatgtaagcgtgtgcgaggagaaaggcttcttgttactcatattaacattattgcttctatgtttcaatagattagtccggtattgggctccgcaaggcaaaaagggtaccg

SEQ ID NO: 635754 - DNA, 1108 bp, Homo sapiens
gaggtcgtctagaggatcccaacgtcagcactcctggctttcatgctggtggaggggaactttgtcttgttttgcacctacaccttgggcttccgcaatgaattccagaatctactcctggccatcatgctctcggccactttaaccattcccatctggcagtggttcttgacccggtttggcaagaagacagctgtatatgttgggatctcatcagcagtgccatttctcatcttggtggccctcatggagagtaacctcatcattacatatgcggtagctgtggcagctggcatcagtgtggcagctgccttcttactaccctggtccatgctgcctgatgtcattgacgacttccatctgaagcagccccacttccatggaaccgagcccatcttcttctccttctatgtcttcttcaccaagtttgcctctggagtgtcactgggcatttctaccctcagtctggactttgcagggtaccagacccgtggctgctcgcagccggaacgtgtcaagtttacactgaacatgctcgtgaccatggctcccatagttctcatcctgctgggcctgctgctcttcaaaatgtaccccattgatgaggagaggcggcggcagaataagaaggccctgcaggcactgagggacgaggccagcagctctggctgctcagaaacagactccacagagctggctagcatcctctagggcccgccacgttgcccgaagccaccatgcagaaggccacagaagggatcaggacctgtctgccggcttgctgagcagctggactgcaggtgctaggaagggaactgaagactcaaggaggtggcccaggacacttgctgtgctcactgtggggccggctgctctgtggcctcctgcctcccctctgcctgcctgtggggccaagccctggggctgccactgtgaatatgccaaggactgatcgggcctagcccggaacactaatgtagaaaccttttttttacagagcctaattaataacttaatgactgtgtacatagcaatgtgtgtgtatgtatatgtctgtgagctattaatgttattaattttcataaaagctggaaagcagctgcctgtt

SEQ ID NO: 635755 - DNA, 2697 bp, Homo sapiens
  misc_feature (55)..(55): n is a, c, g, or t
  misc_feature (174)..(174): n is a, c, g, or t
  misc_feature (204)..(204): n is a, c, g, or t
  misc_feature (852)..(852): n is a, c, g, or t
  misc_feature (2667)..(2667): n is a, c, g, or t
tgttagtaggggtactctaggttgttagtgggtgaattctgttggtggtcagaanctcctaattcgggtgttggtgctaggcttgagtggtagaaagctcaaaagaatccagtgaagaacagaacctcggaaataataaataaaattataccgtatcgtaagcctttttggacnactgatgtgtggtggccttggaaagtgctntctcgaataatgtctcgtcaccattggtatattgtcaaagtattggttaatagtcctagagatagtaagagtatagagttaaagtggaatcatataattaggcctgatgttattaaaagggctgatagggctccggtaagtggtcatgggcttgggtttactatgtggtatgcatgtgtttggtgggtcattatgtattgtcgtgtaggtataagcttactagcagtgtaaacacataagcttggatcagagctactgcaaattcaagaatagttaataggatgaggatagtaaatgtgataagggtagtgtagataatgggattaattagtatgggaagggtatgaaccaacattttcggggtatgggcccgatagcttagcttagctgaccttactgtagaatgtggtgtattttggtagcacggagaattttgaattctcaggtttaggttcgagtcctattgttctagaaataagagggtttgaacctctattttttactctatcaaagtaactcttttatcagacatatttctatgattgtgggggaatgcttgctgttataatagggagtgagatgtgtcatatacatagagctagtgttaggggcaggaagctttttcatagtaaatgtattagttggtcntatcggaatcgtgggtatgatgctcggattcataggaaggtgattgttaatgcgagtgtttttagtacgaagttgattgtatatagttctgatgtgtgtgggtcgtggaatgctcctaggaagagaattgctgtgaatgcatttattatgatgatgttggcatattctgctatgaagaatatggcgaaaggtccggctgcatattctacgttaaagcctgatacaagttctgactctccttctgtaaggtcgaacggggctcggttggtttctgctagggttgagataaatcatattatggctaggggtcaggatgtaaagattattcaaatgtgctcttgtgttgtgattagggttgatagagtatatgatccatttattaggagtactgatagtaggatgattgctagtgttacttcatatgagattgtttgggctactgctcgtagggccccgatgagtgcgtattttgagttggatgctcatcctgatcataggatagagtagactgctaggcttgacatggctagcatgaatagtactcctagatttatgttgattagagggtagggtattggtagtggaactcatattgttagtgctagggataaggctaggattggtgcaataatgaacatggagattgaggatgtggctggtcgtaggggttctttggtgaatagttttagggcatcggcgatgggttggagtaggccgtaggggcctacaacgttgggtccttttcgtagttgcatataacctagtacttttcgttctactagggtgaggaatgctacggccagtaggataggaatgattaggcttagaatgttaattatgaacatgctattagggagaggagttgaacctctggtaataaaggtttaagttttacgcaattaccggtctctgccaccctaatgtgccctgttctagggctggatttattatgagttaattaggttaagattatatcattaattatctctgagacgcgtttgtgaggttggtcccatttctcttgtcctttcgtactgggagaaatttataatagatagaaaccgacctggattgctccggtctgaactcagatcacgtaggactttaatcgttgaacaaacgaacctttaatagcggttgcaccatttgggtgtcctgatccaacatcgaggtcgtaaaccctattgtcgataggaactctagaataggattgcgctgttatccctagggtaacttgttccgttgatcaaaattttggatcaataagtgatgttatggttattttgactggtttgtctagattaaaatcactcggagggttttttgtactccgaggtcaccccaaccgaaattgctagtccatgttaagttatgttttatccctttgtggttgaattgtttaacttttggaatagttaattaaagctccatagggtcttctcgtcttatttttttattcccgcctcttcacgggaaggtcaatttcactgattggaagtaagagacagtaaaaccctcgtgtggccattcatacaagtccttatttggagaacaagtgattatgctacctttgcacggtcagaataccgcggccgttaaactggtgtcactgggcaggcattgcctctaatactagtaatgctagaggtgatgtttttggtaaacaggcggggtttgtgtttgccgagttccttttacttcttttaatctttccttggtgcactcctgtgttgggttaacaatgtaattaataaacgttttagtgttgttttggtttattggttgttaattatcagtatattattagttactgtncgttattaggttccgggatcctctagatca

SEQ ID NO: 635756 - DNA, 558 bp, Homo sapiens
  misc_feature (41)..(42): n is a, c, g, or t
  misc_feature (45)..(46): n is a, c, g, or t
  misc_feature (51)..(51): n is a, c, g, or t
  misc_feature (508)..(508): n is a, c, g, or t
  misc_feature (515)..(515): n is a, c, g, or t
  misc_feature (521)..(522): n is a, c, g, or t
gttgtaacaagcgccggtcagtgaccatgcacgaacttctnnagnngagtntagaggatgcccccactttaatactgcttgtctggctggatgatccactttaatactgcttgtctggctggatgatccactttaatactgcttgtctggctggatgatccactttaatactgcttgtctggctggatgatccactttaatactgcttgtctggctggatgatccactttaatactgcttgtctggctggatgatccactttaatactgcttgtctggctggatgatccactttaatactgcttgtctggctggatgatccactttaatactgcttgtctggctggatgatccactttaatactgcttgtctggctggaagaggtagcctgcacacatctggttgcatccttggagtattaaagtggatcatccagccagacaagcagtattaaagtggatcatccagccagacaagcagtattaaagtggatcatccagccagacancagtatntggatnntccagccactttaagtggtatccgggccggctcttt

SEQ ID NO: 635757 - DNA, 2242 bp, Homo sapiens
  misc_feature (1)..(1): n is a, c, g, or t
  misc_feature (6)..(6): n is a, c, g, or t
  misc_feature (1941)..(1941): n is a, c, g, or t
nagatnctagaggatcccctttttgccttgcggattcatacaagtccttatttggagaacaagtgattatgctacctttgcacggtcagaataccgcggccgttaaactggtgtcactgggcaggcattgcctctaatactagtaatgctagaggtgatgtttttggtaaacaggcggggtttgtgtttgccgagttccttttacttcttttaatctttccttggtgcactcctgtgttgggttaacaatataattaataaacgctttagtgttgttttggtttattgattgttaattatcagtatattattagttactgatgtaagcgtgtgcgaggagaaaggcttcttgttactcatattaacattattgcttctatgtttcaatagattagtccggtattgggctaggagtttgttattagtttttgggattatgttggtgaatttgttgagctttaacgctttctcaattgatggctgcttttaggcctactatggtagtattaagattttactctctagtcaaggttgtatccgtttctaaaaagctgtacctttttagactatctcttaaaaatacattggaatttagggtttttggggtatttttaaggttgaactaaaattctttctcggacaaccagctatcaccaggctcgttaggcttttcacctctacctacaagtcttctcactattttgccacatagatgagttggttcttttaaactgctcataggtagctcgtctggtttcggggtatctagctaaagttctctttgttagattttttctggttaaaccattatgcaaaaggtagaaggggtaatctttgcttttttttacttttattttattctttcatctttcccttacggtactatctctatagcgtcaggataaaaatttctatctcctatactttaatgttaggtgaatgttttattttattttggtgtatttttgtatttgtttagtatgttgagctagctttggttcaaagtacccatacattgtgggatcttctaggtgtaaactaggtgctttagtttaagctatgctttggtaatccaagcacactttccagtatgcttaccttgttacgacttgtctcttcttgcatggttgtgtaattgaatataggttatttttattactacatgcttgaggagggtgacgggcggtgtgtgcgtgcttcatggccttattcaatcaagcactctattcttgatttactgctaaatcctcctttggtttttagtttcataaaaactttcgtatggtgggtattcttatgtagaaaatgtagcccatttctttccaacccataagctacaccttgacctaacgtttttatgtgttatgattgtgcttactattgttcctttttagggtttgctgaagatggcggtatataggctgaattggcaagggttggtaaggtctatcggggtttatcgattatagaacaggctcctctaggtggatgtgaagcaccgccaagtcctttgagttttaggcagttgcgagtagtactctggcgaatagttttgttatgtaactatttgggtttagggctaggcatagtggggtatctaatcccagtttgggtcctagctatcgtgtgtcaggattattagagtcactttcgtgggttattttattttaactagggctttttacagcttagttataatttaactctattgtggtttttttttcttaaacactctttacgccgtggatctattaatttgggttaatcgtatgaccgcggtggctggcacgagatttaccaactctaattaatataacttagtcaaactttcgttcatggcttaatttttatcactgctgtttcccgtgggggtgtggttgagcaaggcgttatgagctaccgttataggtgtgcttgatacctgctccttttgatctttangatctggagggcattctcaccggggcgcggatacttgcatgtgtaattttattaagaattaatagaaaggccaggaccaaacctgtgtgtttatggggctgtgaggctcatctaggcattttcagtgccttgctttgataatttaagctacattaactataagctatattcagattgtgggcgtatgcttaataggtgcttatattctgggaggttattgtgttgtaattctaaactaatcttgtgctaggtttgtcctccaaatctagggtgatacgtgtgtccgaagtacggcccaggt

SEQ ID NO: 635758 - DNA, 1163 bp, Homo sapiens
  misc_feature (41)..(42): n is a, c, g, or t
  misc_feature (45)..(46): n is a, c, g, or t
  misc_feature (51)..(51): n is a, c, g, or t
gttgtaacaagcgccggtcagtgaccatgcacgaacttctnnagnngagtntagaggatgcccccactttaatactgcttgtctggctggatgatccactttaatactgcttgtctggctggatgatccactttaatactgcttgtctggctggatgatccactttaatactgcttgtctggctggatgatccactttaaccattcccatctggcagtggttcttgacccggtttggcaagaagacagctgtatatgttgggatctcatcagcagtgccatttctcatcttggtggccctcatggagagtaacctcatcattacatatgcggtagctgtggcagctggcatcagtgtggcagctgccttcttactaccctggtccatgctgcctgatgtcattgacgacttccatctgaagcagccccacttccatggaaccgagcccatcttcttctccttctatgtcttcttcaccaagtttgcctctggagtgtcactgggcatttctaccctcagtctggactttgcagggtaccagacccgtggctgctcgcagccggaacgtgtcaagtttacactgaacatgctcgtgaccatggctcccatagttctcatcctgctgggcctgctgctcttcaaaatgtaccccattgatgaggagaggcggcggcagaataagaaggccctgcaggcactgagggacgaggccagcagctctggctgctcagaaacagactccacagagctggctagcatcctctagggcccgccacgttgcccgaagccaccatgcagaaggccacagaagggatcaggacctgtctgccggcttgctgagcagctggactgcaggtgctaggaagggaactgaagactcaaggaggtggcccaggacacttgctgtgctcactgtggggccggctgctctgtggcctcctgcctcccctctgcctgcctgtggggccaagccctggggctgccactgtgaatatgccaaggactgatcgggcctagcccggaacactaatgtagaaaccttttttttacagagcctaattaataacttaatgactgtgtacatagcaatgtgtgtgtatgtatatgtctgtgagctattaatgttattaattttcataaaagctggaaagcagctgcctgtt

SEQ ID NO: 635759 - DNA, 2834 bp, Homo sapiens
  misc_feature (55)..(55): n is a, c, g, or t
  misc_feature (174)..(174): n is a, c, g, or t
  misc_feature (204)..(204): n is a, c, g, or t
  misc_feature (852)..(852): n is a, c, g, or t
  misc_feature (2764)..(2764): n is a, c, g, or t
  misc_feature (2767)..(2767): n is a, c, g, or t
  misc_feature (2808)..(2809): n is a, c, g, or t
tgttagtaggggtactctaggttgttagtgggtgaattctgttggtggtcagaanctcctaattcgggtgttggtgctaggcttgagtggtagaaagctcaaaagaatccagtgaagaacagaacctcggaaataataaataaaattataccgtatcgtaagcctttttggacnactgatgtgtggtggccttggaaagtgctntctcgaataatgtctcgtcaccattggtatattgtcaaagtattggttaatagtcctagagatagtaagagtatagagttaaagtggaatcatataattaggcctgatgttattaaaagggctgatagggctccggtaagtggtcatgggcttgggtttactatgtggtatgcatgtgtttggtgggtcattatgtattgtcgtgtaggtataagcttactagcagtgtaaacacataagcttggatcagagctactgcaaattcaagaatagttaataggatgaggatagtaaatgtgataagggtagtgtagataatgggattaattagtatgggaagggtatgaaccaacattttcggggtatgggcccgatagcttagcttagctgaccttactgtagaatgtggtgtattttggtagcacggagaattttgaattctcaggtttaggttcgagtcctattgttctagaaataagagggtttgaacctctattttttactctatcaaagtaactcttttatcagacatatttctatgattgtgggggaatgcttgctgttataatagggagtgagatgtgtcatatacatagagctagtgttaggggcaggaagctttttcatagtaaatgtattagttggtcntatcggaatcgtgggtatgatgctcggattcataggaaggtgattgttaatgcgagtgtttttagtacgaagttgattgtatatagttctgatgtgtgtgggtcgtggaatgctcctaggaagagaattgctgtgaatgcatttattatgatgatgttggcatattctgctatgaagaatatggcgaaaggtccggctgcatattctacgttaaagcctgatacaagttctgactctccttctgtaaggtcgaacggggctcggttggtttctgctagggttgagataaatcatattatggctaggggtcaggatgtaaagattattcaaatgtgctcttgtgttgtgattagggttgatagagtatatgatccatttattaggagtactgatagtaggatgattgctagtgttacttcatatgagattgtttgggctactgctcgtagggccccgatgagtgcgtattttgagttggatgctcatcctgatcataggatagagtagactgctaggcttgacatggctagcatgaatagtactcctagatttatgttgattagagggtagggtattggtagtggaactcatattgttagtgctagggataaggctaggattggtgcaataatgaacatggagattgaggatgtggctggtcgtaggggttctttggtgaatagttttagggcatcggcgatgggttggagtaggccgtaggggcctacaacgttgggtccttttcgtagttgcatataacctagtacttttcgttctactagggtgaggaatgctacggccagtaggataggaatgattaggcttagaatgttaattatgaacatgctattagggagaggagttgaacctctggtaataaaggtttaagttttacgcaattaccggtctctgccaccctaatgtgccctgttctagggctggatttattatgagttaattaggttaagattatatcattaattatctctgagacgcgtttgtgaggttggtcccatttctcttgtcctttcgtactgggagaaatttataatagatagaaaccgacctggattgctccggtctgaactcagatcacgtaggactttaatcgttgaacaaacgaacctttaatagcggttgcaccatttgggtgtcctgatccaacatcgaggtcgtaaaccctattgtcgataggaactctagaataggattgcgctgttatccctagggtaacttgttccgttgatcaaaattttggatcaataagtgatgttatggttattttgactggtttgtctagattaaaatcactcggagggttttttgtactccgaggtcaccccaaccgaaattgctagtccatgttaagttatgttttatccctttgtggttgaattgtttaacttttggaatagttaattaaagctccatagggtcttctcgtcttatttttttattcccgcctcttcacgggaaggtcaatttcactgattggaagtaagagacagtaaaaccctcgtgtggccattcatacaagtccttatttggagaacaagtgattatgctacctttgcacggtcagaataccgcggccgttaaactggtgtcactgggcaggcattgcctctaatactagtaatgtaatactagtaatgctagaggtgatgtttttggtaaacaggcggggtttgtgtttgccgagttccttttacttcttttaatctttccttggtgcactcctgtgttgggttaacaatgtaattaataaacgttttagtgttgttttggtttattggttgttaattatcagtatattattagttactgatgtaagcgtgtgcgaggagaaaggcttcttgttactcatattaacattattgcttctatgtttcaatagattagtccggtattnggnctaggagtttgttattagtttttgggagtattgtgtgatanntgatagtggggaatcctctagacgt

SEQ ID NO: 635760 - DNA, 1731 bp, Homo sapiens
  misc_feature (1608)..(1608): n is a, c, g, or t
ggtgcagcagagtgcgttcctcgtctgccagccggcttggctagcgcgcggcggccgtggctaaggctgctacgaagcgagcttgggaggagcagcggcctgcggggcagaggagcatcccgtctaccaggtcccaagcggcgtggcccgcgggtcatggccaaaggagaaggcgccgagagcggctccgcggcggggctgctacccaccagcatcctccaaagcactgaacgcccggcccaggtgaagaaagaaccgaaaaagaagaaacaacagttgtctgtttgcaacaagctttgctatgcacttgggggagccccctaccaggtgacgggctgtgccctgggtttcttccttcagatctacctattggatgtggctcaggtgggccctttctctgcctccatcatcctgtttgtgggccgagcctgggatgccatcacagaccccctggtgggcctctgcatcagcaaatccccctggacctgcctgggtcgccttatgccctggatcatcttctccacgcccctggccgtcattgcctacttcctcatctggttcgtgcccgacttcccacacggccagacctattggtacctgcttttctattgcctctttgaaacaatggtcacgtgtttccatgttccctactcggctctcaccatgttcatcagcaccgagcagactgagcgggattctgccaccgcctatcggatgactgtggaagtgctgggcacagtgctgggcacggcgatccagggacaaatcgtgggccaagcagacacgccttgtttccaggacctcaatagctctacagtagcttcacaaagtgccaaccatacacatggcaccacctcacacagggaaacgcaaaaggcatacctgctggcagcgggggtcattgtctgtatctatataatctgtgctgtcatcctgatcctgggcgtgcgggagcagagagaaccctatgaagcccagcagtctgagccaatcgcctacttccggggcctacggctggtcatgagccacggcccatacatcaaacttattactggcttcctcttcacctccttggctttcatgctggtggaggggaactttgtcttgttttgcacctacaccttgggcttccgcaatgaattccagaatctactcctggccatcatgctctcggccactttaaccattcccatctggcagtggttcttgacccggtttggcaagaagacagctgtatatgttgggatctcatcagcagtgccatttctcatcttggtggccctcatggagagtaacctcatcattacatatgcggtagctgtggcagctggcatcagtgtggcagctgccttcttactaccctggtaggtatatacaggcccccctcctcgggtatctccagcccctagtccccagttttgaagctccttagggagagttctatgcagtgttctcccacaggccattctgtgggtccaggttaggagtgggggaggtctgtcctgtacagttgtacaggtagtgagctttgcaagaacacctagtcggagtgaaaaatgggggctgtaatctggcctgggctccacttgccacgctgagcacctccangcagggttacttcctcttttttgaaagataataacacactattgtatagagggatttagctaaagtcacgccgccctttatgacctaactggaattttatcccaactctgtgagactccaata

SEQ ID NO: 635761 - DNA, 119 bp, Homo sapiens
gggaatctcccgggcaggagcggaatctgtcccgaaccgggtctgtgaggaactcgcgaacttggattaggaaatccctgcgcccggagcgtttatcccggaacccggatttaagatcg

SEQ ID NO: 635762 - DNA, 1700 bp, Homo sapiens
  misc_feature (1399)..(1399): n is a, c, g, or t
acctcgggccggctagagcggccggtagagcggctaaatacattggaatttagggtttttggggtatttttaaggttgaactaaaattctttctcggacaaccagctatcaccaggctcgttaggcttttcacctctacctacaagtcttctcactattttgccacatagatgagttggttcttttaaactgctcataggtagctcgtctggtttcggggtatctagctaaagttctctttgttagattttttctggttaaaccattatgcaaaaggtagaaggggtaatctttgcttttttttacttttattttattctttcatctttcccttacggtactatctctatagcgtcaggataaaaatttctatctcctatactttaatgttaggtgaatgttttattttattttggtgtatttttgtatttgtttagtatgttgagctagctttggttcaaagtacccatacattgtgggatcttctaggtgtaaactaggtgctttagtttaagctatgctttggtaatccaagcacactttccagtatgcttaccttgttacgacttgtctcttcttgcatggttgtgtaattgaatataggttatttttattactacatgcttgaggagggtgacgggcggtgtgtgcgtgcttcatggccttattcaatcaagcactctattcttgatttactgctaaatcctcctttggtttttagtttcataaaaactttcgtatggtgggtattcttatgtagaaaatgtagcccatttctttccaacccataagctacaccttgacctaacgtttttatgtgttatgattgtgcttactattgttcctttttagggtttgctgaagatggcggtatataggctgaattggcaagggttggtaaggtctatcggggtttatcgattatagaacaggctcctctaggtggatgtgaagcaccgccaagtcctttgagttttaggcagttgcgagtagtactctggcgaatagttttgttatgtaactatttgggtttagggctaggcatagtggggtatctaatcccagtttgggtcctagctatcgtgtgtcaggattattagagtcactttcgtgggttattttattttaactagggctttttacagcttagttataatttaactctattgtggtttttttttcttaaacactctttacgccgtggatctattaatttgggttaatcgtatgaccgcggtggctggcacgagatttaccaactctaattaatataacttagtcaaactttcgttcatggcttaatttttatcactgctgtttcccgtgggggtgtggttgagcaaggcgttatgagctaccgttataggtgtgcttgatacctgctccttttgatctttangatctggagggcattctcaccggggcgcggatacttgcatgtgtaattttattaagaattaatagaaaggccaggaccaaacctgtgtgtttatggggctgtgaggctcatctaggcattttcagtgccttgctttgataatttaagctacattaactataagctatattcagattgtgggcgtatgcttaataggtgcttatattctgggaggttattgtgttgtaattctaaactaatcttgtgctaggtttgtcctccaaatctagggtgatacgtgtgtccgaagtacggcccaggt

SEQ ID NO: 635763 - DNA, 1607 bp, Homo sapiens
  misc_feature (1607)..(1607): n is a, c, g, or t
ggtgcagcagagtgcgttcctcgtctgccagccggcttggctagcgcgcggcggccgtggctaaggctgctacgaagcgagcttgggaggagcagcggcctgcggggcagaggagcatcccgtctaccaggtcccaagcggcgtggcccgcgggtcatggccaaaggagaaggcgccgagagcggctccgcggcggggctgctacccaccagcatcctccaaagcactgaacgcccggcccaggtgaagaaagaaccgaaaaagaagaaacaacagttgtctgtttgcaacaagctttgctatgcacttgggggagccccctaccaggtgacgggctgtgccctgggtttcttccttcagatctacctattggatgtggctcaggtgggccctttctctgcctccatcatcctgtttgtgggccgagcctgggatgccatcacagaccccctggtgggcctctgcatcagcaaatccccctggacctgcctgggtcgccttatgccctggatcatcttctccacgcccctggccgtcattgcctacttcctcatctggttcgtgcccgacttcccacacggccagacctattggtacctgcttttctattgcctctttgaaacaatggtcacgtgtttccatgttccctactcggctctcaccatgttcatcagcaccgagcagactgagcgggattctgccaccgcctatcggatgactgtggaagtgctgggcacagtgctgggcacggcgatccagggacaaatcgtgggccaagcagacacgccttgtttccaggacctcaatagctctacagtagcttcacaaagtgccaaccatacacatggcaccacctcacacagggaaacgcaaaaggcatacctgctggcagcgggggtcattgtctgtatctatataatctgtgctgtcatcctgatcctgggcgtgcgggagcagagagaaccctatgaagcccagcagtctgagccaatcgcctacttccggggcctacggctggtcatgagccacggcccatacatcaaacttattactggcttcctcttcacctccttggctttcatgctggtggaggggaactttgtcttgttttgcacctacaccttgggcttccgcaatgaattccagaatctactcctggccatcatgctctcggccactttaaccattcccatctggcagtggttcttgacccggtttggcaagaagacagctgtatatgttgggatctcatcagcagtgccatttctcatcttggtggccctcatggagagtaacctcatcattacatatgcggtagctgtgggaagtggcatccgtgtggaagctgcttcttactaacctggtcaagctgctgatgtcatgacgactcatcctgaaacaagccacttcaggaacgagccaacttttctttatgtttttcaccaagttgctctggagtcagggattacaccccattggattggggccaccgggtgttcccgattataacgaaacgacaggccaaacgggggcgcaaccaagaaggggaaaggcggagaaggaaaaaattccctcacgctctctgtgtgcacttcctattcgttctn

SEQ ID NO: 635764 - DNA, 218 bp, Homo sapiens
tctatgctacacggctccttcttggctgctgttggcaacctcactcgtgggtcattgccagctaccgagtgggtgtcttcgcgcttcctgagcttctggcgtccggcagcaggtgagctggcaactggcgcggctgcctggaccaggctggcggctctgcacctgggctgcagacccacactccgcaggcatttggcagggcaccctcgcgcgcgctg

SEQ ID NO: 635765 - DNA, 2581 bp, Homo sapiens
  misc_feature (55)..(55): n is a, c, g, or t
  misc_feature (174)..(174): n is a, c, g, or t
  misc_feature (204)..(204): n is a, c, g, or t
  misc_feature (852)..(852): n is a, c, g, or t
tgttagtaggggtactctaggttgttagtgggtgaattctgttggtggtcagaanctcctaattcgggtgttggtgctaggcttgagtggtagaaagctcaaaagaatccagtgaagaacagaacctcggaaataataaataaaattataccgtatcgtaagcctttttggacnactgatgtgtggtggccttggaaagtgctntctcgaataatgtctcgtcaccattggtatattgtcaaagtattggttaatagtcctagagatagtaagagtatagagttaaagtggaatcatataattaggcctgatgttattaaaagggctgatagggctccggtaagtggtcatgggcttgggtttactatgtggtatgcatgtgtttggtgggtcattatgtattgtcgtgtaggtataagcttactagcagtgtaaacacataagcttggatcagagctactgcaaattcaagaatagttaataggatgaggatagtaaatgtgataagggtagtgtagataatgggattaattagtatgggaagggtatgaaccaacattttcggggtatgggcccgatagcttagcttagctgaccttactgtagaatgtggtgtattttggtagcacggagaattttgaattctcaggtttaggttcgagtcctattgttctagaaataagagggtttgaacctctattttttactctatcaaagtaactcttttatcagacatatttctatgattgtgggggaatgcttgctgttataatagggagtgagatgtgtcatatacatagagctagtgttaggggcaggaagctttttcatagtaaatgtattagttggtcntatcggaatcgtgggtatgatgctcggattcataggaaggtgattgttaatgcgagtgtttttagtacgaagttgattgtatatagttctgatgtgtgtgggtcgtggaatgctcctaggaagagaattgctgtgaatgcatttattatgatgatgttggcatattctgctatgaagaatatggcgaaaggtccggctgcatattctacgttaaagcctgatacaagttctgactctccttctgtaaggtcgaacggggctcggttggtttctgctagggttgagataaatcatattatggctaggggtcaggatgtaaagattattcaaatgtgctcttgtgttgtgattagggttgatagagtatatgatccatttattaggagtactgatagtaggatgattgctagtgttacttcatatgagattgtttgggctactgctcgtagggccccgatgagtgcgtattttgagttggatgctcatcctgatcataggatagagtagactgctaggcttgacatggctagcatgaatagtactcctagatttatgttgattagagggtagggtattggtagtggaactcatattgttagtgctagggataaggctaggattggtgcaataatgaacatggagattgaggatgtggctggtcgtaggggttctttggtgaatagttttagggcatcggcgatgggttggagtaggccgtaggggcctacaacgttgggtccttttcgtagttgcatataacctagtacttttcgttctactagggtgaggaatgctacggccagtaggataggaatgattaggcttagaatgttaattatgaacatgctattagggagaggagttgaacctctggtaataaaggtttaagttttacgcaattaccggtctctgccaccctaatgtgccctgttctagggctggatttattatgagttaattaggttaagattatatcattaattatctctgagacgcgtttgtgaggttggtcccatttctcttgtcctttcgtactgggagaaatttataatagatagaaaccgacctggattgctccggtctgaactcagatcacgtaggactttaatcgttgaacaaacgaacctttaatagcggttgcaccatttgggtgtcctgatccaacatcgaggtcgtaaaccctattgtcgataggaactctagaataggattgcgctgttatccctagggtaacttgttccgttgatcaaaattttggatcaataagtgatgttatggttattttgactggtttgtctagattaaaatcactcggagggttttttgtactccgaggtcaccccaaccgaaattgctagtccatgttaagttatgttttatccctttgtggttgaattgtttaacttttggaatagttaattaaagctccatagggtcttctcgtcttatttttttattcccgcctcttcacgggaaggtcaatttcactgattgacccatcggcgtgtacgccgatgggtggagtaacattacatagtgttggggatttgctttaaagtatctcagccaagaaaagaaaaaaagagaaaaaggagttcccgctgtggcgcaacaggatcagcagtgtctctgtagctccaggatgaaggttcgatccccagccatgcacagttggttaaaggatcctgtgttgctgcagctgcagcgtataggcggaccatcggcgttg

SEQ ID NO: 635766 - DNA, 1341 bp, Homo sapiens
ggtgcagcagagtgcgttcctcgtctgccagccggcttggctagcgcgcggcggccgtggctaaggctgctacgaagcgagcttgggaggagcagcggcctgcggggcagaggagcatcccgtctaccaggtcccaagcggcgtggcccgcgggtcatggccaaaggagaaggcgccgagagcggctccgcggcggggctgctacccaccagcatcctccaaagcactgaacgcccggcccaggtgaagaaagaaccgaaaaagaagaaacaacagttgtctgtttgcaacaagctttgctatgcacttgggggagccccctaccaggtgacgggctgtgccctgggtttcttccttcagatctacctattggatgtggctcaggtgggccctttctctgcctccatcatcctgtttgtgggccgagcctgggatgccatcacagaccccctggtgggcctctgcatcagcaaatccccctggacctgcctgggtcgccttatgccctggatcatcttctccacgcccctggccgtcattgcctacttcctcatctggttcgtgcccgacttcccacacggccagacctattggtacctgcttttctattgcctctttgaaacaatggtcacgtgtttccatgttccctactcggctctcaccatgttcatcagcaccgagcagactgagcgggattctgccaccgcctatcggatgactgtggaagtgctgggcacagtgctgggcacggcgatccagggacaaatcgtgggccaagcagacacgccttgtttccaggacctcaatagctctacagtagcttcacaaagtgccaaccatacacatggcaccacctcacacagggaaacgcaaaaggcatacctgctggcagcgggggtcattgtctgtatctatataatctgtgctgtcatcctgatcctgggcgtgcgggagcagagagaaccctatgaagcccagcagtctgagccaatcgcctacttccggggcctacggctggtcatgagccacggcccatacatcaaacttattactggcttcctcttcacctccttggctttcatgctggtggaggggaactttgtcttgttttgcacctacaccttgggcttccgcaatgaattccagaatctactcctggccatcatgctctcggccactttaaccattcccatctggcagtggttcttgacccggtttggcaagaagacagctgtatatgttgggatctcatcagcagtgccatttctcatcttggtggccctcatggaagtggggctgcttcagatggaagttgtcaatgacatcaggcagcatggacca

SEQ ID NO: 635767 - DNA, 294 bp, Homo sapiens
aatccaagcagtcggttgcttctatactttatcttaaataaaacatcacctccatcacagcaggggccattttctctatcctttcatctcgcaacaactgggctgggtaaaagaataaaaggtggctcgttaccttagaatgatcacagtgacaccagtccaagcagagagcagagactgcttatgtccagtctccagaactagactgtgagctccttgaaggcagatagtttttgttctatttccttctaatatctcattttctattttctgcgactgcttggattacaagga

SEQ ID NO: 635768 - DNA, 1727 bp, Homo sapiens
  misc_feature (1426)..(1426): n is a, c, g, or t
actccatctttgactgccaaaagcccatgtagaagcccctattgcaggttcaatagtacttgcagccgtactgctaaaactcggaggctatggcataatgcgaatcactaaaattctttctcggacaaccagctatcaccaggctcgttaggcttttcacctctacctacaagtcttctcactattttgccacatagatgagttggttcttttaaactgctcataggtagctcgtctggtttcggggtatctagctaaagttctctttgttagattttttctggttaaaccattatgcaaaaggtagaaggggtaatctttgcttttttttacttttattttattctttcatctttcccttacggtactatctctatagcgtcaggataaaaatttctatctcctatactttaatgttaggtgaatgttttattttattttggtgtatttttgtatttgtttagtatgttgagctagctttggttcaaagtacccatacattgtgggatcttctaggtgtaaactaggtgctttagtttaagctatgctttggtaatccaagcacactttccagtatgcttaccttgttacgacttgtctcttcttgcatggttgtgtaattgaatataggttatttttattactacatgcttgaggagggtgacgggcggtgtgtgcgtgcttcatggccttattcaatcaagcactctattcttgatttactgctaaatcctcctttggtttttagtttcataaaaactttcgtatggtgggtattcttatgtagaaaatgtagcccatttctttccaacccataagctacaccttgacctaacgtttttatgtgttatgattgtgcttactattgttcctttttagggtttgctgaagatggcggtatataggctgaattggcaagggttggtaaggtctatcggggtttatcgattatagaacaggctcctctaggtggatgtgaagcaccgccaagtcctttgagttttaggcagttgcgagtagtactctggcgaatagttttgttatgtaactatttgggtttagggctaggcatagtggggtatctaatcccagtttgggtcctagctatcgtgtgtcaggattattagagtcactttcgtgggttattttattttaactagggctttttacagcttagttataatttaactctattgtggtttttttttcttaaacactctttacgccgtggatctattaatttgggttaatcgtatgaccgcggtggctggcacgagatttaccaactctaattaatataacttagtcaaactttcgttcatggcttaatttttatcactgctgtttcccgtgggggtgtggttgagcaaggcgttatgagctaccgttataggtgtgcttgatacctgctccttttgatctttangatctggagggcattctcaccggggcgcggatacttgcatgtgtaattttattaagaattaatagaaaggccaggaccaaacctgtgtgtttatggggctgtgaggctcatctaggcattttcagtgccttgctttgataatttaagctacattaactataagctatattcagattgtgggcgtatgcttaataggtgcttatattctgggaggttattgtgttgtaattctaaactaatcttgtgctaggtttgtcctccaaatctagggtgatacgtgtgtccgaagtacggcccaggt

SEQ ID NO: 635769 - DNA, 145 bp, Homo sapiens
aatagtcggggctgctgggcggtgccccgcacgccagcgtcccgactattcgtggcatgatcctgattctcatcttcgccgaggagctggactctacggtctcatcgaaaccctcatcctctgcacaaaggagaccctctcagag

SEQ ID NO: 635770 - DNA, 181 bp, Homo sapiens
gccttttggttttttatatatttataaaaaaagaaaaaggtggggattgccttgggaaattcccagggtattactgggcctatgtggggtattgttaaaccagggtccctgtgatactggtgctcttgatggtcctgatacaggtaaggaaaccgttgggccactttgataccaaggatat

SEQ ID NO: 635771 - DNA, 429 bp, Homo sapiens
  misc_feature (70)..(70): n is a, c, g, or t
aactactaccgcaactaccaataaacaccactgaaatactcaactgtgtgaagaagtgaataaatgatgnaaaggtgaacaacactccaacctatagactttatggtctcacctcttttgctgaatttaagttcctggtagcgtgatgaacatgcctatcagccgtatccgccttcctgccttttgaatttgataaattaatactataacgattgttccatttcattcgtggtattaagaaataactcctaataaggaaaagactggaggcccctattcagagtatgtatgtttatgcctaaatggaaaatacatagcgcatcattaacaaagagaaactagtgcacctccacatggggcatgctttttggacgtcgttgctcagtgtccagaagcttgatgtccaattaatacagaaattgctacatg

SEQ ID NO: 635772 - DNA, 299 bp, Homo sapiens
tacagtacgagtcaattaaggctcttactatttgtaaatcgcccagcctcaggtatgtcttatatcagcagcgtgaaaccagactaatacagtaaattggtatgttgctgaaaagatgcccgaaaatgtggaagcaactttggaactggataacaggcagaggttggaacagtttgaagggctcagaagaagacaggaaaatgtgggaaagtttggaacttccttgagacttgttgaatggctttgaccacaagcctgatagcgatatggacaataaggtccagactcaggtggtgtga

SEQ ID NO: 635773 - DNA, 1112 bp, Homo sapiens
tccaaacaataatcttttattttatatcttctctatacttgtgatagcaaatctctttttttgtgcgtgaattttaattttattaattaaacttttttaaatttacattcttcttctctcttcttttttatttttaaaatctcagaggcctcttttatatgtgtctcaaacatctctttttttataccttattattttataacatttaactttttataacatatctccccccctttggtgcactctataatcaccggtgggaattatttcgaggttatttcacgtggtgtgtgtgtgtatacacacctataaaacaagagaggggagggagggaaaaatataagagcgcgaggtgaacacttgtggacacggatagtgttctcaaacaacacagagcagagatataaagagttaaacccccttcagaggtgcaccatattaccagagcatgtgctcttttctgtggaagacgccgtttaacctcttttcacgcccagagagagatattctcctctcagagccccccctttcccctttatctctccccctccttatatcctttccaaaagcaacaaaagagccaaaaaagaggctgtgaggctccttttctcggctattcatctcttgtgagagagccagaaacagtttgtgtcgccagtggggggcacactagtgccactccaacaccgaagataatcacgtgtgtggcaaagacccccagcgtgtgaacgcgcgtgttgaaatcctctattctccccgcggtgtgtgcttacgcgccccggtgggacacctttcattccttcctgggacactttccatttccccccttgggcgctctctccctccccttctcccctcgggctctttccacaaattttaaggggagggaagccccccatattcatacttttgcacaggtggtttataccataccccatgttgattacaactatttacgcaggggctggtgccccacaagaggacccggtttccctatgagaaaatttctttttgggccccaaaataaaagcaaattaggacgctccacacgcacacgctgaccgattacgacaacgactcaataatcctgcactacttatacacagtatgaa

SEQ ID NO: 635774 - DNA, 688 bp, Homo sapiens
  misc_feature (20)..(20): n is a, c, g, or t
  misc_feature (31)..(31): n is a, c, g, or t
  misc_feature (61)..(61): n is a, c, g, or t
  misc_feature (136)..(136): n is a, c, g, or t
  misc_feature (200)..(200): n is a, c, g, or t
  misc_feature (202)..(202): n is a, c, g, or t
  misc_feature (207)..(207): n is a, c, g, or t
  misc_feature (255)..(255): n is a, c, g, or t
  misc_feature (318)..(318): n is a, c, g, or t
  misc_feature (381)..(381): n is a, c, g, or t
  misc_feature (611)..(611): n is a, c, g, or t
  misc_feature (630)..(630): n is a, c, g, or t
  misc_feature (671)..(671): n is a, c, g, or t
aggatctcagcatagtgacncaggttcagtnagtgtactcgcagtatgaacgcccatagcnatggacggcccctcagtaattatctgtttgaatgagtgcctgtgccagcaagtcatgcctactgctactcactcnctccaagtcaacattctcgctcagccttccgagtaatggatcagtatgcgcaccatgctgctantntgatnttagtaagatgagttctccatgttggcagctggtcttgactccgaccntcaggtgatccgccaacctcagcctcgcaaagtgctggactactaggtgtgagtcaccacgcncagcctagagtagtcagattcttaatgctagaaagtagaatagctgtcagaggccagaagagnggataatggacagttactgtttaatgggtagaggtgtccaattgtgaatgatgagaaaagttctggagatcatggtgatgatggttgcacaacatgaatgtatttaatcacacagactgtacacgttaaattgccatagttctcaaccagcagatctcatgctgttggccaatctgcagggtggcaggagctccattgactccttggggaaagtatcagaaggctgctgnggatggcactgggaccccncctcctcctagtgacaaggaggcttcttcagaaataagaanagctactcatctcgtgc

SEQ ID NO: 635775 - DNA, 777 bp, Homo sapiens
cactaggataatcagaacccttttcgagtgcatggatggaacctcaccgtcctccccaataacacagggtccatcctgacgtcacctcgcgtgctgtgcctggagtgactattccctggctaaatattggcatggtcttttctatcctcatgctggttctcgagaccaaaatcaccttccatacatcgactacttacacactggtgctgactgcatttggtattgcattgcctgctgaggaggagaacaagctggaagatgtggtccagaccctgctgcaagaccaattggcaccccaggtctgcagatgctgcaaagcaatcgtcattgatctccgccaggaggtgctgatgcatagagaccgggagtcaatggtgcacaggaccgatgcatcatagtggaccagtttgtcgtctgcttcccgggatcctatgtgtccaaagtgtgctgtgggtacagcgtgtctgaaaccgtgcactttgctagcacccagtggacaactatgggctcttgagaccggcaacggaaatgacagcgtcagccatatagctaacgccattctccactggagaagttactctaccagattgcacaagcagaagcagaagaagaagacggtcccactctcagctaccagtcttcagccctccgtggatgagctcagggagtacagagctacggtaagcgcgagcagctgttcgaggctgagctccactcctccggacgctatggcagaccacgatggcagcagcaccggtggtcggaccgggaacgaaa

SEQ ID NO: 635776 - DNA, 308 bp, Homo sapiens
  misc_feature (1)..(2): n is a, c, g, or t
nnactcgccttggttgatccactttgcagcagtgtgtggaatccagctggtacttggctccagattcctttttctcagctgtgccacccagaagagcccagtccttcctgaaattgtgactgggaagtgggtctctattggaatacaggatggtgctaagtgcttttcctcgtgacatgttcaccttacaactcatttgatcggcacaggggtggggacattattacgcttccacagccacagtgagcaactctgggcccagtgacccgtggcatgcattcattcacctgacacttgtaagcacctgc

SEQ ID NO: 635777 - DNA, 128 bp, Homo sapiens
attagaggatcccatgctcatccctccttggattaagcggttcttggtaccagcaacttcaaggtttctgccagcccactgttgtatacgcttattgagaaaacaatgcacaatgtgcaagcatccgg

SEQ ID NO: 635778 - DNA, 160 bp, Homo sapiens
cccgggtttttgggggtttttttttttaaaaattttccttccccccccccaaaaaaaaaagggggaaaatggggggcaaattttttcccgtttttttcccaaaaagggggggaacccctaggggggggcctttaaaagaccccaaaaaattttttaaaga

SEQ ID NO: 635779 - DNA, 168 bp, Homo sapiens
actggcctccattgggcgtatgctgaggtctgccgcaaaccctgcagcagctggttaggagtgtaaggtggctgtctctgcgaggcagaggcaggcgtgggaggcagttccctttatactcgatcactgccatcgttggcccgatccaaactccgatttgggatctgc

SEQ ID NO: 635780 - DNA, 539 bp, Homo sapiens
tactcgtggatcccctcggctgcaggtattcggttctagtatatatatatgtatatatatatatatatatatatatatatatatagatagtgtttatccctagttatatatacccccttttctttgtcttttcttttttttctttttttttctcttctttcttttctttctttctcttctttttctttctcttttcttgttcttttcttttcttgttttttctcttcttttttctttttttttttctctttctttcttctttttttttctcttctttctttttttttctctttttctcttttttctttttttcttttctttcttcttttccttttttctctttcttctctttctttttcttttttttttttttctctcttcttctttttctctcttttcttttttcttctctttttctctctttcttttttcttttttttctctttttttttttttttttttttttttttctttctttttctcttcttttttctttcttctctcttttctttcttctttctttttctttttttctttct

SEQ ID NO: 635781 - DNA, 733 bp, Homo sapiens
tggccgggctcgctgtctcaagcctgatttcagagcgatctgctagatcatggctaggctggcctacaagtcccagcgtttgataatggtgctggcctagaccttgcaacgtgctcactacactgacatgcatgcacttggacccagccatacgacattggctatgattctccatcgactttgtcactgactcagaggtctcgattagtcacagagaaactagaggagcagacctcattgcttgatacattaccagtccacgctagtgcactagtagcagcacgatagtggactactacaattgcaacgctcgcatgatacatggctagggccaagtcagaatcttgagcatgctcagatgttaaccattgacgagtgcaaagagtactagagtatcaatgatctaacctgtgttctaaccttaggaatgctgtgtgatactatgcgttgcagctttagtagactcctacattatctgattgtagcataattactccactaggtggccgatactcgcgtaccttggatactgatacgctggtcaacctatcaatactaccagggtccaccttggccgcactggataaccccccctgtaacattcctcaggaccacctcaattccactcctagcgcctaactccaattctggcctaaccctcctcccattttaacacatcacccggtcggcttcaggtgcctcactgtgcctctactcatgagcaccatacacc

SEQ ID NO: 635782 - DNA, 154 bp, Homo sapiens
ctttttaaacgaatttaaactaaacaagcttcaggcttgagggggaattgccatgttgggttgggaaaaagggtattgcagggcagaattagctttagcattattaagcggtttcaatgggggcattatgttggggcttaaaccaccacccaaa

SEQ ID NO: 635783 - DNA, 367 bp, Homo sapiens
ttacactcgagagatacgaaaacacacacccacacaaaaacttgtacatctatttcatagcagcattatttacaatagccaaaagtggaagcaatgcaaatgtccatcaactgatgaatggacaaacaaaatgtagcatatccatacaatgcaatattattcagcattaaaaaggaatgaagcactgatacatgttgtgatctgagtgaaccttgaaaacattatactacgtgaaagaatacggtcacaaaacactacatactatatgcttccatttatatgaaatgtccagaataggcaaatctagagacagaaaatagactagtgattatcagaggctggcagagacagtgaaataggaagtgac

SEQ ID NO: 635784 - DNA, 150 bp, Homo sapiens
  misc_feature (101)..(101): n is a, c, g, or t
cgccatgatcagctcgtccattagcgcgtctggtggagttgcaccaaccgctaaaatgcacgccatcatcgagcgcacggcagcttcgtgtgcaggcaggnagcacaggttgaggtagtggtcgaagcgcagaaagtcaaactgggagtt

SEQ ID NO: 635785 - DNA, 516 bp, Homo sapiens
gccagggctggggtgtgagggcctacctctcacctgggggcacagaggctagagggtgtcacagatggccgggctgccagagctgcaaaggaacagccagcctgtgtgagcaagagcccgtgtgggcaccagggccctcactgtgtggtctctggagctgaccaccagttggtcccagccctgaccttggcccagaatccaccagggcagggcctgtgaacagggccaacttggggccctcctccgccctctctggatgcctccccttcagcactgggcctgccaggcagacagatggacacgtgcttgaggaaacacgggttttatctgggcgaggggttcacgcctgtgctccggggcccctgcccaggttgtgccgggttcagagttgactggctgccagtggaacagagtgtactttgctaatgaagcccttgtcattggacagataggcccctccaggtcctccctgccctgtaataaacgttgccaccgtgaatggtgctgctggacatc

SEQ ID NO: 635786 - DNA, 870 bp, Homo sapiens
  misc_feature (41)..(42): n is a, c, g, or t
  misc_feature (45)..(46): n is a, c, g, or t
  misc_feature (51)..(51): n is a, c, g, or t
  misc_feature (432)..(432): n is a, c, g, or t
  misc_feature (435)..(436): n is a, c, g, or t
  misc_feature (438)..(438): n is a, c, g, or t
  misc_feature (448)..(448): n is a, c, g, or t
  misc_feature (459)..(459): n is a, c, g, or t
  misc_feature (468)..(468): n is a, c, g, or t
  misc_feature (471)..(471): n is a, c, g, or t
  misc_feature (485)..(486): n is a, c, g, or t
  misc_feature (492)..(492): n is a, c, g, or t
  misc_feature (496)..(496): n is a, c, g, or t
  misc_feature (500)..(500): n is a, c, g, or t
gttgtaacaagcgccggtcagtgaccatgcacgaacttctnnagnngagtntagaggatgcccccactttaatactgcttgtctggctggatgatccactttaatactgcttgtctggctggatgatccactttaatactgcttgtctggctggatgatccactttaatactgcttgtctggctggatgatccactttaatactgcttgtctggctggatgatccactttaatactgcttgtctggctggatgatccactttaatactgcttgtctggctggatgatccactttaatactgcttgtctggctggatgatccactttaatactgcttgtctggctggatgatccactttaatactgcttgtctggctggatgatccactttaatactgcttgtctggctggatgatccactttaatactgctngtnngnctggatgatncacttttatantgcttgtcnggntggatgatccactnnaatacngctngtcnggctggatgatccactttaatactgcttgtctggctggatgatccactttaatactgcttgtctggctggatgatccactttaatactgcttgtctggctggatgatccactttaaataaaccaaacattccattttaaatgtggggattgggaaccactagttctttcagatggtattcttcagactatagaaggagcttcccgccaaaggtcaccccaggcccgactgaggaaaacagcgcgaacaagcctcgtctgaatgcacacacaaagactagatcaggtatactgggacaatagtatcgaatagatttcagctatagctggagtagaggtcagggatcctcagcgtcgacctgacagaatgca

SEQ ID NO: 635787 - DNA, 316 bp, Homo sapiens
gaacatgcgtgtgggaattcacagcgggcgagtacactgcggtgtccttggtctcaggaagtggcagttcgacgtctggtctaacgatgtcacgctagccaaccacatggaggctggcggcaaggcaggacgcatccacatcaccaaggctacactcaactacctgaatggggactacgaggtggagccaggctgtgggggcgagcgcaacgcctacctcaaggagcacagtatcgagaccttcctcatcctgcgctgcacccagaagcggaaagaagagaaggccatgatcgccaagatgaaccgccagagaacc

SEQ ID NO: 635788 - DNA, 2314 bp, Homo sapiens
  misc_feature (55)..(55): n is a, c, g, or t
  misc_feature (174)..(174): n is a, c, g, or t
  misc_feature (204)..(204): n is a, c, g, or t
  misc_feature (852)..(852): n is a, c, g, or t
  misc_feature (2284)..(2284): n is a, c, g, or t
tgttagtaggggtactctaggttgttagtgggtgaattctgttggtggtcagaanctcctaattcgggtgttggtgctaggcttgagtggtagaaagctcaaaagaatccagtgaagaacagaacctcggaaataataaataaaattataccgtatcgtaagcctttttggacnactgatgtgtggtggccttggaaagtgctntctcgaataatgtctcgtcaccattggtatattgtcaaagtattggttaatagtcctagagatagtaagagtatagagttaaagtggaatcatataattaggcctgatgttattaaaagggctgatagggctccggtaagtggtcatgggcttgggtttactatgtggtatgcatgtgtttggtgggtcattatgtattgtcgtgtaggtataagcttactagcagtgtaaacacataagcttggatcagagctactgcaaattcaagaatagttaataggatgaggatagtaaatgtgataagggtagtgtagataatgggattaattagtatgggaagggtatgaaccaacattttcggggtatgggcccgatagcttagcttagctgaccttactgtagaatgtggtgtattttggtagcacggagaattttgaattctcaggtttaggttcgagtcctattgttctagaaataagagggtttgaacctctattttttactctatcaaagtaactcttttatcagacatatttctatgattgtgggggaatgcttgctgttataatagggagtgagatgtgtcatatacatagagctagtgttaggggcaggaagctttttcatagtaaatgtattagttggtcntatcggaatcgtgggtatgatgctcggattcataggaaggtgattgttaatgcgagtgtttttagtacgaagttgattgtatatagttctgatgtgtgtgggtcgtggaatgctcctaggaagagaattgctgtgaatgcatttattatgatgatgttggcatattctgctatgaagaatatggcgaaaggtccggctgcatattctacgttaaagcctgatacaagttctgactctccttctgtaaggtcgaacggggctcggttggtttctgctagggttgagataaatcatattatggctaggggtcaggatgtaaagattattcaaatgtgctcttgtgttgtgattagggttgatagagtatatgatccatttattaggagtactgatagtaggatgattgctagtgttacttcatatgagattgtttgggctactgctcgtagggccccgatgagtgcgtattttgagttggatgctcatcctgatcataggatagagtagactgctaggcttgacatggctagcatgaatagtactcctagatttatgttgattagagggtagggtattggtagtggaactcatattgttagtgctagggataaggctaggattggtgcaataatgaacatggagattgaggatgtggctggtcgtaggggttctttggtgaatagttttagggcatcggcgatgggttggagtaggccgtaggggcctacaacgttgggtccttttcgtagttgcatataacctagtacttttcgttctactagggtgaggaatgctacggccagtaggataggaatgattaggcttagaatgttaattatgaacatgctattagggagaggagttgaacctctggtaataaaggtttaagttttacgcaattaccggtctctgccaccctaatgtgccctgttctagggctggatttattatgagttaattaggttaagattatatcattaattatctctgagacgcgtttgtgaggttggtcccatttctcttgtcctttcgtactgggagaaatttataatagatagaaaccgacctggattgctccggtctgaactcagatcacgtaggactttaatcgttgaacaaacgaacctttaatagcggttgcaccatttgggtgtcctgatccaacatcgaggtcgtaaaccctattgtcgataggaactctagaataggattgcgctgttatccctagggtaacttgttccgttgatcaaaattttggatcaataagtgatgttatggttattttgactggtttgtctagattaaaatcactcggagggttttttgtactccgaggtcaccccaaccgaaattgctagtccatgttaagttatgttttatccctttgtggttgaattgtttaacttttggaatagttaattaaagctccatncgttattaggttccgggatcctctagatca

SEQ ID NO: 635789 - DNA, 1216 bp, Homo sapiens
gtgcctgtcatcttcgttgctgcccacatgatgtcatctggctgctcttgggcagggctgggagccactttggggttctgggaagggcaggaggggctctgtggctctaaagcacctccctttaaccccctttgtccatccacagctctcggccactttaaccattcccatctggcagtggttcttgacccggtttggcaagaagacagctgtatatgttgggatctcagtgagtggggttgaagagcagagcctgggttgagttgggatgtctggtgggaacctcccagctgattcatcttcctgcacccccttccctagtcagcagtgccatttctcatcttggtggccctcatggagagtaacctcatcattacatatgcggtagctgtggcagctggcatcagtgtggcagctgccttcttactaccctggtccatgctgcctgatgtcattgacgacttccatctgaagcagccccacttccatggaaccgagcccatcttcttctccttctatgtcttcttcaccaagtttgcctctggagtgtcactgggcatttctaccctcagtctggactttgcagggtaccagacccgtggctgctcgcagccggaacgtgtcaagtttacactgaacatgctcgtgaccatggctcccatagttctcatcctgctgggcctgctgctcttcaaaatgtaccccattgatgaggagaggcggcggcagaataagaaggccctgcaggcactgagggacgaggccagcagctctggctgctcagaaacagactccacagagctggctagcatcctctagggcccgccacgttgcccgaagccaccatgcagaaggccacagaagggatcaggacctgtctgccggcttgctgagcagctggactgcaggtgctaggaagggaactgaagactcaaggaggtggcccaggacacttgctgtgctcactgtggggccggctgctctgtggcctcctgcctcccctctgcctgcctgtggggccaagccctggggctgccactgtgaatatgccaaggactgatcgggcctagcccggaacactaatgtagaaaccttttttttacagagcctaattaataacttaatgactgtgtacatagcaatgtgtgtgtatgtatatgtctgtgagctattaatgttattaattttcataaaagctggaaagcagctgcctgtt

SEQ ID NO: 635790 - DNA, 2338 bp, Homo sapiens
  misc_feature (55)..(55): n is a, c, g, or t
  misc_feature (174)..(174): n is a, c, g, or t
  misc_feature (204)..(204): n is a, c, g, or t
  misc_feature (852)..(852): n is a, c, g, or t
tgttagtaggggtactctaggttgttagtgggtgaattctgttggtggtcagaanctcctaattcgggtgttggtgctaggcttgagtggtagaaagctcaaaagaatccagtgaagaacagaacctcggaaataataaataaaattataccgtatcgtaagcctttttggacnactgatgtgtggtggccttggaaagtgctntctcgaataatgtctcgtcaccattggtatattgtcaaagtattggttaatagtcctagagatagtaagagtatagagttaaagtggaatcatataattaggcctgatgttattaaaagggctgatagggctccggtaagtggtcatgggcttgggtttactatgtggtatgcatgtgtttggtgggtcattatgtattgtcgtgtaggtataagcttactagcagtgtaaacacataagcttggatcagagctactgcaaattcaagaatagttaataggatgaggatagtaaatgtgataagggtagtgtagataatgggattaattagtatgggaagggtatgaaccaacattttcggggtatgggcccgatagcttagcttagctgaccttactgtagaatgtggtgtattttggtagcacggagaattttgaattctcaggtttaggttcgagtcctattgttctagaaataagagggtttgaacctctattttttactctatcaaagtaactcttttatcagacatatttctatgattgtgggggaatgcttgctgttataatagggagtgagatgtgtcatatacatagagctagtgttaggggcaggaagctttttcatagtaaatgtattagttggtcntatcggaatcgtgggtatgatgctcggattcataggaaggtgattgttaatgcgagtgtttttagtacgaagttgattgtatatagttctgatgtgtgtgggtcgtggaatgctcctaggaagagaattgctgtgaatgcatttattatgatgatgttggcatattctgctatgaagaatatggcgaaaggtccggctgcatattctacgttaaagcctgatacaagttctgactctccttctgtaaggtcgaacggggctcggttggtttctgctagggttgagataaatcatattatggctaggggtcaggatgtaaagattattcaaatgtgctcttgtgttgtgattagggttgatagagtatatgatccatttattaggagtactgatagtaggatgattgctagtgttacttcatatgagattgtttgggctactgctcgtagggccccgatgagtgcgtattttgagttggatgctcatcctgatcataggatagagtagactgctaggcttgacatggctagcatgaatagtactcctagatttatgttgattagagggtagggtattggtagtggaactcatattgttagtgctagggataaggctaggattggtgcaataatgaacatggagattgaggatgtggctggtcgtaggggttctttggtgaatagttttagggcatcggcgatgggttggagtaggccgtaggggcctacaacgttgggtccttttcgtagttgcatataacctagtacttttcgttctactagggtgaggaatgctacggccagtaggataggaatgattaggcttagaatgttaattatgaacatgctattagggagaggagttgaacctctggtaataaaggtttaagttttacgcaattaccggtctctgccaccctaatgtgccctgttctagggctggatttattatgagttaattaggttaagattatatcattaattatctctgagacgcgtttgtgaggttggtcccatttctcttgtcctttcgtactgggagaaatttataatagatagaaaccgacctggattgctccggtctgaactcagatcacgtaggactttaatcgttgaacaaacgaacctttaatagcggttgcaccatttgggtgtcctgatccaacatcgaggtcgtaaaccctattgtcgataggaactctagaataggattgcgctgttatccctagggtaacttgttccgttgatcaaaattttggatcaataagtgatgttatggttattttgactggtttgtctagattaaaatcactcggagggttttttgtactccgaggtcaccccaaccgaaattgctagtccatgttaagttatgtggttagtatgagtgaaatgatatataacactaaagagctgattaagagtacgattattaaggtgtgatcgtgaaagtgtaggagttcttctatgatgggtgaagtggcgtc

SEQ ID NO: 635791 - DNA, 984 bp, Homo sapiens
  misc_feature (303)..(303): n is a, c, g, or t
  misc_feature (492)..(493): n is a, c, g, or t
  misc_feature (496)..(496): n is a, c, g, or t
ctctgtccttaaggagcctgttataggacgtgtgtatccatcacctcccatacccctccaacaaccctaagtatcaggttcttaggttccccctctgcaggtgaagaagttgaggtttcagcaggaagagtacctggcccagctgaaaggggcggagctggggtttgagcctcagcattccggctccagagactgcactcttcatcagcctcctggcatataggacctcgagtgtggcctgaccctgcatctggggaaaccagtgggcaggctggagtgagtcatgccagcccgtcagccagnccaggcgagagtgtagatctagggtttgcagtaccctgtgtgcagcaaggacagtaaacagaccaaccaacagttgaaagtgggagtgagcaaactctgtgtcccgcggttcactttagtccgacagcagggccaagatcacgtgaggaaggaggcaggtggggctgaggaggggtaaggatggatgcnnccnccaacccatctcctctctctcttgcagggacgaggccagcagctctggctgctcagaaacagactccacagagctggctagcatcctctagggcccgccacgttgcccgaagccaccatgcagaaggccacagaagggatcaggacctgtctgccggcttgctgagcagctggactgcaggtgctaggaagggaactgaagactcaaggaggtggcccaggacacttgctgtgctcactgtggggccggctgctctgtggcctcctgcctcccctctgcctgcctgtggggccaagccctggggctgccactgtgaatatgccaaggactgatcgggcctagcccggaacactaatgtagaaaccttttttttacagagcctaattaataacttaatgactgtgtacatagcaatgtgtgtgtatgtatatgtctgtgagctattaatgttattaattttcataaaagctggaaagcagctgcctgtt

SEQ ID NO: 635792 - DNA, 2383 bp, Homo sapiens
  misc_feature (55)..(55): n is a, c, g, or t
  misc_feature (174)..(174): n is a, c, g, or t
  misc_feature (204)..(204): n is a, c, g, or t
  misc_feature (852)..(852): n is a, c, g, or t
tgttagtaggggtactctaggttgttagtgggtgaattctgttggtggtcagaanctcctaattcgggtgttggtgctaggcttgagtggtagaaagctcaaaagaatccagtgaagaacagaacctcggaaataataaataaaattataccgtatcgtaagcctttttggacnactgatgtgtggtggccttggaaagtgctntctcgaataatgtctcgtcaccattggtatattgtcaaagtattggttaatagtcctagagatagtaagagtatagagttaaagtggaatcatataattaggcctgatgttattaaaagggctgatagggctccggtaagtggtcatgggcttgggtttactatgtggtatgcatgtgtttggtgggtcattatgtattgtcgtgtaggtataagcttactagcagtgtaaacacataagcttggatcagagctactgcaaattcaagaatagttaataggatgaggatagtaaatgtgataagggtagtgtagataatgggattaattagtatgggaagggtatgaaccaacattttcggggtatgggcccgatagcttagcttagctgaccttactgtagaatgtggtgtattttggtagcacggagaattttgaattctcaggtttaggttcgagtcctattgttctagaaataagagggtttgaacctctattttttactctatcaaagtaactcttttatcagacatatttctatgattgtgggggaatgcttgctgttataatagggagtgagatgtgtcatatacatagagctagtgttaggggcaggaagctttttcatagtaaatgtattagttggtcntatcggaatcgtgggtatgatgctcggattcataggaaggtgattgttaatgcgagtgtttttagtacgaagttgattgtatatagttctgatgtgtgtgggtcgtggaatgctcctaggaagagaattgctgtgaatgcatttattatgatgatgttggcatattctgctatgaagaatatggcgaaaggtccggctgcatattctacgttaaagcctgatacaagttctgactctccttctgtaaggtcgaacggggctcggttggtttctgctagggttgagataaatcatattatggctaggggtcaggatgtaaagattattcaaatgtgctcttgtgttgtgattagggttgatagagtatatgatccatttattaggagtactgatagtaggatgattgctagtgttacttcatatgagattgtttgggctactgctcgtagggccccgatgagtgcgtattttgagttggatgctcatcctgatcataggatagagtagactgctaggcttgacatggctagcatgaatagtactcctagatttatgttgattagagggtagggtattggtagtggaactcatattgttagtgctagggataaggctaggattggtgcaataatgaacatggagattgaggatgtggctggtcgtaggggttctttggtgaatagttttagggcatcggcgatgggttggagtaggccgtaggggcctacaacgttgggtccttttcgtagttgcatataacctagtacttttcgttctactagggtgaggaatgctacggccagtaggataggaatgattaggcttagaatgttaattatgaacatgctattagggagaggagttgaacctctggtaataaaggtttaagttttacgcaattaccggtctctgccaccctaatgtgccctgttctagggctggatttattatgagttaattaggttaagattatatcattaattatctctgagacgcgtttgtgaggttggtcccatttctcttgtcctttcgtactgggagaaatttataatagatagaaaccgacctggattgctccggtctgaactcagatcacgtaggactttaatcgttgaacaaacgaacctttaatagcggttgcaccatttgggtgtcctgatccaacatcgaggtcgtaaaccctattgtcgataggaactctagaataggattgcgctgttatccctagggtaacttgttccgttgatcaaaattttggatcaataagtgatgttatggttattttgactggtttgtctagattaaaatcactcggagggttttttgtactccgaggtcacccacaactttacactatttttattgtcttactcagtattttgtatatcaattctatgatgattggaagtgaccgcattactaagtgacttggaagtgacccacttagtgtgtggtaaagggagcacagcacctcagtttctccccagtctttgtctcttagtggcaaataccctcaggaggaggaggagga

SEQ ID NO: 635793 - DNA, 541 bp, Homo sapiens
  misc_feature (41)..(42): n is a, c, g, or t
  misc_feature (45)..(46): n is a, c, g, or t
  misc_feature (51)..(51): n is a, c, g, or t
  misc_feature (491)..(491): n is a, c, g, or t
  misc_feature (498)..(498): n is a, c, g, or t
  misc_feature (504)..(505): n is a, c, g, or t
gttgtaacaagcgccggtcagtgaccatgcacgaacttctnnagnngagtntagaggatgcccccactttaatactgcttgtctggctggatgatccactttaatactgcttgtctggctggatgatccactttaatactgcttgtctggctggatgatccactttaatactgcttgtctggctggatgatccactttaatactgcttgtctggctggatgatccactttaatactgcttgtctggctggatgatccactttaatactgcttgtctggctggatgatccactttaatactgcttgtctggctggatgatccactttaatactgcttgtctggctggatgatccactttaatactgcttgtctggctggaccaaggatgcaaccagatgtgtgcaggctacctcttccagccagacaagcagtattaaagtggatcatccagccagacaagcagtattaaagtggatcatccagccagacancagtatntggatnntccagccactttaagtggtatccgggccggctcttt

SEQ ID NO: 635794 - DNA, 214 bp, Homo sapiens
gttctgcagtggcatcctcttcctcgcattcctctgcagagtgacacagaactgtgctgatcgcatgagactggtagtgtactgagtcctctggttggtcacgagccgataccgggttggcaggaattgatacagcacttcgtcagggctcagacacatgatccatgtcggcccctgtcagggacctgccttaaattcagaatctctggttgag

SEQ ID NO: 635795 - DNA, 2289 bp, Homo sapiens
  misc_feature (55)..(55): n is a, c, g, or t
  misc_feature (174)..(174): n is a, c, g, or t
  misc_feature (204)..(204): n is a, c, g, or t
  misc_feature (852)..(852): n is a, c, g, or t
tgttagtaggggtactctaggttgttagtgggtgaattctgttggtggtcagaanctcctaattcgggtgttggtgctaggcttgagtggtagaaagctcaaaagaatccagtgaagaacagaacctcggaaataataaataaaattataccgtatcgtaagcctttttggacnactgatgtgtggtggccttggaaagtgctntctcgaataatgtctcgtcaccattggtatattgtcaaagtattggttaatagtcctagagatagtaagagtatagagttaaagtggaatcatataattaggcctgatgttattaaaagggctgatagggctccggtaagtggtcatgggcttgggtttactatgtggtatgcatgtgtttggtgggtcattatgtattgtcgtgtaggtataagcttactagcagtgtaaacacataagcttggatcagagctactgcaaattcaagaatagttaataggatgaggatagtaaatgtgataagggtagtgtagataatgggattaattagtatgggaagggtatgaaccaacattttcggggtatgggcccgatagcttagcttagctgaccttactgtagaatgtggtgtattttggtagcacggagaattttgaattctcaggtttaggttcgagtcctattgttctagaaataagagggtttgaacctctattttttactctatcaaagtaactcttttatcagacatatttctatgattgtgggggaatgcttgctgttataatagggagtgagatgtgtcatatacatagagctagtgttaggggcaggaagctttttcatagtaaatgtattagttggtcntatcggaatcgtgggtatgatgctcggattcataggaaggtgattgttaatgcgagtgtttttagtacgaagttgattgtatatagttctgatgtgtgtgggtcgtggaatgctcctaggaagagaattgctgtgaatgcatttattatgatgatgttggcatattctgctatgaagaatatggcgaaaggtccggctgcatattctacgttaaagcctgatacaagttctgactctccttctgtaaggtcgaacggggctcggttggtttctgctagggttgagataaatcatattatggctaggggtcaggatgtaaagattattcaaatgtgctcttgtgttgtgattagggttgatagagtatatgatccatttattaggagtactgatagtaggatgattgctagtgttacttcatatgagattgtttgggctactgctcgtagggccccgatgagtgcgtattttgagttggatgctcatcctgatcataggatagagtagactgctaggcttgacatggctagcatgaatagtactcctagatttatgttgattagagggtagggtattggtagtggaactcatattgttagtgctagggataaggctaggattggtgcaataatgaacatggagattgaggatgtggctggtcgtaggggttctttggtgaatagttttagggcatcggcgatgggttggagtaggccgtaggggcctacaacgttgggtccttttcgtagttgcatataacctagtacttttcgttctactagggtgaggaatgctacggccagtaggataggaatgattaggcttagaatgttaattatgaacatgctattagggagaggagttgaacctctggtaataaaggtttaagttttacgcaattaccggtctctgccaccctaatgtgccctgttctagggctggatttattatgagttaattaggttaagattatatcattaattatctctgagacgcgtttgtgaggttggtcccatttctcttgtcctttcgtactgggagaaatttataatagatagaaaccgacctggattgctccggtctgaactcagatcacgtaggactttaatcgttgaacaaacgaacctttaatagcggttgcaccatttgggtgtcctgatccaacatcgaggtcgtaaaccctattgtcgataggaactctagaataggattgcgctgttatccctaagggttacattgttctcgttgctgctatgttagtggatcacactgagcaatattagttcgctttgatcggtgaaatcttagacatcttactgctacggaggcttgattttgttcacaagttcgccccgaccgaaattatcaattcaggtatgttagtttaggacctgtgggtttgttagatactgtcgacacgaatgttccggggatcct

SEQ ID NO: 635796 - DNA, 441 bp, Homo sapiens
  misc_feature (391)..(391): n is a, c, g, or t
  misc_feature (398)..(398): n is a, c, g, or t
  misc_feature (404)..(405): n is a, c, g, or t
ccattatatgtgttgctgacacacttatactgttgtctgctgatatccattatactgcttgtctggctggatatccactttaatactgcttgtctggctggatgatccactttaatactgcttgtctggctggatgatccactttaatactgcttgtctggctggatgatccactttaatactgcttgtctggctggatgatccactttaatactgcttgtctggctggatgatccactttaatactgcttgtctggctggatgatccactttaatactccaaggatgcaaccagatgtgtgcaggctacctcttccagccagacaagcagtattaaagtggatcatccagccagacaagcagtattaaagtggatcatccagccagacancagtatntggatnntccagccactttaagtggtatccgggccggctcttt

SEQ ID NO: 635797 - DNA, 462 bp, Homo sapiens
  misc_feature (1)..(1): n is a, c, g, or t
  misc_feature (349)..(349): n is a, c, g, or t
natttatcaatgtcaggttttttcagaaatgctacctaaaaaatttccagctataaataatggaaataaaatgttaacttttatttactttttgaaggtttaaatggaattatttatctaaagttttccaaatttttatgtcaagagatatctcagctaatatacttactcatactgaactatgttcacaaataattccaaatataatttctaaatttcaaatgcccatttttgttatgcacagaaatgtatttcaagatggtaacacaggcaggaggaatgcttgagctcaggagtttgagaccagtctggggaacatggcaaaaccctgtctctccaaaaaatacanaaactagcagcatgtggtggtgcatgcttgtggtcccagctactcgggaggctgaggtgggaggattgcttgagcccaggaggtcgaagctgtagtaagagagaccctgcctc

SEQ ID NO: 635798 - DNA, 777 bp, Homo sapiens
  misc_feature (20)..(20): n is a, c, g, or t
  misc_feature (476)..(476): n is a, c, g, or t
aaaagaggatcccgcgaacngtaacgagaagcaccgccaagtcctttgagttttaggcagttgcgagtagtactctggcgaatagttttgttatgtaactatttgggtttagggctaggcatagtggggtatctaatcccagtttgggtcctagctatcgtgtgtcaggattattagagtcactttcgtgggttattttattttaactagggctttttacagcttagttataatttaactctattgtggtttttttttcttaaacactctttacgccgtggatctattaatttgggttaatcgtatgaccgcggtggctggcacgagatttaccaactctaattaatataacttagtcaaactttcgttcatggcttaatttttatcactgctgtttcccgtgggggtgtggttgagcaaggcgttatgagctaccgttataggtgtgcttgatacctgctccttttgatctttangatctggagggcattctcaccggggcgcggatacttgcatgtgtaattttattaagaattaatagaaaggccaggaccaaacctgtgtgtttatggggctgtgaggctcatctaggcattttcagtgccttgctttgataatttaagctacattaactataagctatattcagattgtgggcgtatgcttaataggtgcttatattctgggaggttattgtgttgtaattctaaactaatcttgtgctaggtttgtcctccaaatctagggtgatacgtgtgtccgaagtacggcccaggt

SEQ ID NO: 635799 - DNA, 397 bp, Homo sapiens
  misc_feature (347)..(347): n is a, c, g, or t
  misc_feature (354)..(354): n is a, c, g, or t
  misc_feature (360)..(361): n is a, c, g, or t
ataactactgactagtaaggactggataatccactttaatactgcttgtctggctggatgatccactttaatactgcttgtctggctggatgatccactttaatactgcttgtctggctggatgatccactttaatactgcttgtctggctggatgatccactttaatactgcttgtctggctggatgatccactttaatactgcttgtctggctggatgatccactttaatactccaaggatgcaaccagatgtgtgcaggctacctcttccagccagacaagcagtattaaagtggatcatccagccagacaagcagtattaaagtggatcatccagccagacancagtatntggatnntccagccactttaagtggtatccgggccggctcttt

SEQ ID NO: 635800 - DNA, 424 bp, Homo sapiens
agtgacatacagtgatcctaaattatcaacttgtcaaacatttaataatttccttctgttttttcgtctgaagagaccgaatgcttagatagataacaatagatgcctggaaaatgtagccaagtagttcctcttgacaaaatcttccctttttgatagtttggaacagagccactgtatggtgactggtagactccaagagttgctttaattgatacactgagactgggatggacagagtacatttgattgtctattttacctgcaatgcaatataaatcaacgtcatttggcttaatgttttaaattcattacatcagttatattgatattctgtaataaaccagcatttttccccatgacattaattttttttagtatttctatgtttcaaataaatacctttacttagtaaaaaaaaaaa

SEQ ID NO: 635801 - DNA, 1355 bp, Homo sapiens
  misc_feature (55)..(55): n is a, c, g, or t
  misc_feature (174)..(174): n is a, c, g, or t
  misc_feature (204)..(204): n is a, c, g, or t
  misc_feature (852)..(852): n is a, c, g, or t
tgttagtaggggtactctaggttgttagtgggtgaattctgttggtggtcagaanctcctaattcgggtgttggtgctaggcttgagtggtagaaagctcaaaagaatccagtgaagaacagaacctcggaaataataaataaaattataccgtatcgtaagcctttttggacnactgatgtgtggtggccttggaaagtgctntctcgaataatgtctcgtcaccattggtatattgtcaaagtattggttaatagtcctagagatagtaagagtatagagttaaagtggaatcatataattaggcctgatgttattaaaagggctgatagggctccggtaagtggtcatgggcttgggtttactatgtggtatgcatgtgtttggtgggtcattatgtattgtcgtgtaggtataagcttactagcagtgtaaacacataagcttggatcagagctactgcaaattcaagaatagttaataggatgaggatagtaaatgtgataagggtagtgtagataatgggattaattagtatgggaagggtatgaaccaacattttcggggtatgggcccgatagcttagcttagctgaccttactgtagaatgtggtgtattttggtagcacggagaattttgaattctcaggtttaggttcgagtcctattgttctagaaataagagggtttgaacctctattttttactctatcaaagtaactcttttatcagacatatttctatgattgtgggggaatgcttgctgttataatagggagtgagatgtgtcatatacatagagctagtgttaggggcaggaagctttttcatagtaaatgtattagttggtcntatcggaatcgtgggtatgatgctcggattcataggaaggtgattgttaatgcgagtgtttttagtacgaagttgattgtatatagttctgatgtgtgtgggtcgtggaatgctcctaggaagagaattgctgtgaatgcatttattatgatgatgttggcatattctgctatgaagaatatggcgaaaggtccggctgcatattctacgttaaagcctgatacaagttctgactctccttctgtaaggtcgaacggggctcggttggtttctgctagggttgagataaatcatattatggctaggggtcaggatgtaaagattattcaaatgtgctcttgtgttgtgattagggttgatagagtatatgatccatttattaggagtactgatagtccttctaggcatagtagtgaagatattaagtgagatcgatatataagtaaccctgcaagggcgatcgcgaatgctataatgatgtttatatatactaatggcacttg

SEQ ID NO: 635802 - DNA, 523 bp, Homo sapiens
  misc_feature (41)..(42): n is a, c, g, or t
  misc_feature (45)..(46): n is a, c, g, or t
  misc_feature (51)..(51): n is a, c, g, or t
  misc_feature (473)..(473): n is a, c, g, or t
  misc_feature (480)..(480): n is a, c, g, or t
  misc_feature (486)..(487): n is a, c, g, or t
gttgtaacaagcgccggtcagtgaccatgcacgaacttctnnagnngagtntagaggatgcccccactttaatactgcttgtctggctggatgatccactttaatactgcttgtctggctggatgatccactttaatactgcttgtctggctggatgatccactttaatactgcttgtctggctggatgatccataatactgcttgtctggctggatgatccactttaatactgcttgtctggctggatgatccactttaatactgcttgtctggctggatgatccactttaatactgcttgtctggctggatgatccactttaatactgcttgtctggctggaagaggtagcctgcacacatctggttgcatccttggagtattaaagtggatcatccagccagacaagcagtattaaagtggatcatccagccagacaagcagtattaaagtggatcatccagccagacancagtatntggatnntccagccactttaagtggtatccgggccggctcttt

SEQ ID NO: 635803 - DNA, 316 bp, Homo sapiens
tgttatgtgaaaaaagccagccacaagggatcacatattagaggatttcatttatatgaaatacccagaataggcaaatctttagaaacaaaaggtagagtggttgttgcctaaagggtagggaggatggaaaattttgcaagtgatttgctgatgggtacagagtttcttgttggggtgataaaaatattctaaaattgattgtagtgagggttgcacaactctgaatatgctaagagccattgagttgtacactttgtgtgggtgaattgtatgtgaattatatctcattaaagctggaaaaataatcaatgga

SEQ ID NO: 635804 - DNA, 887 bp, Homo sapiens
taaggttggagggggaatgcgggaaatggtaaggggtttggaaacttgtcatataagtaaggctagggtgaggggtaggaagtttttccataggaggggtatgagtgggccgtagcggaatcgggggtatgctgtccgaattcataagaacggggaggttagaagtagggtctgggggacaaaatatgtggtgtagagtccaggggagagtgcgtcatatgtggtccctaggaagatggtaggggtgagggtgtcatataataaggtcgggtatccggctatgaagaatagggcgaaggggcctgcgggtatacgatgtgaagcctgagactagtcggactccccttcggacaaggtcgaagggggtccggagggtctcggcaaggggggagataaatcatataagggccagggtcatgagggcaggagtaacagaggtgtctggtgtgtgacaagggcgagaggtaaaggagccactaataagaaggtcgacagaaaagacggcagggcgacacatatgaaatagatgggacaactgcaccacaggggccgactaagggcaggtacaaggaagttggaatgctccacccctgaatccaaaaggtatggcagtaaccggactacgcacaaagggcgtctagaaaaaactggccggcctaggtgtacggacgcaccacggcgggctggacatccggaaggaggtcacacaaacacacccacagagctcaaacacaagtcgtgacgaggaacgaacagggagacgaaacagcgcgaggaacaagagcctggcaacgacaagccgcccaagagcgaaccccacaacaacaagcacagacaacacaactaaaaacaccccaccagcacactagcagatggacaacgccaca

SEQ ID NO: 635805 - DNA, 1457 bp, Homo sapiens
  misc_feature (55)..(55): n is a, c, g, or t
  misc_feature (174)..(174): n is a, c, g, or t
  misc_feature (204)..(204): n is a, c, g, or t
  misc_feature (1094)..(1094): n is a, c, g, or t
  misc_feature (1096)..(1096): n is a, c, g, or t
  misc_feature (1102)..(1104): n is a, c, g, or t
  misc_feature (1110)..(1111): n is a, c, g, or t
  misc_feature (1116)..(1116): n is a, c, g, or t
  misc_feature (1422)..(1422): n is a, c, g, or t
tgttagtaggggtactctaggttgttagtgggtgaattctgttggtggtcagaanctcctaattcgggtgttggtgctaggcttgagtggtagaaagctcaaaagaatccagtgaagaacagaacctcggaaataataaataaaattataccgtatcgtaagcctttttggacnactgatgtgtggtggccttggaaagtgctntctcgaataatgtctcgtcaccattggtatattgtcaaagtattggttaatagtcctagagatagtaagagtatagagttaaagtggaatcatataattaggcctgatgttattaaaagggctgatagggctccggtaagtggtcatgggcttgggtttactatgtggtatgcatgtgtttggtgggtcattatgtattgtcgtgtaggtataagcttactagcagtgtaaacacataagcttggatcagagctactgcaaattcaagaatagttaataggatgaggatagtaaatgtgataagggtagtgtagataatgggattaattagtatgggaagggtatgaaccaacattttcggggtatgggcccgatagcttagcttagctgaccttactgtagaatgtggtgtattttggtagcacggagaattttgaattctcaggtttaggttcgagtcctattgttctagaaataagagggtttgctgaagatggcggtatataggctgaattggcaagggttggtaaggtctatcggggtttatcgattatagaacaggctcctctaggtggatgtgaagcaccgccaagtcctttgagttttaggcagttgcgagtagtactctggcgaatagttttgttatgtaactatttgggtttagggctaggcatagtggggtatctaatcccagtttgggtcctagctatcgtgtgtcaggattattagagtcactttcgtgggttattttattttaactagggcttctttttacagcttagttataatttaactctattgtggtttttttttcttaaacactctttacgccgtggatctattaatttgggttaatcgtatgaccgcggtggctggcacgagatttaccnangcctannnatagtnnccctnctctcaataggaggcctgcctccactatcaggatttatgccaaaatgaataattattcaagaaataacaaaaaatgaaagcatcatcatgccaacactcatagcaataacagcactgctaaacctctatttctacatacgactagcctactcctcctcactgactatgttcccatccaccaacaacataaaaataaaatgacaattcgaacacacaaaacaaataaaattacttcccacaataatggtattatcaacactagtcctacctataacaccagccctctcgtccctaaactaggaattnaggttaacacagaccaagagccgtcggctaattta

SEQ ID NO: 635806 - DNA, 395 bp, Homo sapiens
  misc_feature (41)..(42): n is a, c, g, or t
  misc_feature (45)..(46): n is a, c, g, or t
  misc_feature (51)..(51): n is a, c, g, or t
gttgtaacaagcgccggtcagtgaccatgcacgaacttctnnagnngagtntagaggatgcccccactttaatactgcttgtctggctggatgatccactttaatactgcttgtctggctggatgatccactttaatactgcttgtctggctggatgatccactttaatactgcttgtctggctggatgatccactttaaccattcccatctggcagtggttcttgacccggtttggcaagaagacagctgtatatgttgggatctcatcagcagtgccatttctcatcttggtggccctcatggagagtaacctcatcattacatatgcagcagccgcggtattacagctccaatagcgtatattaaagtggatcaaccagggccgagctgatt

SEQ ID NO: 635807 - DNA, 1536 bp, Homo sapiens
  misc_feature (55)..(55): n is a, c, g, or t
  misc_feature (174)..(174): n is a, c, g, or t
  misc_feature (204)..(204): n is a, c, g, or t
  misc_feature (1235)..(1235): n is a, c, g, or t
tgttagtaggggtactctaggttgttagtgggtgaattctgttggtggtcagaanctcctaattcgggtgttggtgctaggcttgagtggtagaaagctcaaaagaatccagtgaagaacagaacctcggaaataataaataaaattataccgtatcgtaagcctttttggacnactgatgtgtggtggccttggaaagtgctntctcgaataatgtctcgtcaccattggtatattgtcaaagtattggttaatagtcctagagatagtaagagtatagagttaaagtggaatcatataattaggcctgatgttattaaaagggctgatagggctccggtaagtggtcatgggcttgggtttactatgtggtatgcatgtgtttggtgggtcattatgtattgtcgtgtaggtataagcttactagcagtgtaaacacataagcttggatcagagctactgcaaattcaagaatagttaataggatgaggatagtaaatgtgataagggtagtgtagataatgggattaattagtatgggaagggtatgaaccaacattttcggggtatgggcccgatagcttagcttagctgaccttactgtagaatgtggtgtattttggtagcacggagaattttgaattctcaggtttaggttcgagtcctattgttctagaaataagagggtttgctgaagatggcggtatataggctgaattggcaagggttggtaaggtctatcggggtttatcgattatagaacaggctcctctaggtggatgtgaagcaccgccaagtcctttgagttttaggcagttgcgagtagtactctggcgaatagttttgttatgtaactatttgggtttagggctaggcatagtggggtatctaatcccagtttgggtcctagctatcgtgtgtcaggattattagagtcactttcgtgggttattttattttaactagggcttctttttacagcttagttataatttaactctattgtggtttttttttcttaaacactctttacgccgtggatctattaatttgggttaatcgtatgaccgcggtggctggcacgagatttaccaactctaattaatataacttagtcaaactttcgttcatggcttaatttttatcactgctgtttcccgtgggggtgtggttgagcaaggcgttatgagctaccgttataggtgtgcttgatacctgctccttttgatctttangatctggagggcattctcaccggggcgcggatacttgcatgtgtaattttattaagaattaatagaaaggccaggaccaaacctgtgtgtttatggggctgtgaggctcatctaggcattttcagtgccttgctttgataatttaagctacattaactataagctatattcagattgtgggcgtatgcttaataggtgcttatattctgggaggttattgtgttgtaattctaaactaatcttgtgctaggtttgtcctccaaatctagggtgatacgtgtgtccgaagtacggcccaggt

SEQ ID NO: 635808 - DNA, 321 bp, Homo sapiens
  misc_feature (41)..(42): n is a, c, g, or t
  misc_feature (45)..(46): n is a, c, g, or t
  misc_feature (51)..(51): n is a, c, g, or t
  misc_feature (271)..(271): n is a, c, g, or t
  misc_feature (278)..(278): n is a, c, g, or t
  misc_feature (284)..(285): n is a, c, g, or t
gttgtaacaagcgccggtcagtgaccatgcacgaacttctnnagnngagtntagaggatgcccccactttaatactgcttgtctggctggatgatccactttaatactgcttgtctggctggatgatccactttaatactgcttgtctggctggatgatccactttaatactgcttgtctggctggatgatccatccagccagacaagcagtattaaagtggatcatccagccagacaagcagtattaaagtggatcatccagccagacancagtatntggatnntccagccactttaagtggtatccgggccggctcttt

SEQ ID NO: 635809 - DNA, 426 bp, Homo sapiens
aatgtggccgtgaatatgacaacatttaaacgagaagacaacagctcaaagatagagcctaaaaacttgccgaccaagcaagtaattacgctgaacccccttggccccgcttggatactctctaattagacgccctgggccctcccaattctgagtcttttaatatctgtgtttcctgtactgatattgggaccttaggtcttccgtttagttgctcaattcatccaaaaccgtatccaggccatcatcaatgattctatatgacaaatgctccttctaacaaccccacgagatcaccccttaccacaaaatcttgcttcagcttaatctctcccactctaggttcccacgccgccccaatcctgctaaaagcagccctgagaaacatcgcccattatctctccataccaccccccaaaatttttg

SEQ ID NO: 635810 - DNA, 1218 bp, Homo sapiens
  misc_feature (55)..(55): n is a, c, g, or t
  misc_feature (174)..(174): n is a, c, g, or t
  misc_feature (204)..(204): n is a, c, g, or t
  misc_feature (852)..(852): n is a, c, g, or t
tgttagtaggggtactctaggttgttagtgggtgaattctgttggtggtcagaanctcctaattcgggtgttggtgctaggcttgagtggtagaaagctcaaaagaatccagtgaagaacagaacctcggaaataataaataaaattataccgtatcgtaagcctttttggacnactgatgtgtggtggccttggaaagtgctntctcgaataatgtctcgtcaccattggtatattgtcaaagtattggttaatagtcctagagatagtaagagtatagagttaaagtggaatcatataattaggcctgatgttattaaaagggctgatagggctccggtaagtggtcatgggcttgggtttactatgtggtatgcatgtgtttggtgggtcattatgtattgtcgtgtaggtataagcttactagcagtgtaaacacataagcttggatcagagctactgcaaattcaagaatagttaataggatgaggatagtaaatgtgataagggtagtgtagataatgggattaattagtatgggaagggtatgaaccaacattttcggggtatgggcccgatagcttagcttagctgaccttactgtagaatgtggtgtattttggtagcacggagaattttgaattctcaggtttaggttcgagtcctattgttctagaaataagagggtttgaacctctattttttactctatcaaagtaactcttttatcagacatatttctatgattgtgggggaatgcttgctgttataatagggagtgagatgtgtcatatacatagagctagtgttaggggcaggaagctttttcatagtaaatgtattagttggtcntatcggaatcgtgggtatgatgctcggattcataggaaggtgattgttaatgcgagtgtttttagtacgaagttgattgtatatagttctgatgtgtgtgggtcgtggaatgctcctaggaagagaattgctgtgaatgcatttattatgatgatgttggcatattctgctatgaagaatatggcgaaaggtccggctgcatattctacgttaaagcctgatacaagttctgactctccttctgtaaggtcgaacggggctcggttgtttgatgccgattgtcactattatcaagcctagttggcttgtagttgagaaggctacgatttgtttgatatcattttgtgtgagtgcacatatgctgct

SEQ ID NO: 635811 - DNA, 294 bp, Homo sapiens
  misc_feature (41)..(42): n is a, c, g, or t
  misc_feature (45)..(46): n is a, c, g, or t
  misc_feature (51)..(51): n is a, c, g, or t
gttgtaacaagcgccggtcagtgaccatgcacgaacttctnnagnngagtntagaggatgcccccactttaatactgcttgtctggctggatgatccactttaatactgcttgtctggctggatgatccactttaatactgcttgtctggctggatgatccactttaatactgcttgtctggctggatgatccacgtacaatgctgcgcgttgtggctggactgatgccacgtcatgaatcgcctgttaccgcgtatacagagtcaccgggttttcctccagcaaggcaagcac

SEQ ID NO: 635812 - DNA, 1172 bp, Homo sapiens
  misc_feature (734)..(734): n is a, c, g, or t
  misc_feature (743)..(743): n is a, c, g, or t
  misc_feature (869)..(869): n is a, c, g, or t
  misc_feature (896)..(896): n is a, c, g, or t
ggcgagcgtgagtcagcgctgaaggcccagagcgcgctgcacgagcagaagactctgcccgggatgaaccggccgatccaggtgaagcctgcggacagcgagaccgaggagatagaaaactcttcgtgggcatgctcaacaagcaacagtccgaggacgacgtgcgccgccttttcgaggcctttgggaacatcgaggagtgcaccatcctgcgcgggcccgacggcaacagcaaggggtgcgcctttgtgaagtactcctcccacgccgaggccaggccgccattcaacgcgctacacggcagccagaccatgccgggagcctcgtccagtctggtggtcaagtttcgccgacaccgacaaggagcgcacgatgcggcgaatgcagcagatggttggccagatgggcatgttcaaccccatggccatccctttcggagcgtatggcgcctatgctcaggcactgatgcagcagcaagcggccctgatggcatcggtcgcgcagggcggctacctgaatcccatggctgccttcgctgccgcccagatgcagcagatggcggccctcaacatgatatgggctggcagccgcacctatgaccccaacctcaggtggcagcacccctccaggcatcactgcaccagctgtgcctagcatcccatcccccatgtgggtgaacggcttcacgggcctccccctcaggccaatgggcagcgtgctgcggaacgtgtgtntgccaatgngcattcaccgtacgcagcacagagccccacggcagccgaccccgtgcagcaggcctacgctggagttgcagagtatcgaggacgtgcctagcctgctgcctatggtcagattagccaggcctttcntcagcgacggcgaatgattcccagcanagagagaagggccgtaggtgttatttttgcggcgcgtcgcgggagttgtggacgacgtggaagagctgcctgtggttggggttgaagatgagacgaaacgatctcgatagggttacattctgaggcgagggcggttgggtaagagttccgaatttggtgtgctgggcacgatggagacaggcgagaataacattctatatggaggggttaacaagagaaaggttgtgttatagagggggagtaaatgaaaaacatatggggagcctcttcttcctc

SEQ ID NO: 635813 - DNA, 729 bp, Homo sapiens
  misc_feature (428)..(428): n is a, c, g, or t
ccgagctggacccggaagagcggctggcgaatagttttgttatgtaactatttgggtttagggctaggcatagtggggtatctaatcccagtttgggtcctagctatcgtgtgtcaggattattagagtcactttcgtgggttattttattttaactagggcttctttttacagcttagttataatttaactctattgtggtttttttttcttaaacactctttacgccgtggatctattaatttgggttaatcgtatgaccgcggtggctggcacgagatttaccaactctaattaatataacttagtcaaactttcgttcatggcttaatttttatcactgctgtttcccgtgggggtgtggttgagcaaggcgttatgagctaccgttataggtgtgcttgatacctgctccttttgatctttangatctggagggcattctcaccggggcgcggatacttgcatgtgtaattttattaagaattaatagaaaggccaggaccaaacctgtgtgtttatggggctgtgaggctcatctaggcattttcagtgccttgctttgataatttaagctacattaactataagctatattcagattgtgggcgtatgcttaataggtgcttatattctgggaggttattgtgttgtaattctaaactaatcttgtgctaggtttgtcctccaaatctagggtgatacgtgtgtccgaagtacggcccaggt

SEQ ID NO: 635814 - DNA, 487 bp, Homo sapiens
aataatagtagttgaacataagaagtaactgttatgctttttttgagagtatttaattagataatacttttaacttctagcatggtgttgagaggaaaactttcttctgtcccaacttaggtgtgtgtgatgggagaggagaatgtgaatcaattgacaacagatagattaataggagaaaagttttaattcatatgcatgcaggaggcaggagcagtgagtaaccttgctgaatagccaaggataagcagtatacctagttaatgtcaggagttcgagaccagcctggccaacatggtgaaaacctgtctccactaaaaatacaaaaattagcaaggcatggtggtgcatgcctgtaatcctagctactcaggaggctgaggcaggagaattgcttgaacccaggaggaggaggttgcagtgagctgagattgcaccactgcactccagcctgctgggtgacagagtgagactccatctcaggaaa

SEQ ID NO: 635815 - DNA, 463 bp, Homo sapiens
  misc_feature (347)..(347): n is a, c, g, or t
ggctctaaagggggtagagggggtgctataaggtaaataccggccctatttcaaagatttttaggggaattaattctaagacgatgggcatgaaactgtggtttgctccacagatttcaaagcattgaccggagtataccccccgtcgtgtagcggtgaaaggggtttggtttaaacctcccggaattgcatttggttttaagcctaatgtggggacagctcatgagtgcaagacgtcttgggatgtaattattatacgaatgggggcttcaatcgggagtactactcgattgtaaccgcaaggagtcgcaggtcgcctgttctaggataaatggggaagtatgtangagttgaaaaatagtcccgcgtagtcggtgtactcgtaggttccagtcccattggggcccatttgatttgatggtaaggggagggaatcgtgaccttcgcctgttactcgttgccg

SEQ ID NO: 635816 - DNA, 463 bp, Homo sapiens
gtatcagactgatacttccaacattgccacttcaatatccatgcaatttgctacagataaatcactagtcagtagaaagaacaacacgaccatggtactttctacttctaggtacaaagtgtagataaggagccctctgtgtggtacctggtaagctgtgttaatatagcctgatcacagtatacgagttagctcgtggctttcaggatgtagttgtctcctgcttgagaagcttgactggagcagtttacagcctttgagcccaaatgtgttaaacacgcagaccttatgtgggcaagatttcccatacaacatacatacacatagacagacataaggacaatagagacacaaaaatagagagagacatgtgtgcgcggggcgcgcgcgatgcaaggcgcgcgcggcgcggcgagagacacgcccatgttctgcgataggcactcccctatagccgcgtcgg

SEQ ID NO: 635817 - DNA, 733 bp, Homo sapiens
tgcatggtacggggtggaggtacaggcagcaaagcaatatttaggatgctgacttgtggagcagtatcgggcttggaaggaaagctatatgctacccattcatgctcccctgtcagagactcaagctttgatgaaaggctagcaaagagcaaggtaaagagagaaaacaacaaagtgcgcgaggcccgtcagagtgaaagcgtacggttcaggtcagtctgctgcagctttgccatacctcaggctgggcagtctccagactcccctgaaggaagagccttcctcacccaaacccacaagaagatgctgaatcaagcctctctcagctgtgacctggctctgcattttcagtacgtggcctttgtcagccaccctagcgtggctgcagaagctctctaagcacaagacaccagtcgacagccgacaggctcaagagcaggccaactgctgtgcaggaggtgacaggagctcaaggcccaaggttgccaagcttagcagcctgctgaggtgaactgaacaagaagcaggagagggactgggtcagcgtggatcatgcaggtgatggagctggagagcaacagcaagcgcatggatgtcgcgggctcacgagatgctgcagagcaagtactccgagatgaacaaccaaattgacatcatgcatgctgcaggcagcacagacggtcactcagaactccgcagatgccatctacgaatgatcttccctctaccagaa

SEQ ID NO: 635818 - DNA, 266 bp, Homo sapiens
  misc_feature (212)..(212): n is a, c, g, or t
  misc_feature (245)..(245): n is a, c, g, or t
ggatattcagtttttgtaacacaatttgttgaagagactcccccattatattgaggcaggaaaatagagtctggaggcagaaaacataagaccacttcacacttcacctttccatagggcatgggccataaataactttgtaactttatttcatcctctccatttacatagggcatactagggggtatttaaactcccaaaaattctgtaantgggcctttgagcccctacgcttgggctttttnccacactgtggagtgtatttt

SEQ ID NO: 635819 - DNA, 777 bp, Homo sapiens
ggccactgtaacagagacaccagccttcctgtatagacactaaatgttagcaagagtgtgagctagttcctggtgaagtgtttccacagaagacatgtggagcagttgtggggatattaagggaaactttcctctgcctgaccccttgttaaataaaatgacttgggagccattcatgtacagttgcaggaatgagagtgatttcatgatgtggtacattgggaccatgttctaaaaccttgggtttctgagtctgcttttgagtaggtgatttgaggttgaaaaaccagggccttcatctaggaaatacagcattttccagaagcttctttgaaagggaatcctggtttgtttgccaaaatgaaagcccggggtgggctgaatcccacaactgtggtgattgcttgtgagttagtggtcctggtattgtggtgtttataccaataagaatgagcctgaatgtggggtttgaaatcctgacttggaggtaacctggaggaaggaacacatgtaatatgcaggttttaggactgagtagcttgaaaataagctattctaaggccttgtaatctttgttttttttaacagaagtaatttcaactagcctggattcggggaaacagatattggggcgaaagaaagatggggaagtcttggtaggaaaatgggcaatggaggggcacggatcgttcgtgagggaggacaggaggtacagcaagtattttacaaaaaaagggcgcgtaaagggaaaaggagcggtaggcatgtttgcgttcg

SEQ ID NO: 635820 - DNA, 724 bp, Homo sapiens
aggagttggagctgggtgcagtggcttgtgcctgtagtcccagctacttgggaggctgaggcaggagggttgcttgagactagcctaggtaacatagtgagaccctgtctcattaaaaaaaaaaaaaaaggcttggtggcacgcactgtagtcccagctactcaggagactgaggctagaagattcttttgaacctaggagttttgagaccagccgtgggcgatatagtgaggccccatctcaaaaaaaaaaaaaaagcgggtggggggggagttggggcttgtgttgggaattgggccttgagcccaacaaacaggggacctaggaccgacggtgatttcaccagctttgcttaggtcagaaattgagagacgggggggtctgtctaacctggttttcttctaacaagaatccctatattggactggtaaaagtagctaataactccactttgttctccaaatcccaggtagccatgggtagagttgggtgtaggagttgagcaggtggccccaggtatcccaattgggtgggtggtctgaatgggaaagaactaggcaccccaggaggccactgatctggccttataagcacagtcatctgaaagtcaaggcctggctggaggacagggatccccagaagacccaattgtgcttctcaaactcagaccttccagcttgtgtttttcaattacatctactttttaacaacaaccacaacagcg

SEQ ID NO: 635821 - DNA, 141 bp, Homo sapiens
caaatgtaggcaggttgagaacttggaagacagagggataagaaaaataagtggaactggaaaagcattagcaaaaacagaaaaatatgaacacaaaagtgaagtgaagacttacgatccttctggtaactccctaaacga

SEQ ID NO: 635822 - DNA, 248 bp, Homo sapiens
caggagttcaatgaccagcctagtgtacaacgtgggacctcgtctctaccatacaaaggaaaagaaaagaaaagttagccagcactggttgacacatgcctgtagtcccagctactcaggaggctgagacaggaggatcaactgagcctgggaggtcgaggctgctgtgagcaatgatcaggccactgtactccactatgggtgacgacagagtgagactctgtaccaggaacttatgtaccaggaaa

SEQ ID NO: 635823 - DNA, 100 bp, Homo sapiens
catcttttacagaacttatgagttacttatatcatccgtgttatgataccattaatagaattacactttacagtgaatctttggcaagatatggcacaag

SEQ ID NO: 635824 - DNA, 112 bp, Homo sapiens
atcctccaagtgaacaccacagactctagatctcgttagagcattacaagatctggaaaatgcagcctcaggtgatgcagcacgcccctgagctgcagctcgcccctgagtt

SEQ ID NO: 635825 - DNA, 147 bp, Homo sapiens
aaagggggggggggggggggcccccccctttttttcccctttttttttaacccccctttggggggggttttttttccccttttggggcccccgggtttttcccccccccctgtttttttccgggggttttacccttttccccaagga

SEQ ID NO: 635826 - DNA, 682 bp, Homo sapiens
attgtcgcccttcttgctgacgttacttatgaattcttcaatctttgagccacgtcgctatttctattaccaatgtatgatccaggaactcttaatctaccggtggtgcagacctaacctgtcgttgccatgtttctgggacttacgctctaggtaagccttgttagtcacatgtacagagtacttatagagaaggggttcaataggtgcgagttaaccttgtattttttcgtgcttcataactcttctccttctattgtgtgttttccgtcactccctctccctccaccacattgtgttggtcaaatgatactatgtcgtatgaaaccctgagctatagttgtcacaagtaactatggattgtgaattagtcctctgtgggtgcttccttccctcttttttctcccgtcactcttctttctcagtctccactctggtaaatggaaaagttgatgtcgaagaattgatgcttgcttggactcatgttgtatcatgtgaatacgcgattagctgtctcctttttccttcttatatgggtagaattcttatgacttagtgtagttcccttcttgatttgtaggttatagactggagactatgtggtgactgttttatagtttctagagtgactagtataaagcctcaaagttaattcgttatgtgttttaattctcacatagtg

SEQ ID NO: 635827 - DNA, 480 bp, Homo sapiens
  misc_feature (423)..(423): n is a, c, g, or t
  misc_feature (432)..(432): n is a, c, g, or t
  misc_feature (453)..(453): n is a, c, g, or t
attttactattctaagtattccaaataagttgactcatacagtgtttattcttttatgtctggcttatttcacttagcgtaatgttttcaaggttcattcgtgttgtagcgtgtatccaaatttcatttatttttaaggctgaataatatcccattgtacgtacataacacattttctttatccattcatttgttgatggacatttaagttgcttccacctttggctattgtgaatagtgctgctataaacatgaatgtacacatctgtgtccctgctttcatttctttggggtatatacccggaagtagaaatgctggatcatatggtagttctgtgtttagctttttgaggaactgccatactgttttccacagcggcagtatatcctgtcaaattttaagtgtcaagggtccagctcccnttactaccncctccaagacattttttcaantccccttctaggtaggaggaggacttc

SEQ ID NO: 635828 - DNA, 202 bp, Homo sapiens
tggtccagcgctcagtcgggctcccttgactgaagtgcctcaataccagctaccagtcccagctcatcaaacccagccgcatgcgcagattaccccaatgcggcccagcaagactgcccccccgcacgaacgctcttgcgcttgcccagtggagtcctgtgatcgccgctactcccgctccgacgagctcacccgaccatac

SEQ ID NO: 635829 - DNA, 411 bp, Homo sapiens
  misc_feature (148)..(148): n is a, c, g, or t
  misc_feature (181)..(181): n is a, c, g, or t
accgcatctcacagccgtatgtgaactggagggtgtgaagggcctagaagccccggggacaggcaatgtcagtgacccccacagatgtatttcccaaggcctctccaatcatggtccctgctgcccttagcactgctccccgattccnttgggttctccttagaggacggctgttcacacntctagataacctaggctggctttccactgataccttggaagtgctgtgagctctgacagggagctagaactcgggctttgctgtgtcacaggctcttcaccctctgtggctctgttcctcttgcacacaagtcacaagcccagagcatgaccacaggactcctgtgcaagcagtccctggagtccaggagtaacctcccaggagcagagcacagcgcaggagcatggtgg

SEQ ID NO: 635830 - DNA, 136 bp, Homo sapiens
  misc_feature (34)..(34): n is a, c, g, or t
  misc_feature (130)..(130): n is a, c, g, or t
agaggtggagcagctacgtcgacaggtgcgtgantcagatgaggctggacatccgtcactgctgtcccctccagcagagcccccatggactatgaggatgattttacatgtttgaaggagtcagatagcngtgata

SEQ ID NO: 635831 - DNA, 314 bp, Homo sapiens
tctggtactgaacgctttcagccacggcagcagcaatgccggcggcaccttcttgagccattacgcggttcaccacacttcttcctttagaggtgacgcggagcgtcacagggtgcattcccatgcggagcgtgggaacgatcaatgacgagcaccacttgaacaggccacataaaaaagccgccttataaaaggcggcttcggatttcgctacggttacgcttgcggccgcatgtgcgggaacaggatcacgtcgcggatcgacggcgagttgggcaacaacatcaccagacggtcaatgccgataccttcac

SEQ ID NO: 635832 - DNA, 1334 bp, Homo sapiens
taaaacaattttttttttggtttcccgtccaacaatttttttattgaactttttaaattaaaaaaaaattctttacaaattataaaatttttttttcaaattaacaattagtgtgaaaaattgtgggggcacattgaagttctccttttttttggaaagtggagttcttcgcttctgtgttgtgcccagggcgtggaatgtgtcaggtggcgaccattcttcggcttcactgtggaacctctctcaccttctccgaggtttcaaggccatttcttctctgtgtccttcgagcctctctccagagcagctgtgggaattatcaggctattgttgtccacccagcccctgtggctttatttattatatttatttttattgtgtgtattttctataagtgtcagaaatatatatttcaccatgtgttgtggccccaggcggtggttcttgtagaactctccttcacctctccaggtgtgattctgtgcccccaccctctctgcgcgctctctgcaaaacgtgtgctcgtggcgatttctaccgcgcgctaattgtacgcccaaccacacaactgtgtggcgctttaaagatcttcctctattatattaggcaggaaacaccaatttacacacttatgtgtgcacacaatcttcccttctgaacaggaacactttttctaatctacattctacagagacgccctttttttctcccagggggcattacattatcccaacccggggggaaacaaccctgttgtttaccccttatttttcgcggttacaccaccactttggggacaccttctacccctgcgttccttttctttccccttggctttacaacttcttctttttcacttctttcgcgtctttccttctgtgcaaacaacaacagcactttgaacaaatttatatgtcctttctatttttttccacgaaattctcaaattccattttccccacaccctgccctctcacaatagccaaatggggcccttattggcctcccttggggacaaaaaacgaccgccgcctcacggagacgtccctaaacactcacgagggggacacccccaaccacacccccagagatctttttcggcatctgtgaacccgtgatgttaactgcaccccctgcacagtagtcctctcttcgtcggtattacaccccacgtttttcttttttccacccaagtctcctctatgccagtgttggcgccgcctgataaacaagggtcctccgtacacggtgtatctatacgctactggccgcccctatcgttttttctaacaccgcactcagagggctgcctgtgttctttctccaacaagatt

SEQ ID NO: 635833 - DNA, 533 bp, Homo sapiens
  misc_feature (310)..(310): n is a, c, g, or t
  misc_feature (345)..(345): n is a, c, g, or t
  misc_feature (437)..(437): n is a, c, g, or t
  misc_feature (440)..(440): n is a, c, g, or t
  misc_feature (457)..(458): n is a, c, g, or t
  misc_feature (467)..(467): n is a, c, g, or t
  misc_feature (470)..(470): n is a, c, g, or t
  misc_feature (473)..(473): n is a, c, g, or t
  misc_feature (480)..(480): n is a, c, g, or t
  misc_feature (484)..(484): n is a, c, g, or t
  misc_feature (489)..(489): n is a, c, g, or t
  misc_feature (499)..(499): n is a, c, g, or t
  misc_feature (525)..(526): n is a, c, g, or t
  misc_feature (532)..(532): n is a, c, g, or t
ccaagctggtttcaaactcctgacctcaaatggtccacccaccttggcctcccaaagtgcagggattacaggcatgagccaccatgcctggctttacaccaatgtcatagcaggcaaaaggtagaagcaacccagatgtccatcgccatatgaatggataaacaaaatgtggtctatacatacaatgggatattattcagccttaaaaagggaggacattctgtcacatactgcgacatggataaaccgtggtgaagacattacactaagtgaagttaaggcagacacagaaggacaaatacaggtgttntatgactccacttatctgaagttatctaaaaatantccaattcctagaaactgtattacttcctgtttgctattaaaaaaatacctgaaacttggtaatttataaaaaaaaaagtttatttggctcncantccgcaggtgttcaacnntttgaagcnggntcngcctccnggtnaaacnccaaaacttncatcctggttaaaggcaaaagaaccnnctttanc

SEQ ID NO: 635834 - DNA, 386 bp, Homo sapiens
gtctttccttcggtgaaaatcctatcaatggctggggcggtggtcacacctgtatcccagcactttgggagaccgaggcaggtggatcacctgaggtcaggagttcgagaccagcctggccaacgtggtgaaaccctgtctctactaaaaatacaaaaattagctgggcgtgatggtgtgcacctgtaatcccagctactcaggaggctgagacaggacacttgcttgaacccgggagctgccgattgcaatgagccaagattgtgccactgtattccaacttgggtgacagagcaggaactctgtctcaaaaacagcaccgaccataatatccagcaaatcgaaatatcacccacgtcaggcaagagaccgggaggaaccgggct

SEQ ID NO: 635835 - DNA, 869 bp, Homo sapiens
  misc_feature (816)..(816): n is a, c, g, or t
  misc_feature (825)..(825): n is a, c, g, or t
  misc_feature (847)..(847): n is a, c, g, or t
  misc_feature (862)..(862): n is a, c, g, or t
gatcagtagctgcaccactagaaagatggcggagcaagagcaaagaaaaatccctttggttccagaaaatctcctgaaaaagaggaaggcttatcaagccctcaaagccacccaggcaaagcaggcacttttggcaaagaaggagcagaagaaaggaaaagggctcaggtttaagcgactggaatcattcctacatgattcctggcggcagaaacgtgacaaggtgcgtctcagacgactagaagtgaaacctcatgccttggaattgccagataaacattccttggcctttgttgtacgcatcgaaaggattgacggcgtgagtttactggtgcagagaaccattgcaagacttcgcctaaagaaaatttttagtggtgtctttgtaaaagtcaccccccagaatctaaaaatgctgcgtatagtggaaccttatgtgacctggggatttccaaatctgaagtctgtccgagaactcattttgaaacgtggacaagccaaggtcaagaataagaccatccctctgacagacaatacagtgattgaggagcacctggggaagtttggcgtcatttgcttggaagacctcattcatgaaattgccttcccagggaagcatttccaggagatctcatggttcttgtgccctttccacctctcagtggcccgtcatgctaccaaaaatagagtgggcttcctcaaggagatgggcacacctggctatcggggtgaacgcatcaatcagctcatccgtcagctgaactagacccaggtgagcagggctgaaaacttgcctttgggtggactttttgatanggccatgcnttggccactttacaagttcctntttggaatttacttngtattta

SEQ ID NO: 635836 - DNA, 979 bp, Homo sapiens
  misc_feature (157)..(157): n is a, c, g, or t
  misc_feature (159)..(160): n is a, c, g, or t
  misc_feature (169)..(169): n is a, c, g, or t
  misc_feature (174)..(174): n is a, c, g, or t
  misc_feature (235)..(235): n is a, c, g, or t
  misc_feature (609)..(609): n is a, c, g, or t
aggatcttatttactggcatttggagggatgggaggtaggggtggggcttacttgtagtagcttttttttttttaacagacttcacagagaaatgcagttgtcttgacttcaggtctgtctgtcctgtgggcaagtaaatgcagtactgttctgatncnnctgctatanaatgnttgtgaaacgactggagtatattaaaagttgtgttccccaatgcttggagtagtgattgtngaaggaaaaaatccagctgagtgataaaggctgagtgttgaggaaatttctgcagttttaagcagtcgtatttgtgattgaagctgagtacattttgctggtgtatttttaggtaaaatgctttttgttcatttctggtggtgggaggggactgaagcctttagtcttttccagatgcaaccttaaaatcagtgacaagaaacattccaaacaagcaacagtcttcaagaaattaaactggcaagtggaaatgtttaaacagttcagtgatctttagtgcattgtttatgtgtgggtttctctctcccctcccttggtcttaattcttacatgcaggaacactcagcagacacacgtatgcgaagggaccaganaagccagacccagtaagaaaaaatagcctatttactttaaataaaccaaacattccattttaaatgtggggattgggaaccactagttctttcagatggtattcttcagactatagaaggagcttccagttgaattcgccagtggacaatatgaggataccaggtgcacaagttttttcggtattcataatcagagtcagaccagttatgggcccatagtatagaatagatttcacctttatgctggagtaattggcatgtaatcaatttgtgttcctctcggggtccaggcatgagggggcctgttagcctctcttttaacatttttctgggtacccctcaagaaaggcgcggaagggtgaaagtaggt

SEQ ID NO: 635837 - DNA, 361 bp, Homo sapiens
gatcagtagctgcaccactagaaagatggcggagcaagagcaaagaaaaatccctttggttccagaaaatctcctgaaaaagaggaaggcttatcaagccctcaaagccacccaggcaaagcaggcacttttggcaaagaaggagcagaagaaaggaaaagggctcaggtttaagcgactggaatcattcctacatgattcctggcggcagaaacgtgacaaggtgcgtctcagacgactagaagtgaaacctcatgccttggaattgccagataaacattccttggcctttgttgtacgcatcgaagattacgcgtagttactgtcaggacattaagctcgctaagaatttagtggcttt

SEQ ID NO: 635838 - DNA, 332 bp, Homo sapiens
  misc_feature (305)..(305): n is a, c, g, or t
  misc_feature (330)..(330): n is a, c, g, or t
gttcaagcaattctgccgcagcctccggagcagctgggactacaggcatgtgcaccacgcccgactggtttttgcattatttgtggagacgggggtttcaccatgttggccagactggtctcgatctcctgacctcgtgatccgccagccttggcctcccagagtgctgggattgcaggtgtgaaccactgcggcccggcggaacttctctttcctcacttctctctctggggtcccagcttctgggaagggacaccctggccttggccttcacccccagacagggggcaggaacaacccaaatnggggaatttgaggcaagggattttncc

SEQ ID NO: 635839 - DNA, 803 bp, Homo sapiens
  misc_feature (733)..(733): n is a, c, g, or t
  misc_feature (736)..(736): n is a, c, g, or t
  misc_feature (777)..(778): n is a, c, g, or t
gcatgaatcatcagcaaactggtggcgatgggcgggctgagttatgtcggcgggtatgtgtcggcggcagcgttgctcagcttgattgctgtgctgtgcctgaaagagacgcgggataatgatttgaacaaggtcgcctgatagaccgccttcgcgagcaagcccgctcccacacttgaccgagttccagcatgagaatgcggtcaagtgtgggagcgggcttgctcgcgaagggcgcgactcgattacagctctactacaacagccttggaagcacgggtcgctttagcccgagccgcttcaatcgactcatcccgcgccaacgccacgcccatccgacgctgaccattcatacaagtccttatttggagaacaagtgattatgctacctttgcacggtcagaataccgcggccgttaaactggtgtcactgggcaggcattgcctctaatactagtaatgtaatactagtaatgctagaggtgatgtttttggtaaacaggcggggtttgtgtttgccgagttccttttacttcttttaatctttccttggtgcactcctgtgttgggttaacaatgtaattaataaacgttttagtgttgttttggtttattggttgttaattatcagtatattattagttactgatgtaagcgtgtgcgaggagaaaggcttcttgttactcatattaacattattgcttctatgtttcaatagattagtccggtattnggnctaggagtttgttattagtttttgggagtattgtgtgatanntgatagtggggaatcctctagacgt

SEQ ID NO: 635840 - DNA, 903 bp, Homo sapiens
  misc_feature (157)..(157): n is a, c, g, or t
  misc_feature (159)..(160): n is a, c, g, or t
  misc_feature (169)..(169): n is a, c, g, or t
  misc_feature (174)..(174): n is a, c, g, or t
  misc_feature (235)..(235): n is a, c, g, or t
  misc_feature (609)..(609): n is a, c, g, or t
aggatcttatttactggcatttggagggatgggaggtaggggtggggcttacttgtagtagcttttttttttttaacagacttcacagagaaatgcagttgtcttgacttcaggtctgtctgtcctgtgggcaagtaaatgcagtactgttctgatncnnctgctatanaatgnttgtgaaacgactggagtatattaaaagttgtgttccccaatgcttggagtagtgattgtngaaggaaaaaatccagctgagtgataaaggctgagtgttgaggaaatttctgcagttttaagcagtcgtatttgtgattgaagctgagtacattttgctggtgtatttttaggtaaaatgctttttgttcatttctggtggtgggaggggactgaagcctttagtcttttccagatgcaaccttaaaatcagtgacaagaaacattccaaacaagcaacagtcttcaagaaattaaactggcaagtggaaatgtttaaacagttcagtgatctttagtgcattgtttatgtgtgggtttctctctcccctcccttggtcttaattcttacatgcaggaacactcagcagacacacgtatgcgaagggaccaganaagccagacccagtaagaaaaaatagcctatttactttaaataaaccaaacattccattttaaatgtggggattgggaaccactagttctttcagatggtattcttcagactatagaaggagcttcccgccaaaggtcaccccaggcccgactgaggaaaacagcgcgaacaagcctcgtctgaatgcacacacaaagactagatcaggtatactgggacaatagtatcgaatagatttcagctatagctggagtagaggtcagggatcctcagcgtcgacctgacagaatgca

SEQ ID NO: 635841 - DNA, 905 bp, Homo sapiens
gggcgcttcaaggatgcgctgtctgaaccgtgcctatgctgctgcgggccctggtcccaggctgcacgtgcagagacctcctggtggccggagcctccatcagcatggttgcacgtggcagcccatctacaatgtatgtgaacatgctgggatcccgagatggacatgaaggtcagtgactgaccgggctagcccgcagccctgctgtggatctggagctcttccgaggcctgggcatgaccctgagctacctgttccgtggataccgggcagccatcttagggctatcccgttccgagaaggggcccgctgagccctcgcttccgtggggagcatgcgctgctccggtacccatccggggaggagcgttgcattgtctgctagctctgcgaggccatctggcccgcccagtgccatcaccatctgagtgctgagccaagagctgtatggcaagccgcgtgatcacccgtctatgagcatcgaacatgaccaagtgcactctactgcggcttctgcaggaggcctgtcccgtggatgccatcgtcgagggccccaattttgagttctccacggagacccatgaggagctgctgtacaacaggagaagttgctcaacacacggggaccagtggggagggccgagatcgtcgcaacattcaggctgacttacttgtatcgggtgacgccctgcgggccgtagccctgctgaccagtagaccattcgacccatcttgctgagatgggcttccgcggttggccgcttttttttggctgcccgcggccccttctctaagacccggggtgggggggtctctgcccgtttggctttgggcggccggcccggcgtccccgggaggcttgtgcgccatgccctcgtgcccggtccctccctttcccggggcggc

SEQ ID NO: 635842 - DNA, 421 bp, Homo sapiens
  misc_feature (58)..(58): n is a, c, g, or t
  misc_feature (60)..(60): n is a, c, g, or t
  misc_feature (66)..(68): n is a, c, g, or t
  misc_feature (74)..(75): n is a, c, g, or t
  misc_feature (80)..(80): n is a, c, g, or t
  misc_feature (386)..(386): n is a, c, g, or t
tagcgacgcaccacaactgtatgtctatccatacatgaaacaaaatacccgtcatcanangcctannnatagtnnccctnctctcaataggaggcctgcctccactatcaggatttatgccaaaatgaataattattcaagaaataacaaaaaatgaaagcatcatcatgccaacactcatagcaataacagcactgctaaacctctatttctacatacgactagcctactcctcctcactgactatgttcccatccaccaacaacataaaaataaaatgacaattcgaacacacaaaacaaataaaattacttcccacaataatggtattatcaacactagtcctacctataacaccagccctctcgtccctaaactaggaattnaggttaacacagaccaagagccgtcggctaattta

SEQ ID NO: 635843 - DNA, 539 bp, Homo sapiens
  misc_feature (22)..(22): n is a, c, g, or t
  misc_feature (101)..(101): n is a, c, g, or t
  misc_feature (104)..(105): n is a, c, g, or t
  misc_feature (107)..(107): n is a, c, g, or t
  misc_feature (117)..(117): n is a, c, g, or t
  misc_feature (128)..(128): n is a, c, g, or t
  misc_feature (137)..(137): n is a, c, g, or t
  misc_feature (140)..(140): n is a, c, g, or t
  misc_feature (154)..(155): n is a, c, g, or t
  misc_feature (161)..(161): n is a, c, g, or t
  misc_feature (165)..(165): n is a, c, g, or t
  misc_feature (169)..(169): n is a, c, g, or t
aggacggcgcttgaggaccccnggatgatccctttaatactgcttgtctgatccactttaatactgcttgtctggctggatgatccactttaatactgctngtnngnctggatgatncacttttatantgcttgtcnggntggatgatccactnnaatacngctngtcnggctggatgatccactttaatactgcttgtctggctggatgatccactttaatactgcttgtctggctggatgatccactttaatactgcttgtctggctggatgatccactttaaataaaccaaacattccattttaaatgtggggattgggaaccactagttctttcagatggtattcttcagactatagaaggagcttcccgccaaaggtcaccccaggcccgactgaggaaaacagcgcgaacaagcctcgtctgaatgcacacacaaagactagatcaggtatactgggacaatagtatcgaatagatttcagctatagctggagtagaggtcagggatcctcagcgtcgacctgacagaatgca

SEQ ID NO: 635844 - DNA, 215 bp, Homo sapiens
tattcatatattcctgtcccaagccacactgaaaacagaggctgagacatgtactcctggtgtgatctcttgtcctcagtgtctcttactgggctcctgtccctcttgctttatagctagctagccggagaccaaggtactgtgtgcagccaggtagcagcttgcgggatgaggcctgtctggcttaccagtctatacacttgatggctcaacct

SEQ ID NO: 635845 - DNA, 738 bp, Homo sapiens
tgtatctgtctactttctcttgtttaaaaaaagaagaaaaaattaaacaaaatggggttatacgaatggtcagcaaagggtgggttcgagatgtcggaggtgggtaaaggtgggcatttgtgaccaaccagtggttctcctttgtggcatgtttacactgtgtgaatatttggacaagacatcctttgcaagttttaaagaatgaacactttttaaaaattaaaatttccttcttcccttaaaattgaattgacctttggaagcccctggggccaacttccaatgttgcggacgaaatcaaggcaaggaaaaccccttggtaaaggggacaactcccttttaaatctcgcggcgacacattcggcccaaatttgcgttcctaaattgtggtacaaacttttcgtggattccccgtggtcaaaactgtttgtcacaaaacacactttttccttgcgcccattgtactaacaccggggagtaatctacaccacaccttgtgtggtcggaaacaaacaggggtcgaccacaacagcgacgttgcaagttggccccttcccaaaaggattttttataaaaaaaccgcggcttttcaccacaaccacgggcgtttgggtttcaccccaaaaagcgttctgtggcgccatcacataggagggatcgttcacaccccacaattttcaaacaacagatctgttaacaaaacacttgggtgtggcgtataaccacccacaaaacacg

SEQ ID NO: 635846 - DNA, 578 bp, Homo sapiens
  misc_feature (508)..(508): n is a, c, g, or t
  misc_feature (511)..(511): n is a, c, g, or t
  misc_feature (552)..(553): n is a, c, g, or t
tcagccgtccctctctgctcatggtcatctcctcttacatgaactatggactggtctgggctggttctctttttctgattaatgaagctggggtggagcatgaaaaaaccctctgggcaattgctcccattatttcaggatttctgaacaagtgattatgctacctttgcacggtcagaataccgcggccgttaaactggtgtcactgggcaggcattgcctctaatactagtaatgtaatactagtaatgctagaggtgatgtttttggtaaacaggcggggtttgtgtttgccgagttccttttacttcttttaatctttccttggtgcactcctgtgttgggttaacaatgtaattaataaacgttttagtgttgttttggtttattggttgttaattatcagtatattattagttactgatgtaagcgtgtgcgaggagaaaggcttcttgttactcatattaacattattgcttctatgtttcaatagattagtccggtattnggnctaggagtttgttattagtttttgggagtattgtgtgatanntgatagtggggaatcctctagacgt

SEQ ID NO: 635847 - DNA, 451 bp, Homo sapiens
acctatcacttaaactgctgtctgctggatgaccactttaatactgcttgtctggctggaagaggtagcctgcacacatctggttgcatccttggagtattaaagtggatcatggctggatgatccactttaatactgcttgtctggctggatgatccactttaatactgcttgtctggctggatgatccactttaaataaaccaaacattccattttaaatgtggggattgggaaccactagttctttcagatggtattcttcagactatagaaggagcttcccgccaaaggtcaccccaggcccgactgaggaaaacagcgcgaacaagcctcgtctgaatgcacacacaaagactagatcaggtatactgggacaatagtatcgaatagatttcagctatagctggagtagaggtcagggatcctcagcgtcgacctgacagaatgca

SEQ ID NO: 635848 - DNA, 421 bp, Homo sapiens
  misc_feature (76)..(76): n is a, c, g, or t
  misc_feature (412)..(412): n is a, c, g, or t
cacttaaaaaaatgtaagctcccaaagctgggccttgggtggaaagcgtgcttgtaagcccccaagccacctaagnaggctgaggcaagtagggatccctgaagcccccagaagtccaaggataataagtacattaatgattgtgtctgtgaaatagccactgtactcccagcctgggtaacatagtgagaaccttcctcttgaaaaaaataaaaattagttccattgtttgctggccttcgttactacttatgagatgtcaagcatcttttatatcattttcccctagtatataaagtttaactttgagccggcgtggtactcacgcctgtaatcccagcactttgcgtggctgaggcgggtaggtcacttgaggccaggagttccaggccagcctggtcaacatggtganaccctgtct

SEQ ID NO: 635849 - DNA, 387 bp, Homo sapiens
  misc_feature (22)..(22): n is a, c, g, or t
aggacggcgcttgaggaccccnggatgatccctttaatactgcttgtctggctggatgatccactttaatactgcttgtctggctggatgatccactttaatactgcttgtctggctggatgatccactttaaataaaccaaacattccattttaaatgtggggattgggaaccactagttctttcagatggtattcttcagactatagaaggagcttcccgccaaaggtcaccccaggcccgactgaggaaaacagcgcgaacaagcctcgtctgaatgcacacacaaagactagatcaggtatactgggacaatagtatcgaatagatttcagctatagctggagtagaggtcagggatcctcagcgtcgacctgacagaatgca

SEQ ID NO: 635850 - DNA, 394 bp, Homo sapiens
cagctcttcttctaaattcattaaagaaagtgggggaaagaaatggggaaaacaacaatgatatgccattttacaccatcaaatcagcaaaatgtaaaattctaacagtgctgtgcagtgatgagcatgcgaagaaatgaaaactcgtatgtggctaagaggagtgtggattgatgtgggcattttggcatgcaattcagaaataatcaatgaaattgaagatgtttgtgctctatgacccagaaatcccacttctagagatattctcaaatgtgtgtacagagacacatagaagcatgttcattgcagcaccatttgtaatactggaaaattggaaataaccagaatgcacatcaaccagaaaatggataaataaaatgtggcttatcaaata

SEQ ID NO: 635851 - DNA, 125 bp, Homo sapiens
tgatctagaggacccccatatcaatccaccccggcggggcccctcggaaaacagacctaagtggaaatttctttgagaaacctcgaggttctacgtcagacgcgtatgcacttgacatccttccc

SEQ ID NO: 635852 - DNA, 189 bp, Homo sapiens
gaagaccttagaaaaaggaggaaaggaggagaggcagataatttggatgaattcctcaaagaatttgaaaatccagaggttcctaggaggaggaccagcaacaacaggcattcagcaggcgttgatgtttatcggattgaggccccattattgaaggagcccaggcgcgcttccgagagttcaggttat

SEQ ID NO: 635853 - DNA, 123 bp, Homo sapiens
tcccgtgtgttccctttgtctggggtaattcgatacaaaatgatacttttttgaatcctgaatccataaattacactttttttttccacttcaccaaattccacatggttcttgacttgtttt

SEQ ID NO: 635854 - DNA, 220 bp, Homo sapiens
gcatatggcacggcaagtgttctcatgtttagtttccacctatgagtgagaacatgcagtgtttggttttctgtccttgtgatagtttactcagatatgatggtttccagcttcatccatgtccctacaaaggacatgaactcatcctttttatggctgtatagtattcgatggtgtacatgtgcccccttggccttgccatatgcaagggtaccgagca

SEQ ID NO: 635855 - DNA, 100 bp, Homo sapiens
ctctcatattcagcttgtgccggactggctggcagctcggtcatgtactcgcgtgtggcccggccgttgccctcgcggaatgggtgcatttcgttcacca

SEQ ID NO: 635856 - DNA, 714 bp, Homo sapiens
  misc_feature (474)..(474): n is a, c, g, or t
  misc_feature (599)..(599): n is a, c, g, or t
ccctttgatccatatgtgctgtgggctccgcttaaatcagcaagaatgagaaatgagatggagtaaccttcgcacgatcaacgcctctctttaatgattgatggatactatgcctctactggtaatcaattcggcaccctgcttcactgtatagcgctttacatgcttattattgatggaagagcatattcaacagatccttcatttggatcgtgatatctagaattgtagtgatgttataacctaattggggaatacatatctctctggggtttaatataaaagagaataccatgctgcgtctgttatagcggcgcaccttacatactatttgtattgtccctggtgacccccgactaatgtctcttttattctaaggcaccctctacataactgcctataactattttgttggggcctacaatacagcttgcctggccccttgccccctaactggattcgggccaaacacanaacacggcttttaacgcgtgggggcccgggagcgcccggcctctataaactcgttcctccttgcgcacccgccctttatccaaactccctaaccaaatacagccgaaaggttatatttcataaanttgtcaaaattaaaaggcttggaaaggtaacacccttaaatacccaatattcggatggattaattcccctcttccttttagaaactgggccgaaccccgccaggccctcttttac

SEQ ID NO: 635857 - DNA, 771 bp, Homo sapiens
gcaccagcaccagccccagccccagctccctccggccgcagaaccagcatcgggtgttcactgtcgagctctcgatgctgatttgacataatgtgccttacgctgcctcgctgggggcagctggcctccgcctccgcccacgcaccagcagccgcctccatgccctaggttgggcccctgggggaatctgagggctctgtggcctcctcagggcaatgttcccatgatcctatgtctgtctgtacatcgctacgagtatgggaggaggagaaaaagcggtacgatgccgttcgcatgacactcaccggcactccctcaaggggtgccggcgactctgggtggtactcacaggtcatgctgggcccctaccgtcataacatggtcaacgtgagactgtaaggtcaatgtcctatcgtactggtggcccgagactaatctctgtgggtcctggatctgtcagacaggctgccctatagccccaaccagtacggggggactgggagcagttccaagaccaactgcaaaccctttatggtgaatgcttgttccttggttagtcagatacgtgcgtcttgtctcgagtctggcgtacaaaatgcttatatcattactctaaagtgatttgaggggcagcgatagcccactttataacatattggaaacaacttgtgttggacagccgggccccaaagaggatgctgacagaggggaagcagaacctcagaagatcccggggcagagcggctgcgaggaaacctcgccctatatacg

SEQ ID NO: 635858 - DNA, 169 bp, Homo sapiens
  misc_feature (70)..(70): n is a, c, g, or t
  misc_feature (157)..(157): n is a, c, g, or t
tgtcacctcttggcttcatggctatgctgcattaagagatggctaccattgaccctctgcattgccttgncttctggtgcctccctctcctgcaagtggccctttttagtcagatccttaaagctatttcaacatttctccacccgtatccccccancacccttccacc

SEQ ID NO: 635859 - DNA, 555 bp, Homo sapiens
ctgcaagagagcctcagaaaaccatcacgttgctctcatctggaggatcatgggatacctattctgtctgaggactacagtatctccttctggttccaagatgctcagctcaaggatcacatgttggctgtgccgctgttgaatcgcaggtcatccttttgaaatccttacgggtctatctatacagctcgcagaggaacagacaacaatgaaaggaaagagttaggaacctgggctccaaatgggacagaatcttctctgtgctagcaagggtaccttagaaatcaggatctttgcttctcaaatgccagtgtggttcctgatttctctgagactactaggaagctcctccccaaattctccaatgaaaacgaatactgctttattagaatttggccaaagtgtgagtccctccttgtctgcaggaagactggagcagagtgtgacaggattgtgacatcaagaacaatgacagtggagggaccaggccaggtgtttgagatccattgcgatttgattggtctggctgagaaagagagagagagagagagagtg

SEQ ID NO: 635860 - DNA, 112 bp, Homo sapiens
gtgggtctgtgacattctgcagctagtccactactccgaggtaactatcgacttggtttcagtagaatctattttgttattaactacctgtgatttattcagctcagtagtc

SEQ ID NO: 635861 - DNA, 80 bp, Homo sapiens
cgtcgacgtcaaaaattgccaatgccgactatatttcaagtcgtcatggcggggtattgggaaaagttttcaattagcag

SEQ ID NO: 635862 - DNA, 397 bp, Homo sapiens
actgtgttatccttcaatgtactgcctgatctcagcggaacccacattcctctattaccatctcctgataatttttcatgtaccaccttatcatactcatccaggtacagcatggagatggcactcagttcattgggcacactacaggctttggggatactgtaattgacagaattgacctgggtctgcacaatggcatggttggttgagttgaggtgctcagtcagtgtcatggtgcattccccatggctagtataaggcctggtagcctggtggggccacaatccagtcattccagcccacatcgctgaagtccacatagagcgagtggcgccggcagttcttattcttcttcctggcccgctgtgagtggataacacgttcgcgaggggtaccg

SEQ ID NO: 635863 - DNA, 100 bp, Homo sapiens
acgacagtgggtccagctccctgatggggcgacaccactcaccagtttgcagcttccacttaaaattaacaactgctggctgagcgccgtcgcctacgca

SEQ ID NO: 635864 - DNA, 103 bp, Homo sapiens
gatcagcggaccttcatttcacgttcatttcatctcatcattttatctcaatctcacgtatcatcatttcatcagtttcttttcattgtcatctcatttcagt

SEQ ID NO: 635865 - DNA, 986 bp, Homo sapiens
cgcgaactcgcttggtgccctggctgtgtgctgcccctgcccatgcccatgtctccaatgtattgctcagatagactgtggcatgaatgctggcagccaaggcgcatctacgagatcctcccccagcgcatccagcagtggcagcagatcccttgcattgctaaagagcacggaagaagctgctcgaacgcttcccgagagcccagagtgcccgcactcgccttccggatatggaacgcacgataaccatgagcttgaggccatcattctacgtgccaaggcagcaggctgtgcgcgaggatgagtgatgatgcaacagagggtgacccgtgatgacacagacctgcagatcttctgtgttgcctgtgggcaccccatcaacccacgtgtagccttgcgccacatggatgcgctgctacgccaagtatgatgagccggacgtcctttgggtccatgtaccccacacgcattgaaggggccacacgatcttctgtgatgtgtatcatcctcagagcaaaacatactgtaagcggctccaggtgctgtgccccgagcactcacgggacccaaagtggcagtctgacgaggatccgggtgggccccccttttcctgaatgcttgactcccgggtgaattctgccgctgcccagccatgccatcgcattactgcttgggaaactggggtgcggaagttgacttggagcgcgtcgtgtgtgtaacagcttggaccaggctgttgagccatggcgcaaagttggcacaggcatgaccaaaccggcggaattgtggccctgatgttgaccaagaatcaggaattccctcctaacagcttggccaggccgacgtagctctgcgagccttaacctgtcaagggggcgcgcgccgttggccccccttttcggtctgcacccggggcgctttaagggcccatatcgggggggaccccccctttattaccaaaagggcttgcctcgtaccgggccaca

SEQ ID NO: 635866 - DNA, 172 bp, Homo sapiens
aattagacatccgttatgcggggttcctccggctcctctttaaaacaggccgtagtagacgatgagagtatcgatgacgcgggctgatggggataatccaccaggaggagagggacacggtggcctcgtgtgggcctgtggccgaagcagcgtgggcccgaacacgatgccc

SEQ ID NO: 635867 - DNA, 363 bp, Homo sapiens
gttgacaggttggcattttcctgtatttgggaaatgaatcataatgctgaaatattaaaaacgagatttaccaaaagtgtcattaattcaaaggcttctcttacgtacgcggaagcacagatgagaattgattcggcggctatgaatgatgatattaccactagtctccgtggactcaatcagctggctaaaattctaaaaaagggaaggattgaaaagggggctttgactctgtcttctccagagatccgattccacatggacagtgaaacccacgacccaatcgacctgcagacgaaagagctgagagaaacaaattccatggtggaagaatttatgttacttgctaatatttctgtcgca

SEQ ID NO: 635868 - DNA, 494 bp, Homo sapiens
  misc_feature (460)..(460): n is a, c, g, or t
  misc_feature (463)..(463): n is a, c, g, or t
  misc_feature (486)..(486): n is a, c, g, or t
gtaacaacaggtaacacatagtaagtactatgttccaagttatgttctaatagctttacagacataacttcatttaattctcccaacaaccaataactggaagaaatagtgctattataacccccatttgccagataaaggataagaagtctcgaagatggtaaataagtcaaccaaggtcacattgttgagctgaattccagcaagtggttgagctagaattcaaaccaaggtcaatacagctccagggtctgtactcttaagatcaacggtgcatcatctccatggattgctatctttcagaggtactgtgaaagagatgcctacattggagcattctggacaagatgaccttcccttctgtgaaccataatgagcatatccaacatagtcaatctctacccttctacctccaacatcattttctctttccttatttgttttaatttttaatacactnaanacaactgacattaaagcatctanttattaaa

SEQ ID NO: 635869 - DNA, 172 bp, Homo sapiens
tataaggacggcttgctcagttactccacgtagagtccacacaaagaggcgaggagtattgctcagtgggtggtacgggaggctggcacttgcctgaaccgcttaagatagggaatgaaatgcccaccgaagggcagggcaggtacccgtgctgtcccgatcactgaagata

SEQ ID NO: 635870 - DNA, 82 bp, Homo sapiens
ggctggtactggtccggaatgttaaggatcttttagctctgggcacctccagctcctgctcgccggacggctcccagtgaga

SEQ ID NO: 635871 - DNA, 1547 bp, Homo sapiens
gtgcgggaggggctgcgagcggtgctggcctgaggatgtgaggcgtgcgtgctgtggatgctgccttcctgcctggctgtgtgcctgtggcctgtggcctgatgcccctgtgtgctgcttgctgtgctgactgctctgtgagtccttgtcctcctgccatgtgcctgtgcttgccttgtgtgcccctgatgtgatgtgcttgcttgatggccccagtgccagtgtgtcccgctcgtctgcatgtgactgtgtgagaccttgtgtgatgccactgcgcctctgctgctgtgtgtgccttgtgtgatgatgttggtgcctggtgcccctgtgatggccctggatgcctgggtgatgggctcggcccctgccgccaggccccatgtccatgcccctggctcggccctgcccggtttccacagcagcaacgctggtggcccttggggtgatgtggtttgaggaagcttgagtgcatgttgtggaaagaaggagtaacaccacgaggatcgttgcatgtgttgaacagaaggaggagctccacaaggttggagccaggagagtgttgcaaaggcagtcatggcccctaatgacacacattaaggtcatacgatgtggcccggaaggcgccccattaaagacagttgtgaacatggggggcattgggcaccccctggagagaaagagaagcacacaacaggtgcgccatcctaacgcgttggagccacgttgagcacgggggtaaggagagcaaagccattggaagtgggggaggaaaagggcgtcaagtatagtgagacaagtggggagcccgagagggggaaggagagattgagtggcccgaggaaacgttgggaagaaatcgattagagagccatggggagcgtggaggcactcctgaagcatatggaggaaggaagagggacaacgcaggggaggacacacgttagtgtgaaatggggtatgggaggagagctagaagggtgaaccgtggaacgggggcaaagagggagagaatggggagagtaggcagttaggtgtgagcagagccgggaaaggattgaggagagacagtagagtggatgacgtagaaggagtggtcatcgagagttggtgtaccatatatggacagaggggaaatgggtggaaggaagaagtatagaaagtagaacatgatagcgcaggaatataggagtagataggatgtagtgcaaatagtgatagctgaggaaagatgggtgaaaaggacaaagggggaaggaagcggatgaacgggaaagaactaaggtgtgaggatgagagaagtaggggagagggggaaggagtaggagtgggaaagagagtaaggagggagagagggagagaggaggatagcgtacgttgtgtattgaatttgtagaagagaaggagataagtcagaagggggggaacggagatggaagatggaggggagagtaggagaagaaggggtcagggaaggaatgagaaagaagagcgaggaggaggagagaaaggaggaggaagaaatagagaggagggagagaagaagggta

SEQ ID NO: 635872 - DNA, 306 bp, Homo sapiens
  misc_feature (150)..(150): n is a, c, g, or t
tggtacctctaaccagaggctttttctctgcagcctgcaagcatcgtcattggttattagccattctgactgatgtgagatggtatctcattgtggtttagattgcagagttctctcatgattagagatgtgggcatttattcttatgtntgttggccattggtgtatcttcttttgagaagtgtctgttcatgccctttgcccatttttaagctggattatttggtttttgctcgttgatttgtttagattccttgtagattttcttatcagatctttgttggatgcacagtttgtaaatatttt

SEQ ID NO: 635873 - DNA, 139 bp, Homo sapiens
tgaggatcccacagaggagggggcctgccccaccccatccagccaacccacgctgaccatgcgtcagggcctagaggtggagttcttagctatcctggctttcagagccagcctggctctgccccctcctctgtgctgt

SEQ ID NO: 635874 - DNA, 273 bp, Homo sapiens
gtgatattcttatatttctcttctgatgattgtcacagtcaactgaaagcaccttcttagcaaatgagtggccatcaatatacatgtcgaggtagttacaaatcttcttagggggaggtggtggtatctgtaggaatgccaattttacagcttctgctgctgattcaggttctttaattatgcttatctttgagtctgcttcaaatagcacaacaaaaaaatgatgacacttttcacacttgacaaaacgggtggatgagacaaagggaaaca

SEQ ID NO: 635875 - DNA, 302 bp, Homo sapiens
tatcctaaatataaggtatggagttctcttttgggagggtttattcgtgcgggttcatcgtgagtaagaagcctgccttgctgtgccgtgggaagatgccatagttttcgttactggatgtttggagtagatactggtctgtgattggtggaatggagaacacacgtgttggtgcttctgggtagcactggtttgcattagtttatgtttccatgccagagtttgtgtgggcgggcgcatgtgcaccacagagtgcactcgaggggactttcagtcacaggatttcataattgtcatcgtca

SEQ ID NO: 635876 - DNA, 332 bp, Homo sapiens
  misc_feature (21)..(21): n is a, c, g, or t
  misc_feature (105)..(105): n is a, c, g, or t
tagaagcacacttctcacagnaagcattcatgaactcatgtcagttttataaatgtcccacaaataagggttgcaaatacagaatgatgtctggctgggccttgngtgtcacgcctgtaatcccagcactttgggaggtcgaggtgggcggatcacgaggtcaggagatcaagatcatcctggctaacacagtgaaaccccgtctctactaaaaatacaaaaaattagccaggcgtggtgcgggcgcctgtagtcccagctactcgggaggctgaggcaggagaatggcatgaacccgggaggcagagcttgcagtgagccgagatcgcgcc

SEQ ID NO: 635877 - DNA, 143 bp, Homo sapiens
  misc_feature (73)..(73): n is a, c, g, or t
  misc_feature (138)..(138): n is a, c, g, or t
cagctgagatgctctgcaagccagccacagtactaataacccgagccacgtgggtgactgtgactccagtttntccagatgagagagatcttttcaacagtggtattggaagctgggccagggatgatcctgataaanacctt

SEQ ID NO: 635878 - DNA, 861 bp, Homo sapiens
  misc_feature (36)..(36): n is a, c, g, or t
  misc_feature (61)..(61): n is a, c, g, or t
  misc_feature (63)..(63): n is a, c, g, or t
  misc_feature (71)..(71): n is a, c, g, or t
  misc_feature (83)..(84): n is a, c, g, or t
  misc_feature (86)..(86): n is a, c, g, or t
  misc_feature (89)..(89): n is a, c, g, or t
  misc_feature (91)..(91): n is a, c, g, or t
  misc_feature (172)..(172): n is a, c, g, or t
  misc_feature (239)..(239): n is a, c, g, or t
aatgcacaaaaaaaaaaaaaaagaaaaaaaaaaagnaaaaggaaagaaataaaaaaaaaananaaaaaagnaaaactctgaannanaananaaaaaaaaaaaaaagaagaagaaaaaaaaaaaaaaaaaaaaaaaaaaaaaaaaaaaaaaaaaaaaaaaaaaaaaaaaaaanaataaaaaaaaataaaaaaaaaaaaaataaaaaaaaaaaaaaaaaaaaagaaaaaaaaaaaaaaaanagtgtaaagcagtggcttcactggaaaaatggtgtggctagcatttccctttgagtcatgatgacagatggtgtgaaaaccatctaagtttgcttttgaccatcacctcccagtagcaatttgctttcataatccatttagcaatccaggcctctgttgaaaagataatatgagggagaagggaacacatttccttctgaacttacttccctaagtcactttccttatgtatcatctaatacaatgatggttgagtgaaaatacagaaggggtgtttgagtattcagatttcataaaacacttccttggaatatagctgcattaacttggaaagaagcctgttgggccagaagacagaaactccaactggcaaaaaagcaagcatctaagaaaaaaaaccaccaaagttcttgaatttactatatttaaatgcattggttaagtttattttgctaaataaagtgaactgctttttgtctctaaaatgatattctaaataaaaccttaactttttgttgaaaatgcactgaaaaaaaaaactcttcacaaccaatcacacaacaacacctaccacaccacatcaacaacacacaactcccaacacaaaaacaacaaatcacaa

SEQ ID NO: 635879 - DNA, 721 bp, Homo sapiens
gcccgtgttgcttggatggtgggttccgagtactcggcctggttttcgggctctagtagtggacgtgccccgttgctggccctctgcggttctctgctctggacatgcatctagctcgccacaggccggccgccccctctgcttcggggctcctgtatactcggtcaactgttcgtcacctcagactgcagatgttgctacaataccacactgatacgtagtattcacacagggaaaggggcagacgtgaacctagtccaggtggtccgaattttccaagaacatagtttaagtagattatatatgcttgctagaaatgcaggagcctacgtctagcgcgtatcttttctgctatgcttaaactaccatattacaagttcatagaccaaagagatatcccacaattagctatgctctagtaatgcgtcctgaccaagccagagactgcccagttctcattaggtgagtgcgccggcgatctaggggtttgagagaagggaattgttggctcaacttcagattgagagggtgcagtctcagacagcttgactgcttttataatgtaccaatagatgagcctgtggtaagcaacctgggcatcttaggaagcagtccctggagaaggcatgttcccagaaaggtctctggtagggactaaactcactcagtaagaacataatgtatcatcgaagagaactgattcttcttctcgacatgaaat

SEQ ID NO: 635880 - DNA, 1346 bp, Homo sapiens
agcggagtttttgagggagacctaaaactgtatcatcctagcccgtatctctcccttttaactgttctttatgtgtacattctgtgcccaaaagaaaacaacctttcattaattgggcaattgtccaggctcttagcttggcatccagctctcagagctgtgaaatcaaccgcaccagatctacgctttgaaatgaggcaacatctaactggaaactcgctcaaagtaaggaagtggatgaaaagactcagggtcccttttctcttccccgtcttctctcagccacatctctcttatcctatcttggtgaagaagcttgcttggctaggagagaggtcagggacgagaagatagtgacgagaaagttccatgagactctcagaagtcccagcctgaacatcaaacctgaataaccaggagagacgtaacctcggcatactttcagtggtttacctcctgcccacgctgcaggtttttcaggtccttgctcgagtgtgtgctcataggcgtaaataaacgtgctatcagcagcctgcgtcagccagcccagctatttaagcaggctggcatcagcaaacacagcttccaaacccagggcttgcgcttgcctttgcctcttccaccgcgcagggaccatgtcggcggagaccgcgagcggccccacagaggaccaggtggaaatcctggagtacaacttcaacaaggtcgacaagcacccggattccaccacgctgtgcctcatcgcggccgaggcaggcctttccgaggaggagacccagaaatggtttaagcagcgcctggcaaagtggcggcgctcagaaggcctgccctcagagtgcagatccgtcacagactaaggagatggcaggcattgacagcttcactccatgaaggccatctctgtttctctcctccgcttaaccaagctgttgtggtttttcagcatagtgttgtatgttccattgctagctgtcctgctgtttaacacagtgttgtattttttttctaaatgtacataattagaaaagaaaataacaataggaagctatgtgtatcttctgtgtaaagcagtggcttcactggaaaaatggtgtggctagcatttccctttgagtcatgatgacagatggtgtgaaaaccatctaagtttgcttttgaccatcacctcccagtagcaatttgctttcataatccatttagcaatccaggcctctgttgaaaagataatatgagggagaagggaacacatttccttctgaacttacttccctaagtcactttccttatgtatcatctaatacaatgatggttgagtgtgctgccaatgcggtaccgagctcgattcg

SEQ ID NO: 635881 - DNA, 1336 bp, Homo sapiens
  misc_feature (1324)..(1324): n is a, c, g, or t
  misc_feature (1327)..(1327): n is a, c, g, or t
agcggagtttttgagggagacctaaaactgtatcatcctagcccgtatctctcccttttaactgttctttatgtgtacattctgtgcccaaaagaaaacaacctttcattaattgggcaattgtccaggctcttagcttggcatccagctctcagagctgtgaaatcaaccgcaccagatctacgctttgaaatgaggcaacatctaactggaaactcgctcaaagtaaggaagtggatgaaaagactcagggtcccttttctcttccccgtcttctctcagccacatctctcttatcctatcttggtgaagaagcttgcttggctaggagagaggtcagggacgagaagatagtgacgagaaagttccatgagactctcagaagtcccagcctgaacatcaaacctgaataaccaggagagacgtaacctcggcatactttcagtggtttacctcctgcccacgctgcaggtttttcaggtccttgctcgagtgtgtgctcataggcgtaaataaacgtgctatcagcagcctgcgtcagccagcccagctatttaagcaggctggcatcagcaaacacagcttccaaacccagggcttgcgcttgcctttgcctcttccaccgcgcagggaccatgtcggcggagaccgcgagcggccccacagaggaccaggtggaaatcctggagtacaacttcaacaaggtcgacaagcacccggattccaccacgctgtgcctcatcgcggccgaggcaggcctttccgaggaggagacccagaaatggtttaagcagcgcctggcaaagtggcggcgctcagaaggcctgccctcagagtgcagatccgtcacagactaaggagatggcaggcattgacagcttcactccatgaaggccatctctgtttctctcctccgcttaaccaagctgttgtggtttttcagcatagtgttgtatgttccattgctagctgtcctgctgtttaacacagtgttgtattttttttctaaatgtacataattagaaaagaaaataacaataggaagctatgtgtatcttctgtgtaaagcagtggcttcactggaaaaatggtgtggctagcatttccctttgagtcatgatgacagatggtgtgaaaaccatctaagtttgcttttgaccatcacctcccagtagcaatttgctttcataatccatttagcaatccaggcctctgttgaaaagataatatgagggagaagggaacacatttccttctgaacttacttccctaagtcactttccttatgtatcatctaatacaatgatggttgagtgtgctgccnatncggggaccg

SEQ ID NO: 635882 - DNA, 1590 bp, Homo sapiens
agcggagtttttgagggagacctaaaactgtatcatcctagcccgtatctctcccttttaactgttctttatgtgtacattctgtgcccaaaagaaaacaacctttcattaattgggcaattgtccaggctcttagcttggcatccagctctcagagctgtgaaatcaaccgcaccagatctacgctttgaaatgaggcaacatctaactggaaactcgctcaaagtaaggaagtggatgaaaagactcagggtcccttttctcttccccgtcttctctcagccacatctctcttatcctatcttggtgaagaagcttgcttggctaggagagaggtcagggacgagaagatagtgacgagaaagttccatgagactctcagaagtcccagcctgaacatcaaacctgaataaccaggagagacgtaacctcggcatactttcagtggtttacctcctgcccacgctgcaggtttttcaggtccttgctcgagtgtgtgctcataggcgtaaataaacgtgctatcagcagcctgcgtcagccagcccagctatttaagcaggctggcatcagcaaacacagcttccaaacccagggcttgcgcttgcctttgcctcttccaccgcgcagggaccatgtcggcggagaccgcgagcggccccacagaggaccaggtggaaatcctggagtacaacttcaacaaggtcgacaagcacccggattccaccacgctgtgcctcatcgcggccgaggcaggcctttccgaggaggagacccagaaatggtttaagcagcgcctggcaaagtggcggcgctcagaaggcctgccctcagagtgcagatccgtcacagactaaggagatggcaggcattgacagcttcactccatgaaggccatctctgtttctctcctccgcttaaccaagctgttgtggtttttcagcatagtgttgtatgttccattgctagctgtcctgctgtttaacacagtgttgtattttttttctaaatgtacataattagaaaagaaaatacaaatagatagtcccttgagtcatgatgacgatgatttacaacctcgtagcaatttgctttcataatccatttagcaatccaggcctctgttgaaaagataatatgagggagaagggaacacatttccttctgaacttacttccctaagtcactttccttatgtatcatctaatacaatgatggttgagtgaaaatacagaaggggtgtttgagtattcagatttcataaaacacttccttggaatatagctgcattaacttggaaagaagcctgttgggccagaagacagaaactccaactggcaaaaaagcaagcatctaagaaaaaaaaccaccaaagttcttgaatttactatatttaaatgcattggttaagtttattttgctaaataaagtgaactgctttttgtctctaaaatgatattctaaataaaaccttaactttttgttgaaaatgcactgaaaaaaaaaactcttcacaaccaatcacacaacaacacctaccacaccacatcaacaacacacaactcccaacacaaaaacaacaaatcacaa

SEQ ID NO: 635883 - DNA, 162 bp, Homo sapiens
  misc_feature (9)..(9): n is a, c, g, or t
  misc_feature (55)..(55): n is a, c, g, or t
attagctangcgttgtggtcacaacacctagggtagttagtcctggctaccctgnaggctgaggtgggaggattgcttgagcccaggaggtcacagctgtagggagctgtgatggcgccactgtactccagtctgggtggtagagtaagaccatgtctcaag

SEQ ID NO: 635884 - DNA, 725 bp, Homo sapiens
gaactatatgtatgagtctatacatcaaggcttagactcataaatactgctatggttatgattgacacctttcaggcacagtccaatttacattgttcccttccctagcaattactttctactccagctctcaactcttcttgagttactaaatactttgtagacggttaaaggaaagattgagaagtcatacacaatacttttggggtgatagtgagtggacgaatggaagaacatcgtagagtcgagacaggctttagatgtgacattgtcaatagctccagatggatcaggaagtacatttttatattgtgttaaccctgtagtgcgtagaatatgcatcaatttcttgaaggagattccaggtattcataagaatttgcatgtacttatggcaattgtggtcaatataaggaacgtttcctgcttgaaagattatattgatttagactgatgtgtgagatgtctcatccattttcaggcactgtggtaattctatttgtagtaaagtggcaggtatctatggtaactattacaataggtgcatgctcatccatgtgcactgttgatagcctttaccaaacgtgtttgacaaggaccataattaacatcacttatgaacttggctgggccaacaaagccatgattatcgaaggggaaggttgatatggggcaagacgaaccgttaacaatgtgcaagttggcttccaccaggggcctcttgc

SEQ ID NO: 635885 - DNA, 517 bp, Homo sapiens
gttgctttatttacaaacacttaccagatacagtacatatccccattctggagctgtggaataagaaaggattcacagagttgcaaggctaacatagttttgccttctttttcagcattacagatgatatcaattccactcttacaatcggttttcaataaatgctgtaagaggaaaagagaaatcagttcatataattaaaaatatctaagaagctagttgcaataaatgtttaaacattcaagagaaattgcttagatttctagttttcttctacaaagacaatgatgacttgtacagaaatattttcatggtttcatagtttcactgtacagcacctacattttacaatgactacttttaatctcattaatgtccacaacctataggtacatacgatccatattaggaaaagattaattccttcaccttaagaaacaaaataaacatgagcattttacctctagtactttattttcaaggcaagatcataatgcttctggggtattttttttgg

SEQ ID NO: 635886 - DNA, 1616 bp, Homo sapiens
agcggagtttttgagggagacctaaaactgtatcatcctagcccgtatctctcccttttaactgttctttatgtgtacattctgtgcccaaaagaaaacaacctttcattaattgggcaattgtccaggctcttagcttggcatccagctctcagagctgtgaaatcaaccgcaccagatctacgctttgaaatgaggcaacatctaactggaaactcgctcaaagtaaggaagtggatgaaaagactcagggtcccttttctcttccccgtcttctctcagccacatctctcttatcctatcttggtgaagaagcttgcttggctaggagagaggtcagggacgagaagatagtgacgagaaagttccatgagactctcagaagtcccagcctgaacatcaaacctgaataaccaggagagacgtaacctcggcatactttcagtggtttacctcctgcccacgctgcaggtttttcaggtccttgctcgagtgtgtgctcataggcgtaaataaacgtgctatcagcagcctgcgtcagccagcccagctatttaagcaggctggcatcagcaaacacagcttccaaacccagggcttgcgcttgcctttgcctcttccaccgcgcagggaccatgtcggcggagaccgcgagcggccccacagaggaccaggtggaaatcctggagtacaacttcaacaaggtcgacaagcacccggattccaccacgctgtgcctcatcgcggccgaggcaggcctttccgaggaggagacccagaaatggtttaagcagcgcctggcaaagtggcggcgctcagaaggcctgccctcagagtgcagatccgtcacagactaaggagatggcaggcattgacagcttcactccatgaaggccatctctgtttctctcctcggtttttcagcatagtgttgtatgttccattgctagctgtcctgctgtttaacacagtgttgtattttttttctaaatgtacataattagaaaagaaaatagtgtaaagcagtggcttcactggaaaaatggtgtggctagcatttccctttgagtcatgatgacagatggggtgaaaaccatcacctcccagtagcaatttgctttcataatccatttagcaatccaggcctctgttgaaaagataatatgagggagaagggaacacatttccttctgaacttacttccctaagtcactttccttatgtatcatctaatacaatgatggttgagtgaaaatacagaaggggtgtttgagtattcagatttcataaaacacttccttggaatatagctgcattaacttggaaagaagcctgttgggccagaagacagaaactccaactggcaaaaaagcaagcatctaagaaaaaaaaccaccaaagttcttgaatttactatatttaaatgcattggttaagtttattttgctaaataaagtgaactgctttttgtctctaaaatgatattctaaataaaaccttaactttttgttgaaaatgcactgaaaaaaaaaactcttcacaaccaatcacacaacaacacctaccacaccacatcaacaacacacaactcccaacacaaaaacaacaaatcacaa

SEQ ID NO: 635887 - DNA, 229 bp, Homo sapiens
agatatttatggacgagttgaaaagataacggttgatgagccattggttgctatgcacgctgccctatcagacagttaaagctggtgacacggcacaagctgaaaaagcttatcgctagttgacaaaatctttttataaacatatactatatatacggtatattccatatatcccgtaagggggtatcaaaattgatgaaagttatagcgcgagaagattggccattcg

SEQ ID NO: 635888 - DNA, 127 bp, Homo sapiens
ctagacggaccccctactacggagactgacggcacggagacggcgtgaaccccgggacggccgaggaacgggctgacatggctgcgtcccaggtcaacaagctgagggtgaagagcagggaggttca

SEQ ID NO: 635889 - DNA, 213 bp, Homo sapiens
ggaatctttagagacagactacaaaagagtagttcttaaatacagaagtgattgtgagactttgtgataccgatgtgtgtagtagcagttttgtctcaggtacatttatcatttgtgactcaaaggatgttgaggtattgaagtcattatgctgtctgtggagtcctactattagtacagacacctccagtgattttccgccgtgttacattg

SEQ ID NO: 635890 - DNA, 111 bp, Homo sapiens
gaaggattgaaacacaactcaataaggtctcaaaaatctaccgctctgccacacatgtgatgtgataaagagatctagtaccgcgatgtgagcaacttctatgtcacagca

SEQ ID NO: 635891 - DNA, 281 bp, Homo sapiens
  misc_feature (73)..(73): n is a, c, g, or t
gtagtgtacataaaagttatatttatactttagcctattaagtatacaatagcattatgtataaaatagatangtacatacgttatttaaaaattacactactgctaaaaaatgctaacagtcatctgaggcttcagctaatactaatgtttttgctggagtagggtcttgcctcaatgttgatgactgctgactgatcacaaggtggctgctgaagcctgctgtggcaacttcttaagacaataaagtttgtggcatggattgtaaagtgggaattagta

SEQ ID NO: 635892 - DNA, 910 bp, Homo sapiens
ctgatacctcctcttctggatcccgggacgctcccctttgggtttcaggactcctgactcccagtgcccccatttccaccgtcctgaggacgtccttttgacccgtcactcggactcaggagttcactgcctcggaatcttaggccctctgcggctgttcactggagtcgccgcgctgttgtctgtgaattcttattatgacaagctgcctgcgtccataggtgggcatgtgtccgtttcgccacatcagtggtgcagaagacagttgtgtgcaaccacctggctgcgtggcctatgcaagaaaggggaccagtgtgagttcctgcatgagtatgacatgaccaagatgcccgagtgctacttctactccaagttcggggagtgcagcacacaaggaatgtcccttcctgcaccatcgacgcccgagtccaagatcaaggactgtccttggtatgaccgcggttctgaagcaacggtcccctttgcaggcagccggacacatcggcgcagtcatctgtgtgaattacctcgttgggattctgcccggaggggccctcgtgtaaaattcatgcaccctcgatttgaactgcccatggaaacccaccgagtaatgccccaagtggccatagcaaggacacgaggctcctagaaaagcaagagaacctccgcagggtcatcggtggtccatggccagcgtcccacagcagcaggccgtcgcccaaccgggggaccccggccacttgaagcggccccctggtccatttgttggggagaaaagggccgtaacggccacaggtgcacaaaagggcactgggcttttcacaagggaacactgcacccgttggaggcacctccacaagccaggggcccttggtgggagtcgcatctaaaagtgatcgcccttgtggga

SEQ ID NO: 635893 - DNA, 414 bp, Homo sapiens
tgaagcctgttaatttttccattacaatgttttgtaaattcctccatgaggccataatgcattgttttgtgctcaaatttttgcattgtatttaaagcgattcaagtgaaatatattttatataacagtttaatatttatgctctgttgaatggaaagaggtaaaaaacaaatttaggaagcctggttaaattaaactgaactgaaacctgtttggcccataaagcataactctgctaaacctattttttatacacgatttttctaattaaaatttttgcaagtgcttctgtgactttcttccctacagccacttatttgctatgaggagtctgtaactgacaagtgttgcagagggtttgcccattaactgagtaaccatagcacaataaagctaaattctatcactagttta

SEQ ID NO: 635894 - DNA, 215 bp, Homo sapiens
cggagagcgggaagaggatggatttcccggccctcccccccggatggaagaaggaggaagttatcccaaaatcttggctaagttctggcaagagccatgtctactacttcagtcccagttgtaagaagttcaaaagcaagctcaatttgcaaggtaacctggaaatactctttgatctcaacacagttttactctcagagactctgagagattat

SEQ ID NO: 635895 - DNA, 182 bp, Homo sapiens
aaaaaaagacaaaaaaagactctgttttattgaggcaaccacaatgccacactgacacttaaaaaaataccacctcctcgccaccactgggaatccggccggcgcccaaaattcccgcatttccccaccatcaattttttgtttttttgaagtctcccgatgttgcccaggctcgtctcaaa

SEQ ID NO: 635896 - DNA, 478 bp, Homo sapiens
  misc_feature (250)..(250): n is a, c, g, or t
  misc_feature (388)..(388): n is a, c, g, or t
agttcgacggagactctctctgtcgcccaggctggagtgcgatagcgccgtctcggctcactgcgacctctgccccccggatccaagcgattctcctgatgaacactgatgcaaaaatcctcagtaaaatactgccaaaccgaatccagcagcacatcaaaaagcttatccaccatgattaagtgggcttcatccctgggatgcaaggctggttcaatatacgcaaatcaataaacatataatgtttatngatttaacattatatattaaatcagcatataaacagaactaaagacgaaaaccacatgattatctcaatagatgcagaaaaggccttgacaaaattcaacggcccttcatgctaaaaactctcaataaattaggtatngatgggacatatctcaaaataataagagctatttatgacaaacccacagccaatacctaatttattgagagtctccgtcgaactgggtac

SEQ ID NO: 635897 - DNA, 406 bp, Homo sapiens
tccagacaaggtctcactctgtcgccagagtgtggtggcacaatcacaactcactacagcttcaactgctcaggctcaagcgattatcccacctcagccttctgagtagctgggactacaggcacaccccaccatcctcggctaattttttttttatgattattattatttgtatagacaaggtctcaactatgttgcccaggctagtcttgaactcctgggctcaagcgatcctcctgcctcagactctcagagtgcaggaattagagacgtaagccactgcacccggccctcattcttatacatatactttaagtacccatgatgtgccaagcaagttccctgtcctcatgtactaaatattgataccacaaagcgttgacgcggccgcgaatttaatagttgt

SEQ ID NO: 635898 - DNA, 142 bp, Homo sapiens
cgcaacgctgtgcgatcacgctcagagggagagccgatgacagcacacgtggacgctccttgcacccatgtcccgcagccccagctcctggcaagcgcaatgtgaccacgcataacgcccgctaagtgaccacgctaaacgc

SEQ ID NO: 635899 - DNA, 508 bp, Homo sapiens
tgatcgaggatcccagcggcgccctttttttatcttacataacaccaatcattgtatttatggaatgattatgcatcattattggtaaatgacctcaccagctagactctaaatcaaaaagggctggggctgtatctgacatattctcagttgtatcagcagcacctagcacggcatccaacataaatgatacttatttgtggtttggcttaatacaaaaaaaaaaaaaaaaaactgggggaggggggggaatccaatcaacagacaaaaaaatattgctatgtgggggaaagagaaccaaagtgtccacgggtatggtatcagggtggtaagaccaggggcgtcctttttcttccttaaatatcacctatttaatctcttatgtccttttaatgatcaagaaaataaaaaacccttacaaatattttgggtactatttaaaattaggtttccatttaaaacatagactttggggtgtataagtccattctcccactgctataaagaa

SEQ ID NO: 635900 - DNA, 882 bp, Homo sapiens
cacaaaggaccacacgaagaggagacaacggacaggacaaggtgcgagcatcggcccgcccagtcggcgagtagaaataacgcctcgcagagcttgccccggggacccaaatgcgggtccccacaaagcatcggggccccacgtcatggccttcgcacgcgggggattccccaccaccttgtccggagtccaccaaacagggtcctccttcccgccagcaaccgcaccccgccaataacaatggtctaagacgacatccccggacagaggaaaataccgccttgtggggaacctcccccgcctctttctcggccggttggccccaatcacccccctccggaccccccggggaggccacccaacgggcgcactctggaggcggcaccaccaagagaagtagggcgccaccgaacaactggtggacccaccaccacagaacccttcataggtgattactcccccgcacgccctagccacggcggagcaactccaacaaaccccccgggctccagggtgagtcaagccccaccccgcgggagcaaaattgttactgcgcggtaaacactgcactccacgccgccagttccgcaccacggaggagcacatgttttggcgagagccccctcggagggactcacttgcaggaatcgactacacggagaacagggatcccccacgatggagcgagtgcgcacatccctccccccccccgcgagaaagggaggaacactgctccccccccgaggtgagacaccggtacggacaagcgggcggcgagaatagaacctggaacgggcgaagaccaacccgaaaagcgcacgggagcaaaccgtttttttaaaacactaaatgcagccccctgtttcccggccacacaaaaca

SEQ ID NO: 635901 - DNA, 837 bp, Homo sapiens
tccaatgtccagttccttaaatgacccccatctccctgaaagggcaggtgcaggcagctaggtgatggcaaaaaatgtccacttgaaaatctgtgccctgattgaaggcttggcccacatgctggaaggccccctcccaggaaaagtactctcgaaaccagcgtcggggtctcctcgctgccaggactccagtttccgccatgtgtttgactcgttagtccacctgccaattcgtggactcagcggaaaggcaagcctcctgggcctcgggaagacccagacctccaaaaatgtggagctgctatggtgggtcccaaaaaggatgacacctggcaaaggcaattcttcctcagtttgtccagtcgcttggaacatcccagtgatgagatggcagctcatgaaaggtctgagtgagtctctccagggaaagaagatactctgagtaccacgagggaaccagccgtccttatcaaagtgctcccagaaaatatggcagtgcccaagcgagagtgtgtcctcatgggagctacttgcgcttaatttcatccaacacaaaggtactctgggacaggtgagcgaaggggtccttggcctggggctacagcagaccagggcctgtacacattaatcaatctcctcctaaggaacaggggcagccgccttatcttcctcctaccgatacagcggagggacactgatttctctccccgagaacccttctctcccgggggtgtcctataacggtggggtctcgacaacttcaagcatctaaatgggcacatttctaccaaagttaacttcccagaaagccgaacgggctgtaatgagttagaaccg

SEQ ID NO: 635902 - DNA, 859 bp, Homo sapiens
gaccccattctataccaacatcctatgctgatttttcggtcacccttgaagtaatattcttatcctaccaggctctcgcagataatctcccatattgtaacttactactccggagaaaacaagaaccattcgaatacataggtatggtctgagctatgatatcaattggcttcctgagggtttatcgtgtgagcaggaccatatatttactaggtaggaatagacgtaaacacactagcatatttcacactccgctaccatatatcatcgctatcccctaaccggacgtcgaacagtatttagctgactcgtccagcggactccacgtcaagtcagtcatgaaacatgaactctgctgcagtgctcggagccctaggatacctctttctttacaccgtaggtggtctggctggcattgtattagcagactcatcgacgtagacttcgttctacctcgacacgtactacgtgtagcccatttccactatgtcctatcaattggggctgtctttgccatcatgggaggctacattcactggttctgccctattctcaggctacgacctagatccaaactacgccaaaatccatttcactatcatattcatcggagtaatctatgtttcttccccccagctttctcggctgtccggagtgccgcgacgtttctcgggctaccccgtgttgccccgttgaaacatcctgtccctggaggccatcttgtcttacgcgaaaatagtaatgtctgattgagagcctgttcgagcgcagctattgtgaagcccccgactggtgttttggcccccctggctttgaacgcctattgtcaaggggatgccccggtgccctcttcgttaaa

SEQ ID NO: 635903 - DNA, 985 bp, Homo sapiens
gccggatctcacacgtgggtcccccctatccgccatttgtagaccacccatatcttttgtcgaactaaaagtttccttgcgcgtccgtgaaatcgccgggtttctctcttccgcccgtccaatggtgttctcgccggttacaacgtgttaacacaaaagagaaaggtttgccaacaagttcagaacaaacacacgggtgggtagcaacacccgacgttaaacgcagtggtttaactctttccgcaaacctacttgaatttctacttcctttccggatcatttcctccctcatctcttggtgatccccgccgtaataatccctcctctgtcgcaccactggcgagatccttgggggcgacccgccctatcaccccgcggcccatccttgcgtgaagtcccgccctgcggtccgcaccaggggggcaaaagggtgctttttctcactaaacacccttggcctgtagggtcttcaaataaacgagttcgtggccctcggtggtccccccacgacggaggttcgctttgccggaggccaccacccccctgcgtcatcgttgctccgtgccccgcgccgtccacacccgcgctgcggacatgtgacacgcacgccaggctttaaattccccccaaaacttctttccggtggaggaactcgcattccacaaaaaaaagagtaaaaacgttgcttgagtgccacgcccaccaccacccgtgatcgagggagaatgtcttgcaaccacaatataaagcaaatacttcagaagcccctggcgacgcccccatataacggtcacgcaacaaaccatgtgggccaccccgacagttgcccccccaaccaaatccatcgggttatattcctctctgctcctctgccggccacctcggttttatgtctactagctcttcgagcagcaggtggaatttcactcctctccccacacagggttttttaaatcttttagacccataaaaaccgaacaaaaca

SEQ ID NO: 635904 - DNA, 832 bp, Homo sapiens
gacctggggtctgtgagcgctgtgatggtctagaggctggcgattgaagaatgctgggtgccagtcagtttatcggtggttcatgttgattgcaggccatcttcgcagtgtcgacatacaggctgtacgtctttgacttcgctccaacgcgttttatggctatatcacaagagacttaaccatatatctacaaatgtcgatactatcaatggaatcaaggaggaatctaggatccgggatagtatctactagatgtggggagcatgtacctcgaatagctgcacggaagaatcgtcattaggatgatttgtggataagagaattagttggaaaaagtaatagtggataagagacttgtgtggatttactattatattcatcttcattaggaactactgaaagtattttcaaacctgagtgtcaaaacattgtggtcatggtggacaattttgttcccaattattcgtcaagggtggaaaatgtgatgtagatccttgatttgaaaaattcgaagatcaaaattggagatactgacttaacattcgttccactgacatagcaaggtttacctctttaaaatcctcgatggggatcgggttccttcgtagtcatatccactattcatgtgcaaaaacggtatacgatgggtcccacgaaattgttgggaggaaccaagatccctctgaaccatggggtcactgggtcgcattttaaatgagaggtcgaacagacatgcgactaacaggttcttctgggaaagaacttttaggattccgggggacccccattcggcgggttcggtggtggaaacgagacatgatgaataaagggg

SEQ ID NO: 635905 - DNA, 475 bp, Homo sapiens
  misc_feature (49)..(49): n is a, c, g, or t
  misc_feature (63)..(63): n is a, c, g, or t
  misc_feature (66)..(66): n is a, c, g, or t
  misc_feature (122)..(122): n is a, c, g, or t
  misc_feature (124)..(124): n is a, c, g, or t
  misc_feature (126)..(126): n is a, c, g, or t
  misc_feature (128)..(128): n is a, c, g, or t
  misc_feature (145)..(145): n is a, c, g, or t
  misc_feature (155)..(155): n is a, c, g, or t
  misc_feature (166)..(166): n is a, c, g, or t
  misc_feature (186)..(186): n is a, c, g, or t
  misc_feature (237)..(237): n is a, c, g, or t
  misc_feature (469)..(469): n is a, c, g, or t
aagtgtattatttagatatggtctttcttcatctttctctgcatcctgnaagttagcgagtcnttntactcctacctcttgtcctccctttctccacaaaatacatacacatatacggcttngngngngggtgtggtatcatcancacagcatanagatttaagcngtagacacaagtcacatganagaggctctatgcatcatgtggcctgtccgaataaaaagcaaacattagantgccatttcagcagttacagtgttgatatgatcaatatagctaatttttttatacccgtcatatatttttagaagtcatccgtaggaagaggcaaacaacaaagactgcttttttttagaaaagttatgtgccaacttcaaaatgacatactaaccagatatcagcattcgagagcgaggttgaataggactggccttgatgcacatgcagatgatttgctttcataatatnaaatta

SEQ ID NO: 635906 - DNA, 335 bp, Homo sapiens
tgaatggccagagggctggcagtgtgctgcgcactgctggagcgtgtatgatggctggtcggagccttggagctggtgccgttgcaccgttactggccggtggtcggcctccatgttcaggttctcaatgtgtatgctctgacctggtcctgcgaggaactcacgaagaacctgctctcggagccgttcatgagggccttgtacctcagagtcagtgatcttgtaccagtgcccagtcagtgacaggtggcacggactctgacttgcagaccagcattggacgtctccccctcgttgatgtgttctgacgacttcacggccttcactctgggagg

SEQ ID NO: 635907 - DNA, 151 bp, Homo sapiens
acctagcaggatccctttgagagcccctctcctacagtttgagcacccatcgttaccgcacttcagcctggggtgcatagggtgagactctgtctctaagaagaataaaaaaaaagcttcatgggtaaccatttagtagatacagatctta

SEQ ID NO: 635908 - DNA, 169 bp, Homo sapiens
ccgtaatgatgagggaggtgtatccatagacttgctgacactcgttcaaggctacttgaagtgggtgtattacacaggcttggccaaagggttaatgcatgctagaaatgtgaagtgaagggaatagaccttgaccgcttgggaacattctatgtttctttacgactgc

SEQ ID NO: 635909 - DNA, 236 bp, Homo sapiens
agttgtaagagaatacaacaatttaacgaaattaataaattcattagctgagtgagaaattgaacaaagatagatattatggaaaggaacaaaacaggaatcttggagcttgaggaattaagtgaatgaaattaaaaaaaatacaattgagagccacagtaacagactagaacatgcagaataatacatttctgaacttgaagacagatcgtttgaaataacccattcagaggaag

SEQ ID NO: 635910 - DNA, 315 bp, Homo sapiens
ttagactcgagcttgtaccctcgataggcatatcccaggtacatctgactgcttcagattcctccttcttctcatcttccttctcctctgctgcaacatgggcagatccagcagcaggggctgcggagcctggggcagcatgagacgggtactgctccaccagcaggtacactggccaccttgccaataccctgtgcaataacgtcttccatgatttttccattcagctcactgataaccttgttgagccggtcgtcgtccgcctcgatacccacgctgtccaagatcttcttgatgtccttggcccttatcgag

SEQ ID NO: 635911 - DNA, 406 bp, Homo sapiens
ggcttatgcttgtagtctcacatactggggaggctgaggcaggaggattgctatgaggccaggagttcaagaccagactggacgtcatagtagagactctgtctctataaaaaaccaaaaagaaaaattagccgggtgtggcagcatacacctatggttccagctacttgggaagctgaggtgggaggaatgtctgagcccagaagttcaaggctgcagtgagccatggtcaaaccactgcactccagcctgggagacagaacgagatgctgtctcaaaaaaaaaaaaaaaaaaacccccaaaaacccccttaaaaaccctttaaccagtggggggtttcagggcctctcaatttttggggggattacccagggttacttttttcccatgaaaccaggaaacatta

SEQ ID NO: 635912 - DNA, 559 bp, Homo sapiens
gctctacccaggtcccgctcaagaccctctgccagcccactcagggctctgcctttccccagccctgggcccctcagcctccccatcccccactggctatggtcctgccccttctaccagacccatgggcccccaggcagccctcttaccattcgagggccctcgtctgctggcagtccacccctagtccccactggtgccttactgccccatactccagggcctggtccggtaccccctcgccacccagcatgcagaaacagccccattgcatgtgccgagtgcgccagcagctgcagacctgctctccgtccagcccggagagccagcatggcggcaaggtcagtactcctgggggtgggcatgcgccctgcgtgcaaaaccaccaacggtggatgcaagctgatgaggtctgacgggagaaagggcccttgcgcgatgattgagcgggacccctatgaacatcctgagaggctgagagaagtatgcagcaggaagctggagtgactttacggggtcaagctagggggatgtagggagctctggacacttgtctggc

SEQ ID NO: 635913 - DNA, 270 bp, Homo sapiens
  misc_feature (14)..(14): n is a, c, g, or t
  misc_feature (104)..(104): n is a, c, g, or t
  misc_feature (109)..(109): n is a, c, g, or t
  misc_feature (111)..(111): n is a, c, g, or t
  misc_feature (116)..(116): n is a, c, g, or t
  misc_feature (119)..(119): n is a, c, g, or t
  misc_feature (125)..(125): n is a, c, g, or t
  misc_feature (127)..(127): n is a, c, g, or t
  misc_feature (129)..(129): n is a, c, g, or t
  misc_feature (132)..(132): n is a, c, g, or t
  misc_feature (143)..(143): n is a, c, g, or t
  misc_feature (152)..(152): n is a, c, g, or t
  misc_feature (155)..(155): n is a, c, g, or t
  misc_feature (167)..(167): n is a, c, g, or t
  misc_feature (172)..(172): n is a, c, g, or t
  misc_feature (174)..(174): n is a, c, g, or t
  misc_feature (192)..(192): n is a, c, g, or t
  misc_feature (212)..(212): n is a, c, g, or t
  misc_feature (216)..(216): n is a, c, g, or t
  misc_feature (240)..(240): n is a, c, g, or t
  misc_feature (244)..(244): n is a, c, g, or t
tttgaaagcttttnaatttttctttacagtaaatattccattctgatttcataaattaaacatttatgcctcccttttgtgttgacactgtagctcatactggnaaagncncccantgntttgcngntnttnaaagtagttcnatatataancantgttataaggantttcntntggaaatggttgaaaatncttctaaaatgtgattatcnaccntggtatgatgatcggtgtaattgntganattcctttagaggtgtgaatgtacac

SEQ ID NO: 635914 - DNA, 245 bp, Homo sapiens
  misc_feature (51)..(51): n is a, c, g, or t
  misc_feature (129)..(129): n is a, c, g, or t
ttagaggatcctggtcatgtgatcctcccagtcggtgcagcaaattcaggnaagcatgcgcattggagcagaggtttacacaacctgaagaatgtcatcaaggagaaatatgggaaagatggcaccaantgtgggggatgaaggcgggtttgctcccaaatattcctggagaataacagaaggcctggagcttgctgaaagactggctatttgggaaaaggctggcttacactggatacaggtgg

SEQ ID NO: 635915 - DNA, 227 bp, Homo sapiens
attcttctgtctagcataatatgaagaaatcccgtttccaacgaaggcctcaaaggggtctgaatatccacttgcagactttataaacagagtgtttactaactgctctatgaaaagaaaggttaaactctgtgagttgaacacacacatcacaaaggagtttctgagaatcattctgtctagtttttctacgaagatatttccttttctactattgacgtcgacgc

SEQ ID NO: 635916 - DNA, 606 bp, Homo sapiens
gtggacctgcctcccgtcccagctcttggaatgctgcgggatgggttgctcagacatgtaggcatgctggttggtactcatctcccagttagcagctcaggcctgcctctgagtagccgtccacagctctgctgatcgattgtcttctgacacgggttggaatgtgagctagagcacagaggcaagccctggaagttagggtcactgattgattctacccttttttttttttttggaaacgcagtctcgctcggtcgcccaggtgggagtgcggggagcgatcggggctcacggaaatttccgcctccggggttcaagccattctccggcctcagcctcccgagatagcggggacggcggggggcccgtcaccacccgggggcataattttgggggtataaggtacgagcacggggtccaccgggtgggccaggagggtctcgatctccggacctcgtgatccgcccgggtcggcctcccaaagtgcggggatacgggcgtgagccaccgaccgggcctgattctaggtttaaaaatattcctacctttgtgggcaagggccgcatgtgcccccctttgacaacccggtttgtgccagtgggtcgg

SEQ ID NO: 635917 - DNA, 975 bp, Homo sapiens
aggggctgttacggctcggagtttcgggagtgcgcggtgggtcgtgctgtgatgacggcatggagacgttctgccccgtggtgctactgcgaccctcgtagacgatcatgcgcggtctactgctcattcagcgagaggcgcctcccgcggatcgcccagactggcgcccgcttcgcccatgccgagctgagcgcggctagtggctggcgggatgcttgcgctgctggccgccagcgtggcgctcgccgtggccgctggtggcccaggacagcccgtgcgcccggtacgccgcttcgtgtgcacggcactgcccccagaggcggtgcacgccggctgcccgctgcccgcgatgcccatgcagggcggcgcgcagagtcccgaggaggagctgagggccgcggtgctgcagctgcgcgagaccgtcgtgcagcagaaggagacgctgggcgcgcagcgcggaggccatccgcgagctcacgggcaagctagcgcgctgcgagggggctggcgggcggcaatggcgcgcggcgcgggggccacgggcaaggacactatgggcgaccttgccgcgggacccccggccacgtcgtggagcagctcaggccgctcgcttgcaagaccctcaatggaccgccttggaggagcctcgaggcaccagcttcaggagcaaacgttttccaattgctgggctgcccgggcgaccttccgcgaggtgcctccagcagcgggcttgggcggagcttggaagaggcaggcttcatggcgcaaagtgttggcaagagcttggaggcacgagcaagttccctggcgtgcaccacatgaagacctcggggttcaaccgggcagaaagaccggtagaggcaacccttgaacggcggcttggttgcaagaggtgtcaccccgaagctttgagcggaggcaataaccggcctttaaagtcaaccaagattgcgttcaaagggtgtccctcccaaa

SEQ ID NO: 635918 - DNA, 154 bp, Homo sapiens
tggtgtctagaggatccatcggagagtgcaggaataaaatgttctttgcctcaggatggctgaaaagaaaaacaaagacggtgacatattcaaattatgatcaatgtgcatttaaaacttcgcataaaatcttctcaaggggttgacttttccg

SEQ ID NO: 635919 - DNA, 198 bp, Homo sapiens
agcggagcgcggcgccgctctccgctgcgggggaggccatggcggaaccttcccaggccccgacccggcccggtgcgcagccccggccgttgtgtcacagccgtgccagttcacgactgtgctcccgcggttttgggcattcatccgccggtcgcctgccgtgagccgcgctgaggcttgggggcccggatgtaggaa

SEQ ID NO: 635920 - DNA, 768 bp, Homo sapiens
  misc_feature (562)..(562): n is a, c, g, or t
  misc_feature (619)..(619): n is a, c, g, or t
  misc_feature (623)..(623): n is a, c, g, or t
  misc_feature (627)..(627): n is a, c, g, or t
  misc_feature (635)..(635): n is a, c, g, or t
tgattttccaggcatttataatttatcaaacatggctacaaaacatgacaatgtaacctactagttaacataaaattaataaaatggttatcacaattttaatagggatgtcataaaacctttaaagaacaaatcattaaagtgctatgtaacacaatccagaagtttaaaatggaaggaagggtcactgacttgtttaattatgaatgacacgtaattttatatcagagtgtaactaaggtagtgaacacacacaaacacattcacaaatacatgcaaactaatgatcaagtttatgaataatgatgcaaaattttaagaaaatattagaataaaaatatttcagcatgtatttatttaattagccaaaaaaggtaatcatataatcatctctttgatcaggcaaaaacaattagatttttctctcctttcttcactgttagttattatttgatgtatcaatcaatgcaattgtatacaaggccaaaaaatgagacatataaatgatacatccttcaaagaaggatttaaattcctctctctgagatgttgtatgttgaanatctgaaaatttctgtaaaaccttaaaaataaaaatcagtaaaattctaggagaaanatantaantgtggatnagtttcgtataatatagaaaatgtaatgaaatgcctatttttgttatcacaacaataatttaaagtacacaagaaccatgtactttaaatttaggaataaataaaaactgggaataaatttaaaaaaaaaaaa

SEQ ID NO: 635921 - DNA, 243 bp, Homo sapiens
  misc_feature (46)..(46): n is a, c, g, or t
  misc_feature (80)..(80): n is a, c, g, or t
  misc_feature (203)..(203): n is a, c, g, or t
gcccgcaagaagctcctggctgaccaggctgaggctcgcaggtctnagaccaaggaagcacgaaagcgccgggaggagcncctccaggccaagaaggaagagatcatcaagactctgtccaaggaggaggagaccaagaaataaagcttccctcgtgtctgtacatagcggcctggctgtggcctcatgtggatcagtctttnaaataaaacaagcctttgtctgttgccctcttgtttagca

SEQ ID NO: 635922 - DNA, 826 bp, Homo sapiens
  misc_feature (826)..(826): n is a, c, g, or t
ggggttacgggatcggcggcagcagccccagccctcagagagaccagcagaaaggtgagggagggagggtgctggggggacagtcctcccaccattcctaccgctatgggcccaagtctccacactcccagcgtccgactcacaatcggcggggctaggagacacctccaaatccctgtcgcccccttggcacgacagccccagagagagacagagacacaagcgcactcgcgggacaacactctgggtgccgcacgcacgtggctagggggacgggggccgaagacacagacaatgaaacgaatagcccagcgatagacagaagagacaagaaatggagtcaagatggcacaagggagaatagaactagctagaaagatagaaacaactcacaataagcaagatggcaacgcgataagagaacagtgagcagtggccacgagccgacacgacgccagtggcaggcagaaacgaacagaacgtagcgacccgaaggaatgcacgtagaagagtcggcagcagatagccaaagagaaatagcgctcacataactcggaagccaacagatcgagagcaatatggaaataccgacgcacggaaccactatacaagatggtaggcatacagagcccaaactacagccaatggcaaaatagatagcacaggagttcagccgagagacaggcgacacacgcggaacacagagaagcaagcaattgcaaagcaagaagcgacagagacgggcccaaacaagagacgctaggaggaccaagacaagacaaagcgagcagtaacacccaatcagatagaacaggcgtcaaagtcn

SEQ ID NO: 635923 - DNA, 476 bp, Homo sapiens
tataggagaggatcacagtgttactggggatggccttgtagtgtcgtggcacaagcctaaatctgcgcggtgcataagaatggctcaccggtgagactccattatttcttgaagaacagtgttgtttgtcttattttattttctttcaggcatatatagaatctttggcactataaaaagcatataccgcataattaatatctaatggttcccagagaagacacaatcttataaggggaagtcatgggaagaaggaagctctggtcataaaaacacgatttccaccttctgtgcagagaaactgcactcttaattgtaggcagaagggtttcgtttgggtgacttcatcttcaccactggaagacgctgcccacctgccaccacacccggctaattttttgtatttttagtagagacagggtttcaccatgttggccagactggtctcaaactcctgacctcaggtgatcaacctg

SEQ ID NO: 635924 - DNA, 591 bp, Homo sapiens
ttacctgctcgcggagcagataccccccacatccaatgacatgtctgtcttgtcacccaggctgagtgctgtgcacgatcttggtcactgcaacctctgcctcccaggttcaagcgattctcctgcctcaacctcccgagtaggtgggattacgggcacccgccaccacacccggctaatttttgtatattagtagagatggggtttcgccatgttggccaggctggtctccaactcttgacctcaagtgatccgcccgcctcagcctcccagaatgctgggattacaggtgtgagctaccacacccagccatgattttgggtatttttagagatggggtttcaccatgttggccaggctggtctcaaactcctgtgcctcaagtgatccacccgacttgtgcctcccaaaatgctgggattataggcgtgagccaccatgcctggccaaaaaagcatattttaaacaaaagtactgggacaatgaagttaagggcagaacacccagtttatctcttttggaaaatttgccagcctcacctccctgtctacttgtctagggtttccgggtgtattactcggcgagccgggg

SEQ ID NO: 635925 - DNA, 129 bp, Homo sapiens
catttacgcggctataccgactactgtgatctcgtcatgggatattgcatcccgatcccatcagatgggtcacgggtaccgcgctgcctgggtaggtaggcacacgctgagccagtcagtgtagcgcgc

SEQ ID NO: 635926 - DNA, 148 bp, Homo sapiens
ttgttttgtagagatgtggtctcgctatgttacaggctggtctcaaactcctgggctcaagcaatctgcctgcctcagcctcccaaagtgctgggatcataggcatgagactttgtgccaggccttctatttatgttcttggtcgacg

SEQ ID NO: 635927 - DNA, 269 bp, Homo sapiens
  misc_feature (148)..(148): n is a, c, g, or t
  misc_feature (200)..(200): n is a, c, g, or t
  misc_feature (204)..(204): n is a, c, g, or t
  misc_feature (207)..(207): n is a, c, g, or t
  misc_feature (214)..(214): n is a, c, g, or t
  misc_feature (217)..(217): n is a, c, g, or t
  misc_feature (228)..(228): n is a, c, g, or t
  misc_feature (230)..(232): n is a, c, g, or t
  misc_feature (239)..(239): n is a, c, g, or t
  misc_feature (241)..(241): n is a, c, g, or t
  misc_feature (247)..(247): n is a, c, g, or t
tcttgcatggcctgtagctttacagatcgtgggattccctgttgtatatatactcagccatgagggggcatatgtatcttgattatcagactggaagacgggactttctattactatcatcaccagaataaaacataggataatttancctaccagcccttctcccccaataactgtggtctatacagagtcaatatatntttncanagaaagntantcgctcgattntnnntgaatcntnattaanctttatgataagctagggggga

SEQ ID NO: 635928 - DNA, 327 bp, Homo sapiens
ggagaggtcatagccactgctgttgtgcaaggacctgctgttagaatagaaggccaaggaggcgctggtggtggcctcaggctatgcatgtgatgcccattgtttccagggccatcccagattggaggttcctgtttctataggaggatcccttgagacctcctcatttccacacccgagcaatgctgagggctgtggggcccccacgggcttgagtgtggtttatggcacaacagggactgatcacagtggcaccgggtgtcagtggccagtggtcaatggccaggaaccctgaggaccctactacttgtgtgggtggcatttacc

SEQ ID NO: 635929 - DNA, 149 bp, Homo sapiens
aaatcctgttcgtatcccccttttgatttccctaagttccttgttccccccctaaaaaaagaatgattgccccccccctgtttccccccggattgttgtgattgtagaaacgaagctatgtgaaaattatataagtattataaaggtga

SEQ ID NO: 635930 - DNA, 476 bp, Homo sapiens
tagggcctgggatcgcaggaaccagcgaggaattgcgatgcggagagagaaaggaaggggggatggcccgatcacgccccgcaaagcacttcgcgatcccaaggtagccgagaaggacctccatgggtcagctgcggctaggggtcgcgcaagccatcgtagatgacaggtcggaagaggcagaccgaaggctccaggacgcataactcaggagcactgctacactggccaatgggcggtgacgggagaacagagctctgctctcactggctggcagcgcaccaggagcctgtatcccgttgcctctcctggatgggttgtcagccctgtgtttcagctgtgaccaattcattataacatttggatacttactgaaaatgtaaggaagcaggaaaaattaactacgtttcattcagagatagcctctatcaactagtttgacatttttccctctgttacattgagatcatacccta

SEQ ID NO: 635931 - DNA, 316 bp, Homo sapiens
tgaactgttacgtcaattaaacaccctccctataataaattacccagcctcaggtatttcttcaaagcagcgtgagaacggactaatacaaccagtttgcacccttcatccaatctcacagacacacagaggggtctcagactgttcttcccactcagcctttattccaaccaaaacagacttgtgatgttattagggaaatgagtttgaatcactcacagacacacatactcacattattaaggagtgggttatcattactcactgagacgacacagacactcatatcgatgtatgggtgggtcagaatcatgag

SEQ ID NO: 635932 - DNA, 766 bp, Homo sapiens
  misc_feature (302)..(302): n is a, c, g, or t
gcacgaggtatgcttcaactgcacattacgagtcgaccaaaccattcatgtcaaatgctttgaatgtcctctgcgaatttgtatcctctgtttccaatgcggcgcggaatcaccaccacatcgccgaggtcacaattacgagcttgtcaagccaacaagtaatcccgaagcaatgagctggacacacgaagatgaattcgaattgttaaaagctgctcataaattcaagatgggaaattggggagaaatagctgaaagtattggtcgcggaagaaaagatggtcataattgcaaggattacnttgaaaaacatttcgtgcgtggatggattggacaattttccataaaaagttcaagttgggatcgaattaaatatgggatgtatataaatcaaacattagacagtgtgctacaaaaaaactgtttggaatcaacggaaagaatgcttctgattcgagacgccgttcgtgcatctggagaaagctgggatgaaaacgatccgaaacttgcgataaaagtgcaacaagtattagagcagtatgtgcaaaaagtaatcgatgatgacattgaaaccaagtatgagcgcccaaaattccttacaaatcaatatgagacggagcttagcccagatgactgtgatcctgataatgaaagagatatgaaatcgaagcgatcagtaaaacaggaaataaatactgatgatagtgataatgacaattcgccgggcccgtcttccagttgtcggaaaaaggggcctccgagtcca

SEQ ID NO: 635933 - DNA, 136 bp, Homo sapiens
gagcttctttagcctaggccagcaggcacaccgaagtcagccccgaacaggcctgtgatcagcagccgggtcgaagcccaggccctggggtggcctgcacacctgtctctgcagggccctgcgttgacaaaagcca

SEQ ID NO: 635934 - DNA, 658 bp, Homo sapiens
gcggtcccaaacagcagtgcagcagagactaacagtgaaccctttgtatggcatcatttcctggggtgatcgaccagctacccggtagcaggttgatcatattggaactcttccaccatggcaaaggagagaggtttgtcctcattggaacaggcacttactcaggatatgggtttgcctacctgcatgcaatgcttccgccaagactaccatttatggactcaaggaatgccttatccactatcacggtattccacacagcattacctttgaccaagcactcactttacaggtaaagaagtgaggcagtgggctcatgctcacggaattcactggtcttaccatattccccatcttcctgaagcagctggattgatagaatggtgggacggccttttgaggtcgcgattacaacatcaactaggttgcaatactttgccgggccggggcaccatactccagaagaccgtgtgtgctctgaatcagcgcccaacgtatggtattgtttctcccatagccaggattcacagatccaggattcaaggggtggatgtgaaagtggaaccactcactatgatgcactagcaaaatgtttgctttctgttcccacgacattaggttctgctttactagtcatcttaactccagagggaagaac

SEQ ID NO: 635935 - DNA, 361 bp, Homo sapiens
  misc_feature (361)..(361): n is a, c, g, or t
cacgagagcaaactcactctagattactagcagacaaccttagagagaccatttacccgaataccgtgtaggcgatatgagaatggacctcgggcaatagacatagagccgcgtggcgaagatggacaattataaccacgcgtaatatagcgaggactaacccctataccttctgcataatggattgactagaaataactttgcaaggagagacaaagcttagacccccgaaaccagacgagctatctaagaacagcttaaagagcgcacccgtatatgtagcagctggatgtgcaagattgagtactagtttgagctttttgtccacagaaccctatgaatgcccttgggatatcaggtn

SEQ ID NO: 635936 - DNA, 860 bp, Homo sapiens
ggcaccgcctgccctctctctctctctctctctctctctctctctctctctctctctctctctctctctctctctctctctcagagatggagaagagagagaggcgcgaggagagagagtgtgtctcccgcccggggtggtgagaaaacgcgggagagcagagagaggggaagacgccgccggagagagagagggaccaagaagagggggagggaggagagagcagagccagagagagccacacacgcggagagagacgtgcgccgccgtctatatgcgggggggagagagagagagacctctctctatgagcgggaagagagtggcgcgcgacgagcacgcagacacgcgggctaggggagccgagagagagacacacaggtgaaaaggcggggcacaaatatacagcaggagagagaagagagagaagaagagagagagagtgtgggcgcggcggagaaaagagggggtggtcgagagggggggccgtcccaaaaggagagaccgtgtggcgcgcgagagagagaagagagcagacaccagagggaggagagcaacagagagcagcacagggggggggagcgagcacaggatgatgctatccccagcgacggtgagctggtacgcgcgccgggactgtgtaggcaaaagggggggccccacaagaggaagattaacgagggagaagacgacacagaaggggaggtaaacacaacagaaagaccggcacactggccgcgaacgaaggaatgcgagtccaaacaaagagggccgcgtgcaaagcgggggcgaacatacagggaacacaaacagagagagaagaaagcaacccgcaaagggagagagagcgggcaaaaagg

SEQ ID NO: 635937 - DNA, 700 bp, Homo sapiens
tggggaaagtcaggtcaggggtagtactataatggtggggacgattagtttatagcatgggagtaggtttaaaggttaatggtacgtaagtctaaggccattatgtgtgtgttgggatgattggagactaagtagggctaaggcccaccgcgtgacttacgcagggggcaaagactaagttatgggcaataaggcaacaataatgggctcaagagggcagtggtgtgtcgacgggttcatagaggagtaagctataaatgagaaccagcgagataatgttatatcatattcccattactaaaggacataaggtaacggagagggacatattgagtgtgtgtgagacgcgatatataactaaagagttatatcgactaaagaaagtcgacagatcgcgtcaacatggctaaagtataaaacaatgtaacaaatggcattggtagagactctgagggcctacaggtgcgaacagccatgaacacaccccattctcacacagacaaaacaccgaggatacaaaatgagcgtgcccgagagtgtacaccccgccacgagcccggaaccaacaaccacaagcgtgcactgcaacgcggccacaccccctccatcacacaacgcccccgcacgagacaccacgcatccgagggaactccccacagactcccacaaaaaccaacgacctccccagcaaacgaaacac

SEQ ID NO: 635938 - DNA, 368 bp, Homo sapiens
  misc_feature (199)..(199): n is a, c, g, or t
tatccgctcacgaggggtggggaaattggaacaggggaacaggtctccaggccctacagtgcagtccagagaaggcaggcaagtgacctcaggtcacacagcaaaaactccccatttgctgcctgcccttgcccagctccagaccagtcctctgctcctagatctgtggactcttaatgaagtgagaggtggctgcagngcaccatggtggacaccccagtccgggagaaatggctacacttcgctgaccgtgggagggctgcgagctctctagcatgaagtagcaagtctgtgaaacttgatactatgggccgcctctcttcctgactctacatgatgcgcctaccaccaggatgggcacctggaaa

SEQ ID NO: 635939 - DNA, 362 bp, Homo sapiens
  misc_feature (199)..(199): n is a, c, g, or t
tatccgctcacgaggggtggggaaattggaacaggggaacaggtctccaggccctacagtgcagtccagagaaggcaggcaagtgacctcaggtcacacagcaaaaactccccatttgctgcctgcccttgcccagctccagaccagtcctctgctcctagatctgtggactcttaatgaagtgagaggtggctgcagngcaacacaggagacacgctcatgtacaaggagcaatggctacccatctgctcagtcgggtagcgtacgaactctatagctatgaaatgacatagttttcatgcagccagcataatcggggccccctgttcatcctctaccattctatccctcccacagtttgc

SEQ ID NO: 635940 - DNA, 1358 bp, Homo sapiens
  misc_feature (481)..(481): n is a, c, g, or t
  misc_feature (684)..(685): n is a, c, g, or t
  misc_feature (722)..(722): n is a, c, g, or t
  misc_feature (734)..(734): n is a, c, g, or t
  misc_feature (770)..(771): n is a, c, g, or t
  misc_feature (792)..(792): n is a, c, g, or t
  misc_feature (794)..(794): n is a, c, g, or t
  misc_feature (852)..(852): n is a, c, g, or t
ttttcggaatgatctcttgatgtaaagccttgacacctttctactgatgcaggtacactgtcagtgaagacttaatgcagtgccttccgtagcatcattttttcttttcaattacaaatacatcaagttgaatgttttattaccagtagtttgttttgatgcttctttgtaaaacagatgacatgctgttaagattcctcgacaggaattctatctagaactgttagctaagtgctgctactaatatcttacatttatacgacagtataaatgtttttgactaacaatcttttgaattgctatttcccctatgtcacttgacttgatagtacattcagtaagtcttaatatattatttaaaagtgataccttttctatttcatttgttccattgtctcaaacattgtggtgatggtttctatgcaatttgataatatgaacaaatctgcagcatggtgacagacacattggctatagctgntgatagtacaaacttgtctaccttctttagctcagcctcacattattgtaatcaacctcaaaagaaatcaacctaattcctcaattctacttaacccaacctcattaccctgtcctatttttttaccttttttatagcctatatcaagtcctaatatttatttatctatctgtacactttaatgaaagtccttttgaaacagnntttctggtttggtcaatagatgtgtcccaaactatanggcccatagtantcactcaataaaatgaatggttgagtggggtaaatnnatatattgttatatatactcncnttaaaaaattttgtttctgagacgggcctcaatttggtcgcccaagcttggaatgganggccatgaacttgggaaactggaaggtccggttccctggtgtaccgccttttttctgctaaacttccgggagagttgggatatccggtccgtgcaacacgcccctaaatggtgtcgatttcttaggcaaaaaacggtttcacacgcgttactcggaagggcttgattccccggacttagcctttcacaccttggcctctcaagaggtggggttacccggcgggccccacaaaaaatctattaaatcgacacttgtgggatcctgcgctttttatccctaaagacggttttagagattacacccccgccttaaaaaatggtgacacactctgtgaataatacctatgataacctgtgggcccctccccagtctttatatccacgtatatgtcgcccatcaagttacatgtcatcgcctttacgatgactacacacgcggcgtatatagtccggcgctcatatctactcacacgactgcgctgacgtactactatagcgcgcgcgcct

SEQ ID NO: 635941 - DNA, 137 bp, Homo sapiens
tttcgccagccaacaggatgatatgaagacttccctgaagaaagttgtgaaggagacctcctacgagatgatgatgcagtgtgtgtcccgcatgttaggcccacccccatgcatgtcacctcacatgcgctgcatgg

SEQ ID NO: 635942 - DNA, 284 bp, Homo sapiens
aaaacttcaccagcattaatttttttattcattaaaacaacaaaccttggccaggcgcagtggctcattcctataatcccagcactttgggaggccgaggtgggcggatcgtgaggtcaggagagatcgagacaatccgtggtagcgcggtgaagccccatctctactaaaaatacagaagattagccgggtgtggtcgcgtgcgcctgtggtcccagctgctgaggaggctgaggcgggggaatcgcttgaacccgggaggcggatgttgcagtgagccggga

SEQ ID NO: 635943 - DNA, 383 bp, Homo sapiens
tcagctgcgttaccggtgggagtacggaatgacaacaatgagccagtttttctagagaaagcacttttggtgtcaggaccagcacgtgcaaggcctgaggtgggaaagaggttggtgtgttcaagaaagaaggcaagactggcctgaacacagtgactaaggtggagagggttacacgcagaagccagaaagacaagaagttttgccccaaaaatggaaatctaagcactcttgcagtcataaaactggccatggaagtgccctggtgcccagagagatatgtcatttctgagcagtagtagggaattcttccagttacaaagtcgcttcctacttactcaggtaatagtcatagactcagagctggcagggagtgtagagtt

SEQ ID NO: 635944 - DNA, 375 bp, Homo sapiens
gtggaagaaaagaagcagctttacctacttgtttctttttgtctctcttcctggacactcactttttcagagacttaaacagtctctgcaatggagtgtgggtccaccttagcctcttaacttcctaatggagaagggtgtcaaccaggcaattttccttgggcctttaaaggattcgggacttatcctaaccaagcccccatttttttaaacaaggggtttttttggatgggtttaaaaatacttgaaaacttaggcccaccatttttatagatctcttaaaaattgaggccgtttcgaaagtttcggcgacaagaaaaaagtcgccctcgtgcgtagtttacaagattttgtggagtctttttaaaattgtta

SEQ ID NO: 635945 - DNA, 1163 bp, Homo sapiens
  misc_feature (1163)..(1163): n is a, c, g, or t
ggagaatgccagaaagtgttgtgcatggggaagctgagatcatccatgctgtggttatcaggaaactagaatgagatcctacagggcacgaggcaagaagggaactgatcgtgcgtgccgcagattgagctgctgcaactgcttggttcagattggcagcggaaaataatcctgtggagagggcgtcgagtggtcaagatcaagttcatatatcatcggccatcgtctctatgagctacgaacgcccaaccttggctagacgcgtacattgaagccagagatgtgggggaagtgcctggactgcatcaatgagcatgagtggatagtcctgtgtggcaaatcccaggcatgttagttgggagaggagatattctggaaggagaggtgagaagcctggcacagaggctgaggcaggcactgtgtggtccgtggggtggatcctaactctggtggaacgaatggatgaagaatttaccaaaataatgcagacatactgaccctcactcccaagagtacgtggagcacttgaacggatgatggcccaggtgtgtgccatcatcgagcgtgtgcaggctaactggaggagaagggcactaaccgaggaggtctgccgcatctagctgctgcgcatactgcacaactacctaccaagttgattacgagggcccatcagcgacaggtgacccggctgaggctcctcaaagtctggacaagaacagggcgaaaatgagggcgaaggaatcggatgaggctgatgggagaagactggtgcaaggtaaatttaagcccaaggaacggataacacgggaatcggacacatggtccacactatggcacaatttacccacaaggcccgtgacacgcgcgtggtacagcgcaggaaaccaggccataaccactgagtggaacagtaagattgaagcgcgcacgtgaaggaccttttaaaagggccaaggtggaaggtgattgagcatcgacagaggtaacgagagaaaagacctagagcaatatgtagcaagtatggaaggaggggagtgaacataacaagatagtaagaagaaggaggaatcaagaacctaagagtgtagtcagtggtgagtaaagagaagaaaaaatgtgagacgctgtctagatttgttgattaggtgtgtagttgtatatan

SEQ ID NO: 635946 - DNA, 203 bp, Homo sapiens
aaaaaacccaaggggggggggggcccccccttcccccccggggggggttaacccttttttaaaaccccggggggggaaaacccattttttttttttgggggtttctttttatttttgggccttgccctttttgttcccggtggggagggggggccctttttgtttttttggggccccccgggccccttttttttttttttcca

SEQ ID NO: 635947 - DNA, 348 bp, Homo sapiens
  misc_feature (342)..(342): n is a, c, g, or t
gcaactaaatagcaaaaagataaataagccaattttaagttgggcaaaatatttgaatagccattgcaccaaaaggtgtaggaatagctaataaagcacatgaaaagatggtcagtatcatcagtcagcagggaaatgcaaatcaaaactacaatgacacaccacttcttacccactagaatgctatgataaaaatgaaggacaataacaattgagggaagtgaaataacaatgatgtgggaaaaattggaaatacttcatggcattgttgatggggacatggcagccatgttggggaaaggcagtttgggcagtttctttaaaaacgtttggaaggatacnttttac

SEQ ID NO: 635948 - DNA, 878 bp, Homo sapiens
  misc_feature (1)..(1): n is a, c, g, or t
  misc_feature (76)..(76): n is a, c, g, or t
  misc_feature (113)..(113): n is a, c, g, or t
  misc_feature (126)..(126): n is a, c, g, or t
  misc_feature (130)..(130): n is a, c, g, or t
  misc_feature (203)..(203): n is a, c, g, or t
  misc_feature (248)..(248): n is a, c, g, or t
  misc_feature (326)..(326): n is a, c, g, or t
  misc_feature (328)..(328): n is a, c, g, or t
  misc_feature (331)..(331): n is a, c, g, or t
  misc_feature (354)..(354): n is a, c, g, or t
  misc_feature (470)..(470): n is a, c, g, or t
  misc_feature (557)..(557): n is a, c, g, or t
  misc_feature (579)..(579): n is a, c, g, or t
  misc_feature (613)..(613): n is a, c, g, or t
  misc_feature (634)..(634): n is a, c, g, or t
  misc_feature (643)..(643): n is a, c, g, or t
  misc_feature (662)..(662): n is a, c, g, or t
  misc_feature (668)..(668): n is a, c, g, or t
  misc_feature (685)..(685): n is a, c, g, or t
  misc_feature (695)..(695): n is a, c, g, or t
  misc_feature (706)..(706): n is a, c, g, or t
  misc_feature (750)..(750): n is a, c, g, or t
  misc_feature (771)..(771): n is a, c, g, or t
  misc_feature (773)..(773): n is a, c, g, or t
  misc_feature (776)..(776): n is a, c, g, or t
  misc_feature (778)..(778): n is a, c, g, or t
  misc_feature (805)..(805): n is a, c, g, or t
  misc_feature (809)..(809): n is a, c, g, or t
  misc_feature (869)..(869): n is a, c, g, or t
ntaattcctttgtttcttgccccctttagtgttttccccccacatttaattttcatttgctccccactcccttttntaaatagaatgcaaacaaccatcctgaagtgtctgangggcacctgcccncacntccctgccctccaaaatgcagactgagaagccaacagactgccttttcttttcttaatcaggtcactagttcnaaatatggtggcctggaggtcccatagaaaaagcaaaggggtgtnaacagtatgtataacagcgtatttacagggagtcacatgcggacaaaaagctacaatactgagtatcagacgacgcangnganaacaaagggccgggggtgggggnagagaaccccatgggcaaagaaaccccaggaaacgttaaactggtaaatcaatggcgagttaaggcttaaaaagtgtataaaaataacacagttaatattcaaaacggaactccanatacagaatatatagatgagtttctgtctagttttcttttttttcccggggggatgataggagggcttctctgggctctgtaaatanttcctatatacaccgacacgcntggctttcagattggggtgtgtctgtgggggctnggggcagggtctgctcctggnaactgcctncccggggatcccttccctncagagnggcctagggcctcggcngggggaatcncactccatagnagggaagacaaataacccctccctagggcactgcccccatctgngaggaaattctggagggaagncncananccaggcccactccctccccatcccccngccnacagtctgggtatggtgggagaggtagccgaaaggtttcctggccagcaccgaggtagantggggtggt

SEQ ID NO: 635949 - DNA, 932 bp, Homo sapiens
  misc_feature (70)..(70): n is a, c, g, or t
ggcttcagtagcgacaggggctgagaaagtggtgacaccgtcggaggtagcgagagtggagtccctgaanactttctcccaacagccccagggacatttcttccctcagtcccagcatctgcctcttcgctcagctcccaggatccccaactcctgataccgagggtgtggaggttggcgtgatgcactagtggccggtctcactcgcatgtggatccataacacgagggggtccgtggtagcggggtacgggagccacctcgaggacggggtgtggcactgagacacgactagaacaagtacgtggctgagcgtcagcacacgacccccatgcggtgacaagcgctgggagatgcaaggaatagtggggaatggccgcgcgcgcgattcccgaaagcggcgaagcctacctgaggagtacatggcggggtaagttatttactcatacttcctacatataatccgagagagagagggaaaagcgtcaacctccgacaacgccccgcgcaagggaagcatggaatctcaagaacgacgctaggattctctccactgcggccgtgccggagtgcagcttgctttctccaccagacacccacagacgataaaccgggctggggtcgaaccgaacaaccctggtggccctcccaaccttctaacacattcgtcgcttcgttttcctcgcagcccacgctacagagggcccccgggttagttccccgggtctaagagacttaatgtgccccaattcttaactggtttccttggaataggaacaagcgttcctggcccttcttattggaaagccaaggcggcagggcgcaatactggagccagccaaggcgtatcgttgggacacgggcgcaaaaggggcgccgggtaggaagaaccctttccatggaaaagcttcccggttggcccctgggggaccc

SEQ ID NO: 635950 - DNA, 122 bp, Homo sapiens
  misc_feature (103)..(103): n is a, c, g, or t
ctgcggattggcggacctgtggtgctgagcataagaggtcttccgtatctgattgtgcgttttagtaaaaccaacacagaacagacgaagcaagtaaccatcnggtagtcttgaccatcaag

SEQ ID NO: 635951 - DNA, 317 bp, Homo sapiens
  misc_feature (12)..(12): n is a, c, g, or t
tgtgcaactgcnttggcaagggcggcaagtgttagatgtagaagtactggcctaacaattttcaagtgactcttgacctagataagtggtttcgtgcatggccaatatgaatgtggctcccagcaactgcggcacagctactctcccatctggcagtctgatccatcctccttttattacttacctccctcctgcatggaaaaagtctttttcgtccgtagaataggtaggtaccaggtcaggtgtttaagggagtaagggggctgctaccaatgcccggtaaggggtagacgctgctttttgagcttttgaatcag

SEQ ID NO: 635952 - DNA, 182 bp, Homo sapiens
tgtcacagagggggcagactgtatgtggtcactgtcggcttcagccggacgtgggcaaagggatctaactctagtcaggcggctcagaatctggccacttccacatcggctgctgtcattggaccgcgctccaaagtcatccatggccctgggagaacggcgggcacggccacactggtagg

SEQ ID NO: 635953 - DNA, 221 bp, Homo sapiens
tacatgatacgactcgagctgagtaccctcgataaggggcccactcgtttagccaattaagttatttggaatggtgagttcatgggtggttgtgagtagatgcatccaaacttgcccaatagcctttcacctcgtggagagcgtggagtcaattcgcggcgaatccgggtcccggccgtgcatcatggttcaagtgaagactggttgtcttgccacctgtg

SEQ ID NO: 635954 - DNA, 161 bp, Homo sapiens
  misc_feature (62)..(62): n is a, c, g, or t
  misc_feature (146)..(146): n is a, c, g, or t
tgttaaatagaagattttaggccagatatggtggttcgcacctgtaaacctagcactttggnaggctgaggtgggagaatcgcttgagcccaggtagtcaaggctgcagtgagctctgtttgctccagtcctgggagagagaaatngagtgacaccctgcc

SEQ ID NO: 635955 - DNA, 155 bp, Homo sapiens
tcccgtctctactaaaaatacaaacttagctggtgattataggctgacgcatagtgcccgggtcaacttgtttatttacagattgtctatctaatatttttagaacatggatgactggtggtaactaaaactgcagaaagtgaaattgcagataa

SEQ ID NO: 635956 - DNA, 1628 bp, Homo sapiens
  misc_feature (574)..(574): n is a, c, g, or t
  misc_feature (845)..(845): n is a, c, g, or t
tagggccattctgggctccggggggccgcctctgggtcctccccgggggtggttggccggtggccgcgccctgtggtgtcatctggcgctggggcagttcccgggcgcggcctgggtgccccctataatctaatgtcgcgccggatatattggggaggtttcttacaaatatgggcgaaactattggagcaaacaaagaacatgttctgagaatcttgagatcacaaaattgtggagtagtgagagtgtgtgtgagaaagaagtgtataaaaataagaggagagaatgcgggtgagagaagaaaaacaatatatctctcaaagagcagtgtgacagtctaaatgtggtgtcacaagagtgtgagtggcgaaaatcctctcacagagtattctctgtggagagcgcctctatcatcaagagaaaagagatctgtgtgagtggtgtcgtctggtgtgaagacaaacaccacacacagcaggagagtaacacttgtgagagaagcgctctggcctctaagagagtgtgagtgtgtaacaagagacacagagagtgtgagagagggtgtctctctctnaaaaaacacgctgctggcgagaagttatacagtgtgggtgtccgcccgagatatagatggaagacgcccaaatattctctctatgtgagagagagagagtgtctccagcagaaactctctgtgataaagagggagaagattatgtgagcgggggtctctctctatatatcagacgcggctcttctatatgttgtgagagattaagcgcgagaaatgttgggaagaatattttatatttaaagggggcggaattttttattgtagaagaccnctattaacgggggaggaagcacacagatcgtgtgtgtggactgtggtggtggagacacccccatgtatttttgttgataggaaacgtaatgttggagagaatatattcgaggggaggggagaacattgtggtgaagacaaagaaacaactgtgcggcgcacaacaagatgttgtggctacactatctgttgtgacgaaaccaccgcgggggcgttctggactactgaaacaaacaaggagaaaaaagacctcccccccaaaagagggggggaagctcttcctcccggtgagacaaaatctgtggggggggcacaccgcggtgtggcgttccacaacgagacacgcgtggctgtgagaccgttgggtcccaccacgggggaacgatatggggggtgtgccccgcgaaaccccccgcggagtggtaaccccccttattttgtcggtgtgagggcaccctgttgtaacaagcgactacttcttaagtggggggcgagcaaggtttcccccccacggagtgtgtcgtgggcacacgcccattatgtatgaagtgtttggtgggtcgtcagagaatttttttccctcgtgtgtgaaccccccacttggtgtgagtttctttcttcttccctcactgtgtgatggctgtggtgggggcaccggacaccagttacgggcggggggaggtgggctgcacacccccccagtggtgatcattggtaggtcgccccctttttgtgggtgggggcccccaacaactatggtggtgggggtctcacggggggcgca

SEQ ID NO: 635957 - DNA, 211 bp, Homo sapiens
tacggcaagtatatcagagtctcgatcagcgtggtgtctcgggatctaatttcaaatcgttgtcttctgactacgcatagtagtttgtagagatgtccttgccggtatggtacgcttgttcgctttcatgattctctccatattgccagcacatccgtactggctggccaccaaagcacacggagattctagtacaggcgctgagacacca

SEQ ID NO: 635958 - DNA, 898 bp, Homo sapiens
gcagatttgtggtgcgtactgagtcgtcggtgctgcgcgcgggtgagtacggggacctggatctggctcgcgaggtgcgagacggcgggggcgggagggcgagaagccgtcttggccctcgctgatcttggggttccagccctccgccggctgcgcctgcttgtctggccggtttgcccttctctgaagggaggtagggcagggttcggtctgccagagggaagcatcgcctagaggctgtgccaggtgtccctccttggcctaaacgggctcaggtgcacctgagattgctccgcacggttattgacagggagacgtacctatgggcttgagcaggttcagtctggcctaacccaggaggctacgcagagatttggaggacagccacgcagtaccaagcccatagaatcgtctgggactcgcacatgcacaagtcccgttctctctcttgttataactgcaagttgtcctttgcgccggagcattctgccctccacgttatgctgtacatgacaacttgggtgaggcaacagggaagctgaaaagagatcatacggtgctgaatgaaattgtatggaactcgcgggtcagacatttcccaatttccagtgtcagatgcttcaaagtattattaaaaacgtatggatccccatgaagccttactacaccaaagttttaacaggagatttggataggaatggggttgatggggttcatcgtttataaaattcgggcgtggtgataaaagaaagtaggttggaagcttcgggctggtcctggtcttcataaacagattactggggtccatttgaagaaagtgctgccgtaaatcagcagcggtaatggagcgggacgtctgccctgttagcggaactaggggataggttgggtggaaaaa

SEQ ID NO: 635959 - DNA, 526 bp, Homo sapiens
ggacgcgtgggtatgaccctggtcatcgtggtgtggagcgtggccgcctcatctggccggtgccatcatcgccggcttcctgcccaacggatggaacagcgccggacaccgcagacaccgagcacccccgcgagtgcccgaggaccaccgagcgcgcgcgcgcgatgcgcgcgcgggcgtattggggtggacaagtgacccgctccgctcctcctgtgtccgtcctgtgtccgcgcgcgcggatgcctttcccgcggggactcggcggtgtgcttcggctgtagtatcgtaagtcctctttcccgagatggggccgccgagagaccccaggctttgaaaaagcaaggttggtgctgcacttcagtttccgaaaagcagatgttcaagcccattgcatagagggtgaggatcgacagctccgaagacggcgaggagggacaatgggggccttcccccttctagtgcattcccctgacacgataccttctcagaacccacttgcccaaattcatgccgatccatgacc

SEQ ID NO: 635960 - DNA, 196 bp, Homo sapiens
taaccatagaggatcccccacgtatgttgatggtttccttaggtgcaggtgggcagcagagatggccctgaaccctccactcagtcttggatgagaaagtcggggtctcatagttgctggtggtggaggtgatgatctcatcgcgcatgcttgtaggacaggtgcgagtctagtgtggccggtcagctagcgcatg

SEQ ID NO: 635961 - DNA, 214 bp, Homo sapiens
  misc_feature (97)..(97): n is a, c, g, or t
gaccttcagagggaaaatcagatgtccaaacgacttttaacaaacgcataaagaggtttatttgggtacatggaccgcagtggttattgcacaaganagggaaaggaacacgcgggtagatgatttctagcaggcaggaagtcctgtgaggtgtcaacatgagcacctccagctgtactagtgacattggaataataaatttgataaggtggtg

SEQ ID NO: 635962 - DNA, 376 bp, Homo sapiens
aggcgtggtgcacaagcctgaagtcccagctacttcgggatgctgaggcaggagcatcgcttggaacctgggaggcggaggctgcagtaagccgagaacgcgccactgcactccagcttgggcaacagaccgagactctgtctcataacaaaaccaaacacacacacacacacacacacacacacacactcaaaacaagatatatataactggtttcaaagaagaggccaggccatgtgcggtcgctcacgcctgtactcccaacactatgggaggcggacgcaggagaatcacttgaccccaggaggcagaggttgtggtgagctgagatcacgccattgcagtccaggttgggcaacaagagcaaaactccatc

SEQ ID NO: 635963 - DNA, 147 bp, Homo sapiens
tactccttccagctccttttcacttcttttgtttattagagtatagactggatcttactatgtttctcagactggtttcaaactcctagagctcacagtcaatcttccctgtggagactccaccctccggggtaccgatgctcgaca

SEQ ID NO: 635964 - DNA, 482 bp, Homo sapiens
tatcgttgatcctaagctgtttctagggtcaactccataggagatttctcttttataccttcttcactggcccgtctcgagcaagaccgtagtcaccatatcctgttttcattcattgatctacgatcaacaatacagtattttataaatgtatttatgctgctagactgtgggtcaaatgttcccattttcaaattatttagaattcttatgagtttaaaatttgtaaatttctaaatccaatcatgtaaaatgaaactgtggctccattggagtagtctcccacctaaatatcaagatggctatatgctaaaaagagacaatatggtcaagtctaaaatggctaattgtcctatgatgctattatcatagactaatgacatttatcttcaaaacaccaaattgtctttagaaaaattaatgtgattacaggtagaggccttctaggtgagacacttttaaggtacactgcatttggcaaa

SEQ ID NO: 635965 - DNA, 159 bp, Homo sapiens
tagcatcttatttgcttctgcatgccgctggccccaatacaaactcgacagtagttccaatagccagaacacagcactttcaatttttccaccctgcagatctaaatattctgtcataaaataagcaaacggtctgaggtgcctgacaagaattattta

SEQ ID NO: 635966 - DNA, 188 bp, Homo sapiens
cctggtacgggagtggctgtgtgtctggcactgtgctcatagtggaatagaacatatcaagactcaagtgagggccgacatttcacctctcttaaggtctctctgcattttttttttttttttttttttttttttttttttttttttttttttttttttttttttttttttttttttttttttttttt

SEQ ID NO: 635967 - DNA, 124 bp, Homo sapiens
caggtcgatcacttcaggtaacgagttcgagaccagcccggccaatgtggcgaaatcccgtctctaccacgaataccaaacttagccgggtatggtggtgctcggctgcaatctagcctggaac

SEQ ID NO: 635968 - DNA, 325 bp, Homo sapiens
  misc_feature (321)..(321): n is a, c, g, or t
tttggaggaggcatgaagcaggaagacaatgcaataattgaaatctctctgaaactggccaacatctatgctgctcagaataaacaggaatttgcccttgctggctatgaattctgcatttcaactctagaggggaaaattgaaagagaaaaggaattagcagaagatattatgtcagaagaaacagccaatacttacctcctccttggtatgtgcttagactcttgtgcacgctatctgctattctccaagcagctatcacaggcacaaagggatgtattgaaaaaagccctgcaagatttgtcaaggaattccaagggngaaa

SEQ ID NO: 635969 - DNA, 673 bp, Homo sapiens
  misc_feature (75)..(75): n is a, c, g, or t
  misc_feature (77)..(77): n is a, c, g, or t
  misc_feature (642)..(642): n is a, c, g, or t
acagtctggtgattatgctatcctatgccatgcacttcctgcctccaacaaaaaacagcttggggagtggtggcngnggtggggatcctagatgtgcctaatacatcctctgcttccacttaccagaatgatagtggcttccctaaaactgcattggctctccagctgcctacaaagtagtcagattcccaagcagtagtagaaaagtacagaacggaaattcttcctcattcatcatgtacttgtcatattccattgtggcaccctaagtcccttttactgtgtttattttctcttggattctgtgcttgggctggaagataaaggggtgggaggaatgtctgttactacctggaataaggcttgtctttaatccactagcattcagaagtacccccaggaagcatcctctgctcaccatagaaagttttcagaaactcttgagagtctgattatatactagattggaacaaagaagctagtaagaattaatgaagtcacctctgggaacattgcctctgaaaaactgtaagtaattgcgcatttgccaggaaggcaaggaattccaaggcagcggagatctgaggagcattctccagcagtcctcaggtgctgtggtgcttaccagagctctgtccaggnataggaaaggaacgagaagcggcgaaggtac

SEQ ID NO: 635970 - DNA, 295 bp, Homo sapiens
aacagcagccaaatcatgaatagttagccaagaagaaggtcttaaaggtaccaagaaaaggaccaaaaaaattggggtttgaaatcccagtgcgcaaaccataaacttctttctcaaaaccatagagaattttggaaaactcaagaagataaatttgtggcacagtaagtcacattctttcaagcatacttgtaaaatgtttccttaaagtgttcttggaataaaaatgattgtcatgtctccaaccacagtaaactaatggtgctccgtgaaataaaagtcatatccccccttt

SEQ ID NO: 635971 - DNA, 119 bp, Homo sapiens
  misc_feature (49)..(49): n is a, c, g, or t
ggacccgcggtttgtcttacgccctggcccagtgtggtgttctgcaagngatcacattgcagcaactgaagctgtaggttacagctaaggctcatattcaatccctggtcctggaactt

SEQ ID NO: 635972 - DNA, 1459 bp, Homo sapiens
caaagccgcctgggctgctgcgcccagagccagcctggatgcctggagcctggatgccctgaacttgcatgctccatgccccatgcctgtgctgtgatgcctgcatgcccatgtgcctgtgtggcctgtgctgtgtgtgatcactgtgaacatgctggtggctgtgtgctgtgctggctgcttgccctgggatgtgctgtggccctcccttgatttctcggtgtgccgtccccatgtgattggacgcagccttgacgtgcaccaggacctcaggtgcccttgggtgtggcacactgtgcctaacttgacttgaccacttcacatgcgtggctatgcaccttgcgtggctaccttgcatggcataccaatcccccagtgccactggccaacatcgggggctacgtgtaccaagtgtgcccggatggcaacgagaccagcgccaacaacccctcattggtgaggcctcgacacgccgactcatggcttttccaagactggtggtggcagcctgatacaaaagctaggacaggtagtggtgcccctggttacctatccgacgttgggattgtgcaagacacatgtgttgaccatttttcagcacaagcgcaggaccctaccatcagaacacggttgcagtggtgctcccggtggacattgccacggaaaccaagactccccttggtgaattccccgtgaaatccattgtgagatttaagacggttatcatagtcagcaagagaccgtacgtggcatgacatgtgcagagcccacgggattgtatagaaggggacagaatagaaagttacaaaggacaatcagtgacaaacacagacaaagatttatgagtgtaacacaggtagagtcaagatactttggggcataccgctgaagaaggagcgaacattatgggataagttcggtcacgcattacccagattgagtttacaggaaccgtggattgttggtcacaaagcggtggtgggcatccatattgaagattgggagatggattgggaggatgtgggacacagagaagatatacgtgggaccggtcacagtttaacacaggaggaccccaggtcacgcggaacaaaccaaccaacaggacccaacggaacgaaggggaccacaactggatgcaacgtcgagcatgcgatggaaccacatggagacaacacactactgtgctccatccaactgcgagaacccaccaaggtggcgacagcacccgaggacagataccagagatacgaatacagaacgaaccccgacgaaaggaagagagacactgaaggacacagaaaggacgaagaacaccagggagccgagcaaacagggaggaacatgaaagcaaagcaacaggagaaaaacaaagaaaaggcaaggaaaaaggaacagaggacgaagcacaacgagccgatatcacgacagacaaagaacgaacgacgacaacgccgtg

SEQ ID NO: 635973 - DNA, 400 bp, Homo sapiens
acatggttacaattactatttccaaaagatgggaatattttgcttgcacgtagagaagtcagctacagggaatggtggccatgcagaagactctgccatagaaggataattttatatcactttatgagaattattgctctgagtcaggagactttattgccatcaaagcatagcctgtcagggatggtgccattagtcattgaagtgtggtttatcccagggcagtctggtttataatgtaaacacctctatcttcatatttcatatttcatctgggggcacaatttaaactgattgatggacacaggaaaaatactttaattctgagaaagcttaataaaaaatcaaggtaaaatcccccatcaataaaacatctactgaaatgacaagaaaaaaaaaa

SEQ ID NO: 635974 - DNA, 438 bp, Homo sapiens
  misc_feature (154)..(154): n is a, c, g, or t
  misc_feature (326)..(327): n is a, c, g, or t
gccgcatgcaggtgggcccatctaagcaatttggaccacccatggctgggcttggtcagcctctaagatggacagggatctcataagaattcaagtaaggaattgtgagtaaagacaattaaaatttaaagaggaattttaattacagtttccntgagtttcggaaatctagttccaatgacagatactgggaatgtcagcgcaaggagtttgtgtcatcacatccttagtataccaccatttaagcattttttaagttcctcgtgtcgtgtttgttcaggtgggccttcctcattggttgactcaacgctttaactttacctccnntagcttagtctgcattcgtgcttcccgcattcaattttcaagctattcatacattaaattgttggcttgttgccccaagtgtatgacgatagtgcccactatgctttagcg

SEQ ID NO: 635975 - DNA, 179 bp, Homo sapiens
gaggattccccacccgatagagcatggatggtggcaatcaaagaggcatagggaatgccccctcaggcatttgatacagcattcaaaatcaccctatttctgtgtctgattcgatcatcacccattcttggagttaccgatgctcgaatttctgctaatacatggatcagtagactgct

SEQ ID NO: 635976 - DNA, 2089 bp, Homo sapiens
tctcttgcttgtattatttgggaacatcatttaaaaggactgtataatattccattaagtagatggaccatcatttatttaacatgctttggtctttaccccttgaaggcaaggcatatcctcctttccctattaacccattatggttcagtcatccgtgaagttggctaagcttttgaatttaaattttctgtctgcactgtctctttgaggtaatggtatgccagttgctgtgtgaaatgaaacttctttttatttgctttaaactttattaattcaagctttagctaggcatcttgttcttattcggctttagtttgataaaaaaaaaaagttgtgtttatcttcccctgcctggtcttgcagctttggtcctagggcctcccttccttctttcgaaacagatgccactgtggatggtaggttccacaagcatggccctgtccactcatcacagatgtgactcgagcagcttctggagctgcgctctagagggcattcaggtggatgtttccccacctgcaaggtgggatgtttgctggacagataacaagatttgcctgtttttttccccttcccatcacatctatttccttatccctttggtgacccagggtgccctgttggctggatcttaggaactggttgtctcacactttcacctgccccctgcctgtgtctttccccttcctgacttctgttgacctcctgttcccactctactggtctctccctcacagtgctgtcactgcagctatgctcctggcttcccctcaccgagtgagtttttgtgaccttcgcactgtattcatgctttgggacttactgctgtaatgatgtcagtggcggaggttagcagatggcggcagcagcaatgagacctgacatgttctaatgactccctccttcctacccttgctggctgagccaatggagggacagaggtttccttgaggtatttaaggagggggccaagggaaatcggggggcccccaggtgccaatgaggcctgtgacctttgctgctataatatcagtgtttcacaagcagggcggttcgggagcccacttgcagcccatcaaaaattgatttaattgcaatttttcctccaattaggagcactggagcctgactaattggagtaatagagagtaataaggctcagataaaaagccttcctcggctgcctttgtatctcgtgtcagtgcctgtcagaggtcagagagcttgcatattctattaggcagcctggccttcatttgtacaaattagtttacccaacagtaattaaaatgccaatgcgggttgaagagaactgaatacacttgatgggcatgttggtgaacgatgtgacagctctggtggcctcccttgccaaagtgtgtcagcccaggctcagaggctgctggggcctgggccagctgggcggctctaggccagccacggggcacagctgctgagcacgccacttgtgctgccctgcctcagagccactcagttgcttctttcttcttccaggtggagtcatttgttcatttgtccattcattcattcattcaatcaataagcatttgagttttcaatatgtgtcaggcattatactagatgctggagattcaaacaagactaactcttgaagtgtagcccacatgagaacttctgggcgaggggtggtataataacttgggtctggaatcaagactgactgggttccaattccagtccactagttgctacctgtgtgagctagagcaaattaattacctcccaaagcctcagtctcctcatgtgtaaaatagggaaagtggggctgggtgcggtggctcatgcgtctaatcccagaactttgcgaggccaaggtaggtggatcacttgaggtcaggagttcgagaccagcctggccaacctggggaaaccctctctctactaaaaatacaaaaattagccaggcgtggtggtgcgcacctgttaactcagctactgggggtgctgaggcaggagaatggcatgaacctgggagatagaggttgcatgagctgagattgcaccactgcactccagcctgggcgacagagcaagactctgtctc

SEQ ID NO: 635977 - DNA, 2008 bp, Homo sapiens
ctgtgttgttgtttgtgctttctgggtcgttgtggtggttttgtctgtgtttttgttgttttgtctttgtgtcggtctggtttgtttgatctacgtcttggttagtctgttggtttcttgtgttgctttcgtttagttttgtttctctctctctgtgtcgttcgtcgttgctttcggttgcttgctgtgtttcgtcgttgtgttggttcgtttttgtatgttgggggagcagctagagatggccccggatacctcgtggtcatgccacgcgggcgggcgccctttttgttttcgtcgaggggacctcaccttgcgtgtctcacaaagcacgcggggtttttttctcccccgtccccttcttttttctcgtctgtcttcaatggttgtatcagctctctctcgggggtggcaatgtttcctcgccacgacggtgaatctctgtggtgcgaagcactcaacgaaaagagggggggggtagtctactctctgtcgcgtcgccacctcgctggtcttctggggtgatggtgtctcgccacagagaccacagcggaacatcatttatttgtgagggggagactacccctctcccccgggtcgacttttctccccgtctaatgtttttgtgcccgtgtcgtctgttttccgaccaccgtgggggggaccccactaaggttggtcgtctctcttcgcttttcctcacccctgctcagcagcccggcttgttagctgtcgggggtgcttttttctttttggcgcaacgtctcttttttggtggggggggtggcgctcccttctcctgtagagttggcggttgctcgtgccgcaccccaacagctgttggttagcgtttatgtactattggggcgtgtcggaacgccaccacgggggtgggtcgttctcctcctgtgtgggggcaggtcttctcttttgggtgtgcgccacacggtgatagtagtatacctcttgcggggcgcacaacacagcacagatgttgtggcgtagaagcagaccctgtgctcttttgtttctcccgtaatatatgtggggcgcgccactcttctctcatcttcttgggagactcttctcacacgggggttctatgtttggatgcattcttctatcgtgttgcgctctcttggtggggcacgcagctcgctcctcttgggggtgttttttatcgcctcagtagagaggggccgcccctccttattatgtgttgttgtcttgtaggtgcgtttctccctcgtcgcgcgcccacaatggagtgtatgacttcacacacactctttgctcgccgacgctcacgtcgagtgcggcgcacaacgctggactcatctctcttgtggggagagacatcactcttccaccacttcgtggcgggccgcgcgcagtggggccctactcttcgttgagactcaccgccgcgcaccactctcgtgggtggagatgtgagacagattatatatctctctcgttgttttgtctagtagactctctctctgcgagctgttcttctgttgggggagagattgtagagtatctcatctctctctcgtgggtgtcgtctcattgtctcagcacgcgataatatatatcatgggggagtgctctcgtggaggagccaatataaggagctatctggggagctctctcactcccccacacgcgcccatattgggcgcgcgctaatatataagacaccacccacccgcggcacgagaaaccccaactcttcttcctctctatattttctctatggagaaatgataagaatagtttcccgctgggagaagagtcacatctgtgaacaacctgtgtgagttaagggagacacacgaacctcccccccccgctgtcgttctttgcacccacacgcgccgccgatataatgacgcgggctcatcttctccccgcgggagccacgaggggttgaaaattaggagaactctcttttttggttgggtttaaaaaaaaaaataaaacaattaagacgaacaaggaaaaagta

SEQ ID NO: 635978 - DNA, 99 bp, Homo sapiens
tcaagcttctaacgatgtacggggacatgagacgcaactagttggtgcataagaaggccccacttggctatttcatatctacctacaattgaccaaaaa

SEQ ID NO: 635979 - DNA, 87 bp, Homo sapiens
gcggccgcctactactactactgctcgaattcaagcttctaacgatgtacggggacatggaaatatatgatgtgctaccaaatgtgc

SEQ ID NO: 635980 - DNA, 1856 bp, Homo sapiens
agcccagatagagtatgtgtttgctagcgctgaatctgtacacagacatcatcaacatcttcctgtacatcctacaccaatcattggtcctgcggccaacggcagtacgaccgaagctccagctcagacatagtatgcccgctacaggtgagcacggttaggcactaggacccctagaacacctaggacatcggaatgatggccacgtcgtagtacctatcactccatactcatcattgatcactcctagtgctagcagcccgtgatgtgcgaaaacagggatcgcactcgtcatcgcgaaaccgcataccttgatattgatacatcatgccatgcatagcgtattcccaattgttgagcagccccagtctggatgagtacgaacaaagacacatgggacacgcattgtatagattacccatacaccctgagacccctcagtcacaacatgggcgagacgagcgcataggggtcacagcgttgtttaccagttttgcccaatacatcacatggttacataagcatcaattctagcttttgacattggatgacgctccgtgatacatggcgccaagaacacgaacatcctctaggggggacctagagcgagagacacggccaaacccaacggttcaccccgtgcgggttcagacaagtgcgacatgtcgtaggaccccaagagacacgcggatcgcacaggggtttagaccaaccgatcattatacgccctttcacttggatagtcattagatactcgcccacaacgacaacttggacaccgacttcggaactaaaacaaacgaccatacactgagcgtccccacaacatcagaacaccgcaacacaaccatcacataccgaaaagacataacagcaccaccaccattgacgccaacacacacactcacacgagcaaactagcacgaacagcacccaaaaaacacaggccaccctataaacacaactaaagcgaaacaccacaaacaagcggcaaggaccagcaaacagaaacacagacaacacacagacacaacacaaccgagacacaacgcacaggcagcaacccacgcccaaccacacagacgcacgcgagcacatcacagccgcacgtacgaacaacacgtacacgccagacaacacacagacacgcagacacacacgatagcataacgctcactacaaccctcgaccatcaacaacaccacacaccacagcacccacaccaacagaccaccaaataacggaccacacactccaccagcacgatacacacacaacatcaatcaggaccgacacactaaacacagacaagactgcaccacgaccaacgaatctaacagccgccctcacatacaaacactgaacatccaaacagcaacttaccaacgcaccacgaccaaacacacaacaacctgaccgactacgcacaaacaagaaagacgaaacgccatgacacgcagcccaacacacaacaaccaaaaagtaaaacaaaatagaacctacaatcaacaaacacaaaacacaccaccacagaactgtacacgaagcaacaacaacccaaacctcaacaaaaccacataagcagaacatcaaaatatagcgggcatacaaaacatacttcaacaccccacaacatgtacagaaccgatgcaacaccacacacatagcacagccacaccacaccacctaccatatataactaacaccagcagcaccgaaccaccacaacgacaaacaaaacaccaagaagacgaaacaaccaccacacgtaccacgacagaaaaagcagataacaacatacacagcaaaaatgcaacaaacaaacactaccaaacgacacatcagagcacaagcac

SEQ ID NO: 635981 - DNA, 332 bp, Homo sapiens
actcttctgttaccaaacagcgcctcaaccgattttgtcaccagtgagtacttctactacgtgctgatcggggctagatatctagaagttacgactagtgacactatggaggcccaacgggaaagtggagtattcagttcatgaatactttattctacagagagcagattctaggggtacttgggaagattctctagtatctatcctagtattctcagaccactaatgggatttctggtactatataaactatataaactatatctagtatgcaataccgtgtagagtctcccagtaaaatactgctcatagggaacaagaactaactaggg

SEQ ID NO: 635982 - DNA, 423 bp, Homo sapiens
tctgtactgaggaggagctgatctgtgtctggtcttctctctaaactctcctcggattagtcagacccaccatgaactggctgcaggttcactcttcaggatctgcttttattgcaccgaattttggtgagatgccatcagcccgcactgaggagctttagaacagcctgtgaaactcggtggtgtatactgtgagggtgtcactgacagcattcattgcatcacagagtgtcctctccatggggccccatgggaagcgtttgcctcatgcttccatagcagggacagccaggcttctctgagtaatcgctttgtatgtcctgtggaccccgtgacccgtgtaactgatcaggttttcctcatccattgactgctataaaattgagctccaaatgcatggctaaaacaactgaatttctatgg

SEQ ID NO: 635983 - DNA, 252 bp, Homo sapiens
catgttggccagcacgatggtcggcgtgatcggcgtcaacggcggcaccggcatgtcatcgagtaccgcggcacgaacgatccgcgcgatggacatggaacaacgcatgaccctgtgcaacatgagcatcgaggccggcgcgcgcttgggcatggttgcgccggacgaggtcaccttcgactacgtgcgcaggacgccgtacgcaccgaaggatttcgacgccgcggtggcaaagtgaaagcagctggtacc

SEQ ID NO: 635984 - DNA, 160 bp, Homo sapiens
cgggcgactctagaggacccctataggcgctaggtgaaatagacaaattcctagaaagaaagaaactgccaacaccgactcgtgaagaaatagaaaatctgactagacctataagagagaattagtaatcaaaaacctttccgcaaagaaaagcccagca

SEQ ID NO: 635985 - DNA, 231 bp, Homo sapiens
ggacagtatccatggcacatctattctacaaatgtccatctatccagttggacatctgtcctacagatagttgatatatgtgtctgaagttctcagaatattccaaggctagaaatatttatttgggagttatgtgtgtaagtgatagttcatatcttaagactacatagcaaatagccaagaaggaaggtaaacattgatttgtaaaagattgtggacggttggacacag

SEQ ID NO: 635986 - DNA, 174 bp, Homo sapiens
cggcacgaggccagctgcgggtctcaaagccagcacagatcacaagagcaaggccagcagctcctccagggaagagcaaaacgctgccttggaaacacattttaattgatgaaaggattctttgttttagccgctgatggcagtgcaagtgaacttcagggctaaaaaaaaaaa

SEQ ID NO: 635987 - DNA, 178 bp, Homo sapiens
gtggctgtggtagcactgttcaaccgtgttcctgctccgtcctccactatagcagatgcgatgcgcggagtaggagagagggaggtaagagtcagaagctaatgtagtatatgcggggaaacgccgatatcggtggtgcaccgatttcatataggggcaactatgtcagttgccaaag

SEQ ID NO: 635988 - DNA, 219 bp, Homo sapiens
ggtcgactggctctggaaaactgctttattcacattaaaatgtacgaagctcagcagtttgcatttaatgtgcaagccttagagcctcactctggggtgtatcatcctcaatttaggatcactttttaggaatatgatgcttttttgcctcattcctttcaaaagtgttcattatatgtcctaaaaattcttacctctgaaatgattttgatttcttcc

SEQ ID NO: 635989 - DNA, 517 bp, Homo sapiens
cctcgctgcgtcgcataatcgactgactgcattattcatcctaagtaaatattcatggatcatccttctgttctagggggcgtactagtatgccgaggagatacagataactaagatattgaagtccttgtggtcatggagctatgacgtgtagtgagtgggaaagacatttcagtacacaagtaaacatatcaatagatgagatcaagatagtgctgtgagctcggaaggatataatggtgatgtaaaagagagagtaacagggacctgagaggttagagaaggcctctgagaatgacgtatgaactgtgagctcaaggatgagaagaagccgttaatgtgcagatttggggaaagttcctttctggacaaagggaacagctgtcaaagctcctgagggtaggaaaagagcttgacatgcagaacggacacctaggaagtcatcattgttagaatgtagggagcaagggggtgtcgggggtggaggatggtggcacaactttgggataaggtatgg

SEQ ID NO: 635990 - DNA, 414 bp, Homo sapiens
  misc_feature (22)..(22): n is a, c, g, or t
  misc_feature (34)..(34): n is a, c, g, or t
  misc_feature (66)..(66): n is a, c, g, or t
  misc_feature (123)..(123): n is a, c, g, or t
  misc_feature (146)..(146): n is a, c, g, or t
  misc_feature (410)..(410): n is a, c, g, or t
aaaacccccctggctgtaagtnaccccttagccnaggcccatggaggccccccattgcttccaagntcctgctgggccccccagggcccctctctatttcatcaacatgaatgaaatcagtcnagagacaatattggccgggtgcnggtgctcacgcctgtaatcccagcactttgggaggccaaggcgggtagatcacttgaggttgggagttcgagaccatcctgaccaacggagaaaccctgtctctactaaaaatacaaaattagccaggcgtggtggcacatgccggtcatcctagctactcaggaggctgaggcaggagaatcgcttgaacccaggaggcaaggttgcagtgagccgaggtcatgccattgcactctagcctgggcaacaagagtgaaactccnactc

SEQ ID NO: 635991 - DNA, 168 bp, Homo sapiens
  misc_feature (145)..(145): n is a, c, g, or t
gcgcccagagacagactagagagcagtacagagacccagagagagtgcgggacagagacccagagagagagggagacagagacccagagagagagggacacggagacagagggcgacagagaccaagagacgctaagagaacgtnaccccctcagagagaagatagca

SEQ ID NO: 635992 - DNA, 459 bp, Homo sapiens
  misc_feature (459)..(459): n is a, c, g, or t
agcccgaagatgaccgccttcatgccgaggtgtcttgctccggatcctatagtgagttcgagctacactatatgtttgacctggaggctagccagacaactacaatgactgagttgtactaagagtttgcagtaaagaaggaacgagctacatacctagaataggtctgtgactgcgttacgttcatccgacatgaaagctgactgactcctgatcgcatagaggatggactcattggcccttcccaacatgactctcagcaagtgctggccgatccatcgattgggctgcactgagatcacgacgccttaaaatgcagagtgtgcctgccgcagggaccatgggactatgtcacagcccatgatagttcaaagttgtcgagacaagtaaccaggatcctgatgaatggaagacactgcataagacttggatgatttgcgcacggaggcgtggggttcn

SEQ ID NO: 635993 - DNA, 886 bp, Homo sapiens
agcgtgcctatcggcatggctcttaaagagagacagcattaatttttgaatcgcgttgtggcggccggccaggcgagagaatggcggtatttgtgagaggagtcgagacgtaccgaacgagagtggtaactacctagtgggctctactgagagtgctgatatagaatgaatacaaatcatgtgctgaacacatgagtgtattaacatccactactggtgacggcactagcttggctagactcttccatttgtgaccttctaaagttactgagattgccaaggaaaacttaattattggatctacttcatatgctagaagaagaagatgtcctcagattgaaatcatagagtgaatatcggtttcaggaacgtgtggaccaattacaggacgtaacttatatataagcctttaataggacattagaggtggcctttgtataaggattggagtcatgatggacgaacttcgatatggtttggcacttctccggaacttttgacacctgtatttgtagtcacggacttatccggattcctgtcttgtaactgtagctctacaaaggcttgacttgtaagagattatgtggcgaccaagacagctcgtactgacaacttcggttcaacagctaatggcaagacgctcgtttggacgatgtgtgcatgagtcgccccggtgagtctttgtgccgaggttctgaattgaattcctagttcctactgaatgttaacttgcgattcgtactgcaaacacacgaaaccaaagaactcaagcttggtggaactttgcgcctccaatcatgtggtgtggaaggccttgcgcaaagagaccctcaaagcccacacagtccacaaagagtgggcaggaaattaggcatcgagggggacg

SEQ ID NO: 635994 - DNA, 440 bp, Homo sapiens
  misc_feature (42)..(42): n is a, c, g, or t
ggagagtactggagcctgcaaatgcattgtgtttgctctggnggtggtgggcatggggtctgttcggagatgtggaggggttagacggggtttctggttttagaaggttgcgtgttcttcgagttgggctaaagtagagttcgttgtgctgtttctgactcctaatgagagttccttccagaccgttacgtgtctcctggccaagccccaggaaggaaatgatgcagctctggctccttgtctcccaggctgatcctttattcagaataccacaaagaaaggacattcagctcaaggctccctgccgtgttgaagagttctgactgcacaaaccagcttctgggtttttctggaatgaataccctcatatctgtcctgatgtgatatgtctgagactgaatgcgggaggttcaatgtgaagctgtgtgtggggtcaaagt

SEQ ID NO: 635995 - DNA, 989 bp, Homo sapiens
ggtctgatgcttgacgtattatctgagcttttatagcatatctctaggaacgtgacagtcgatgtgaggtctcgtgatccgatgtcagtgtgctgttctggtcggtcggtacggcgtggtaggtatactcaggtccatcagtacgactaagcggtggacgtatcagtggagttgcatgagaacggaataagctatggcttaatctcgtagcgcatcccagtgaatgattggactccttggagcggttatattagacaatgcgtgtaaggctataggctcttgcgatgtggaatagcctgctcacgcttatactccatgctgcgaatcctaagttctgatggatcttctcgatgaaacaaatttctcctgtatccaatatgaggatttgacaccaggtcaagcgcagtggtaggatcaagcgacagaaggcgctgatgaagagtacaatacgactcagtaccacccccatgtactcttgggagagctgctgctatgccctattggtgactttttcgtcccatcaagcttatggctcgacttgcgaggctgtagatggacggagttccatggtagaccaagcttgcacatggactgggtagatggaacactcatggtcgcgtagaaacgtatcttgcagtatacccatgaaatcagaacacgctagatttatagtcgcttagtcccaagctatatactgatactccttcgtggtaatagggcagcgacagagaagcgcgaaaccaagtgtaaacatcaagcccccgttgacgttatccattaccgttgcatgtgggtggacgtcaccaaatttacgcttggggtgccacgaaagcgccaagggtgagcttgcgtgtaggaattacatgaacgtgtaattgtccggggaaattgacgtccagttcctttttggggggttggcaagcaagattttgttcggacggaacttctttgcatggacggggattcgcagcttaaccataacgaacaat

SEQ ID NO: 635996 - DNA, 429 bp, Homo sapiens
cgtggttgtcctaggacgttcgttgtacgcgcactgtgttgatagtgagaccccgattcctatgtgggccacgtttgaatcgtgggagtccgcatgtgtattgattgctcatggtttcccccgcagtcttggcccccacctttcccgtgtgcgatctctggagctggatgactggcctcctttgcacaggaaggtcatgtcatctattgtcaatgacctaacaaacagcatctgggaagggagcagccaggggcagacaaaaccctcagaaaagtccacgagggaagagaaggaacagtggatccgttccaaatatgaggagaagctctttctggccccactaccctgcactgagctgtccctgggccagcagctgctgcgggccaccgctgatgaggacctgcagacagccatcctgctgctggcaca

SEQ ID NO: 635997 - DNA, 322 bp, Homo sapiens
  misc_feature (97)..(97): n is a, c, g, or t
  misc_feature (120)..(120): n is a, c, g, or t
  misc_feature (161)..(161): n is a, c, g, or t
gggcaattttttgcacccccccccggggccccaaaaagcatgggttgtaagggggttcctccccttggcccccagcttgggcaaccccgggccgggntgccacccctttgtttctaaggngggggacccagttggtttccccttgttttttcccccggcangggggggtttaagggggcccccaccctggtcaaaaaccccagatttttttggtccctccccccttgggggccctgaagtccttgggccagttttccaggaagggggggtttcccatttttgggtttttttggggaaaaaaaacatgatttttgtttcccta

SEQ ID NO: 635998 - DNA, 141 bp, Homo sapiens
gtatacgtcgaggggtaagaacgtaagaagaaggcactgaccgacttacaagaagctgcgggcctactttgtggaggaggatggagcattccctgcaggaaagctgacaaggaggaggagctcctctgaagtactagctgg

SEQ ID NO: 635999 - DNA, 180 bp, Homo sapiens
taaatctggccacatcttctacaattgagctgcgtgtggctcccgaggagcaccccgtgctgctgaccgaggccccccgtgaacccctagggcaaccgcgaggcaagatgaccctacgatcaggtttgagcacctatcgacacccctgtcgcatgtatcgttgcttatccatggctcgtg

SEQ ID NO: 636000 - DNA, 1667 bp, Homo sapiens
  misc_feature (718)..(718): n is a, c, g, or t
  misc_feature (1406)..(1406): n is a, c, g, or t
tctgttcgctgcgaagtatcagcatgttgctgtgggggcgccccctctttagctgtgtctgcggcgcgggtttgatggataggaccacacatgggggggggggttattattgctccccctcgttcgttgatggtggcgagtcgcgctcacttgcttcttttttagactgctgccccccaacagctgggttgtttgttgtcgccgcccgccccgacgaagtaatgatgtgtttcgtcgtgccctcgttcgtcgaactacaacaaggcggctgtgcttctattaattgtatgtttttggtaggcagcgaggaggattgctatgtcatcacgtttgctgtttgtggtctctctccgcgcgtcctgtttattgtttgttctgttcgattgacgcccccccccccccgctgctggcgatgtatgtttgtggtttttgctcccccccaccatacgtcttttgtggtcgtcgtctttttggtgacgacagggcgggtgtctcttttgtttgtgctcagctgtcctcagtcatattgttggtgttttgagtctgctcccagctacctactggggggggccgccttctcactttcggaaggatgtaagtgatgtgtgcctcgtccgaagaagaagatatagttgctgggggtcaccaccaccggcgggtgtttattattgatgagatcattaatgtttggggcggtgatgttttatactccccccgntggttattacagcagcaggaggtcgccgacaacaacaaggggggacgatataataaaaggcaggtgttgttgatatcaactacacggggggtgcccctacacctcgttgagacaaccccacacgacgacattctgtgtgtgtagagagagagtagagtgttgcagagaagagagtacgggggttgttctcctctgcccttgtgtggtgcacaccacacatgtatccctcgcagagtatagtagtggtgagaagagtgtgttctcacaacgcgctgagagagaagagtgtggagtagagaattcctgcgctgtgtttgctcccacaactgtgtgtgccaccacagctcgggtgggggagaccactgtgtgtgtgtctctcttctctattacactctctctgtgtggttgctgctgctgggggtttttttctgttgtgtgttttgttatagtacatgaggtggcgcgcccgctcatcactctcctctctttctctcagacaccccctctgttatctctgtggggagtgtgttttttgtgtgtgtgtgtagacacagtgtgcgccccctcatctctctctctctctctcacacactgtgttttgtgccgtctgtttgtagattatctctctctctgtgtgtgtgtgtgtgtgtgtgtgtgtgtgtgtgtgtgtgtgtgtgtgtgtgtgtgntgtgttctcttcatgagaatactggcccagcagtggccacataaatatttctccacacccagagagagagaaagacttgtgtgggtcgccacacacaagactctggaagagaatgtgaatttctccaagatgatttgtccacacagtgggaaacgggacaccagagagaggttatataccaggaggtgattttgatgttgcacccttcaggagaccaatttttttcgcccaggttaataaattgtgaaataatccacccca

SEQ ID NO: 636001 - DNA, 215 bp, Homo sapiens
aaggtatcacccatgtgcctgataaaatacgcaccaaagtaaatacaaaccagacgcagaagtggagggctcgggagggagggttaatccagcaggagggaggccgagctgggggtgcaggccgcacagggggtgccatggagcacggtttggacggctggcctcacaggtggcagtgcaggtgtcaggctggagtgcaaggatgtcccagacag

SEQ ID NO: 636002 - DNA, 121 bp, Homo sapiens
gtgtgacccacacagagttgagtggcctgctaatgatcaggcgtgtgttaatgcagcagcacatagtcccctccctgaagcacggctgagcgaaatgtgcgtctctggcctggaagcccct

SEQ ID NO: 636003 - DNA, 390 bp, Homo sapiens
aacagctcattcaggacttgatagagtgttacatacactttagtcataaaacttagtgttcatcattcatcttaccaatgctacagttctttgtcattggactgaaaaatcccaaatccttcactttactactcctagtctttgggaagtagttagatatgcctcttctttaacttggaggtgtacaaaatttacttcttggtgtttagtgaattaatgtgaatatttttacttcacaaaactttcccaaaaagtattaaaaaggaaccttagcacatttattttattaaaacaagaaaacccaaaatatataaaccttttcttattatgataataagcttatatatgtgaataagttataacctagtgtataaaaaattatttctaaca

SEQ ID NO: 636004 - DNA, 270 bp, Homo sapiens
  misc_feature (11)..(11): n is a, c, g, or t
  misc_feature (26)..(26): n is a, c, g, or t
  misc_feature (41)..(41): n is a, c, g, or t
  misc_feature (99)..(99): n is a, c, g, or t
  misc_feature (144)..(144): n is a, c, g, or t
  misc_feature (155)..(155): n is a, c, g, or t
  misc_feature (185)..(185): n is a, c, g, or t
  misc_feature (211)..(211): n is a, c, g, or t
  misc_feature (221)..(221): n is a, c, g, or t
ctggttttttntatttttagtagagncggggtttcaccatntgggccaggctggtctcgaactcctgacttcaggtaatctatctgcctcagccatctnaagtgctgggattacaggtgtgagccactgcacccagctcatagnatcttttttangttttatttaggccactgtcattttgggtntctgtgacctgtagttgaacttaatnctaataatgnactaatagctttctccagaagattaaatgagatactgtgtgcaacttga

SEQ ID NO: 636005 - DNA, 218 bp, Homo sapiens
ttagccttacgatcaaatcttaaatggcaccttagtgaagctcaacaaggcttcaataaccatgctgaggatagtagagccatatatagcatgagaggtacccatatctgaagtccgtcacttaactgatctaccagcgtggttctaggcacactcaataagacgcgcattgctttgacaagatcacgctctgattagaacaatctcgggtaccgagc

SEQ ID NO: 636006 - DNA, 254 bp, Homo sapiens
  misc_feature (13)..(13): n is a, c, g, or t
  misc_feature (149)..(149): n is a, c, g, or t
  misc_feature (151)..(151): n is a, c, g, or t
  misc_feature (157)..(157): n is a, c, g, or t
  misc_feature (159)..(159): n is a, c, g, or t
  misc_feature (174)..(174): n is a, c, g, or t
  misc_feature (183)..(183): n is a, c, g, or t
  misc_feature (194)..(194): n is a, c, g, or t
  misc_feature (216)..(216): n is a, c, g, or t
  misc_feature (231)..(231): n is a, c, g, or t
ccggtgcaagttnaccagcagcagaggacttgggaacccgatgaagaggagggaactttccgcagctccatccgccgtctgtccacccgcagcggtagaaacacctggagcgatggaatccggccaggactcccctggcacctgacatntnccacgntncacctgcggggccancggcccctncgcggcccttncccagccctgccccggagactncccctgccgcaaganttccaataaaacgtgcgttctct

SEQ ID NO: 636007 - DNA, 1187 bp, Homo sapiens
gcaggccatggcccttccatggaggattcctctgctgtcctcatggaaagcctaaagtctatctggtccagttccatgatgcatcctggaccttctgcctctggagcagctgttaatgcagcattaagcagaaacagcaacggggcaacaaggcaccatgaaccctcacacactgaggccaaagtggcaacttggaatgaaggctccataaaccatggcatgttgggttagcagggactggaccacacagtaccccttgcaggtggacagaccatcttatctgttatctcgctgtcaagagggatgtaagtataccaccaggcccgctgagtgtgcacgaacaatgtacgcacgagcaacaaaaaagaaaaaatccatcaggaactactacacggaccccccggggaccatccggacgggagaagagagaggaaaatgaatgaaaatctcagatcagaaacgtagagaatcaagacgagcatctccaacattcagccaatcgttacaatgtcaccaaagacacaatgggaagctgaaaagcatgaaaaagagggaagagaagatagggaaaaaagcacaaaaagggaacacacacaaacaacaaaaaacgacataagagagagacataagacaggaaatccagaaaaacggacaaaggacaaagcacagaacggagccaagagacagagaagaaaaacacaaaaacagcaaacaaacacagaagacacaagagaacaaaagtaaaaaagaagaacaacaaaataaacaaaaacaaagagaaccaaaaaagaggacgaaggcaacagaagagaaagagaaaaacaagaaagaaaagccaagaagaacacaagaacacagaaaaaaaaaaaagaagaagaaagagacgagaaaaaagaaacacaaaagaaaaacgaaagccagcacacgaggaaaaacaagagacaaaaaagagaaaaggaaaggcacaagagaacaagcaaagacaggaaagacaaaacaaaagaagacagaagcaagagagcaaagagaaccagaaaaaagcagagaacaagagaaagaaagaaacaagaagaaaaagaaaaaaagaagagacaaagaaaaacagaaaagagagaagacagaaagagagaaacaacaaagcgaggcaaacaacgaaaaacaaggacaacaggaaaaggatctgcaca

SEQ ID NO: 636008 - DNA, 702 bp, Homo sapiens
  misc_feature (352)..(352): n is a, c, g, or t
agcgggagaaatgccccgatggctctccggggcacacgagaagcgcaggcgctagcgggattgggatggcagtcagccatcgagtaggcggccgtttaggcagcaatatccgcaacaagtgtagacaaggtcccggcttgactccgtctctggtaacagtccttttgaagaagatggacctggtgaggggcggctggtctgtgggagacacgtagtctcctatcctactcgaccgactggtaagcggaactggttggccctgtggctggacgggaccctgggatactagctacggatgagacagcgcaggaccgaggaggaccgtgatgcatcgtccatcttcaaatgtccngtgacactaaatgatccggaccacgagtgcccatgactgtgcaaggcacccagagggccaggagccgagagtggccgtgctgactgtgaacctacgggaaggcgggcggctgcagcactcgtgtgactggagagcaaaggatgatgcgcctagcgtggacagacaggcactgccggaggcgaaagtccacaccctggggcagcgtcatacgagcgccgtaccaacgactacgtacgagagtggtagacccacctaatgcacatcgaagggcgacgtatggtccgcacgctactacaggaccgaccatacgcaggcgctggcgatgacggcacgtgatagtgccgggcagg

SEQ ID NO: 636009 - DNA, 1340 bp, Homo sapiens
  misc_feature (218)..(218): n is a, c, g, or t
ggcaggagctgacaagcaggcaacccaaattcgcagaggtctgacaagcgtgcggcatcagataccgcacgtcctgctcagagtacgacaaagcccgaggagggccaggtcggacctgggcgtcaactcgcgaactcctagactgctcctcatgattccttcgtagtcctacggcccactggactgcgtatgtcctgtgggaccccatgacgcgccgncgaggaccgtcgacttgatcgaagcgcgtggctcggccgctatgggggactcctcacgtaccacgattcgggcgtcgacccacctcgacacgctggtgggcgcagggagcgcagtttgccatgttgcggctgatcgtcccattctcagactatttaccacaccgttgaatttgacacgtgtagccaaagggaagagcaacgcgtgccaagagcattgacttctacactagaatcagactcttgggtccgggatcgtataagggattcgggaccccgggggtcggcgcatcgggcttgtggagcatcgggcaagaccatgcgatgggagctgcagcgcatatcacgcaaatcagagcaggtaggttcctgcagcgcaagtgtggggtccaacgtctcgtgacaagggttggtcctcgggccatatcgcagagggacacagggcctcaatgcaaagggttcgtgtaaggctttccggcgccggtccattttgccttcgtggagggaagggcaaccgccttctggtgacttccaaaacctaaaggccccaacaggagcacgccaggctgggccctccggaacctttgtcgataggcgttgggggaagtcgttagggaggcgaaaagaggttggcgcgttgtggagggggccaggatattgtcaaaaaggggagaggcttttggaaaaagagcgggacttggcggaaaattaaacccgtaagggcaaaaaagtggcaaaggggtttgggaaccctttgggaattacagggcttgggttgttccaagagggccttccgggggcttgggaaaagggggaaccccttgagggcagagggcttgccatgggcacttgggcaaagcttcccaaaaggtgacagggccccggtgacaccttggaaggaccaacctagggattccttccaatgtaggacgaaaaaaggcgggccacaggagcttgtgggaatggagggcgagaaggctgtaggatttgggaatactatggaggggggggcccagaggggtggggaccaaaaggcttttggaatggggaaagccccttaaggggatggaagagggccacaagaaaagggcaaacgttttacacgggattgacgatttgcttagg

SEQ ID NO: 636010 - DNA, 376 bp, Homo sapiens
  misc_feature (327)..(327): n is a, c, g, or t
  misc_feature (354)..(354): n is a, c, g, or t
gagcggccgcccgggcaggtacttttgaaagctacattaaaaaaatgcacttttaggccaggtgcggtggctcatgcttataatcccagcactttgggaggccgaggtgggcggatcacctgaggtcaggagttcaagaccagcctggccaacatggtgaaaccccgtctctacaaaaatacaaaaatgatggtaggtgcctgtaatcccagctactcgggaggctgaggcaggagaatcgcttgaacctgggaggcagaggttgcagtgagccgaaactgagccactgaactccagcctgggtgaaagagcaagactccgactcanaaagaaaaaaaaagaaaaatgtatttnttaagtgaatcagctgacaagg

SEQ ID NO: 636011 - DNA, 250 bp, Homo sapiens
tctcgaggacctccaataaattgttggtcattgatacacggctagaggaacagttcacccagtacgatattgagcaaattagcggtttatcgagtgcatatgctgttcgtatgtacgaactgctgatttgttggcgtagcacaggcaaaacaccaattattgagctagacgagtttagaaagcgaataggtgttttagatactgaatacactagatcaatgaccaacaatttattggagatcctctagac

SEQ ID NO: 636012 - DNA, 662 bp, Homo sapiens
  misc_feature (231)..(231): n is a, c, g, or t
  misc_feature (375)..(375): n is a, c, g, or t
gtttttcaaaagtataaataaagtgtgagtacctgttttcaaatttgtattatctctttggagtaaagtctgacaagtagaattgttgcagtgaagagtctgcacatcttatgtttgatacttcttgtcagatagccctttcgagaagttgtgctattttatataccccggaaaaaacacaaagtgtgtgtttctcctaaccatgtcaatgcatgtgtttgatcaattttnagagatctttgccagtctgatagatgaaaatcatttcattattgtttaatttgccttctgaatatttgtgaattgaacatttttccatgtttgttgaccatttgcatttttaatttatctgtgacttatacccattatttctantagattgttaatttttcttgatttatgtaagctcttttattattgtgtggatattaaccctttgcctttggacagtattgttaatattttcctgagtttgtcatttgtctttcaactttgtgtatgatttttttgccacacagaagttttcaattgtactcaacattatttatcattatttttcccctgtattattttacttttgtgttttaaagtgttcacatgtaaatttttagcctgtctaatttatttggtgcaatgaggtaaggatttaatattttcttgct

SEQ ID NO: 636013 - DNA, 417 bp, Homo sapiens
cacacattcatggctcttccaacatctcatctctccttccaacatctcatcgccccttccaacatctcatcccccttccaacatctcattgctccttccaacatctcatgcctccttccaacatctcatgggccccttccgacatctcatagctccttccaacattcatcgctccttccaacatctcatcgcaccttccaacatctcatcactccttccaacatctcattccgccttccaacacctcatacccccttccaacatctcatcactccttccaacatctcatcactccttccaacatctcatcgcaccttccaacatctcatacccccttccaacatctcatatctccttccaacatctcatatttccttccaacatctcatcgctccttccaacatctcattgctcctt

SEQ ID NO: 636014 - DNA, 852 bp, Homo sapiens
  misc_feature (551)..(551): n is a, c, g, or t
tggaaggtcggaaagcttctttatgggggggaggggcccggcccccaaatttctgaccccaaaaacaaaccccaaaagggcagttgcaaacggggattggtgtggttgaccagggcctgtgtgtgtgggcggggacgggggcccagggacgccatccgcctcagactctctggcccttctggtggcaaggggctatgtgcgccccgggctcaggcttgcagagaagcgtgttgagaagggctgtgtgtaggctggatctcccggtgtcagaacagctattctggacgcacctggtgatgtcgcccagtctctattctggaccgccgaaattttgcgccgtctccaggtgtgttcttggcacgccatctggtgtctgagacccctgttctggggggcgtgccctcacaaatgtccggtgtgggagaatggtgggtctcaacattgcggtggctttgggttctccccaatcacatgtcttcttcgaccaagtgtccggggctgggagatttctcacatcccccttgtgggcggcgataattctccacaagagncgacatgttttggtccccaatgagacccggtgggatgagaaaacacgcagaagaacccaccttgtttctgggcagaatgcgacagggtgttgagattgtgtttgcgccctgtggtacagtctcttgagaatgggtaagatggggcgccggggtacctcctctttgggatccctggttcccttgggggccatggtggggcattgcccccgggggggggaccttgggcggggacagaaatctctggccaattaaagaagcggtggatttctctggaggcctctgggaccccttgctctgagag

SEQ ID NO: 636015 - DNA, 1064 bp, Homo sapiens
  misc_feature (19)..(19): n is a, c, g, or t
  misc_feature (32)..(32): n is a, c, g, or t
  misc_feature (48)..(48): n is a, c, g, or t
  misc_feature (163)..(163): n is a, c, g, or t
  misc_feature (172)..(172): n is a, c, g, or t
  misc_feature (405)..(405): n is a, c, g, or t
  misc_feature (415)..(415): n is a, c, g, or t
  misc_feature (716)..(716): n is a, c, g, or t
tttcttttcctccgctccnacgcgaggaagcncgccgcccatcttgangattaaggattacacccggcgtgactgtcacgccacatatcatagcgccccggcgcacaacactatcgcccgcaccgcagaagacgcaggacgaggcgggcgccgcgccgccgcnaccaccacncataaccacccgatcaggccaatacacaggcgcgacaacgctatatataaatgttacgaattatagactagaagcttagcagcgtgtagctgaaaccgtgctcgcgcgcagctccgctatttatgctctactcgctcccctagcacaaataggagagcgtccatgaaaccatatgtgtcaataacaaggctttcaaacgcatcatcgcggtcgaggcggtccggcgagtaganataatataanataaaatacaagcgtcaacgcaacgctcacatgcactacctaacgactcgtttctaactccttctccgtgcgagtcatagtatggtggggatccaagataatatgatagaatattttattatattgtgtcatgtctgtgctctctgcgcctagtacgtagcgacatagaaggtccgttcgcacgttgtcgtaactatcatacgcgacttaacagacatacataccgtagtgaggtcatgcacacctaggataacgaactagtatcgacattacgatcgacgtaagattctacaacttcttntacttacacgtttttatgatattctactgggtactagatattcgaactaccgataataggactagacaagattaatgtgaaagatatagtaaggtaattggtgaagaagtagatgaatagggaggatgtggtagggtgggaggatagtaagaggtgtattaaatgtgtaagaggtagtaaagttgaataggagatgagggtagagaaggtgaatgagagagagtctgtgcttgcttgtcggcgcgccacttctattagtacctctttcattagtagattttgatatatcacacactcatggcactaggtattaatataagataactctgcaccactcaaactacagct

SEQ ID NO: 636016 - DNA, 515 bp, Homo sapiens
  misc_feature (1)..(1): n is a, c, g, or t
ngggttgttttcttctaaaacctaaggcctaatttttgaagctaggggtgttcaaaggcaatgattttcttcattggaaccccccggggcgtgatggtttcccaccaccaaggcgttttgcaaaactaaatccaaaaaggactctcctaaaatgtcaaggccaacacgagagtgagggtgggtggattaataaacccaatagtggaggggattgggggggaaagccgcccggtttggagggagagtaccaaatggaggaggattaaacgcaagagaaaaggaactttggagaaggaaacggataattggagtaaggaagcgtatagtaggccatgtgaaggaaaaggacggtaagaaaatgtagagagagggaaggatgcagggaaagtgccctgggtgttgtggcaacggacaaaggctatggataaagggcaaaacatcctggaataggtgaaacagagatattattctcccctgtcctctgttgtctttgtcttttcacgtcttaataaaag

SEQ ID NO: 636017 - DNA, 356 bp, Homo sapiens
cgctgccgggcgctgtggaatccatcaatgtgttggaatgcgactgcgccggcgcttggaacggcggaagccgtggatagatgcgcttccaggcatcatcgtactcgcgctgatacgccaagagcttctgaacgcgttgcgcttccatgcgcacctggagttccgcgatgtgtcgtcgttcgctgtccgtgcgcgcctcggagccgagcgcggtgagcggatcgagattggggctgtagagtcccaacggcccgtgcatcaactgccggtatcgtgcccactcctcacgtgtaaggccccagtcacgtgcggtctgagctgagaggtcctgttccgccgaaggacgttgtgtcgtg

SEQ ID NO: 636018 - DNA, 506 bp, Homo sapiens
acatacctcaccatgtttgagtgttcttctggcttccggggattgaacccagggccttgtgagggctcagcacagtctacaactgacagagaaaggcagacctctcagaggaagaagtgatgattcctggaagaagtaacaggtatactaagataaaatgtgtaagcagaagttagacacgggaaagtcagtagaatatgagttcaggtggggctcacaatgaaaagtgaaggttagaattaacaaaataaaaataagtccaaacacagcttacaagagaaaataaggtatattgctgaggttaaaagcatccagcccatctctgtctggtgcagttaccatcttcaatggccgtgcagtccacattagtaagtttagactgtattttaggagaacgggggaccttgcccttcctcatgagaaatcattttggtgtatgatgtgaaaacagaagacagtaaagaaacacggaaggaagcagctatgggttaagagtcaggaaggag

SEQ ID NO: 636019 - DNA, 297 bp, Homo sapiens
tctgggttgtggtgtgtctgtgctgtgaattgtattctgcttcaaagtgtgggacgtttcacaggatgagaatggtcaagatagtgagaccaaatgcctatatcgattcaaagaagtgggagatccatgaaagtttcccgtacgaggcgtgggggcccaatcccattaccacagtctcgcctctgggctcacgacactagtaaattaatatgacggattcaaggaacgagacccctaaccttggaaagcagctgcatgaaaattcgatcctggctttcacgaagccatgcaggtgac

SEQ ID NO: 636020 - DNA, 660 bp, Homo sapiens
  misc_feature (655)..(655): n is a, c, g, or t
acctcctaccccacgtgctaaaagtataatatgcctaaaagaaaacattggccacactttcatgacatcagattgggcaatgctttctgggatgtgacaccaaaagcataggcaacaaaagaaaattagattccttggattacatctaaatgacagacacttttgtacatcaaaaaacactgtgaactgagtgaaaagataacccgtggattaggaaaaatatttgcaaatcatatatctgaaaagaggctgatatccatcatatataaagaacagccagaactaaacaacaagaaacccaaagcatcccattaacaatggtcagaagatttgagtagacatgtccctaaagaagatatagcaatggccaataaacatctaaagtgatgttcaaatcactaatcatagggaagcacaaatcaaaccaataatgtgataccacacattaggatggatatgataaacaagcattggtgaaacgagagggaagtaggaatgctcgaatatgattggagggaatgtaaaccatgaaggaacagggaaaatagtatggcgtgtactggaaaaattagaaacagaatcatcagatgttcccgcagttgcacttgtgggttcctaccaaaaagattaagagccaggggtggaagagatcggngggag

SEQ ID NO: 636021 - DNA, 214 bp, Homo sapiens
  misc_feature (27)..(27): n is a, c, g, or t
  misc_feature (76)..(76): n is a, c, g, or t
  misc_feature (147)..(147): n is a, c, g, or t
  misc_feature (153)..(153): n is a, c, g, or t
  misc_feature (174)..(174): n is a, c, g, or t
gtggactctcactcctcccccgacgtnaaggcctccctgtctctccgggcagctctgagtcccagggcagactggnacatctccaggaaaccagggccatctgggcaggaggcctggggatgagggtggggggggacccaggttccngagganagtgaagcaacagcccagctngaagggcgtcttctgcggagaaataaagtcacttttgagt

SEQ ID NO: 636022 - DNA, 350 bp, Homo sapiens
aggtctcttacttaaaaacaaaacaaatgcacatgggaaactatctcctctgagaagtcttcctttacccgtgcgtcaataaacattcccttctgtgttacctctgcacttggtatattagcaccctgagttgtgtctatcagctccaaggagcagagtttccagccaggcacagtggctcatgcctgtaatcccagcactttgggaggccaaggtgggtggatcacctgaggtagggagttcgagaccagcctgaccaacgtggagaaaccaaatctctactaaaaacattagccaggcatggtggcgcatgcctgtaatcccagctacttgagaagctgtggcggacg

SEQ ID NO: 636023 - DNA, 477 bp, Homo sapiens
ggaacggggggccccacaacttgggaagaattccgcaaatggtttactcagcatacctttcttcagcaatcctgttgtctggacctgaccacgtcatacaataacctggctacgtatgtcttccttcatacggtgaaagggacaccttttagactcctgaccaaggaaaggctcggctactgcacactgggagcaaatggactatgggctccagtttacctcttcccgcaagttcctcagcatctctcctaatgtgctttattttctggccaacttttaaaacaaagaataatctgggcactttctcaacaaacacaccccaattgttaagtgtactgctcccaaagttgccccagttccatggggttcgtgtttttggcatcaccaaatactgagggatgggttttggaacagctccatgggcatggggaaggcactgaaacagaggactataaaacatccttctcttattctcca

SEQ ID NO: 636024 - DNA, 436 bp, Homo sapiens
ctctagagtacccccccaaggaatccaatcttactccccttgaatacaggcagagtgaagtgcaatgtaagacaagttaataaaaaagcctacctgcatactgagcagtaattttaatagatcgataacatgcttaatataatttaatgtcttataaactacgaacagcttgtcactttatctatgatctcaggaattgtgctgacacgaatatctccatcatacagtctccatttacaatttaaaataaaaacgtccgctaggctgacctatatctgccaaaactttttaggtttacatctatggtcaagtacatatacaaccatcagatgcgtctctgttggactgaaaaggtcaggacaaactttgattcttgtctaaatgcgatcctagttttttggaatgaaatgctgtttctagaacgcaacatgatagt

SEQ ID NO: 636025 - DNA, 239 bp, Homo sapiens
ctgctggtcgtaactctagaggtatccccgcacgctctctctgtgggggggcgatcagactgacctggcgcaggatctgctgccggctgttccctggtatcattgttgtcattttagtgtcacaccaagcttgtccagcccagcttattttgttgttgttctattttgttttgttttaggcttttagcagcctgaagacattgtttttacgtttctgtctgtccccacagagagagcgt

SEQ ID NO: 636026 - DNA, 472 bp, Homo sapiens
cttgagaaatgatgtgcatctccaaactgccagctgtcctcctcatcctctctgtggcactgaaccacttgagagctacacctgtcagaagtggtagcaaccctcagatggacaaaccgaagttccaacacggccacgtgtgccacacaacgcctggcaaactttttggttcgttccagcaacaaccttggtccagtcctcccaccaaccaacgtgggatcgaatacatatggcaagaggaatgcggcaggggatccaaatagggaatccttggatttcttactcgtttaaagtcaatgtacttctgcagcacttaatactttatgtgtaaatgctctggtgatttcctgaatattaacagtacctttttcattcccccctcagtgagaatgcacaatgtgcttgtgcttgatgactgtgtgtgtaaattctcatgctaagaattgctttaaactgagtattgatcaaaaaa

SEQ ID NO: 636027 - DNA, 432 bp, Homo sapiens
gcacctgcccactccccttcgtgagcactgtgattatgcgatcgtcctccccaagcttgtgtgtgcgcaggacaacggcataatcgcggtacagttttaccaacaatccccctgtgaattagatcacccataatgcaaaatctgtgtctcagtttgcataaaagacagtattaggcgaacaatgctatttgtgtcatacccatcataaagacacgtcgcgtcaactggcgacgcgacccacctaatcctggaaggaaagaccgcatgagcgagcacctagatgccgtcagccggtccgaacaacccaacaaggtaaaaacgttttttgggcacccgtttgggctaacgacaatcttctttaccgagatgtgggagcgctttagttactattccatgcgcgcgatcctgctctacttcttggtagatacagtt

SEQ ID NO: 636028 - DNA, 329 bp, Homo sapiens
ttttagtagagtcggagtttcgccatgttggccaggctgatctcgaactcctgacctcagatgatccacctgtctcggcttcccaaagtgctgggattacaggcaagagccaccgggcccagccaaaatttctttaaaagctatctctaccaaaaatacaaaaattagccagcatggtggtgcatgcctgtaatcccagctcctcgggaggctgaggcaggagaatcgcttgaacccaggaggcggacgttaaatacagagtagttattaaaggcaactgatttgtacactgaacacttttcaaagtgcaaagcgccatttgccctctg

SEQ ID NO: 636029 - DNA, 445 bp, Homo sapiens
  misc_feature (352)..(352): n is a, c, g, or t
  misc_feature (381)..(381): n is a, c, g, or t
  misc_feature (403)..(403): n is a, c, g, or t
  misc_feature (434)..(434): n is a, c, g, or t
tgagatagtcttgctctattgcccaagccaaagtatagtggcaccatctctgctcactgcaacttccgcctcttgagttcaagcaattctcatgcctgagcctcccaagtagctgggattacaggcacctgccaccacgcccagttaatttttgtatttttagtagggatggggctttaccatgttggccaggatggtctcgaactcctgtcctcaggtgatctgcccgcctcggcctcccaaagtgctgggatcacagccgtgagcaccgtgcccagccaagtgtgcatgttttcaatcttctccctgttcttgatgctcagagttggacaactacacaaacactggcaangggcttttgcttttttgttcccgatgggnatcttcacaagggtttccctantgcaggcattttgttttttaggacattttancaaccttagtg

SEQ ID NO: 636030 - DNA, 265 bp, Homo sapiens
agtatccggcacggacactttcgtcaagataaactcctatcatgaaaacgctcccacgtcaaaatagtttaactcacccactggcttcactctggccagtagcaaggtctggcaactcgggcattgggcaaaggggattaataataagagaaacccgggactctggcatcaaatggatggacattcaccacttatcacatatttgctatcggaaccaagatactaaaactaacggaaactggcacaaaccgatctcggtggaggt

SEQ ID NO: 636031 - DNA, 1825 bp, Homo sapiens
ggacgtcgttggtatagtgaaatccagtgaattcacatatgaattctgatcccatgggcaaaaaaaaaaaaaaaaaaaaaaaaaaaaaaaaaaaaaaaaaaaaaaaaaaaaacaaaaaaaaaagaagacaagagagcgagagcgacaccccaaagaacgaccaacaaagatacagcgaacaacagatagcacgcaacgaccccactcccatgagcgcacagacggatgcgcacatgggcagcgagatagtactcacacgcaggccggccagagagagaagcgaggagagacagcagagcagcagccgagcggagccaacgccaaggaaaacgagagagaggaacaaaagggaagagagaagaagaaagccagagcagcaacgagagggcgagaggcacaccgaaaggagaggaaacacgcacagcgaagaaaagaaggatatgttcactactcatacgctagtgacttgtattcttcactcctttacacctctactgaatgaccgaaccagagccgtgaatctatctgatactagagtgagcgcctcactacttctgtttgtctacgtatagaattgcctaatcgtacaattgctacaccaccactcaatgtagagcaaaataagcataagaacacatagcgtgacgctgacagcgagtggcgagagtatcgagccagacggcgcacagcgcgcggacgactgaggaaaacgacagggaaagagacaaacggaaggagcaagagggacgcgcaaaggcaacgggagcaagcagagcgctagaggggggagaaggggcgaggcacggagagagaagaacgaacgagaactgggacgcgacagagcgagcacagaccagagggaagcgcggaggcagaagcgaacggagacgaagacacgagacgaggacggcgcgcgcagacaggagacacaagcgaatgacgagcacggcgtcggaaagcgacggcgcaggcagggaggaggacgacgcgcagagaacgagagagcgacggagagaccaggccgcaagcggacgagagagggggagcagacagagaacagcaacagcagaagaggggaaaggggagcgcaagaccgcgaaggacgagaaggagagggacacaggagcggaaaggagggagagaggcggaagcaagacagagaacggagagaccaaagcaacgaaggcagacgacacaagagagagacgacgacgaaaaggacacaaaacgcaggacgggatcaaacaaagagcagggagcgcgcgagaagaagcggaccaggagggagagagggagcgtcggagagagaaaaaacgagaaaggagcgaacacgaagcggagacagggacaagcagaatgacgggcgaggcacgcaccagcgaggaagcacagcgcgtaagagaacaacagcgcgcaaggagagacagccacggacagaagagcgagcagagagacagatcagagggaccagcggcggcagagaacccagagagcagagagacaggagacgagggggcagaggcgagtgagagaaagagagcagatggagagcgaagaagagacaaggagagagagggagagaggtggagagatgatgaggaacagcagtgcagcgggagagggagaggagagatcacaggtagagagtaagggaagagaagcgacgagaacgaagagagagcaagtggaggaagggaggacgaggagtagcaaggaacgggaaggaggaaagcgtgagaacgagaaggacgagagcacgcgcgcagaggaaaaagaacagacataaagcagaagaatgaggcaggacgaagaagaagcgaaagac

SEQ ID NO: 636032 - DNA, 1056 bp, Homo sapiens
cgaggatgagtggcccgggctgtccgtgaccaatgaggagatctttggcagtgatgctgattctgaggacgatgcctgactctattatgaggacagaggacaggcccaagtgctggctagtgactaatgattcagacagcggctagcatatgggggtggccagccggtatcctggagcctgcgagtgcgcagctgccagtcccttccccagtgtggatcgatcactcggcccaggaaggatcggccaagtgattgcatgcaagccttctgacttccatgtgaaagctgatagtgacacgtgactttgacgatcccagggcgattcaggggcgtggcttcaagactgcctattaattgtcgagcagctaaaagcaatcttttctaagtggtcgtgtatgtgagcctttcagcttgttgtggttccccacgacccaaacactttgcatgttaagtaaagtcaaaccttctcttttatacacaacaatacaatacaacggagatgataggaccagaagatttccctgggggtggtgctctttgtcgtgggcgtgcccgtgaacatacatcagtgccattttagattgcggccctgggtgtttgattgcttggtttttcctgtgcccccactcgtgtttttgttcgccagccgtggtgatgaccggaccgggtttgcctgatatcaaggtgatccacggaatcatggtttgagaaattacctggcgtaaaccgccgtggttaggaaacaggccgcgggcgactcgtgaaagaaaactttagaacgcttgtggaagacctttgggcgtccacgtccaccattctgctctgataaaacttggaactcttgactccaggaaccggatgacagtgggccccacatgttggttttgaccatctaaatccctgaaggtgataacgacagagaatcccaagtgggtgtccctttggacagaattcccggttactgggttgtctcggcaaaaatgggggtcttgggaccagggcgggttccgctaccagaaactaccatttaacgggagtgggaaaccttgtatagct

SEQ ID NO: 636033 - DNA, 735 bp, Homo sapiens
  misc_feature (592)..(592): n is a, c, g, or t
  misc_feature (645)..(645): n is a, c, g, or t
  misc_feature (659)..(660): n is a, c, g, or t
  misc_feature (671)..(671): n is a, c, g, or t
  misc_feature (706)..(706): n is a, c, g, or t
  misc_feature (712)..(712): n is a, c, g, or t
atacgttgtaaccagcggccagttaaattgagtacggctctctataggtaatatgggtgtccgagctccccccagagcatgggtatttcaataatagctcaagagatgtcgagcagacagagaatattcagttgtattagattcgtgactataatgagttagacccactgatagatattccatagtcataggtcgcgctatacaattaggtgcattagtagttggcctgcagtagtgtaaagcatcagctgtgtgaccagctctatcggtagaatgactcgtcaaatgctgtcgataatttccagtatcagtataaaagtcgtatatgtcccctataataacagttgttttagcccagttagtatagtagaagcatacagtataaacactgtgaccgatgataataagagcttgatagcttcgtttatatacacttcggtgtgcgtctgagtgtgtcctaagtgaaggcgtcaagtcccaatatggtctatgatgatggcaaataggtacactgatctaacgtaaatactaagctatgaactagtatcgagtgtctcagtgcgctcctatgtggtgcgttgtcatcgggctnattcgattctgtcctttagtgatcagagttacatacaagtgcacttagagtcnctgtccgctgcttnnacgacgccgcntgtctagatagaaatatattccctcggtgaccganattccnctgcaagcccgggggatccacta

SEQ ID NO: 636034 - DNA, 319 bp, Homo sapiens
cagtgagacaaaattatgccactgcactccagcctgtctcagaaacaacaataaataaacttaagaccaaaataataaatggtatgttttctgaccaaaactgaaagaaactaggaattaaaagaaatgtgaaaataaaacacattcttcaacatatttttgctcaagggtcaaaaaacttcattttgggccgggcgcggtggctcacgcctgtaatcccagctctcagggaggctaagaggcaggaggatagcttgagcccaggagttcgagacctgcctgggcaatatagcgagaccccgttctccagaaaaaggga

SEQ ID NO: 636035 - DNA, 297 bp, Homo sapiens
attgatagcggatagggcaggctcgaatccatatgccgtgtcaccacaacaagtacattgtgactgaacgcgccacctacatcggaaacttcaactggtcttggaactacttcacggagacggcgggcacctcgctgctggtgacgcagaatgggaggggcggctgcggagcactggagccattttcctgagggactggactccccttacagcatgaccttgacacctcacgtgacagcgtggcaaccgctccgcctgctctgagcccgatcagtggcagcaagctctggcccgcgc

SEQ ID NO: 636036 - DNA, 251 bp, Homo sapiens
  misc_feature (77)..(77): n is a, c, g, or t
  misc_feature (112)..(112): n is a, c, g, or t
  misc_feature (168)..(169): n is a, c, g, or t
  misc_feature (184)..(184): n is a, c, g, or t
  misc_feature (241)..(241): n is a, c, g, or t
acttaaagctcctaagccactgcctgctggtgacccctggccgcccacctccccgccgagttcaacccctggggtgnacgcctccctggaaaagttcctggcttctgtgagnaccgtgctgacctccaaataccgttaagctggagcctcggtagccgttcctccctnngctgggccttccaangggccctcctcccctccttgcaccggcccttcctggtctttgaataaagtctgagtnggcggcaaaa

SEQ ID NO: 636037 - DNA, 634 bp, Homo sapiens
gagcgggctcgccgccaccggactgccgggtccctagccaggacgagacccctcccttcccatgcggacagcccggaccccggaggatggattctcttatgttaccttcctgcagtttagcccccatcccttcaaaatatgggttccccaccactgacactgtgatgcccatagctaatggttgcgcctggaaaatggtgacaatggggactgggctgacagcgtggctcgtggtcctccaacgaccccggacatagaccaaaagggacgacggggcatctcggacgggcggacgcggaggcccaattcagacacaggacgatccggaccgaccgagcatcgcactgcaaatcccacagatgagcaatcgcgctgtcaacagtgaaagtaaactgcaatcatgaggaagggacggagcgctgatcactccagcgcaaacgtacagagcccgtatggaccccaatcggggacggcagggggggggcctgggaggcccgagaaaaaggcagggggcaagcaaggataccaggcctgaggccgcgagggaaaggggaggccaaaccgagaccaaggccgaagatggacgcgtgcggcggcagaaggacggggaggcagggacatagcaggaaggagg

SEQ ID NO: 636038 - DNA, 429 bp, Homo sapiens
gagagagagagtagagagagagagagagagagagagagtagcgtagagagagtgaccgtgagcgagagcgcgagcgtccgctccatccctgtcttccccctcctcttttacccctgcgctcttcccatcggcgttcccctgccgtgtgtcccctcccttgctcctttcccacttctctttcttctcccgtgctcctttgcttcttgggcccccttggtctccattcacgtctcgtcgtttcatgttacctctgccttgctccgttctcctgtctctccttgctgcggtcacttcctggacttttccattcttttttctctcctctcattgccttactttctcctcatgttcttcttcttctcccttactgttttcttctgtttcatcctctttcacgccctattcctctctccttttggtcttcccgtt

SEQ ID NO: 636039 - DNA, 211 bp, Homo sapiens
atcctgtagctgtacagtgagctgatcagcatcgtgccgtgacatctcggaactgctgcggctggtccggggatgatgggtcggctacacaagcggcacccaggcgtccggttgaaatttaaccccccccaaaaaaaaagttttttttggggccaccatgcgccaagtgacgcacgggcgcattgcaagggtgctgatcgacggtcgctcg

SEQ ID NO: 636040 - DNA, 377 bp, Homo sapiens
agtaccggttcagtggcctcctctttccatgccttcaactcctctgaaatgagggccatgacgagggtaggaaaaactgtctctgcgatagagaggtggaaaaagtcccgcgaagtgtccccggtatctagaaagcgctcagtagtgtttgctgttatcttagggatatcaggctgcctggacatttctcagaggatgaaggggattgtagtaaggaagaccaccttccagaggatgaaggggattgtagtaaggaagaccaccttccagaggatgaaggggattgtaggaaggaagaccaccttcccggggctgggcacacattattgagctccataatgtgtgcccacagaggctgaagatgatgatacaggacc

SEQ ID NO: 636041 - DNA, 140 bp, Homo sapiens
ttcaacaaacaatcggttcctacgaactccctcctgtcatgctggcctcactccactctcaggttcctagaaccaatgccactcttctaggtcctgcaaaatccatggtcagggatgcacgggttggggataaaccgcga

SEQ ID NO: 636042 - DNA, 103 bp, Homo sapiens
tgggagtctgcgttttattaggctgtcatgtgaagccaagaggtgatactgtgttcttgtgacaacaatgtaagtgttccccgattactttccagtcattcgt

SEQ ID NO: 636043 - DNA, 845 bp, Homo sapiens
gagaataaaaggatgcacaataaatatacatcccctaatcagagacagtttcaaattttagtttataatttgtaggtgttcctcttcacagctatatattagaatcatatgagaatgagtgaggaaagccaaaaaaacaaaaggatcatcgagaagcataaaacaaaaaggttaggagcggtgagaggcaggacccaggcttggtattgttctgttttaaataattttctaaagttttgaattgtaaaaaaagcatgcatggaactgaccatcatagccatgttaagtgtacagttcagcagtattgagcacctccacattgtcatgcagcggaactccagaaattctccgtcttgcaaaactcagcctctgggccgttaaactaggtgtccccacctcccctcccccaggccctggtgaccaccgttctgctttctctgtctgtgattttgaccactttagatacgtcatttcagtggactcatcctgtgtctttttgtggcggaatcacgttctgttgtgtgtatacaccacgtttttcttgtccgttcacctgtggatggactcttgggcgtctgccgtaggccgtgtgaatgctggcggcggtgatcgtgagtgctgcggcgctgatcgtgtgctgacgtctcctccacgtactgagtcgtgtcttttggatgcgcgccagagggtgggactgtggatcctgtgctgggtcatactatgttaattctctgaggaactccggctgtcctcatagcagcggtcgttcaccctggccacggggcgggtcggttcccacgttctccgggaaggggtccggtcccagttctcccgggaagggggcg

SEQ ID NO: 636044 - DNA, 304 bp, Homo sapiens
ctgtgtttatggtgtgatgatgatggtatgatggtggtgctgtgctgatggtatgatgatggtatgatgatgacggtggtgatgatggtgctcatggtgctgatgatggtatgatggtgatgatgatggtgctcatggtgctgatgatggtaatgatggtgatgatgatggtgatgatgctggtgctgctgctactgactgatgatgatgcgggatgtgactggtgatggcatggatgatgactggtggtgacgcgtggtatctgctaatgactggtgatgatgtgtgctggtcaatgatggtg

SEQ ID NO: 636045 - DNA, 329 bp, Homo sapiens
  misc_feature (275)..(275): n is a, c, g, or t
tcaataaagggtcgtattcaacaagaataatattccaaatagaactattccaaatacgtatacacccaatgttggagcacccagattaagaaaacaagtacttctagacctatgaaaagacttagacagcaatataacagtgggggactttgacttctcactgacagatcactgaagcagaatactaataaataaattttggacttaaactctgcacttaaccaattgctcctaatggacatctacagaatatgccatccatcaaccaaatatangctcttcttatatgcacctagaacacactcgaagattggccacatgcttggccg

SEQ ID NO: 636046 - DNA, 355 bp, Homo sapiens
tccagctggccccaaggggtgggattagaggcgtgagcgcttttcttaaaagagtccaggttctatgtgggaagagcgagttggtcagtttttatgggaacaaagaaatgaatggacagcatggtgataaacactggaagtgtcacttctaaaattggtccatggctgaaagtggtggctcatgcctgtaatcccagcacgttgggaagccaaggtgggtggagcacctgaggtcaagagtttgagaccagcctggccaacatggtgaaacctggtctctactaaaaatacaaaaaattagctgggcgtggtggtgtgtgcctgtagtcccagctacttgggggccaggctggag

SEQ ID NO: 636047 - DNA, 277 bp, Homo sapiens
cagccagggcccttcccaggtttaatttacaggcctggatttcctcccctttcccccttttttccaggggttaacattgactttcccttgggtttcccctggggtttcacctgggggtttttttgcagcattcttccaaggcctaatttttcccatggggcccaaacccgttaaccacccccttttttgaaaggggattcaaaggcttttggggttgttgaaaaggcctttttcaaattgttccaatttaacttcccttggaagggccttggttgga

SEQ ID NO: 636048 - DNA, 433 bp, Homo sapiens
  misc_feature (177)..(177): n is a, c, g, or t
  misc_feature (406)..(406): n is a, c, g, or t
  misc_feature (423)..(423): n is a, c, g, or t
tggaagaatagatgacattatttctcacaccacaccctgccctgctcttcatccctattttaccaatcagggtcagtcatctccaacaccccacaaacacacccatagctccaaggagccagcaacaagcacacaaacaaagataagcaaacaaacttatcaggcgcaggcagctgncttccacacaggccctgccagctcctctgcaaatacagtctctggtaggctgccctgagaaggatctgaaggaggccgtgcatagcaccggtgagcttacctacctgctggctcacagtactgtgggaaggtcaaggccaaggccaggtcagtagctgagcttgctaaactgggttctttgcttccctatgggacaaagccttctggccaaggtttgttgtgggggggnggggaaccatgggtttncaaaattaaa

SEQ ID NO: 636049 - DNA, 876 bp, Homo sapiens
ggagttactgagaactcataagacgaagctaaaatccctctgcggatccacaagtcatccgccctgaacacatcctgcagaaagcccagatcaaaggagacgccatggaattatctactaggaaaatatgtcgagcttactctttctgggtcacatgtgtctggtgatttcgtcgcgaatgttcttccacttccagtcatccatgatcgtgcagtgagttgccccagaaatgctacgcttgactagggaaaactccattctttcttgcccagtccgggtgcccctatatacttcgagttgtcgatggtgcatgcatggcgttctcttagtagcaataatccgcgactctcgactaagtgtcctagaggaagtacggatgctctcggctcccatacacgaagcgtcaccttccaggagtccatcttgcatgtgtagcgtaattcatataacaggagtcgcgagtgatatgggaggagtttcatagagtggtagtaacctactactgggcgtagcgactgcaagctactatgtatgattatcactaaaatcttagatatgcttctttaaccagagtgctgatcttgtatgacgttgtcttgcatttttcgtgggaaaactggaaataaattgacatggttagttggagtcgtattatgcgctgtatgatgaggaatataaaatctctccttttccttaccataccagtttgacacgcttcaacggtatatactgcagcttctagctgacgttccctgcctatatcctagcagtgacaaatcagcaggtctaggttctctctctcaatttggaattgatgtacccgcgatttgtagctatggttccactgcgaaataaagcccttttaaaatcagtcaa

SEQ ID NO: 636050 - DNA, 124 bp, Homo sapiens
tgctgtctagaggtcccatgctggtttctctgatacatgatttccacgcactcccgggcacatttccctagcttcttgtctgcggcagtatcctctgagagtcttgggtagcgaaggagccgga

SEQ ID NO: 636051 - DNA, 330 bp, Homo sapiens
cagactcttccggggccttcgccagcataaaagaggaggatgctcgcgtatgcagcaactgctccagcgcaaattgcagccgcggttgagtatcactgaataaaggatcgttttcgtcaatcaaatgtggctgagcaaatatttcctgatagctatcggtatcaggaaccaggtcacgccatgcaagtttcgtaatggtcaaagttgatgttttttagtctgttgtcaaagccgcgattatacgtaaccggcactacagcacacgtagaaagcaccgacaatactcctggcatgggcgttaaagctcacaggatggagattcttttcttc

SEQ ID NO: 636052 - DNA, 570 bp, Homo sapiens
  misc_feature (245)..(245): n is a, c, g, or t
cccagttctactacctttgtccttaggtgtgaggtccagggttgctaggaaaagaaatcagcagacacaggtgtagaccagagtgtttcttaaatggtgtaattttgtcctctctgtgtcctggggaatactggccatgcctggagacatatcacctcaatttttttgagggcccaaataggatggggggtctgtgttatttgtgggatccagagatgaaagaggggtgggatcccccctgaaanagtggagagtgacatgtgctggacactgtccatgaagcactgagcagaagctggaggcacaacgcaccagacacttccagcaaggatggagctgaaaacataaccccctctgttctggaggccctgggaaacctaaaaaaggctgtgagccaaggagggagggttttcctttggcatgggatggggatgaagtaaggaaagggactggaccccctggaagctgattccctatggggggaggtgtattgaagtcctccagacaaccctcagatttgatgatttcctagtagaactcccagaaataaaaagctgttatactggtcga

SEQ ID NO: 636053 - DNA, 202 bp, Homo sapiens
tgctgattaagttttcttcttaatttcacgtatacttacatacactcttggaaggtgctgaagtcatcaacctgagtgccaaagacaaggtatgccaactgggcatatgctaagaaaataatgaagaacataattgcaaagccaaagaggtctttggcacaccgagacatggttgtggagagctgactcccgcttttgtgtt

SEQ ID NO: 636054 - DNA, 950 bp, Homo sapiens
cgcggtggtgcctcccgccatgattctgaggcctccccagccacgtggaactgtctgctggagtttgctggaggtccacgccacacccttttgcctgggaatcaccagcggaggctgcagaacagcaaagattgctgcctgttccttcctctggaagcttcgtcccagatggacacctgccagatgccagccagagctctcctgtatgaggtgtctgtcaacccctgctaggaagtgtctcccagtcaggaggcacagggatcagggacccccttggggggggcagtgtgtcccttagcagagcttgagcactgtgctgggagatctgctgtctctttaggcccggaggcaggaatatttaagtctgtgaagctacacccacagcgcttcttcccccaggtgctctgtctcagggagatgggagtttatatctataagcccctgactggggctgctgcctttctttcagagataccctgccagagaggaggaatctagagaggacatctggatacagcggtttgctgggctgtggtgggtccatcagttccgaactttcctggttggttttgtttaccctgtggacgggaaaacaccctactcaagcctcagtaatggcgtcatccctccctcacccaagcttgagtggtccggtggacttccgacatgctgggctggcagaagattcaggccagggaccttagcaacggcccaggggggggaccgcgaccataaccatgcggcggacgaatcaccacctcaaggaggtaagggatggacacgggtgtccacgagccactggtctgacacaccaacgtcggggccgtgtcgtgtcgcactactgtcaacaaccgccagtataacgaggacatcgataacgagcgactgcagcaacacgtcgacacacacaagagaccaacagacacaacacacgaagcgctcagacagta

SEQ ID NO: 636055 - DNA, 1206 bp, Homo sapiens
tttgctgttgtgtcgtttgcttttgtgtgtggtgggttgctcttcgattctccgtgttttgcttttctctactgggtagtcgcgcttggatttgggccggttactttttgtcgtcgttttcgtatggttcctctggtgaggtggctcttttcgccagctgttggcggatttttggtgccacagtgtgtgcgcgtcgctggtgtgcttatggtgtgtcacaccgcgtcgccacgtttgtgtggggctccggggtttacccacgtggtatcttcctcagcgtgtgtcggggtggtccctgggtcctggggtgctcctgtgttagcagttgtttacctgctttccgcggggagtggacaaggggtggggttgtagcgcactggtgtgagtgaccggtggaagtttcggtgttggctttggcgcccgttggtgcacagtggcttaactcgaggaggttgttcgtcttgttgtgtctgtgttacgtctcctgctcgacatgccgcgtccagagtgatcactctgagatctgttggtaccgttcagtggccgaggatcccagtgactgtggactttgtgattccctgagttcccctctatcggggagagggccttctaggatttttcccgggtcttgttcctcgcccttttatggtggcactcccgttctttgtggctggtgtgactccctggcctaacctcgtccatatcctagtgcacctggacccgctggggctttttatccctcggagtgagaatgaagaggttatttctcccaagctcgtgcacccggatttttttggcgaggtattgttgaccctcatgccctctgtgtggctttgttcttcccattctttttggctcgtgccacccacctcgttggtcttgctgtgtggaatgccctccctctatctcccccactatatacgcttcttggaatatgactcggttggtgcactcgctacccacaaagaaggggaatattgagcccgcgggagaatatgcttatttttttcgcgaaggtcgcctcttgggaagaacttattgttgtgagcctgaaaaatgttaatttgaagaatgtggggcccgggaccacgtgacactttctgtagtcccacgaatgcaccacgaaattatatgggagagaaatgttgagtttctataccgtgtggcgcgcttttttaataatcctttaatcttgggaaaattcca

SEQ ID NO: 636056 - DNA, 301 bp, Homo sapiens
  misc_feature (3)..(3): n is a, c, g, or t
  misc_feature (5)..(5): n is a, c, g, or t
  misc_feature (7)..(7): n is a, c, g, or t
  misc_feature (18)..(18): n is a, c, g, or t
  misc_feature (37)..(37): n is a, c, g, or t
  misc_feature (82)..(82): n is a, c, g, or t
  misc_feature (134)..(134): n is a, c, g, or t
  misc_feature (150)..(150): n is a, c, g, or t
  misc_feature (162)..(162): n is a, c, g, or t
  misc_feature (193)..(194): n is a, c, g, or t
  misc_feature (203)..(203): n is a, c, g, or t
  misc_feature (221)..(221): n is a, c, g, or t
  misc_feature (294)..(294): n is a, c, g, or t
  misc_feature (299)..(299): n is a, c, g, or t
aantntngtatttttatnggagacagggtttcaccangttggccaggctggtctcgaactcttgacctcaagtgatccaccngtctcgggctcccaaagtgctgggattacaggcatgagccactgcacccggnccttttattattcatngtaagacacacngggaccacaattgtctcttctactcagtagnnggattctgngtgcctagttcagtattnggcaagtaagcgttctgcatttgatatcccggtttacccgggacaacaaagtatctccaaacttcattcattnattcntt

SEQ ID NO: 636057 - DNA, 111 bp, Homo sapiens
ctctcccccccaacccccactttcacaacgcggccccccacctttacctccctaagttcttcatctctttcgacattttttttgaaggctgatgggggggagggtggaaga

SEQ ID NO: 636058 - DNA, 416 bp, Homo sapiens
agaccatgtggattggaaaagattagttgccaattagccccccagataggggcagggcccccacaaccttttcctgtgcacttgcctgtgcttgacagccaagaaattctggtctcctttggccttaacaatccttacacctttaccaagttctagaggggaacactggagaagagcaggagaagagacagacaaccacgggggaaggctccacaggggaacggcagatgtgcgcggtgttgcgggacgaaatgtggactttggcctccagtgtcgacaggggacaacccaattggcccatctcgggttccccccaaaccccaaaccccctctcttctggtaagctgggtcttgtactggcaagtctctgggaggcaccaaaatgttacctggggagaaagaccccacacacccgc

SEQ ID NO: 636059 - DNA, 479 bp, Homo sapiens
  misc_feature (109)..(109): n is a, c, g, or t
  misc_feature (135)..(135): n is a, c, g, or t
ccctccttaaccatgtggtgttttgagctgtttttagtggggacgcccagaggttgtgtggcctttattgtggccccccccattcaggggaaaaagggggattgttggnttgggggcccctggacccaattggcnaaggggggcaagcttcctttttggggggtttttgtccagttcttttaaaaaaaatggaggcccaagggcttcccccccctggttgggggtcaaaaaacaccccgcaagagttgggggccttggggccttggggtgttgttcctttgaagccgctttgggcccgggcccttatttgtttttttggttttttgggcctttccggttgggcccggtccccccccccccttcggttgtccgggggcaaaccccccccccccccccttcctttttcccccccttttggggccctccgggccggttgttttagggcccccctgtttgtcattaacccccgggtggggcca

SEQ ID NO: 636060 - DNA, 205 bp, Homo sapiens
tgtcccgaggattcgaaattttccccctacattgactcctgtgctacatcagccaaacttcaccttggggaggtttggatttgatagccaattagttctagtgctggttgcaaagaattgatatttagatggtttttaatactcacgcagattgtcttccctatatattagtgtctatttttatgttagcagtagtgcatatccg

SEQ ID NO: 636061 - DNA, 445 bp, Homo sapiens
gaaaaagcaagaacgttgatttatcgtcttcgtggagtgttaacttggccacgagtatgtgattattaagagtctcagcccaaaaataagatgtgtagagaaatttgtgaagaatgcaagttcctccagtgccagatgccatttgttgctatcagaagtgccatggatattctaagatccagatatacataactgatccagactttaagggttttatacgcatcagctgttgccagtgactgtaaaatagagtatcacatggattgagagaccagatccagatctcgttactgcttggataagattgacaaggattttttacaaggaatatgtataacccctgtcaggcaaggtgtcatttctaagattatcatcttcagcagtggtggtgaagttaaatgtgaatttgaacacaaggtcataaaagaaaaggttcctccaaggc

SEQ ID NO: 636062 - DNA, 353 bp, Homo sapiens
ccacctatataccggggtaggcagcgcgataaatgcgcaagtggatccagtgctatcaacgatgtagactagccatcatctacgggtggccagcagcagctacaacataggttcatccgcggaggacaaccagaccaaccgcctgcaggaggctctagaacctctacaagagcatctaggaacaacagatggctagcgcaccatctactagtagaacctgtacctacaacaagcaagatactagctacgctgagaaagtcctagctagggaaatcgaagatagaggactaactattccagaatttgctccctacactaactacctgaggatgctactacccgagcccggagag

SEQ ID NO: 636063 - DNA, 480 bp, Homo sapiens
gaccacgcaacaatttacactaagatgatcgtgatacctaacctacgaatttacatagagacagactatgagctagaattagcttagctcatgtatctaaagaactactgtaatggatacaaagctagctaacgccatgggtggaaaatacttaagaatctagaaagattaaatcttgagctacagacctatacaaatagaaacaatactattactacaaacaagaaaagacacataaggaaacaccaagtacaaaggtatactcctctcaagggtggagagcatgtggcactccaatgtgcgatctagatgctaacaatgctatgagaacatcaccacacttacacttggactgcttcctcctttgtctacatgagaaggtaggactgcatcatctctccaggtactctcttcctatcagtctaactcttccgagataaagcctcactataggatataaagaatccctaagaaaagctt

SEQ ID NO: 636064 - DNA, 686 bp, Homo sapiens
  misc_feature (244)..(244): n is a, c, g, or t
  misc_feature (594)..(594): n is a, c, g, or t
  misc_feature (630)..(631): n is a, c, g, or t
gtgactccactgacctcgatggtggtagaccaatgacctgaggagcaatagaggatgagtagggccattgcctgacaagcctggaggaagatgcagagagccacaccggtgagccccgccatgtcctacctgaccagctaccagcctcctcaaaaccgctactactatgtggacggggatcccctacttcatcagtccaaacttcccggaggaaagacagagtgcccctcctggctgtcaacantcgaatgagagccccatggcatcagctgactgcgctcgttagttccaggcatgcaaggtcagcaggcgctccacagcttaagtgcggcagagtcgactgggcgcacaagtagaggcagcccgtgactccgaagaccagaaaggacttactgtcggaacacgtgggcagtcgccatatgctctacgatggagcttccacggtgggcaggtgaacaactgagagaacgatcgacccgtggtggaagcatgggcccgtggccggatgcaacgtttcaacgcgtggcttaggacgacgagtacacatgtctagcgcaccggagtagggcgtagtcccgagtgatggattcagancatgggagacgaatcgagtggcgtgcgtcgtccgtnnttggaccgactggcggtatacccgttccgtgggatccgttccctagcaacctagg

SEQ ID NO: 636065 - DNA, 132 bp, Homo sapiens
  misc_feature (37)..(37): n is a, c, g, or t
aagtcggtaccgacgctctcgggggacagtgagaatnttggtacagccaggtcggccttgagaaagcaggctgtctaggtgaggtctacgcaaggtacagttcttgcaccccaagtttgcatttggacttta

SEQ ID NO: 636066 - DNA, 804 bp, Homo sapiens
  misc_feature (476)..(476): n is a, c, g, or t
aatcatcgcgtatccccaccgggcgtcaaagtatttagctgactcgccacgactccacggtaagcaatgatgaaaatagatctgctagtcagttgcatcatgatgctcctagtgattcatctttcttgttcatccagtagagtgagcctgatttggcattgtattacccaactcatcactaggatatcgtactaaagcagacaggtactacgtggtggctcaagttcgcatctatgtccttatcgaataggagcatgtatttcgccattcgagtacggacggcttctaatgtcgagcgtagtattttcgcgccgtattcctcgagtgctacatgccgctagaattcaaaactctacagttcccaaaattccattgttcacatagtcgatattcgaatcagcgcgtaacatcgtaatcattacgttcccactagacactttctcgggacctaatccctgcgaatggcacccggaacncgtatacgtgccggacttactcccggaatagccgaattacgactcgacattgataacgatccgtatcatctgtaggctccattcattgttgctcataacaagctagtaatcattaatgacattttcgatgatttgagaaagccttcggttcgaagtgaaaagtccgtactagtagaagaaggcctgcagtaaacctggagtgagctatatggatgtccgcactagacctaccacacattcgagagaacccgtatacataaaatctagacaaataaaggaaggaatcgaaccgccaaagctggtttcatgccaacccgatggctccatg

SEQ ID NO: 636067 - DNA, 100 bp, Homo sapiens
cacagaatgggataggggatcatgcatctggtggccggctcctcaagggcatggttgtggaccacatttacttctgcttggtcttctgctggtgctggtg

SEQ ID NO: 636068 - DNA, 107 bp, Homo sapiens
cccgcgctcagctctgtccctctcatccgcgtatttggaagagatgtttttctcctcggctaacgactgatcaaatttcctctgcttcttttccagcttgagacacg

SEQ ID NO: 636069 - DNA, 205 bp, Homo sapiens
gtacagagacaaccacatacaaaatatgcaaactatttgactatagatatctctccatagaagacataccaatggccaataggcacaagataagatgtctaataccattaactcattagggaaatgcatatcaaaaccacaatgagattccacttcacatgcactagaatggctcaaatagaaaagacagcccttctatggtagt

SEQ ID NO: 636070 - DNA, 418 bp, Homo sapiens
  misc_feature (412)..(412): n is a, c, g, or t
gtaggacgaccattcttaaaatttctctcgttcatttggccttaagttcaaagctgttacaagctgttacccaccatgtttacagtttctgctatctatcagtaagcaggaggtctaataagaattgccttaaactggccgggcacagtggctcacgcctgtaatcccagcactttgggaggctgagcgagcggatcccctgaggtaaggagttcgagaccagcctggccaacatggtgaaaccccgtctctactaaaaggacaaaaattagccgggcgtggtggtgggctcctgtaatcccagctacttatgaggctgagcagcagaatagcttgaacctgggaggtgaagattgcagtgagccgacatcgcgctactgcactccagcctgggcgacaagagcgagactcncatctc

SEQ ID NO: 636071 - DNA, 161 bp, Homo sapiens
tctggccctgtagagaaaggccgagctaccagttcatgtcgttcctcttcatcatcttcatcatcttcatcctcctcttcctcctcttggtcatcattttcttcctcctcctctacctggtcatggcaagacctcgtttctcctccgttctcctgcttcct

SEQ ID NO: 636072 - DNA, 476 bp, Homo sapiens
gctccaaaggctgtatcctagctttatttttaaagggcctgcgccgcagagtcaatataaaaacacaaaaagtcccgtcagtttaataacaataaaaaaccccaaaagtggaaaactgagggcaagggaaatgacccctaggcaggggcacggggatccctgctcatggcaccaggcctggctgcagggtcccccggtattgctgttgctacgaggttggggggcagcgattgtcctgtgggagccacggccgtctgagtcaggaccctcatttcttctggggtgtgctcagcttctgcatgccccggatcttgtccagcaggccagagatgaaggcctcagtgggtttgtaacagtcaactaacagctccttgaccctagcagcccgggtatcatcactctccatgtctaaaagttcatccacatctatctcgagctccgggatctcctcctcctggcagtcgtagagtcgcgtg

SEQ ID NO: 636073 - DNA, 954 bp, Homo sapiens
gtatcagatgtgagcgcttgacccgatgcaatcaggtgtactagcgaatacgtgaagatatattgtgcaagctgatgatcctccctaatatgcgtagaaggaataacgggcgtacctgcggttcccttatgagcatacatctcatacatcctcaaaatccacatcgcgtctatagcccagttgattgtgcctatagccaatattgaggtctatggagatgccgtgtcgatgtcatattgggggaccattagaccacatactatttctctcatgtcgaacaaatatggcactagcaagtaggtatcatggagcaaaagtataatcggagatgcatggaactcaattcgtcctcgactcagttgatattactaccgcaaagtgactactgaactgtctcaagagacaatagagtacatcaggaattcagagatgaatgcatgctcaaccagtctagggtatttagcactcatcgcctctatctatttttaaactgtggtctatgacaaacctatttaggtgtacccccaaccttttcctccgacgcccctaaaacgacacctcctaataataactactgagggctaacgcctcacaatcaatgggaaggcaaacggcattagtcgagtgaacactatcgcgaaaaaaacttctagcctggtctataactaatctacctaaaaatcgtcgttaattatacgttcacagcacacaagtaagcattttggagatcctctttcgaacaaaattatcgccactgggtattataccgatagcccgcgggtgaagccgtgagcgggaaaatcaatttaaccaagaggtccttccctatatggctatattaaccaaaccagggaaattttaaccctctggcaaattactgcacacttatgatctcacagttgtggaccctggcccttaccaactgagccccgcttagcgctgaagggtgtccca

SEQ ID NO: 636074 - DNA, 1079 bp, Homo sapiens
ctttccagagaagcataatgagaacgtcagactgaggtaataagaccagaattcaagtgatagacgaaactgtgtttggttaaaggacacagatttgcaggaaaaacaactttgatgtagcaattttctaaataaaattttgttactgtaatgtcactatttgctgctacagtagctcaatattttacagggctatctataaagctggctccattataaaaactggaggatacttcctaaatgcagaacagaacataggcggaaactgtacaccaatggtcttccagatgggtgactgatggcatatagggtagctgatagcatgctttaactattatgcctaatagcaccggaaaaccaaggaaagtcagagaagacggggagagacattttatatataaacctgccaagttatagcattagtgatctcctttactgggacactgacaattttgtgaaactctcaaaaggaacggtgatgcagcggagacacaatgtgaatatcagataacatacagatcgggacgtacaagcatgttattagtacacccctttacctagaacattagtacaaaaatctttaaactgtgcaagtaccaagttcacccagacttggacttccatgtacgtaaatcttaatatcaagattataggcttaaactaagtgttgacacaactggaccattagactacagtaaaaactatgcgcatgttagactaaggaagacatcaaacacaacactggtccacggattacgggaaactacaccaaactaactggaatacaaaatacaaaatacaccaacaataatacaaatatcggcaaagaaaacagacacgaacccaaaccaggaagcaacaacaacgagcacacgagcaacacaagaaaaacgagaacgaaaagcacaaaactagggcacgaaaaagcgaaaagaagaacaacgaaacaacgacgcgaaacagcagacataaagcaaaacaaaaagaaagcaaaagcaaaaagacacagacagaagacaaaagaaaacaaaacaaacgacagagaacgaacaacaacagaaccaacaatacaacacaat

SEQ ID NO: 636075 - DNA, 132 bp, Homo sapiens
cactggacacgctggccgcataaaattgcgcgaacgccataacatcacggttgtctgttgaaacactgagaaaatgtatgacggctgattgactctggagtcccatactcaccttgcaagccacgtattcat

SEQ ID NO: 636076 - DNA, 288 bp, Homo sapiens
ggatccggtgagagcagcctggccaacactggtgaaatccatctcgaataacaataaaaaaattagccaggcttggtggccacctgtaatctcagctactcaggaggctgaggcacaaggctcacttgaatcctgaaggtggagattgcagtgagctgagatcatgccactgcactccagcctgggcgacaagagcaaaactccgtctcaaaaaagataaagaaaaaaagaaaaatgtcacttttaaaaaacattggagtcctgttcctccacttgacctctctcgct

SEQ ID NO: 636077 - DNA, 225 bp, Homo sapiens
tcagctcagcagactgaggtatcccttgcgtgcccactaaagcactctcactcacttttgcaccacttgtacttttacacctcaggtgcaatacgatgtacagcaaagcgaccctcggtgtcatagatcagacggaaattctctcccgctcttgtcaatgctgatgacctccatgactccagcagggtaggttatatcagtacggaccttgccatcgattctaaa

SEQ ID NO: 636078 - DNA, 541 bp, Homo sapiens
  misc_feature (82)..(82): n is a, c, g, or t
gaaaggcggagggaaaaggccagggagttaccagccccccaaaaagttagaaaaaagttcgagagggccaaaccaaaaaaanccaaaaagtatggtggcagtgtgggttttcaacccccccccagtggcaccaaagccaggtcctgttcccttttttcccagccaggagcctccccccaagcgggagtatgaccagtgttgcatacaggtcaggctgccaaatgggacctccctgacccaaacgttccgggcccgggaacaactggcaactgttaggctttatgtggagctcccccgtggggaggaaataggtgggggccaggaccctgtgcaattgttcagtggcttccccaaacgggccttttcaaaaactgacatggagcggcctttgcaggaactgggactcgtgccttttgctgttttcattgtggccaaaaaatgtcccaactgagggcctttgtcccattgtccctttgtgaccccttcatttttgataaagccctgacatttccttcctaaaaaatagcccctgggttttgta

SEQ ID NO: 636079 - DNA, 342 bp, Homo sapiens
  misc_feature (7)..(7): n is a, c, g, or t
  misc_feature (24)..(24): n is a, c, g, or t
  misc_feature (111)..(111): n is a, c, g, or t
  misc_feature (164)..(164): n is a, c, g, or t
  misc_feature (182)..(182): n is a, c, g, or t
  misc_feature (210)..(210): n is a, c, g, or t
  misc_feature (275)..(275): n is a, c, g, or t
  misc_feature (300)..(300): n is a, c, g, or t
ccagccnaccttgccccctgaccnaccttcacccgtgccccttctttctgcccttcctcaccgaagaagggctaggaacaccctggagaggctgcaggccggccacggacntcagctgagccccggctgctccttcagcctccttgctcatgttggagcacagncccagcttcctgccaggncccgattcttcttatgtcctccagcccnccctggcgtggcatccactcactccttccagcaataagaaccgtccttggcgtggagagtctgtnaacaaaccaatgacttaccaggagnacaagctcttgaagaagatgtaaatgaccttttttttttttt

SEQ ID NO: 636080 - DNA, 224 bp, Homo sapiens
tagaacaatcacggtcagtgtaccattgtcgtgaaacattggatcgcgctttgatatgcatgcaggttgcggacggctgacagaagagcatgtgcttggggctatctgttcctgtcgacgcgaggagccgtagagccagggcaagagccagtcttctccacatggcagggattgtccataccacgtcccaggggcgtgagtgctgtctctaggctgtactccag

SEQ ID NO: 636081 - DNA, 783 bp, Homo sapiens
agcgtccgccctgggctgtggaccctgcgtttgccgagcgctatgccccggacaaaacgagcacagtgctgacccggcacagccagccagtcacgcccacgccgctgcagagccgcagctccattgtgcaggcagctgccggaggggtgccaggagggggcagcaacaacggcaagactcccgtgtgtcatccagtgcctagcaaggtcatccggtggctcgctacctggtggcgctggtgccacgcgtaccagccggaggagtttgtgtgtagccagtgtgggaaggtcctggaagagggtggcttcttggaggagaagggcgccatcttctgcccaccatgctatgacgtgcgctatgcacccagctgtgccaagtgcatacgaagaacgattacagcgcgagatcactgcactgccctgaatgatgatcctgtgcacgtgcacatgctttacctgtgctgcctgcaagacgcccatccggaacagggccttctagatggaggagggcgtgcccgtatcgcgagcgagactatgagaacgatgtttcggcccgacaatgccatgggctgtgacttcaacgatcgatcgctggtggaccggttcctggaggccctgtggcttcagactgtgcatgacacctgcttcgtctgtgcgatagtgtcaggatcaacctggaatggcaagacctactagctccagagaaggacaggccgtctctgcaagagccatgccttactctcatgtgtgagccccttctggccacagactgcctcggtggccc

SEQ ID NO: 636082 - DNA, 257 bp, Homo sapiens
tccgtacgccaactcagcacttcagacgtatcaagtctgccaatgcaacaggtggcatcccctaaaccagtgctctctctcatgcaggccctgctgactgctactccaatcagctccacttcccttttagcatagaacagatgaaaagccctttttagatcaaaaatgcatttcggttaaggcttcatgaggagaaatgtgatttacattattctactacattaaagagaaatcttaattttttgggcgtacgggga

SEQ ID NO: 636083 - DNA, 272 bp, Homo sapiens
tcttgagcgcaatatggagaggtccatgtgacaaggaactgaggcttttgccggcacccacttgagtgagcttggaagctgatcttccagcccaaggcagagcttcaagtgactgcagttctggctgacatcatgactacaaactcatgagagattctgagccagaaccagccagctaagccattctctgattcctgactcccagaaattgtgcaagataataaatatttgttgttttaagctgcttagctttaggggtaacttaatagcaa

SEQ ID NO: 636084 - DNA, 970 bp, Homo sapiens
caaacggtgttcaatatgaatgccccagttcctcctgttaatgaaccagaaactattaaaacagcgaaatcagtaccaggccagattattaccagaggcttttctaagtcagggctcaccaagtagaacaaacagagcgttccagcaagaacaagcttcaaacaggtggttggcacttaccatggttccccagagcaatcccatcaagtgactggtaaccaccagcagcctcctcagcagtaaccacttggatttaccacgtagcaatcaggcctattaccaatagtcgtaggttgtgtctacgttggatggcttcccgtggttgctccgagcgcttgcattgacattggattaccggggggacccctagtctaaattgagatttccccgcacgcaagtgatcatcgatcaggtgtaaccgagacctatccatgtcctcgtaaacacgttcccaatacccaagttggttctcattaacacaacgacttacaagtttccacgtgtgcatacccccccgggcaattttacctccttgtgccttgattccaaaccggagcaatatgggattatatcagggcagaaactttttccaagggcccgcaaagggcgtcctcagcgggcccacgaaagttgagaaacccaaaccgagggtgaaaggcccccgaacctgacagggagcccacctaggggacagcgggcgcacccccgacaaagaaaccccgaatacaaagcaaggcgggataagcccccggacggcaaccttttgcagaccaacctttcccaagctcacgaagtcttcggcaacattttcaaactccctcttgaccttatttccacgaacgggggaagttacaatcggctctcacaaacttccacgcgccgccacataataacacagccaaaccttttgggcgccccaggatcggtttaaaccccaattacaaacacttaactctggtttagactccca

SEQ ID NO: 636085 - DNA, 364 bp, Homo sapiens
gggtgctcaggatgcatcctgaatcgtgatgggttcgatgtttatcatcctaccgttgttctggataggagcacctggatgggcgggtattagtgcaggtaaggcgctagagggacttacgagtggaacactagccgttcgaggtgctggagagaaagttggtcaaacagcagaaagcaaaattacaaagtgagggatgtagacaatgcacaacacttcatgcctcaccacttttggctttcgtcttcacgacgccacaaactgtttggaccattccgatcccagaggctctgagacttgctttgaacattaacagtctcttgattatcaaccttagccatgatcagcgcggtagtcgcgatga

SEQ ID NO: 636086 - DNA, 154 bp, Homo sapiens
catatatatatatatatatatatatatatatatatatatatatatatatatatcctttgtatatataaaggaaaattcctgtggactcttctgtctcctcaagctgtcacttcctctcctttcctttactgtcagcatctttattcatccgtct

SEQ ID NO: 636087 - DNA, 641 bp, Homo sapiens
acaaggtcggaggatggttgtgatgtgtcttttgttttttttctgaacatatttcaaaagcttttattgggggagtttggggaggtggactttggggccaaattcttgaaccccgttgaacccattgtttttagaggggcccccaccgggggggaactccagtttttgttcctttaagggggggtaaatttgaggttgggggaaaaaaggggaaaagtggtttcctgggaaaaattgttatcggttaaaaattccaaaaaaaatacgacccggaagaataaagggaaaagcttggggggccaaaggggggagctaactaacattaatggggtggggctaagtgccggttttcaagggggaaaacctttggtgcaagttgtataaagaaatcggccaaccccgggggagagggggtttgggaatggggcgtttttccgttttctggttaaatgaattattgggttggggacgttggttgggggagctgtttaagtttattaaaagggggtaatacgggttttccaaaaaatagggggaataacccagaaaaaaaaaatgtgagaaaaagggcaaaaaaagggcaagaaaccgaaaaaggggcggtgtggtgggggttttaaaaagcctccgcccccttgaaa

SEQ ID NO: 636088 - DNA, 955 bp, Homo sapiens
ggacgcgtgggtcgacccacgcgatccgcgagaggaaaccctgaacaaactgatccagtcacgcccagtatacccccggaggatagtgagatcatcaccaagcatggcatcaccgtcgagcgtgcccatcagtcaccgatatccacgctagcgatctgccgtgagcaagccggagcggaacggaacgcatcagcgacgcagacctaccagctctcacggtggactccgattatcaaggacatcatggaggacactattgaggacaaacttgagcaaccaaagcactacccttatatctctaccctgttcctctgcctccttcagcaccaccgccgtcaagcgcccgctatgggcactggcataagaacaaggccccaggcgaagtaccgcagtggcaccccgacctcatcaattttccatccttggcgggtgtgaagacctgcaatgagcatgcgcttgagcctaacgagggttgaacccaggccaaacggaaacttgggaggttgccttgatagggagtcaaaagagcattcgctaagccaacagaaaatgtggatggaacaccacgtggaacgcaactttgaattaaaaaccagaattgaaggaaacatcacgcaggttaagaaaaatacggatcggacacaatcaaaaaacgaagggaccacccaaaaatggacgaacaaagaggcatcctcagacggagaagtagcgacgacagaccagacgaggccaccgaccatagacgaagaatgaccacatatacgggagacaaacaggacagggcccgatgacccccacaagccaccaatggcaacacaccacaaagtgaataccaaggacaaccaccgtgcaaactgcccacgccatgcgcaaaagaccgaccaacacagggaacacgaagggagacatagccgagcaccacacaccgggagacaggacagagaagcaaaggaca

SEQ ID NO: 636089 - DNA, 126 bp, Homo sapiens
gtcaaacttacacacacatgagcagacacacacccggccttctggctcttctttcttactccataggaagcatggcaaggtctcgcagactttcctccatggcagattctggccaccccacaggaa

SEQ ID NO: 636090 - DNA, 786 bp, Homo sapiens
cgcatgtggctcacacctgtaatcctagcgcttcggtgaggccaaggcgggggatcacttgaagtcacgtgacttctgaaagccagcctggccatgttcttgtggttttcgttgagtgattttggcggcatagaaattcccccagacaccgaaatgctgtgcaggcttcctaagtaccaaataggctgcaatggctgggctcggcggctcatgcctgtaatcccagcgagcttgggagactgaggcaggaggatagcttgagtccaggagttcaggagcagcctgggcaatttactgagatactgttctctacaaaaaaatactaaatagatttagtcgcaggcatggtggtgtgtgcctgtagtcccagatgctggataggcgtgagattgggaggatagttgagcccaggaggttgaggctgcagtgaactgttgtggatcaccagcagatgcactccagccgtgggtaccagggcaaaactgagcccatggaacatgacggatcgaacaactctaatttagattaatatcaactcgaagttcagcaggtgtataaaaactttggcactctgtatagctcattttgttccactcgtgtggcttgttatggtcactagattggcagtcttctacactgtgtgtgtatcaatgttagattttgaaagtatttggttagaagtggggtttttagaaatcccgatagggggaaaaaggggagtttaaacaagtggatgcttttaatgtcctgtatgttgacttatgtaattccctttcctgatgtgga

SEQ ID NO: 636091 - DNA, 372 bp, Homo sapiens
  misc_feature (314)..(314): n is a, c, g, or t
ggatgggttaggggggttcggtgaacttcgatcctcccgcctcagcctccagagtagatgggacaaggggcatatgccactatgcccgggctaatggtttatttttttggtagagatggggatctggctatgtggcgcaggcgggtcctgaactggtggcctcaagtaatcctccggcctccatctcccaaagggcggggattacaggcacaagccaccgggctcggccagtttcctcattttttaaaggggggggcccacctcaggggtcggcggtgagaattaagtgaaaaattcaaggcaaagtccttggnacagtctctaggcaataactacggtaagtatcggaggtagagagccgggcaagggtac

SEQ ID NO: 636092 - DNA, 271 bp, Homo sapiens
cctgtaattccagctacttcgtacgctgaggcaggagaatatcttgaactctgggaggcattatgccgagatcgtgccactgcattccagcctgagctacatattgagaccatctcttaaaaaagaaaatgaacacaggataatcaggccttgagatcctccaaacttaccttttcattatagggctcctctcgtacaacctctaggtgccatccagaatgcggaagccaccacggtcagcttcttactccccatgctcatcaagctgcgt

SEQ ID NO: 636093 - DNA, 217 bp, Homo sapiens
ccatggccggtggtacccagcagaaggtttctgcaaggatgagagctccttaagccatggaccaggagcaaagttgcaggtacactgtcaggctgtgttatggatgttagcagttaatttagctctgcgtcttcagagcaattattcttagctacttaaaaaaaaaacaacaaggaaaaaaatgacccccataaagcatttgctgccccatataatg

SEQ ID NO: 636094 - DNA, 120 bp, Homo sapiens
tggatctggaggagcgaggcgctggaagggaaagatcttggccctgccctggccataggacactcacaaacactttataaaaattggggccacagagtagaagaaaaacgagtcatcaga

SEQ ID NO: 636095 - DNA, 198 bp, Homo sapiens
  misc_feature (157)..(157): n is a, c, g, or t
gcacccctgaggaaacgctgcctgagaatgaaacaagcataagtaaaagctgagctgtgagatggagcagatgacaggcacatggacatcttttgggaggcactgggatttaacttgttgcttaaagctagtctaaaccctgaaacatttcatcatnttcattgacacgagccccaggttttcttttttttttggatg

SEQ ID NO: 636096 - DNA, 929 bp, Homo sapiens
ccgaggtgttgtgtaccggggacccgaaagtgggcacaaatggctgcctggggacgacgaagaggtaaatcaccaaggattgccgaggaatttctgcggtttcccaaaaggaaaggggatgggccattatatgggggaacccgcgacaccacggcacacagtactagtgaggagcacgccacgcagattcactggggccccgccgagggaggtgctcggacaggggacaacacctcgctgacaccacacgagactcttgtggactcggtgggggacgtgggtgttcgtgcgtcttacagaaggaatgccttgttgttggcggaagtctcccccacatttccaccaccggggggagattaattaagcgagaggaagggtttctttcttaccaagcgaatgtgctctcatccagctagagagggttcttgcgtatcacgcccccgcgtttctctgggttctcgcgcgccgagacggcccatctggcacatcatatggagagaaaaggcgtcgctttttcggggaggaaacccacgaccgcgggagagtgctggggaaattttctatcgagagaggagaatgcaaagagaatttggaggacagcagcccttttttaaggacgtcgttggctgggagaaccccgttggcccggcgcctgcgccccaccccatttgtgcccacgcttttctggcgctgcatcctgagctgtctatgcacacttctgtagcgaggaggttctactcccgggagggcgccccccacatgaggcacgccccccgagcgctccggccccttacaaccccggggcaggcaaactttctggaatttgaatttttggccgcggggctttagcccccctcccccgtcccctgcccctccccttcccgagaggcttttagattttttaaaaagcctttgggattttccggcca

SEQ ID NO: 636097 - DNA, 149 bp, Homo sapiens
tcctatgatggtcttcaccaggggaatgtggcttttaaagaaaatcttctattgggttgtaactgttcatatcttccttacttttctgtgttgcttcttattgccatggtcttgggccttttaactatctgcctctgagtcttcaattt

SEQ ID NO: 636098 - DNA, 1011 bp, Homo sapiens
cagagagtacggaacgtcctggtttcgcagcggcagtgtttgttgtgccatggacttaagacagagaattagataatagcctgatgttgaaaggtgcaatgaagtattcaataattgaaggtgtgcccgagtgccacaccggtttgtacgtagggcagaccaccgcgcataggacttgctcaaagttctccatggtcttctattgggcggagtcaaggtccaggcccctgtatactctttacacagcccgtgaataagaacaaaaggcatcatcttggggagaggaatacactgattggaagtatttggagaaatcccaaaggaaggtacatcccttggaaacaaaaatgatctttgtcgccattaccgaagaagggaagaaatgggcagacttaactcagattatctcaccaaaagctactaatgagtactacattgggcccgtgcccttatttattcacacaaaccagaacatgtctcatgacttaatatttgtgtacccatcctttaatagatctcataccaccagaattcaagatcatgaatgacttgcccagaactatttgttggggcacgtcctgatttaaactacgactggctggtggtcacatgaaatatgtcacggtttatgacattttacatagtaacctccaacttcccgcaaaattggtatcactgatacaccccctttaaagacttttgattagacgtccgtcaagtgactggaccaacttttccacactcattgtgagtccaatcataaaacctactgggagatggttaatattttagacatactataccgtggtatgtcacttatatacactccttgggcaatgttcacgtgttcaaaccagcaacaccctggtttgtgcatcgcaatggcataaaggcgggcacacaactagcccaccaagtttcgcaaatagcgcactaatccgacaggtaaatccggcgagggtgactaagcaccctatctatcgactcaggaccctcatccaatctacccca

SEQ ID NO: 636099 - DNA, 319 bp, Homo sapiens
  misc_feature (17)..(17): n is a, c, g, or t
  misc_feature (26)..(26): n is a, c, g, or t
  misc_feature (52)..(52): n is a, c, g, or t
  misc_feature (188)..(188): n is a, c, g, or t
  misc_feature (301)..(301): n is a, c, g, or t
taaagtatgggcaaacnacctatatnatcagatgacctacctatcacacatnaaaagcctacacatggcaggacaccgtggctcatgccctgtaatcccagcactttgggaggctgaggtgagagtagcacttgaactcaggagttccctgggcaacacagggagaccccatctctactgaaaatacnaaaatcagtcaggtgtgatggtgttcacttgttgcctgtggtgccagttactcaggaggctgaggtgggaggatggcttgagcctgggagttggaggttgcagggagcagagntcactggagcagcctgcg

SEQ ID NO: 636100 - DNA, 256 bp, Homo sapiens
  misc_feature (5)..(5): n is a, c, g, or t
  misc_feature (66)..(66): n is a, c, g, or t
  misc_feature (68)..(68): n is a, c, g, or t
  misc_feature (70)..(71): n is a, c, g, or t
  misc_feature (76)..(77): n is a, c, g, or t
  misc_feature (79)..(79): n is a, c, g, or t
  misc_feature (82)..(84): n is a, c, g, or t
  misc_feature (88)..(88): n is a, c, g, or t
  misc_feature (91)..(91): n is a, c, g, or t
  misc_feature (93)..(93): n is a, c, g, or t
  misc_feature (102)..(102): n is a, c, g, or t
  misc_feature (105)..(105): n is a, c, g, or t
  misc_feature (111)..(112): n is a, c, g, or t
  misc_feature (116)..(117): n is a, c, g, or t
  misc_feature (119)..(122): n is a, c, g, or t
  misc_feature (125)..(126): n is a, c, g, or t
  misc_feature (128)..(131): n is a, c, g, or t
  misc_feature (133)..(134): n is a, c, g, or t
  misc_feature (139)..(141): n is a, c, g, or t
  misc_feature (145)..(146): n is a, c, g, or t
  misc_feature (149)..(149): n is a, c, g, or t
  misc_feature (151)..(151): n is a, c, g, or t
  misc_feature (158)..(158): n is a, c, g, or t
  misc_feature (160)..(160): n is a, c, g, or t
  misc_feature (162)..(164): n is a, c, g, or t
  misc_feature (166)..(167): n is a, c, g, or t
  misc_feature (170)..(170): n is a, c, g, or t
  misc_feature (178)..(178): n is a, c, g, or t
  misc_feature (181)..(182): n is a, c, g, or t
  misc_feature (188)..(189): n is a, c, g, or t
  misc_feature (192)..(193): n is a, c, g, or t
  misc_feature (199)..(199): n is a, c, g, or t
  misc_feature (204)..(204): n is a, c, g, or t
  misc_feature (208)..(209): n is a, c, g, or t
  misc_feature (211)..(211): n is a, c, g, or t
  misc_feature (214)..(214): n is a, c, g, or t
  misc_feature (216)..(216): n is a, c, g, or t
  misc_feature (221)..(221): n is a, c, g, or t
  misc_feature (224)..(224): n is a, c, g, or t
  misc_feature (226)..(227): n is a, c, g, or t
  misc_feature (232)..(232): n is a, c, g, or t
  misc_feature (235)..(235): n is a, c, g, or t
  misc_feature (241)..(241): n is a, c, g, or t
gtccncccacccctgacatacctactgtcaccctgccccagtcctaccccttcctctccatgcaantntnnccagnncncannntaanatntnaaaattggnagnaatatnnttanntnnnnatnntnnnntnnttttnnntttnnaantntattaanantnnnanntangtgtcctnatnnttaatnnttnnaatttnctgantttnnanaananaattnttncnntttcnaanattttnccctatcactctctc

SEQ ID NO: 636101 - DNA, 784 bp, Homo sapiens
ggcttcttcgccagaaccaaccggtggcttgcttgtcccagcggcgccccctcattcaccgtctgccatgccgggaggtctgcttctccggggacgtgggtcccaacttgtgaggccacataccaccgtcggccgcatccgtttccaccgatttctgggagactcatggggcattctcttctcccaccctcgggactttaccccagtgtgcaccaagagctggggagagctggcaaaagttggcaccagaattgtgccaagaggcatgtcacgtggatgggccctttcaatagaacagtgtggaggaccatctgtgccgtgagcaagggatatcaaggtcttacaatgtgttgagagagccacagaaaggttaccttttccccatacatcgattgataggaatgggagctgtgcaatcctgtggggcatgctggatccaagcagagcaaggatgaacaggggcaatgctggtgacagtcgggtgcggtggtaaggggtccgtgataaagaagtggaagtggtcatatcctcttaacccagcgtaccattggcgaggcacttgtgatgacgacttcctcaggggataggccatcctctctccaagcttgacgagcagatagcaccgtggtggcaccccagtttggctttggcaggctggcgcatcgtgtgatgggcctttccaaccattccttgaagagatgcaaaaaaattttcccgaaaggaggtttccacaaaggaggtccatttggcagaaatacctcggttaaccacccaaggctaagtt

SEQ ID NO: 636102 - DNA, 517 bp, Homo sapiens
tgagaatcgagctcggtaccgggagtggagagagaatggaagaaaaggggagagaagggaaaggaggaagaaaaggaaaggaaaggaataaattttatttcttaacagttctggatgttaggaagtccaaggttgaggggcctgcatctggtaagggtcttcttgctgcatcatcccactacagaaggcagaaggaaaagagagtgcaagaaagcaagagggcaaaaggggctgaactctgttttataataagcccactctgtgattactaatctattaccacaataacaacattaactcattcatgaaggctattttattaggccccacatcccaactgttgcattgaggattgagtttccagcacataaactttgggggacacatttaaaccatagcagagcacttaggttaattcaactaagaggagctgggaaaatcaaaggcatgagaaagacagcaaaagctagcagagagaaatgcataggttaaggaaaaaagtcacagtgaatcctgt

SEQ ID NO: 636103 - DNA, 107 bp, Homo sapiens
gcacagttttcgtaaagcccttgcacagctggataaatggcatcatgataagctatggagttgaaatgttgctagtcacaattgtgtctcacatctacactgtggct

SEQ ID NO: 636104 - DNA, 185 bp, Homo sapiens
aagctttttttttttaggtaaaaataggatccttaatttctggaaaactaagctccttctggctataactataggcctgggaaacagcaaagttctacagataaggcaaaatctttaagataatactacagtggaacattccatagtaatagctcgagtgctataatgaggtcaatagctccatc

SEQ ID NO: 636105 - DNA, 83 bp, Homo sapiens
aaaacaccctcatgttcatacacctatcccccattctcctcctatccctcaaacccggtaatgatgtcggggttgagtcggcg

SEQ ID NO: 636106 - DNA, 509 bp, Homo sapiens
aacagcaagaagaacaaagctccctgggagcttgtgggactataacaaaagatctagcatacatgtcatcatgagccttggacgctgatgacacggaggacaggactgaaaaagtactcaaagcaatagtggctgaagattctcacactatggcaatggactgtcaaccaacagattcaagaagcacagtgaacccctacacaagaaaaacccaaaggaatccacagcaagacacatcataattaaacttctgaaaactaaagacaaagaaaaaacatcttgaaagcagccggagaaaaatgacaccttacctgcaggagaaaaacaaattggaatgacgaaagatttgtcatgataagccatggaagccagaaggaagcagcaaaatatttttcaggtgtcgaaagaactgtcaaacccagattcttatatccagtgaaaacatccttcaggaatgaaggagaaataaagacaatctcagaggacaaaaaactaacagaatctgctgc

SEQ ID NO: 636107 - DNA, 1425 bp, Homo sapiens
gctctactctgaggcgtgtctcgcacgcgtgaaacgcggcaaccctgttgtctgactcctgtcggcacattcgcctactctaactcacgcttaccgctcagctaatgctgttgagctgctatggtccacctcctccggtatgtcacacggctgcgatgtccaagaattaggcaagtgctctgctggagagctcctaacgtgaccgtggtacatcacgtgcgagtcgcgagctccagattggcgcaagatgacctagaggtgacacatgaccattgcggggaggaggatgacttctcgttcgaacatacgttcgttcatgtgtagaccggggcgcatggcggatgcaaacgttgccccaggtgcatgatgtaatgtagcgacttggaaaccctatcagatcagtctgatgaaagcttctgcaacgtggtgaaccgtaccagacaagcgtctttgcaaccttgatgcaagactgcatacaacagcgcaaagggagaggattgacttgaccacgaattacaacatattgactctcgaattgggaccaacgttagcgaacacgaatattgtgcgaacggggacgcattccactctgtaccccattgatggtttaggggagcgccgcgacattcccgacaaaggtccttggccctgcagccatggttgcagcgcggaggatccatttctaggacggcatatcctatgcgggtataatatcaccaccaaagaccgttttgaggctggcgcgccgagaaaaccttgggtttatcttgggggattatccacactttcccctttgcacttctaattgcgaaaaccgctccatcttcaaggcacatcgacgtataatagaggcaaacggacacggtcccaaaagcgccgtgggaagagtatcatccgcaattttttagcacacgaagacaactacacccaaagagagtttatcccaacaaagggccttgtatagggctctggacgccccgcattaccaagcttgcgcacgatccgtttcaagccgagcgcgatcttaatcagaggcgcctttgtggatgccgacgttccgtggaattttggtggcccctatcaagtagggcgtagagacgcaacactcggacgggccaatattataacatggaaaccaaatcccttgatctcggttatggaaacacgccttcctgaagttaattacgaatggccgtaccccaaatcccatatcacacgtacaacccatttataacccgcacccttttatttaaggcccacgcacttttcttgaattcccttccaatatcaacacttgttattccccctttgatgcactttttggtattgtgtatatgccccacttgtaactattgtttgaaacccctgtgcactatgtaaaattccccataaccaaaccctgtgtatgtacccttatcccccctg

SEQ ID NO: 636108 - DNA, 933 bp, Homo sapiens
gcctagcagccccacctgcctgccgccggcctagttaccatcacaccccgggatggatgcctgcatgctgccgcagcctggccccagtcaccatcaccgcaaccatagcatgcgaggccgagacccagcatgccgcccgcctgcccctccccggctgccccgccctcagcgccgccgagcaccagagcccgggcacgtacgtggcagtctggccgcttggggaagcgggtggccccggtgctgggccttcacaattctgtgcggctgcccttgccctggcggtgggaacaaggaaagggttcatcggcaacggaagggggttcagggacgaaacaaggtagaagacttgccttcaaatctgctagcggggacacggcgcatctgagtattcaactccacagcatcggaatttgaccacccaagtgtgaaaagagttgtattctggataccaccacaaggactttgcgcatatacacctgcagcatattatagccacgcagggaacgattaccctttccccagagttggcttagtgacagcaaattgcgcaagaagaggtaactttggttgaggaagagattttgggaatggatatgtgcactcggggacaacggggcaagccgacacagagcgagacctgacactgagcgaagacgcagaacgcgagaagaagtcgggtttaacccgcacaggcttcgccgtttagcggtaggcgatacggttcccccagagagtttacacagagaggcgaaggttaagatttattttcgcagcggcaggaagcccgggtaaaaacacgatttacatctcaggaaccggcgttattcccaacaggttcagcaaggagggggtccgttccgaatcgcccaattttacccaagcacacaatttacccacgaaattagttaccgacgttggggcaaagcagatcga

SEQ ID NO: 636109 - DNA, 266 bp, Homo sapiens
cgtactgatttgagcgctaatgactgatgtggggaaacccagcgatggcctgtctgtctagattcttggcctctctcggcagcattccttccttctgggtatgtacaggaccgtctttggaatgggggtcttatgacctacaatctaaaacaaagtagctcagataatttattcatgagccagtttttacacaaaagcaaggcggaagttagagtagttttttttttttttttttttttgggcaacaaattttggcttggtcccca

SEQ ID NO: 636110 - DNA, 197 bp, Homo sapiens
gtaccgttatcattaggaggtgctacacctccataagactttgtatggattgagtagataatgcatgttaaaccacttgtatagtttctggctaactgtaaacaagatgttctagaagttctagttatcttttttttttttttttttttttttaaaattcgggttctcattgtgccaccaaggttgtatggccgggg

SEQ ID NO: 636111 - DNA, 226 bp, Homo sapiens
cccttgcggttctcatagggtgggaccaaatgacgattccaatggttctctgcattcataacgatcctcctttgcgtggagggtcactctctttagatgtgccatgaggtaccggaggatccgcagatgagcaggtggcagtagttccagtgcttcatgaagggttcccatttgctcatccggatccataatttgggcagattctataaacttagggtaggcatca

SEQ ID NO: 636112 - DNA, 1175 bp, Homo sapiens
  misc_feature (164)..(164): n is a, c, g, or t
taattctagtcgacgatggcgtgtctccctttcttcgtgtaggttgatcgagttttctatgtgtgcgctcttgaaccttcttgccgcgaaatattggtgcccgattgtatcactgttataagatgctagcagcattggactaaagagatacagaatgagacctngacactcaagataaagagagaacagggccatgccttacaagtgcatgcagctgcgagctgcactctcatcctcaagtctccgcacagttgtcccaccagaagctctgtccgacaagcctggtcagaaaggcagacatcaatacaaaatgggcagaccacacgatgggccaagaacgattgcaagccagagaaaggaaagccaagactgacagatgggtggatcgcttctctaaacgtgtactgaacggccacacgcaacaatgagtgaacagcacactaagtcaacgaacttgaacgttcctgaacgctgtcaaaaggcagctcctcctgaacacgcttctcccaaaaaagcacctaggtactaacgggtaactgctagctagcatagatagcatgtttgcttgctagctgctagctgcttgctataagctgctacagtaccagcaaaaaagatcaccgccgagagtaaaaaggctccagaccagaaggttcctgcccagacaagccacaggccaagaaagcagccgcctgcttccaaaaagctcagaaggggtcacaaaagctccagcccaggaaagcagctgctcaaaggcatctggccacgacatgctcagtggcactccataacacagtactaacacggtacagctagaccctgtcgaccaatgtatctcacgccttgcatttcacagcctgttgaagacaagcctaggaggcaacttgacagcacggatcaaactaacattcactcactccaaaacaaaacaaaaaacaaacacacagggcatgaaacatccatacctgaaggcaccagaatacgacggcacaactaactggcagggggacaaaaggaggggatacaaacaagcgccgcagctactaactaagaggaaacaacccagtcgacactgacgcccacattgtggccgacggaaccgagcaagccgccagacacactccggtcagctgtcgccgctgtagccacaccacacaccgatgaagccaacacaa

SEQ ID NO: 636113 - DNA, 229 bp, Homo sapiens
tatattatttatttattcttcgttagtttcttcagattatcacccactggagggtggaaggggagtgagcagacacacttgggaggtgtcttgagattatcatccgctcacatggtggagctgaggtggaagggagtgagcagacactcggaggtgtcttgagattatcatcgctgaggtggaaggatagagcagacactcagtaggtctgagctcaggagtatcagta

SEQ ID NO: 636114 - DNA, 348 bp, Homo sapiens
actcctgaactcatgtgacttgcctatcatcagcctctcatagtgctagggattacaggctgtgagccactgtgcctggccttcctttcaatctggatgccctttatttctttctattgccttaattttctctggcaaggacttccagtactcatgttcagttacagtggtgaatgtgggcatactttccttcttctaaatctctgagttaagacttcctatgtttctccattcactatttcatcttttggtttgtcatatttcgcctttattatatatagttatgttccttctaagcccactttgttgagagtttttatcatgaagggatgttgaattttttcaaat

SEQ ID NO: 636115 - DNA, 698 bp, Homo sapiens
caattatcactttttatgtgtgaggctctgtgtgctttcctttacatacattatctctttgagttctcaaagcagccctatgtactaggtactatgattatctccatttgtagatgaggaaaatggggcatacagatgttagataactttcccaaagtcacacagttaatagatttgaacccaggtcatctgcttcccaagatgtgttcttaaccactttatataaacagttatggacaaatactaacaattttattctgtcgttttcctggctcatagatttatttatttttctttgaatgattcatttgttcatttaatcatttaataaatatttgctgaacactctgtgtgcttgcctctacaaagcactggcctgaaccagctgaacaaaatggatttggaccttgctgtccttacagtatagtaggattcagagagtataggacaattacaataatagcatgctctaaatgctataataagggaggtactatgtttatggaaacaaaaaagatgcacctaaataagacttgggggttttaggaaaggttttccagacaaagtaatatcttttatgagatctgagagatgaatgatgataatgatgaaggagggaagataggaaaaaactccaggaaatgagacaagtttacaaatcagagtgggtatgtattttgcggaacatgaaagggggt

SEQ ID NO: 636116 - DNA, 102 bp, Homo sapiens
acaggatccctgcgcgcatcaccgcagcagcgagctctatcgcatcggccagcagctggggatcacgttctcagtgtgggactcggcgagccttgagaatgt

SEQ ID NO: 636117 - DNA, 111 bp, Homo sapiens
caccaggacgcgcagtgcttcacacggtgcatatcatgacaccatggacgcagcagagctgcatacagtgttgctgatatcaaacaccatgcatgcaagagccgcttacac

SEQ ID NO: 636118 - DNA, 114 bp, Homo sapiens
caacctgaggagttcagtcttgcgtccttcccctccccaagaagggagggggctacttcagtgcccttctgtgtgttgcctgggcaggataccttgatccacaccagctaccca

SEQ ID NO: 636119 - DNA, 185 bp, Homo sapiens
agtcattctacacggatccccctggcgtgctcaggtctacattatctttgctggagttgtgctattgtctgaatgtgtctccacaattgatgtgcttgaatatgcgcagtccccaacgcaaatagctgttagaacgtggggttttttgtttttgaagcggtgaaatctggctcggttgcccaggt

SEQ ID NO: 636120 - DNA, 488 bp, Homo sapiens
tcaaaatcttgataaatatatcttggatatctatgtggcctttcagctcagtctttcctgaatttttattgagacagagtctcactctgttgttcaggcaggagtgcagtggtgcgatctcagctcactgtaacctccacctcccaggttcaagtgattgcctcccaagtaaactgcgattacaggtgcccgccaccatgcccagctaatttttatatttatagtagagactaggtttcaccatgtctgccaggctagtctccaaactcctgacctcaactgatccgcctgccttggcctctgaaagtgctgggattataggcatgagccaccgcacccagccataataatacttcagttcaaaaactagactgtcttgtagccattacacccgaacaagatcatgtatattgtgggaacatggatggagctggaggccattattcctaagcaactcatgcaggaacagaaaacaaatacacatttct

SEQ ID NO: 636121 - DNA, 150 bp, Homo sapiens
catatgaatgagcgcggtgggagtcaggacgccatcgaggtcgaacagcacggcatggaacttctcatcgagggagggcgagtccataatcctcatgctattcaccatgtggggaagggtcatctcgattcgatctccaggaggttgctt

SEQ ID NO: 636122 - DNA, 610 bp, Homo sapiens
gtatatatacgcatgttcttcataagtcatttgtcttttgatttcaccctggtcatttggaataatgtcaccgagattagagttcttcaaaaatctgatgtaaaatttaacccatgtagaaaagttttcttctgatgttaaagtgtgtggtggtaagacattatttctcacctttgtcttagcttgaggtacttcagagtgttgatcctgtgaatcgattggatcaggtgaggaagtactcagcggtgggatatactgtggcagcggatagtgtgtgtccggttgataatacgcaggtgacgtttgataatgtgaacacgtcatcatagatggttgttggtaatgtgcccagttagaggccatagctttgtttggggtcatcatgccgtgctgttggtactgtccattctgtggaggtggtactgaagcaggttgaggagagacatgatgatggttctctggaacagctgatgtcccaggtgttgtctcttgttgagaattaaccttagtggaatctctatcaaattccggtaaattggaagctgaaacggctaacggatcttgatttgatgggacttccttagaagtaaccgaagcataggcgctacca

SEQ ID NO: 636123 - DNA, 103 bp, Homo sapiens
gagctgcgtgcagcatggtcacacacttcttctaaatgacaggctctgctcgatgagcagtgcagaagaggattgctgttccccacctcccgcaggttctgga

SEQ ID NO: 636124 - DNA, 463 bp, Homo sapiens
cccatgttgggggtgtctgcagtatttctcacttagtccagccaccctgcctgatttcattcattcattcaacaaatatggttcccaaagtcccaggtgagggaactgaggctcccagtgatgaaatgatttgcccgaggcctcgaaggtggcgggtggtagagctggcctgcaaaccaaagaccattgctatcaagagtggtgatggggccgggcgcagtacgtcacgcctgtaatcccagtagtttgggaggccaaggtgggcaaaccacttgaggccaggagtttgagactaccttggccaacatggtgaaaccccatctgtaccaaaaatacaaaaattacccaggtgtggcacgggcacctgtaatcccagctactccagaggctgaggcatgagactcacttgaacccaggaagtggaggttgcagtgagccgacatttcgccacagcatccgtctc

SEQ ID NO: 636125 - DNA, 164 bp, Homo sapiens
aggacgctcttgggacggcggagctatcagcgtgaccagctgctgagatctgcagtagctgacacagccttcacaggctagggagtgatggggttatcacacctagaacagcagctagctcttcccagaggaatgggacagaaatcaggcaagctcctgtgagg

SEQ ID NO: 636126 - DNA, 546 bp, Homo sapiens
  misc_feature (256)..(256): n is a, c, g, or t
  misc_feature (280)..(280): n is a, c, g, or t
  misc_feature (286)..(287): n is a, c, g, or t
ggatcacataagcctggtggttgaagctgcagtgagcctcccacctcagccttttggatagctgggactacaggcaagcaccacaatatccaaaaggctgaggtgggaggatcacataagcctggtggttgaagctgcagtgagccaaagattgcaccactgcactccagcctgtgtgacacagtgagaccctgtctcaaaaaggctgaggtgggaggatcacataagcctggtggttgaagctgcagtgagccanaagcaactttgggccaacccaacntgggcnnactccagcctgtgtgacacagtgagacccggtctcaaaaaaaaaacaaacagacagacacagaacaaaatttttccaggggttatggccctttacaaaaaaaaaggtttaccccaagaggaaggggggggccactaagaaaacgcaaaaggggggggggataaaggtacttgttcattacttatataaagggggggaaggggaagggtgcggtgagacttaaagggaaagtgggtgaccataagggaattattttaacg

SEQ ID NO: 636127 - DNA, 876 bp, Homo sapiens
ccaggctctggactaacagagcgcggatctcaggttggcaggcagggggaactatcctagtcccctgctgaggctgtgtttgggtaaaaaagtccttcttggcaactgggcgatttaatccaggttgcttctgtctctaggggctcacaggacatctggaacatgaaggaacacaacacaacccaccaattatcttggtggccacagagggccctccaaggagctgatgccctttgtgaggctagtagccatcagttaaatactgtaatccattacactgagaatagaaatgtaaccaggatgtagctgaacatgcccagctttagctgccatgtggctgggccttccatggaaaggaccagccttctctaaggagaggaggaagcagacagaggcagtgagccctcccactctgcgcttcccctcactggcctgctcacaccgctgggtgaaggcacatgtcagggttaggtagttattcaatggtatgcctgcggctcttcaggaagggctgattggattcctatctacatcttccactgcattttggcacaaaatgctctggctattgcctgaccaatcttagcggtaactccacagggatggcgttacctatgagaggccctagggtcggagtgaagctgtgtaagaaggagacccagcgggtctggttctctaaccttgggtccaactatttacaggggttcccgaaatctttacggccggaatggggcggatcccacagagaggtcggaggactcccaaggaaaacacccacccttgagaaccgggaactcgaggcccggggagaagcccacccgggagcacatggcacagaaccaccgcgggaacaaacaccgggcacaggaaaagggg

SEQ ID NO: 636128 - DNA, 447 bp, Homo sapiens
aagaaatgcagggccggagggcttgcagactgtgcgcagaggcagtccgggccatttggtagacccgggcaatttgtttagctataatgaccttgattaagaatgagtggacttagaagagaccatgagacggttggaggtaaaaattttagtgcctagtaatggctacagaaatacaagtaacggtgttgggggcattaggtaggaggggagcgcgggttgggaacgagggggaagcgtgatgggccgaaaaaatgaatgcctagaggggcccttaccagacttaatatacctaagcggggtaaatgatagatgggagaggacatttaaattatatacagaagcgagggttttggggaagtagaaatgaatataaatggagtgtatagactgggatgtgatgaaaaaaggcgtgcattgaaagttctagacaccacgcgacgtggg

SEQ ID NO: 636129 - DNA, 272 bp, Homo sapiens
  misc_feature (201)..(201): n is a, c, g, or t
ctattttgtataattaactttgatgttgagaatccacactttattgtacacttcattgccacttgaaattcatggtcttacagtgagatttgaatttctattgagcgcttttaaaaaagtaatacctaaccataaagttaaaatctatgtatattgagtcatatctaaaaccacgtataaacataaattgtatttcctgtnttaatcccaggggaagtactgtttgggaaagctattattaggtaaatgttttacacattactgtttctcac

SEQ ID NO: 636130 - DNA, 465 bp, Homo sapiens
cacaagaggatcacggcgcggaccttgtcactaaccccactcacaccctacacccgcataggcccagcgcgacagacacactcaggagctcttacataacacatgaagcaatggaatgaagaaatgactgatccaaaccctctttagagactgaatttgcatgcagaatcctaggcggttctagccacacctgtacccttgtccttcagcggctgacacccacgtattcatccccccactacctcttgaccctaaagcaaccccacctcatgtaactctgaagctcttaggccaccggagggttctcagggctccttggtcctggactgtggcactgggggcaccttggtccctggggtctctgaagtcagtgtagccctcactgctcactgacatggtgtctctgcctctctctgcttctctgtgtccctcatcttcctcccacttcattctgactggcaagcc

SEQ ID NO: 636131 - DNA, 138 bp, Homo sapiens
accggacaacggggtactgagcccgaccccatgaaagggtctggatctgtgcaagaaagaattcagggcgagtctgcagtgcaaagttaaagcaagtttattaacaaagtaaagtggtgaaagtacagctactacata

SEQ ID NO: 636132 - DNA, 295 bp, Homo sapiens
  misc_feature (15)..(15): n is a, c, g, or t
  misc_feature (26)..(26): n is a, c, g, or t
  misc_feature (49)..(49): n is a, c, g, or t
  misc_feature (55)..(55): n is a, c, g, or t
  misc_feature (102)..(102): n is a, c, g, or t
  misc_feature (123)..(123): n is a, c, g, or t
  misc_feature (126)..(126): n is a, c, g, or t
  misc_feature (175)..(175): n is a, c, g, or t
  misc_feature (191)..(191): n is a, c, g, or t
caggggggggggcanccctccctggntgccaggaggttttgaatgcccncagtcntgccctgcctgtcccctcaacccggcagggcctgtagccccaaggancaaagggggtggatggggggnttnaaaaaggggggagccccccagcctggcatccatgttgacattttttgantgtcccctggttgggnggagccaggcccttccctaaagttttgtcaaaaccctcctggggaaggggtcagggggtttgggttttgttttttaaaataaaaaaaacatgttatattcccca

SEQ ID NO: 636133 - DNA, 596 bp, Homo sapiens
tctctacctaagagcagctgacttcccgggatcttccccccactcctcacacctcacttgtcccaggcgctgccttcatccgggcgggtagcggcactggggcatggggtggtgggtgggagctcaccgccacctatcaagctctcagctactcctgaaccgggcagagatgatgaccagacgtgtatgtacactacagcatgctatgtggcagagcaccagtggggcctaatcctgcctcatcatgctgggcaggaatctggaaagggaaacatggtgagtatcagcaatcggggaagggagggggtaaataattccttcccagaagtctgtatcatgagattgggaggggaccgagcccgtgtaacatggatgtgaacagggaggatcagaggtttaatcagaacacattcttttatacaaccaactctccagagcgtgagtataggagtgccatgagcttttaagtcagcagtttggtaacctcggtatataaaatcataacccacgcgtggggggggaggggaagacgatttcagctgacagagttagtggcacccagtatggtgggcctgtagctgcaaagagcttcaggc

SEQ ID NO: 636134 - DNA, 107 bp, Homo sapiens
cgcttagagaaaacactgtttactgaacagtgctttgaaaccacgatgggtgatcagagccccatttctgccttctagagataaacctgtctcccttcctgcagggt

SEQ ID NO: 636135 - DNA, 280 bp, Homo sapiens
tgcacctgtcctgcccactggcactcggtggatggtgtgcgggcggatgggtgagttagcggacaaaggtgggtctgaggctggccctgtgttggtgtgaggtttggtggtcaggacctgggcgggtggtcctcagttcttggcccgttttctttaaagggtgtggtgctattgggtcctactgttttcccaaggtccccagcccccggaaggcaatagactcctaaggactttggtccctcagctacttgcctttggaggttggcgtccttggcccagc

SEQ ID NO: 636136 - DNA, 321 bp, Homo sapiens
cttagaggatccccggtatcgggggctaatagtcctagagaatacactaatctatagattttaatcctccaagtttgccctgccttctatttgtctaacatggcttcctaatgtatctccttctctggaagctgatagagacgctgagaacaatgggggagtcctcagctaactgccagtatgcccgggtgtgaaaggaaatgaggccgaaagcccaagaggtcgcgggctcggaaacaggacttaggaggattgtgagacccaaaggctgagccataccgtagcccctcccatactccctgcccccccccgtatacagcg

SEQ ID NO: 636137 - DNA, 139 bp, Homo sapiens
ggcttaatggtcgaggccatctcctgggccgcctggccactcgtggctaaacaagtactcctggcccccaaggtggtggtcgtacgtttttaaggcatcaacattttcccggaatttctacaggaacaagttgaaggga

SEQ ID NO: 636138 - DNA, 123 bp, Homo sapiens
ttttacctttctgactgctaccgacttttgacctacctctgacgtaccctcactactacggtaggacactctacgtttagacgacctacactacacttccacggatgcattcttgaccttacc

SEQ ID NO: 636139 - DNA, 404 bp, Homo sapiens
atatatacatgcagtactcatatattcaaaagtagagaaaggataaataaatcacagtgtacccattctataaagcagagacgaattgaacaatatacagctacctgtaacactatggattatgaaaccagatgaatatacatgatactgccatacatatccttgatagtatatacgtaagaggcacctcgtcaatatatactatttcgtgaaatcacgactttagggggatcagagatcgaaagggaagacagaaagggccattatccggaggatcatgcatactgttgaccttagatcggggatgtcctccgtcttatggaagtgacattgaactatacaccaactggatgaatgctgcgtatgctacatgtatactttcacttcactgaagctttaaactt

SEQ ID NO: 636140 - DNA, 102 bp, Homo sapiens
gagcgcgcggggagggtgcctccagggggccctcggcgggggccgggcccctccccctggtctggggggcgggaccggccccccgcgccccccgccaggcag

SEQ ID NO: 636141 - DNA, 350 bp, Homo sapiens
acactccaatatgcgggatctctgggagggagctaatgtctgactagggcttcatagagggctgcatgctgaagagcgtgttgaagctggggttctgaagctcacgtaggagtgtaccaggtagacaagagtatgtagaacagctcgggcagagattgcactggtacggcagataatatgcaggtttaagatattgtagcacctctctaaaaaactgatgccaaaagccaggcacggtggcttacgcctagaatcacagtactactggagtcttaggcaggacgaacacctgatgtcagctggttgagaccagcccttcaacatggtgaaaccccatctctactaaaagt

SEQ ID NO: 636142 - DNA, 1853 bp, Homo sapiens
  misc_feature (2)..(2): n is a, c, g, or t
  misc_feature (382)..(382): n is a, c, g, or t
  misc_feature (822)..(822): n is a, c, g, or t
  misc_feature (1149)..(1149): n is a, c, g, or t
  misc_feature (1400)..(1400): n is a, c, g, or t
tnttctgcagacgcgtggcaggcaaagaggacaagacgggagcgggtcgttcttgtgtgcgtacttcctactgtcacttttgctttaccttcttctatgtctagtgtgtttgtctgtggccagtagagttgttactgtcgtgtgttgtctctctctctcgttgtagtctgtgtcttagtagtcgagtgttttggtctgtttctcatcctgcctatgtttgtttgtcagtgttgttgtttcttagtatctttatttgtctgtggtggctgtgtctcgtgttgtttgtgtgtttgcttttttactttcctttcttttgtttttttgtcgctcgctccgcgcgtgtgttctttttctgcgggttagctctgagttgggcgctctnggactattaaatacaatcccccctgtgggggtcgctcagccgaacccaccacgcggcttgtgttggggggcgaccaccaccgtttgtggttgtcatcgctgcggggtgggtggtcgcccccaacacgcgggtgggtgcgccacacacaacatgcagcgcgggccgttggttttgtatatagctctcgtgcccgcccgcctccgtctgcttgttattatgtcgcgcgcggtgcttctcttcttagtgtgttgtgagtcagcgtcgccctcgtcggggggggcgacacaaattttttgcgcgtccatgctggaggggccctttggtcgtactcccaccccttgtttgtggtgcgaacacaacaaaagataggggggggtttgttttgtttcgacgaaacaaccacaaagaaggcagcacagagggagctcctctgtcaaaanatattttggggcccgcggcaacatattttgtggagtgcccccacgataggtggtaagtatcatcctcgttttgtcgttgctcacaccggccgctgcttcgtctgtgtggggttagaataaagacaccacacaggcggcgtgcggggctcccaacacagatagaatttttttctcccggggagtttttatagaacacacaaaaaaagaggggtctctgaggagaagacaacactcactctcttctctctctattaaacacgttgtgtgtctcactctttctctctcgacgggggggtcgacacaacacacacggcgagagtctcctcnccctcacgcgagagagggtacatgatctactctgtctgtctcgcgtgtttgttgtgtctctctctctctgctgctctcttcttcgacacacacagtgtgttgacacacactcgcgttatatgtcctcgggtgtgtctctgtgaggggtgtgtatgtgaggaggagctcagcagtagtttctctctctctcagcgtgatatagagacacacacacacgcgcgtgagagagagtgaggggtctcttcttctcncacgcaggtgtcttattgtgggagagaggggacacacaaaagactctctcgcgcggtgtgtctatagtgctgcgagagagacacacaagtgttctctcacacacagagaggtctgtgtgtataagacacacaccccccacttctctccgcgccccaacatagagagagatatgtgtgataacacagcgccacacgctgctttgtataaagaatgggaaccaccactcctcgagagagagagagcaccaaaccccccctcgcaaatatatggatggaaaccacgcgcgttttgttgtcacccactctttttctataaggggggtatatttatagagaaatattgggttttataaaagagaaaaatataaataggggggggtggtttggcccttggggtttggggaaattcggggtttaaaaataaaaaaagatttttttttctgggggaattga

SEQ ID NO: 636143 - DNA, 201 bp, Homo sapiens
ggggattacagttcaacatgagatttgagtgggacacagagccaaccatatcaagggttttgaaggggatctgtttccttctctgtacacattgctgaattctgccattggtacaaagacagagtggtttatgaaaggttgtgatatgataggaggccatactcactcatctccttcactcatctagtctctctcggatct

SEQ ID NO: 636144 - DNA, 93 bp, Homo sapiens
gcactggatgtattgagccaattactgaatctcggttcggtttatccgttccagcgcgagggagggggcaatggataattttcttgctctgac

SEQ ID NO: 636145 - DNA, 605 bp, Homo sapiens
ccggtaattccgccattatgcgccgcggggaatgaaagactatttgctggatttcattgatgctgactggcgcttgggttattaaccccactgttaaaattgcccttaaactagaaaccacgaaaggggagacaaacgagtggctttttggacatttctcccctgatcccccaccctttaatcatccatgtctggggtggggcaggaattttagggaattctgaactcacaaccacgtggcaggggaagctcctcgtcttgccatttggcctggtcccatttgaaaattggcgcgctctatttctataaagcaagtttcttcaagatgcaagccagattcgtctttctgatcctcatcatatatgaaaagagcaacttacatatcctttctttcggacaacattaaaagggaaaagctacctggttttttcttctgggcgggcggactttggatgatcaacccttaggcacgccatttgttctttctttttcctaacacaaaaaaagagggtcttttacttcttgtcaccgagcacttacttatctgccgctggtcggcttttattaaaaggaaacaccacatctctttctttccctaacaagag

SEQ ID NO: 636146 - DNA, 664 bp, Homo sapiens
  misc_feature (31)..(31): n is a, c, g, or t
  misc_feature (412)..(414): n is a, c, g, or t
  misc_feature (457)..(457): n is a, c, g, or t
  misc_feature (460)..(460): n is a, c, g, or t
  misc_feature (463)..(464): n is a, c, g, or t
  misc_feature (517)..(517): n is a, c, g, or t
  misc_feature (519)..(519): n is a, c, g, or t
  misc_feature (527)..(527): n is a, c, g, or t
  misc_feature (533)..(533): n is a, c, g, or t
  misc_feature (535)..(535): n is a, c, g, or t
  misc_feature (537)..(537): n is a, c, g, or t
  misc_feature (545)..(545): n is a, c, g, or t
  misc_feature (553)..(553): n is a, c, g, or t
  misc_feature (555)..(556): n is a, c, g, or t
  misc_feature (558)..(559): n is a, c, g, or t
  misc_feature (568)..(568): n is a, c, g, or t
  misc_feature (573)..(573): n is a, c, g, or t
  misc_feature (582)..(582): n is a, c, g, or t
  misc_feature (631)..(631): n is a, c, g, or t
agaagaaaaacgtcttgcaagaaagacttcntggtttacaacgatcaaatgtatgggctatttgcctgattggtggcctggactcagcaagagattcctttgcagcagaggttggccacacatctgggggctgcaacaccactgaaaagacagctttctaagcattagtgtaaggcaaaaagcagagtgcctaaacttggccatttccaccaagaaaaaaagtttcatagcaaccttccttcaccagaaaggcttactttatgatatgctaacagaacagaaaagcaggttgggacaagatacagactttgttgcatttagctatgacccttctctcccctctgtggatgtgggcagggtggggagaggcaggaagaggcagtagagggaaatgacatttgcactcaggctnnncgcccctacccacccctacccttcgcccagacagacgttgganttnatnntcaccaaggggtgggtaatggagtcccagctaattgccaggagctgaggcggntncaagccantaaaanangntgcccacnggctcccncnntnnctgtccttnatggnacttgcatntttaaggctgccagcttcagagctccctggtacattccctggccaattntcatccctgtgtcaaatggatgggatgccaggg

SEQ ID NO: 636147 - DNA, 248 bp, Homo sapiens
aacttgacgatgatatatagaaagtgacagagacatcaggcattagattctcatagggacagcgcaacgtagatccctcacatgcatggttcacaatggggtgcatgctcctatgagaatctaatgctgctgctgatctgagagaaggcagagctcaggcaggaatgtgagcaatggggagtggctgtaaacacagatgaagcttccctcattcaacaccattcacctccggctgtgtggctccttac

SEQ ID NO: 636148 - DNA, 116 bp, Homo sapiens
cgcaggacaagctgtatcttactaggagatcctcatagcagatccccttttactcacttgtctgactgcttttgtgctacaatgagcaagacgctcagtaagttgtaacaaaagat

SEQ ID NO: 636149 - DNA, 360 bp, Homo sapiens
acccgtctcacttctgaatccttcaacatcgtgcatactgcttctcactgttctgcaatcgaaatactgtgcattctgtatctggtcctgtgtacctgtaatggtaatagtatctcgatctgcgcgatccttctaaaggctcatcgaatttatgatctaagctcccgagctcatgacgtgactttgttcaatccagtttgactatcttagccaactcatagatccagctaaaactatgagaatagtaacttgtgtagtaataataggtccatcaagatcagcatatgagccacgatcccctgcatcggaataatcatatccggagccaccctaaaaacagaaagaaaaaaatagaaaatt

SEQ ID NO: 636150 - DNA, 129 bp, Homo sapiens
ccggaacgtactacgtagtagctcacttccactaatgtcctatcaataggagctgtatttgccatcataggaagcttcattcactgatttctagctacatctcatgtactcctattacgtgtccggcca

SEQ ID NO: 636151 - DNA, 446 bp, Homo sapiens
  misc_feature (15)..(15): n is a, c, g, or t
  misc_feature (67)..(67): n is a, c, g, or t
  misc_feature (113)..(113): n is a, c, g, or t
  misc_feature (140)..(140): n is a, c, g, or t
  misc_feature (144)..(144): n is a, c, g, or t
  misc_feature (146)..(148): n is a, c, g, or t
  misc_feature (150)..(150): n is a, c, g, or t
  misc_feature (164)..(164): n is a, c, g, or t
  misc_feature (167)..(167): n is a, c, g, or t
  misc_feature (169)..(170): n is a, c, g, or t
  misc_feature (175)..(175): n is a, c, g, or t
  misc_feature (289)..(289): n is a, c, g, or t
  misc_feature (292)..(292): n is a, c, g, or t
  misc_feature (338)..(338): n is a, c, g, or t
  misc_feature (366)..(366): n is a, c, g, or t
  misc_feature (369)..(369): n is a, c, g, or t
  misc_feature (381)..(381): n is a, c, g, or t
  misc_feature (385)..(385): n is a, c, g, or t
  misc_feature (437)..(437): n is a, c, g, or t
tgtagttttaaatangataacaagtattatgtgttacatatagatatataagacgaatacatttccnatagattacaaatgatttattaccaatctaaatctcattatttttnataatctgtataatgaatatgtaaacntgtnannncncacacgtcacatcngantnnccggncttcccgccctccatctcccgcagacatgtgaacaacaagtctgacaacctactactaggagccaacatctaaaaaggcatttcgcatcctacagttggcaatgcctgagaatnccncttgtcctctgccttgtcccacacttattaaggacgtcttcccccncccattctagtagatgtgtagtagtggnatntacttcaggttnaatncgcatttacatattgacttaacgaacattgggcatctttttgagtgcatgtntgccattaa

SEQ ID NO: 636152 - DNA, 135 bp, Homo sapiens
cactgtccactagattcaactttcatgtgaggggtattcggcactgctactttttaaaaaatccgatgcacattcaacttttcacccagtaactcaactgccaggaatttattgttatgaataaatatttatttt

SEQ ID NO: 636153 - DNA, 1060 bp, Homo sapiens
accactgacatgactttccaaaaaacacataattgtgaatcaacacaaccacccacagccgtaagttattagcatcatcccgtctacgtattttttaagccaaagtcaagcgaacaaccgtatttagctggttgcccaaccgttgttccgtccgagcccccgtaagcaacaccccgcgtccgtaagtagcgtaagcgtaccgtggacgtccgtaccgccgtcaacaagtcatggacaaaggccaagcgcgcacgttagtcgcaggtgaaaccagcgtagtcagcgaaaaaagaagagcgtcgtaacgcgtcgtcgtagttaccgttacagtctgttccgccggtaagcgaagaagtccgtccgcgtgtgaagtgtaattaaacccacttgtcaaccgaggacccaagcgagggaaaacgcgttgaggtccaagtaactgttggtgacacatcagttccccattccttcacgcgagaaagaacccagacaagcgttataggtcgcccgccaacacgtttggggccttcagtcaaatccaacacacggaagttagaagggacgagacagccaaggcacgaagaaaaccaggcaccagtggaagaacagcaagggacaaacaagtacacatttccacaataagtagtcataagacaacccccaattaaggataagggacatcccgccgtttccccacccgtaatgcttcacagtccggggcacaccttacaaagttatagaacgcagacgcatccaagccaacagcacagccacccgataagaggccgttccaacgccgtttacagaacccaaatttttcgttaaacgataaagagttcagagagtacaatttacaaagcgtggaagcccacagaagaggaaagaacgcgttatattgcaatgagaaatattcacaattgggaaacggagcccgaaagaactgaagagacatttataagaaggtagaagtggggacacggttaagggggagttttgaaaccaagccaaagagataaaaagcgaatgttatagtcgaagtaatgtataaaaaagaggaacatca

SEQ ID NO: 636154 - DNA, 650 bp, Homo sapiens
agcgggggttttccaatgctggttttgaagtcgcggccgctgttcctgggacgtccggttgaccgcgcgtctgctgcagagaccatgtctgccgacggggcatggaggctgatggcagctacccaggtgacagtggaagaaccggtacagtcgaagcccgagtgtggtggaccgtgtggccagctatgcctctgatcagctccaccgtgcagacaatggtgtccgcagcctatgcctccaccgaaggcagagctacccgcacatcaagactgtctgctgcacgcaactagagaagggagtgacggaccctccacggcggctgctgtcagcggggcatcagccgatcctctccatagctggacgccccagattgcatcacgccagcgaatacagcccactagggggctggacaagttggaggagaacctcccaattcctgcagctagcccacggagaaagtcctggcggacaccaaggagcttgtgtcgtctaaggtgtcggggggcccaatgagatggtgtctacgcgccaaggacacggttggacacccaatgtgtcggaggcggtggacgcgacccgcggtagctgtgcagagcggccgtggacaagacaaagtccgtaatgaccggcgggtccaatcagtcatgggc

SEQ ID NO: 636155 - DNA, 331 bp, Homo sapiens
tcactgtcagacggtctacatatacagtacacaccagtcggtgtctgtcgatatcacaatgatagaattcaacatgcagccaggtgcagttggctcacaactacaatcccagtagtttgggaggctgaggcgggtggctcacaatggtcaggagttcaagaccagccgtggccaagatggtgaaactccgtgtctactaaaaatacaaaaaaattagccaggcctggtggtgagcgcctgtaattcccactactcaggaggatgaggcagagaattgcttgaatccgcaaggcagaggttgcagtgccgattcttggctgatgtgacgatt

SEQ ID NO: 636156 - DNA, 814 bp, Homo sapiens
gatttaggatgaggcttctgctgcttctcctagtggcgggtctggatggtccggagcagaggcctcggccaatctgggtgggtgcccaggaagagattaaagatgcacgtacgccagggggccgcgtgcgtctaagttccagattggtgttgcctcgaggttataggcgggtgtcagatggagtcgagtgcggggtgattaggccaggtgacccagacatccgcattgaaggagagaattaccttcccgtcaacctagtatatagacactgtaagcatctgtccgtgtcagtcttcaaacctagtattaatagggttgataattgtgtggcaaggatcctttgtgctttcttgtggatgaaggctgttaggatctggcaggggggccatgatgttaaggttgatgcatgtatgatggtttgcttcttgagacaacatgatgggagaaccagtgtatgtcgaatcaggtgcgtttgaggataacctttaaatgatgtacctgtgtggtctaagctggaatctggtcacctttccatccatgcaacaactgtgttcaaaattctgggacaatgacatggaggctcaatgtgcatatgggattcaatcccacaccacttcgatcatagcagcactatcagactgaaagctcttggccttagggacattgcaagacgcggtgactgacattttgaggctgtacggagaagccagtgttgtcagacaaatcttttgggaggcggtgctctggaaccccggggaatgttcgggggaatgggacggcctcggggcaaaatgtggttccccccaaacaatgg

SEQ ID NO: 636157 - DNA, 1339 bp, Homo sapiens
agtagtgcttagatcgcaagtcgtgctgaccttcaatgctgcacagtgagtaagcatgaaaacaggtactgttatggataccaaggatcgatgaagttaacaactgagatcaaagaactgaaagaaactctatgaagaacaaaaccaaggcaggcagatgactacttgcgatcagtactgttcctatgcttcataagccatgagagaagttagagaaacgctacagagatgttagagacacaagtggcccatctgtgtgcaggagcaatcgtaaacaagattccgcgagggtctacctatagccaaggtccagttgttaccaggaccatctccaaataccctatctgtatactgaaaacgaggttactcatctggccaaaaatacaagcttcaggcacagaggcaaagatccagtggaatatgggacgaatggtagaggaccaaacaactgcataccaccagagagcataaaactacaacaaagcaagaaagcagcacaatgagaaggtatacacccatgcagacagacacggaaaggtacatgcgctagagccagagaggacataccagaagatagacaagaaagggcttagcatagaacaattaccgacccgggacgacgaacataagacacatatactcacgtgacggaaagaaaaatccaatggacgaccatcaggacccagcacccacagcactggcattggcaccggaaagatatagcgcataatcccccactgaagcacacgacacaagaaaaatctatgacgaaagctccgacaaaaacgcaagactgccatgagatggacaagcatcacacacacaaacggaccacagactcgacaacaggcacaccagcgacgattacatggaacacattacaaccagaaaatacacacaggaaaacacaatgccaagcaagacaacttcacttaaagaaagatcgaagtgaagtcccacgtagaagccgtctgcgggcacagacacggcagaatatgaccgacaaacaacaatactaacaattggatccaacaatataaccataaacactgcaacgaccccacatcagcgactttgcttaacctaacacacaccatacaatcgtaagctaactaaacacaaaatatgccatacaaacaccataaacacgacacacgatctagagaacaacctccacacaatctgagattacagtaactaaactaaagccacacacaacaagcacactaccactcaccaaacaacacaagaaatcaacagacatacaaacaaaacacacactactcatttacatacaccaccaatatacataaccacatcacacactaacaacgaaacg

SEQ ID NO: 636158 - DNA, 362 bp, Homo sapiens
ggcccctcagaatgatattgggcctcacgttaggacatagcctatgaagtctgttgctatagttcctagcaggaggataatgccgatgtttcaggtttctgagtagacatatgatccgtaatataggcctcgcacaatgtgtaggaagaggcagataaagaatattcaggcgccattggcgtaaaggtagcggatgattcagccgtaatttacgtctcgagttatgtggtcgattaatgcaaagtcggttgaggcgtctggtgagtagtgcatgtctaggtatagtcctgtggggatttggaggatcagtcaggcgccaagtagtgagcggaagtttcatcgtgcggagatgttggatgggc

SEQ ID NO: 636159 - DNA, 141 bp, Homo sapiens
gggttggcagataactctttcaccctactcaatgtaagagctcatcttcaacctgggtgacagagtgagactctgtctcacgagaactacctgtaagtaaacagttactaatgaaatgggattatacaccaagggcagaac

SEQ ID NO: 636160 - DNA, 725 bp, Homo sapiens
  misc_feature (699)..(699): n is a, c, g, or t
gttttcccctttctccctgttccctccttcttgtctccctcttctttcgtattttcctctatctttttttcttctcatctccttttgttcctctcccttgactctcatgtctttcactatcttttcttcttgaacaagttgttaggtgtccttcgcctcttatttctgtacctcttgatctcttacatgcgtatcctctctttgcgccgttttgctttgcgtgccttgtcttcccttgtatccagatgtgtctggctgcctgtggagattctgcctttccctgtagcatacttgtgtttctattgcattatctggtcagtatatcagttatcatagtgtgccatttcaagtcctacggtgtgggcttccatgactgctctttaatatgaagtactcaagtctctcttgggtacttgagctggaaagcctatcacggacaactgacgggctacctgttttcactttgataaactttgacttcactggaacctttacaaactaatctcagacaaattttttggtgcccatgcagctgtagttgttcactgctttcctggatggatgggactcttatgtcataacttctgtactcctctggcaccatagctaatggtcatccttctcccacaagccccggctttgggacttgaatgatacagctttgcttctgtgtagtatacctgtacatacctgtttcantaccccggggggggggaatgtatttt

SEQ ID NO: 636161 - DNA, 390 bp, Homo sapiens
cacccggactggccttttcttcccccatcacggccctcgcttctccctgcaggagctcgggggcgaaacctgtgtctggatttcagtgcatgacttcagatcctgctccaacatgtcaggtgtgcggtcatgttgccggacaccctaatgtaagcaaatgttgttcagtgcgatcaatgtatattgacttccgtactggtttacgcaaaacccaaaggtacctgtgaaaacccatgtctggaaatgtttggcgcgttaagctgaatgaccttctgaccctgggccgttgcgtacgtatctaattcataactgcgttaattgtattgataaagtgtttgggagtattttgcgcttgtgatgtggaaataaagtgtttgatctaaactttga

SEQ ID NO: 636162 - DNA, 544 bp, Homo sapiens
  misc_feature (12)..(12): n is a, c, g, or t
  misc_feature (24)..(24): n is a, c, g, or t
  misc_feature (87)..(87): n is a, c, g, or t
  misc_feature (111)..(111): n is a, c, g, or t
ccagggcaaggncaagttcagttntggcaagcctgcttgcccatagacttccccccaagtagtctcaggccttttgacatgtccttnaggggcccttaagaaagaaagtgnagggacactccagaggctgtcgtggaggatcatgtgagcctgggaggtcaaggctgcagtgagccgtgattgcaccactgcactccagcctgagtgacagagcgagaccctgtctcaaaaaacaaacaaacaaacaaacaaaaacagaacattctgggcacggtggctcatgcctgtagtcccagcactttgggaggccgaggctggtggatcacaaggtcaggagattgagaccatcctggctaacacagtgaaaccccgtctctactaaaaatacaaaaaaattagccaggcgtggtggcggtcacctgtagtcccagctactcgggaggctgaagcaggagaatggcgtgaacctgggaggcggagcttgcagtgagccgagatcacaccactgcactccagcctgagcgacagagcaagactccatctc

SEQ ID NO: 636163 - DNA, 270 bp, Homo sapiens
  misc_feature (5)..(5): n is a, c, g, or t
  misc_feature (7)..(7): n is a, c, g, or t
  misc_feature (15)..(15): n is a, c, g, or t
  misc_feature (40)..(40): n is a, c, g, or t
  misc_feature (147)..(147): n is a, c, g, or t
ccagngncccagccntgtggattgaaaccacagcctacgncctgctgcacctcctgcttcacgagggcaaagcagagatggcagaccaggctgcggcgcatcacccgtcagcagcttccaagggggattccgcagtacccaagacanggtgattgccctggatgccctgtctgcctactggattgcctcccacaccactgaggagaggggtctcaatgtgactctcagctccacaggccggaatgggttcaagtcccacgcgctgcagct

SEQ ID NO: 636164 - DNA, 348 bp, Homo sapiens
  misc_feature (5)..(5): n is a, c, g, or t
  misc_feature (31)..(32): n is a, c, g, or t
  misc_feature (78)..(78): n is a, c, g, or t
  misc_feature (93)..(93): n is a, c, g, or t
  misc_feature (179)..(179): n is a, c, g, or t
  misc_feature (197)..(197): n is a, c, g, or t
  misc_feature (232)..(232): n is a, c, g, or t
  misc_feature (241)..(241): n is a, c, g, or t
  misc_feature (305)..(305): n is a, c, g, or t
  misc_feature (348)..(348): n is a, c, g, or t
cgacncccagctaatattttgtatatttagnngagatcacgtctccctgtgttgcccacactgtgctcgaactcctgngctcaagcaatcctnctgccttggcctctgaacatgcagtgattacaggcgtgagaaccaccgtgcctgacctgaggtgtgcactttagacattgagagangccaagttcacattttgntggtgaacagaaatctaagctggcctccttttggntcaggagtntttatgaattttacttttttgggttctttttggcttcttttatttttacccccactggccctgnattctctcctgtgctcggtcgagaggatcttaacttgcagtgn

SEQ ID NO: 636165 - DNA, 131 bp, Homo sapiens
agtcgattcatacaggatcccgttgggccacgcaccgtgcccagctaagttatttgtgttatcagtagaaacgtgtttcgccatgttgaccaggccggtctcgaactcctgacctcaggtgatccgcgcca

SEQ ID NO: 636166 - DNA, 764 bp, Homo sapiens
  misc_feature (121)..(121): n is a, c, g, or t
  misc_feature (405)..(405): n is a, c, g, or t
ttgttcctcatccgcctccttgctcgccgcagccgcctccgccgcgcgcctcctccgccgccgcggactccggcagctttatcgccagatgtccctgaagctctcggctttctttttaatnccccgtgcatctggatcaccggacgtgccccacacatgtcatgacgccagccgtagaacaccatgctccgaagatcaccacacaaggaacttaacaggacgaagaacggaagttgtggacagcggcagacaaatgggaacgagaacgcccctgcataacggggaagtgctacatgagcgaacaactggggagcaggaggctgacaactgaaggtagaacgaaagaacgaggacacgaacggtggggcaggacagacggagcgacggacagaacacaggtgaatnggtgaggaacgacggatggacgatgaagcactgacggaacgctgagatcagctacggtgcaagccgggcagctgaacgatgactgacggactgctgactgtcgataccaagaagcagaagaccgacgaggatgactagacagcaaaaaaggaacaagttaaactaagaaaaaaaaaagcgccgccgtagacctattcaccctcacacttcccgtactcagaatctaaacggtttggtcaccttccgagtagagaggcctgcctgccaatcggtggcgcagtgccacccggagatgacaccgcgctctcagcacccaaaccaaaaccatgaggaattggcacacgggggcggaacaacag

SEQ ID NO: 636167 - DNA, 512 bp, Homo sapiens
actgcactccagcctgggggacagagcgagactccgtctgaaaaaaaaaaaaaaaattcattaacagtacatttaaaatttctgttactggagattgtatttctcattccatccattaatgtgcagcttcaatgttttcccccagatatgcaatttcacttacaggatcttgttcttcagtgacatgtcataagagttaataattccacaagccaccctgcactgctgtgatcctaacaatattgaaaggttggtgtgtatcctttcctacctttcctcattctaaaatgtttcctcgttctaaatgccaagctggttttgaacaactgacctcaggtgatccacctaccttggcccctcaaggtgctgggattataggcatgagctaacatgcccagccctaatctgctcttcttagatggatacttgtcagattgggttaagacccactctcatggcctcattttaacttaattttctctttaataaaagtccaaatgcagtccaaaaaa

SEQ ID NO: 636168 - DNA, 121 bp, Homo sapiens
gggagagctagactaggttggtcatgatgcagaggctactcaaatgcagtcggcttgatcctggctctgtccctcattcctggttctggaattcctcgagttcaaggttatcctacgcgag

SEQ ID NO: 636169 - DNA, 359 bp, Homo sapiens
  misc_feature (99)..(99): n is a, c, g, or t
  misc_feature (121)..(121): n is a, c, g, or t
  misc_feature (133)..(133): n is a, c, g, or t
  misc_feature (138)..(138): n is a, c, g, or t
  misc_feature (168)..(168): n is a, c, g, or t
  misc_feature (187)..(187): n is a, c, g, or t
  misc_feature (217)..(218): n is a, c, g, or t
  misc_feature (259)..(259): n is a, c, g, or t
  misc_feature (271)..(271): n is a, c, g, or t
  misc_feature (281)..(281): n is a, c, g, or t
  misc_feature (285)..(285): n is a, c, g, or t
  misc_feature (287)..(287): n is a, c, g, or t
  misc_feature (321)..(321): n is a, c, g, or t
  misc_feature (324)..(324): n is a, c, g, or t
  misc_feature (335)..(335): n is a, c, g, or t
ccctgagggcccttttgcctaaaattaacttaatttgtagaaaacaatggattccgttaatatcctttccatttatggaaaaaattgttaggggtgccnagggctttttattaaaagtttntctttaaaggtntaaanaattgtgaatcagttgaatgttgggccccnaggggaaacagtttgtaanaaatgatttaaatttttcagttcagttccnncagtcccttggagctttgcaatttccagaccagttttttcntttttaagttcnttacaagccnggananattttgaaattaacttgaacctgaggatttggcncangatgggttaanaaattttaactttcaataatttga

SEQ ID NO: 636170 - DNA, 634 bp, Homo sapiens
cgcatcaggaggaatagctaatggatgctgcacttattattgaggtggtgggttgatctgtgcagcaaaccaccgtggcacacgtgtacttatgtaacaaacctacacatcctgcacatgtattccagaacttaaaataaaagttgatgggaaaaaaaagaaattgaggtttaatagagacttaaaattcagaaataaaaaaagttttggttctggctgtaatagagtggtaagaatcacattcatctttccactgtaaatacctataaaacaaactatatgaaaaagctgttctttggcatcgtacaatagacaacataagactttgattctcaagagaagggctgcagttgttatcgtgagtcatgcctgtaataccagaattttgggaggccaaggcaggaggatcgcttcaggccaggagttcaagacaagcctggggaacatagtgagatcccatctctgtaaaaattttttttttttaattagctagatttggtagtgtgcgcctgtagtccagctgctcaggaagctgaggtgagagaatcgcttgagcccaggagtttaagactgcagtaagctataaatgtgccactacactccagcctgggcaacagagtgagactgtatctca

SEQ ID NO: 636171 - DNA, 161 bp, Homo sapiens
gggtggaagttctccaaaacaatatccacaacaaagtctgacctcactctgagggagatgggaagttggaggaagaaggacttaaccagcttccttgagttaggaggattttgctttccgtgtttcccaccagggctatatgtccacattcaggtgggcca

SEQ ID NO: 636172 - DNA, 771 bp, Homo sapiens
  misc_feature (1)..(1): n is a, c, g, or t
  misc_feature (493)..(493): n is a, c, g, or t
  misc_feature (500)..(500): n is a, c, g, or t
  misc_feature (507)..(507): n is a, c, g, or t
  misc_feature (512)..(513): n is a, c, g, or t
  misc_feature (520)..(520): n is a, c, g, or t
  misc_feature (524)..(524): n is a, c, g, or t
  misc_feature (529)..(529): n is a, c, g, or t
  misc_feature (534)..(535): n is a, c, g, or t
  misc_feature (540)..(540): n is a, c, g, or t
  misc_feature (544)..(544): n is a, c, g, or t
  misc_feature (548)..(548): n is a, c, g, or t
  misc_feature (553)..(553): n is a, c, g, or t
  misc_feature (557)..(557): n is a, c, g, or t
  misc_feature (564)..(564): n is a, c, g, or t
  misc_feature (572)..(572): n is a, c, g, or t
  misc_feature (581)..(581): n is a, c, g, or t
  misc_feature (606)..(606): n is a, c, g, or t
  misc_feature (609)..(609): n is a, c, g, or t
  misc_feature (616)..(616): n is a, c, g, or t
  misc_feature (619)..(619): n is a, c, g, or t
  misc_feature (623)..(623): n is a, c, g, or t
  misc_feature (627)..(627): n is a, c, g, or t
  misc_feature (631)..(631): n is a, c, g, or t
  misc_feature (635)..(636): n is a, c, g, or t
  misc_feature (642)..(642): n is a, c, g, or t
  misc_feature (645)..(646): n is a, c, g, or t
  misc_feature (651)..(651): n is a, c, g, or t
  misc_feature (660)..(660): n is a, c, g, or t
  misc_feature (675)..(675): n is a, c, g, or t
  misc_feature (696)..(696): n is a, c, g, or t
  misc_feature (701)..(701): n is a, c, g, or t
  misc_feature (711)..(711): n is a, c, g, or t
nggaacaacaaagttattgagttccgtgaaccagaactcagaacaactttgttgactctcccccctctccggagaggacataactgcctttggaaacggtacggttctgtcgagtcccgaggcggatctcctgaaacctcctaaatgccaagttcaaagcacaagaaacatgtgtttttaacagccctaccctggacggtcgccaatgaggcctcatgttcgggcattccttttctttctgtgaaccagaatcttcctcggctttttagggagcaggaaaaatgcgtctaaagcaactctttttaaaaacctgccctgttgtatataactgtgtctgtttcaccgtgtgacctcccaagggggtgggaacttgaaattaacgtttaaaggggccacgatttgcccgagggttaatcctttgctctcaccttgtatggattaggagatgaagccatttcttatcctgtagatgtgaagcactttcagttttcancgatgtnggaatgnagcannagaagcncgtnccttnacacnnagtgncgtntgtncttgnccanatgcgcngggcgtcngggaccttnaatgcctgccctggttgtgtggacnccntaatgcnaancatntctncacntctnngggacnccnngggcncctgttganaagtgtggagaaacncctaatttaaatgtcacaganaatgncctagtgttnactactacaatgttgatgctacactgttgtaattattaaactgattatttttcttatgtc

SEQ ID NO: 636173 - DNA, 450 bp, Homo sapiens
  misc_feature (35)..(35): n is a, c, g, or t
  misc_feature (82)..(82): n is a, c, g, or t
  misc_feature (85)..(85): n is a, c, g, or t
  misc_feature (236)..(236): n is a, c, g, or t
  misc_feature (238)..(239): n is a, c, g, or t
atccataaagaaaagagctttaattaactcacagnttcacgtggttggggacacctcgggaaacttacaatcatggcagaangtnaagtgaaagcaaggcatgtcttacatggcaccaggagagaaagagtgtgtaaatgccacacttttaaaccatcagatctcatgagaatgaacttactatcatgagaacagcttgggggaaccacccccatgatccaagcagctcccacccngnnccttcctccacatgtgaggattacaatttgagatgagattcgggtggggacacagagccaagccatataatttcaaccctggcccctcccaaatcttttgtccttctcacattttcaaacacaatcatgccttcccaatagaaccccaaagtcttaacttatttcagcattaacccacaagtccaagtccaaagggttatctgagacaagc

SEQ ID NO: 636174 - DNA, 127 bp, Homo sapiens
ctatggcagcctcccaagtagctgggactacttgcgcatgccactatgcctgactaatttttttggtttttaatagagagggggagggggtctcacttggtggcccaggcgggtctcgaactcctga

SEQ ID NO: 636175 - DNA, 762 bp, Homo sapiens
  misc_feature (291)..(291): n is a, c, g, or t
agtacatattggtagcgcaaccagtcgacagccgcagcaacaccaggagaggccgggggcagccgccatacggcagcgccagggacagagcacaggaaagggacccccacagtcacctagtagtttgaaggcgtcctacaacaattccagaatagctagcatttcctatacagctagtatgtagggctccacttgtagatagtaaaggtagaaacacataggtaaccactatatagagggtaatctatacaaggacgctaaagctacaaagttatgaactaagccgtaggnatagctagtagcacccggaaagcatactaagagcgcagcaggtaggccctacgtacgggacggacatatgtaggacaccataggtagtattaaagccaagtagattgtcatagctatgtatcactataccgaaatagttgactatcaactaatagctaactaaaagacaagtatcaccgattcagccattagccatgaactcgaaagtgaatggggaacacaaagagaagtccaatggatggggaccccaatgaacatgttccaagttcaatgaggagaactacggttgtgaagactacctataataagcagtctatcttcttatacggggccccttagaaaaggacaactcagaagagttcgtccagcgagagcctgcgtgcggcccgttaggctcgagagattgatcaaggccccagtaacgcctaggatcccctgtgaccgaccatgcgccctaaaagagaccctgcc

SEQ ID NO: 636176 - DNA, 240 bp, Homo sapiens
agatcttacaggtaagccgggtatggctgagagtacgggtgggagagcatccgggcagccgaggggctgagtgccccaaagcccacaggtgcacccttccctgaagcagaggtgaggtttggggggctgagtccccgcagagagttgtctcattgggtacccagcactggggcagcaccttactcctgtgtcatgtgtgtggagacctgaatcacgaccatgtactgcgcttgctgtaca

SEQ ID NO: 636177 - DNA, 149 bp, Homo sapiens
  misc_feature (131)..(131): n is a, c, g, or t
tctagaggatccctaagcggatgagggggcgttgaagttattaacactttgatatctgctccggggacagacgaggtgagcctggatgccattgggtgtagtacgtggttctctgaagagcaggacctgtnatgcctgtacaagtgaga

SEQ ID NO: 636178 - DNA, 117 bp, Homo sapiens
atcccagagtgatgttctctcttcctcttgtgctcttgctggtgtggtggtccatggtgtcttactccttggaggccatgtgggccatgaggtccacgaccacgacgaattcctggt

SEQ ID NO: 636179 - DNA, 451 bp, Homo sapiens
  misc_feature (406)..(406): n is a, c, g, or t
tttcattcgatcgttctttcttctttcgatctttctctctctttccttccttccttctctctttctctttctctctctctctttcttttcttttctttctttttttgtcttttttctgatggagtctcgctctgtttgttgcccaggctggagtgcagtggtgcgatctcggctcactgcagcctctacccccgggcccaggtgattctcctctctcagcctctggagtagctgggactacaggcatgcaccaccatgcccggccgatttttgcatttttagtagagacagagtttcaccacgccggccaggctggtctcgaactcccgacctcaggtgatccgcccacctcggcctcccagagtgctgggattacagacatgagccattgcacctggcctatagnttgttttcttttttttttagacagagtctcgctctgtctcccagg

SEQ ID NO: 636180 - DNA, 717 bp, Homo sapiens
gactgcaggtgctatcagtgaggacaggctggatgaccaagcttcctgccatggccctaagcctggagctcccttccctaatggacacgtgggtgctggaggcagtggcctgctcccacctccacccgcgctctgcggggcctctgcctgttgatgtctccgtacgtgtggtggtgggtgagcccaccgaggtccaggtggttccgggccggggcatctgctctggatcctcgccatcctgtgatagtgccttcctgctgtccccaggtggccccgatccctgtttatgggctccaatgtaccagctcagccagtactgtcactgcctatatggtgtctgccgcgatgcctgggtctggtcggcaatattaactttgctacacaggtagtatttcgacaatgagcgacttggccaaataactcagcgtagaaaaacttccagctacattgggcgtgcggtagggcctgtctctcacttggaggttcccagctccgccgtcgtccctgttagcccacactggggtctgaccgtgtgctggtcgcgcagatttctagttgctgccaaagtaattgtggctctcttgctgagcaccctttggtgcttgcttgcagtgtgtcgtagctcgacacatgcttggggggctggaggaggcgtccctactccttcttctcccccaagtgtcataggggctggcctgacttggaagtgccttccaa

SEQ ID NO: 636181 - DNA, 204 bp, Homo sapiens
acgtaagaggatccgacagcatcctaaccaggagtctctccagaatgccctgtcattcccatcatgttctaattgagtctttgtctgattatgtcatttacttttttatgtaggtcgagatggggggatggatctccctatttggttcatgtgggtctcaaattccggggcccacgcaatcttcccacttcagcctccaaaagc

SEQ ID NO: 636182 - DNA, 1068 bp, Homo sapiens
cagtaagtgagggtggagcccagtgagactgtgggtgtgtgcaggccggggagtattaaaggtggtgatttttcaaaaaaaaaaaaaaaaaaaaaaaaaaaaatttttgggccgccttgggcccccctcaaaaaaggcctttctcataaaccattctcgttgtgggccccgccggccccgagttaggttaagttgaaacgggtgtctcattagcctgtgtttcccttaggaagaattcctgggtctcaggacactatagtggccttgggatttccctcaccatataaaaaagccccgggggggaaaccgaaggcgtttcgtgaaaaaatctccagaagtggagtttctgagaggctcattaccgctggacttcttatctcaccagggaagtctccaggcgagaagcctcggattttcaatatttcagcccccgcgccgggaggatcagcttcgaggtacggtgtggtgtcatagtcaattaaaagaacattgatggacgagcactgtggaaagcccatcaagaaaggggatgtaggagtgaacacatgaaaattccgcgagggggaaattacaaaccacgttggatcaccattaggaattataaacaattgggccccaggtggttaaaccagggggggtcgaaaacaaagtgggccacaatcattggaccagcggattacacattcaaaccaggtgggcgtgaaacccctcaccagagggaaattggtgctcgagaagaaaaacagacattttccgctaaatgaaccccccttttaagggtacaatgagccacggggtttccacccggaaaacccacccaactcttgggcgaactatttgatgtgacacacgggacggaaataggggagggtaattcaaatccaaaacggagagcagaagtttatgtattggcccatgagaaagcgggttaacacagggggtgaacatatcaccatatacagaggtcaccgctatcatgtcacgtgacgaaacctgagtgcaactcataggcggagaaatgtaacaggcgcgtaccaatgacgtattgttaggctacaaagcagacaa

SEQ ID NO: 636183 - DNA, 334 bp, Homo sapiens
  misc_feature (80)..(80): n is a, c, g, or t
  misc_feature (95)..(95): n is a, c, g, or t
  misc_feature (259)..(259): n is a, c, g, or t
tagacgggtccctcctagccagggaggggaagaatagtatgagatgaggtgggcgatgaataggagccatgtgatgcagngggtttttaacaggngaggcacataggctcatttttaaaaagatgattttgacttttgaatgaatggattttaggaggccaaaaaatgaaaacaatgtgccacttggaggctatggtagtcccagtgagagatgatggtggcctagactagactgatagcagtaaagacggagataaanggatggattaatgagatgtttagtaatagaacttggagatggaacttggaaatatggttgcgtggggtaggaggt

SEQ ID NO: 636184 - DNA, 521 bp, Homo sapiens
agcggaagaaaaactatcaaggacacatctaaatacatgttagaatgagccaatatgggacaacttcccattatcaactattaagacaaaggttctagacatggcttaaaagtattagctttatctgatgctctgacagtgcagagtgatattggacccaaatgtaggatctagaggatgacagcttgaatgttagtatcttggctgaatcaggctcagggtggagagagtgatgttagaaccaggactcttgcagagagccaggaactaggtccaagcagccaattcatgaaactaaagaaactagaaagattctgtccccatggaggcaaagtgtcaaggaaacttgccttcaggatgggaaaatagaaagttgtcttaaagcaatttagcaacccatgtttgccctacatgtggatgtagaatcaaatttacacttccttcatggggcagaaattttaagccaagaaactagcataagaaaactggtctggaactgatgaaacatctatggaactgat

SEQ ID NO: 636185 - DNA, 161 bp, Homo sapiens
gatgtaagtacctatgtattgtatggtcaccagattaaaaagtatatttatgtggattgccgccatctggggggaaaggcgaggtcctttattaagtattcactgtttaatattactcatttgataatatcctgtcctttggttttaattatagcccgttt

SEQ ID NO: 636186 - DNA, 315 bp, Homo sapiens
ccgcaaaaaatataaagggaagttaaactcatagcattagcatacaacttcctcttagattatacgtgccacattctttacatgcttttgaatccattcgtatccatacaattaatatttaggtaagcatctcattatgtagacaagccctagttttagcacgcatggagatacacttggtgtacaaacaagcacaccagagcattctgcgcttcatcagcactttccatgcaagccaggaaagcagagagatgatagacaataagcataatgcattagatcactataccagaagatgaaatggctgtcggaatc

SEQ ID NO: 636187 - DNA, 206 bp, Homo sapiens
  misc_feature (77)..(77): n is a, c, g, or t
  misc_feature (81)..(81): n is a, c, g, or t
agggttttgtttttttttttccttttgggggggggaaacaaaggttcccccccggcccccccagtgggggggggggnggtntttttttaaaacccccccccttccccccggggggcccccccttcccctgggggcccttttttccccccaagggggcctggggggggtttttttttttttggggtttattgggtgttgggggggga

SEQ ID NO: 636188 - DNA, 247 bp, Homo sapiens
  misc_feature (16)..(16): n is a, c, g, or t
  misc_feature (29)..(29): n is a, c, g, or t
  misc_feature (41)..(41): n is a, c, g, or t
tctgccccttttgtcnggggcaaaagganccaaggaggaanttccagccgcaccacatttgcaaacgacacactgtcgggctttttttgcaataactgcatttcctaaataattcagtctttggattgagaacgtgtctgtcactttcctttatagaaataaccttttgtaaattaatgtactgttactttataaagccagacaactgtctctagatagacagcaataaaagctaccaactgtgaaa

SEQ ID NO: 636189 - DNA, 365 bp, Homo sapiens
caccttccacaggtgaatgggaccgattcgaagtgagcaaagggattcacaaattatgtatttatttgttttcatagttaagtagctgaagctcagagtctgtcaggagcgtacaggaaagtgtgtcgggttgaggtgggtgaatgtaggatcagaggggtgggtcgtggtggagaagggttgcaaagctgtgaagcgcactgtggtatgaagcgcattgcatttccatagcactgaagtaccagtttccattcctgggctgagattgtttttcccgtggttgtattgttctgatttcacgtacaccagagtaactgatttttttttgtttgttttcttgtggattaacaccaaataaaaattgt

SEQ ID NO: 636190 - DNA, 218 bp, Homo sapiens
tccgatacctaattacggtgtggaaaacgcatgagatatatcgttctcttgagccaataatacccctaacgtgaacccacccccaacaaatttctatgtggcttcaatagctgttcaatatcaaaccaaaatgtgtagtgcttacaacagatgctaaagctccctcagcagagtaaccagaaggcttgccctggtgttctcctaccttttatgacttg

SEQ ID NO: 636191 - DNA, 477 bp, Homo sapiens
agcggagtggaaggagcgcggtggcgcgggagcggcccggggaccccgcgctgctgaccggcggcgaccgcggccggaggcgggcgcgggtctcggaggcggtcgcctcagcagcgcccccacgggcgggccccaggccgcgagaggcagcatgtggctgatcgccaggcagtatgcctcgaggccatggacgttcggagctgagcaatcgtacgagaggcacggtcattgatcggcatggatcagggaccttgcgaagcacaggacccggcgcgctcgttgaccagggtcgactagcagcacaggggaagaacgccaagagaagtcgataaccaacgatagcacatagactctgggacaatatcacggcgtgtgacaacctagagtactttgtaatcaagaacgtgcactggactcagcaacagaagagcaggaaatcgccagcggccgatgactggcgcagtacctaggaacccc

SEQ ID NO: 636192 - DNA, 183 bp, Homo sapiens
tgtagagacaggagtctcactatgttgcccaggctggacttgaactcctgggctcaagcgatcctcccgcctcggcctcccaaagtgttcagattacaggtgtgagccatggcacctggcctcaggtttctgtgaaaatctttggggtatgagcctctggtggctcataaatgagctttggga

SEQ ID NO: 636193 - DNA, 924 bp, Homo sapiens
cataagtgttcaacttcattccaggagtgcatatacgactcgaagttgtgaccacctccattgggagtggcaggactctagattgtgtattggataatggacttatcggcacaggtggctgtatagtcagtcatcaacgatgtcttgccctcttccccacaagcaacatataaggtcattcctgtccttcaagttcgtggcccaatgtaagatatcagaatctagagcgcgtgaatgttctattacccaggaatgatagactacgttaggtgctgggggttttgtggggagcgggggggatacctcgttaagctttcgtaggatgatagtgtgtgtgaggagggaggatggtgattcgaatcggcttcttgacctttgtagagtcgtgatgggatagagagtgtaacatgacatcttccagggtgaagagagggatttgtcatggtctaccttctcgtgtgtgatgtgcatgaactatgaatgcatgaaacccttgcagtgtgtgtttctatgatgtacctataattgcagtcatgacatcatgggtattgaagaaaggctaaagctcggtgaatgcattacgtatgtcctgaggaataatattctgagagggaccagacagttggttgaaacattgatacttacaaatgcttgacaccagtttaaatcagaaacaatcgtaccaggggggtactggaccttagactgtctcgcgtacaagcgaccaccactgcctttgttgttcatagaggtactgcaaataggcgtacctctctattgctttgtcggggaagcccctccatttctatataaacattgatggccccgcgccgataagctggattttgacttgttgttacacgctggtgaaccaccccacgggtcccactctatggctaacaacacctgtttacggttggaaac

SEQ ID NO: 636194 - DNA, 531 bp, Homo sapiens
caggagcagctggacaaccaattggatgcatatatgtcgaaaacaaaaaacacatcaaaggacaaaagggttcatacaagcacagtatcaaaaagtaaaggaacacactaaatgcacaagctggtggcagtaatgtccagcaacctacttgtcgataggtccatccatgcatcaactcgaaactatctttcgtcatctgttatctcaaggtctattaacatgatgtcgtctgactaagcaagatgtctcatcatggcggaggatggagcaaggcttcaatcacatggtttcgcggatctagtctgcgccatgataggcactccgaactcagaaatacaggtgatccaattttgattcctcgaacttatatatggcaatctcaacttgcaatgctacaagccgtgccataccttgggataaactacgaggtgcgatgcaagggtcaacatcatagatcagtccaagttgccaacgacacgcaaaagatgggaaaacggccgccatcaatacccagaatgtagaatacaggca

SEQ ID NO: 636195 - DNA, 174 bp, Homo sapiens
atcaactaaaacagctggcagtctctcttttgtctccttccacactctctaacgttatctttattactctagtggttactagctagagaaggtagccaatacacatacttgtgctaaacaagataaagtttcaaggtcatgcacaaacagcagcaacagagggcattatcattt

SEQ ID NO: 636196 - DNA, 119 bp, Homo sapiens
ccgcatatgttcgtcggcgaagcgcccggccgcgacgaggacctcgaggggcggccgttcgtcggcggctccggcaagctgctcgacctgatgatgggagcgatcgggctcgaccgccg

SEQ ID NO: 636197 - DNA, 386 bp, Homo sapiens
gtggttcccgggtataattgctgctcccctccccccacttccagggccccagtggttgtgtagagagtctggaggtgacctgcagacgggcagatgctggagagaagccaaaggcctttattcactgggtgtcacagcctttgatgtgtgaggttcgcctctatgagcgactattccagcacaagaaccctgaagatcctactgaggtgcctggtggatttttaagtgacctgaacctgcttgtctttaaccgaactgtcacactgaaggaagacccaggaaaggtgtgagctggaagcactgaacctacctcatcctcctggagggtgtggcttgccttgcctccccaaattccatgtcaataaagagcagtttaattctcgtag

SEQ ID NO: 636198 - DNA, 392 bp, Homo sapiens
  misc_feature (135)..(135): n is a, c, g, or t
  misc_feature (306)..(306): n is a, c, g, or t
  misc_feature (308)..(308): n is a, c, g, or t
  misc_feature (310)..(310): n is a, c, g, or t
  misc_feature (317)..(317): n is a, c, g, or t
ttgctggctccctgctcacttatcctaaaacagtcctgtcagtgaacctctccccctcaactacatggggtttccagtcagacttcccactaaaggaatgagaaagtatatcaggaaatagacctactaatatanaagtaaacccatcccaactactcagtcatttgttgtaaatgcaaagagaaaacctaggatcactaagcagaatttaccagcatgtgtaagaaaatattcaagacaagtaaatagcaaaaactgatcccagaggtaatggagataattcagggagaagaagagaagctaaanancnacatcangaattttaaaaatccacttagaattttcagagatatcaaccgatattgcatccaccacaaactatacctatatac

SEQ ID NO: 636199 - DNA, 885 bp, Homo sapiens
tgtgggttggagcacagggtacttaatggatgggtacatgacaagggggggcttccctaggcccctcccctcttcaaggggtctactgggcaacggtgaggaggggaaattcaggggggggggggactgattgtggcagggactccccagagtgagggtctctctcttcctctggtgctctggcgggggcggggggtccaggggtctaactcctgggaggccaggtgggccaggaggtccaccacccggtggctgtagccaaattcgtggtcataccaggaaatgagcttgacaaaggggtcgttgagggcaatgccagccccagcgtcaaaggtggaggagtgggtgtcgctgtgaagtcagaggagaccacctgggtgctcagtgtagcccaggatgccctgggagggggccctccgacgccggtcttcaccaccttctggatgtcatcactaattgggacaggttttctctaaagggcgggtcaggtccaccatggacacgtgggcacggggggacccggaaggccatgccagtgagcttccgtaagctcaaggatgacctggccaaagcttggagcgcagaagaaggcagggatgatagtctggaaagccccggggccatcacgccaacgagtttccgggaggggccacccaaagtctttgggtggacgtgacggcatggactggggcaagagtcttccagaaacccaagctgtcttggcagccttggcggggtggtcaccttggtgtgcaggaaggctggcacaaaccgagaggggggaaaatcagggtacccatgacaatcgcgccgacagggaaagactctggccccaagacaccccagtggaacaggcacaaaatgatatgttaccacagaaatgat

SEQ ID NO: 636200 - DNA, 453 bp, Homo sapiens
aagggaaaaaaaaaaaaaagagacaaaaagaaaaaaaagagagagagaaaaaaaagtcaagaagaaaagagaaaaaaaaaaaaaaggaagaacgagaaggaaaaagagaagaaaaaaagaaaaaaaaaaaaaaaagaaaaaaaaaagaaaggatgaaagaagaaaaagaaaaaaaaaaaaaacaaaaggagaagaaaagagaagaaaatgaaaaaaaaaaaaggaaaaaaaaaaaacaagaataggaaaagaaaagaattatttaaattgaaaaatattgaaaagatgggtaagagaatataaaatgaaatggaagtgaaagatataaactaagaaaactaaaatactaactcacaatagcggtgtggctctctctatctctctactctatctctctctctctctctctctctctctctctcactctctaataatctcgcgtgcaaaattcct

SEQ ID NO: 636201 - DNA, 216 bp, Homo sapiens
tttttatcccctttccccccccgttttaaaaaagggtttagtatagtgttttagtccccccctttgcccataaccattcagcaaatgctgtgaaatttaattgacccctttcccttttaaaaaaaaaaatttttatgaacgggggcccccccttttttccctcctttgccccttcaaaaatagtttttttaataataaacctggtttggtttggga

SEQ ID NO: 636202 - DNA, 300 bp, Homo sapiens
cggcacgaggcaagaccgggtatgttgactcacacccgtaatcccaacacttagggaggttgaagcctgttctcaagaccagtctgggcagcatggcgagactctgtctctacaaaaaataaattagccaggcgtggtgtcgtgtgcctgtagtcctagttactaaggagcctaaggcagcaagattgcctgacccaggagtttgaggttattgtgagccatgatcaatgccactgcactccaccctgggtggagtgagaccctgtctcaaaaaagagacagaatcagaccctgtctcta

SEQ ID NO: 636203 - DNA, 736 bp, Homo sapiens
ggttctgtctctctggagaaccttgactaaaatagatttgatattaaggaagccaaatgtcattcctccttactttattacttgcagcataatgggagagatctgtgaaactgttccctcacaaaaggctatgatggtctaagcatatgaggcctcttaacagtgaaagataaaactttaaaagctaattactattggcattttgaaagcagaaaatcacttaattgcaatggttgagcaataaccagtctttcgaatggactgcacatacttacaaaattgtagaccacagtcactcttcaagtacaaattcagtgagtgtttcaaaaatcatagaagtgaaaatgcaaacgaaaaatacagaaatctcccctgccaaattattcaatcatataagacttctgccctttcacatatagtgccaatttcctatgctacatatctcatctttgcttcatttccaatactggaggtataaagttgtgtaaagacttctgtagagttctaagtgttttatgcattttttgcaaatttgactctatgaaagtgtgtcatcggaacgttgacttgtgtgtagcactgtgtgtgtgtctgcaactatcaaacttccttataaagatgtcctttctgtcatctgacattgtgacagattcattctcaagaggtccgtactgggcaccggctatgttggggggacccccgggggttgagggccccttggacctgcgggtggcca

SEQ ID NO: 636204 - DNA, 420 bp, Homo sapiens
gaagataagaggcaaggcttgctctgatctttcccagttctcagagtccagcaggccgctgtgctggacacatacatggatccaccaacatacatcagtccttctgtgttctctcctgcatggaaaatgctcagaagatgctacaaaacctcatgcctactgtctgccactgctggagaaggaatcatggttttgtagcatcttctgagcattttccagtacatcatctgcttttgtgctgctggaagtgaggaccatcagcaggagttttctgtgcctcctgcaagttgctgatttctcacagttgctactggctttctccaatgttcacttctctatccctttcagtggtttataaatacttcattcctatagtagatccttcctgcttatattaataatacctggagggacatggtt

SEQ ID NO: 636205 - DNA, 461 bp, Homo sapiens
  misc_feature (360)..(360): n is a, c, g, or t
  misc_feature (417)..(417): n is a, c, g, or t
  misc_feature (444)..(444): n is a, c, g, or t
attcggcacaggaaagatgctgccagtctctttgctaaaacacagcaagagtcacctttactccagttcccaaaaagtttttcatctccatctgagaccacctcagcctgaattttattgtcaatattgctatcagcattttgggcaaagcatttcagcaagtatctaggaagttccaaactttcccacattttcctgtcttcttctgagcccttcaaactgttccaacctctgcctgttacccagttccaaacttgctttcatatttttggctatcttttcagcaatgccccactctactgttaggcagtttactgtattagtctgttttcacactgctgataaagacattcctcaagnattgtgaagaaaaagaggtttaattgggacttacagttccacatgggccgggggagnttccaggaattcatgggcgggagggtngaaaaggcactttcgta

SEQ ID NO: 636206 - DNA, 400 bp, Homo sapiens
  misc_feature (356)..(356): n is a, c, g, or t
  misc_feature (358)..(358): n is a, c, g, or t
aacctgattaattatattttaaaaatagcacattcaacactgttttacttgaatacagctaaatgtgtgtatatatggacccacatatacaaatatggtcccttaagattataatggggcccaggcgcagtggctcaggcctgtaatccccagccctttgggagaccaaggtgggcagatcatgaggtcaagtaatcaagaccatcctggccagcatggtgaaatcccgtctctactaaaaatacaaaaattagctgggcgttgtggcacgtgcctgtagtcccagctacttgggaggcaggagaatcgcttgaacccaagaggtggaggttgcagtaggctgagatcgcaccacntntttccagcctggcgacagagtgagacaccgtcccctagttcg

SEQ ID NO: 636207 - DNA, 130 bp, Homo sapiens
ggtggagtggatggacttatgacagatagagagatgggcagatggatggacaaatggatggacagatatggatcgttggatggatggttaaatagatggtgggtggatgatggagggatggatggatagg

SEQ ID NO: 636208 - DNA, 169 bp, Homo sapiens
gggccgggtcgttaatcgatttaagccttgatatgggtacagcagatgttacatgagagcatggggttgggggtacggtcatagatcaagaggatcccaaggtcagaagaatggtgcttagttacagaacaaaaggaaaagtctcccatggtctactgtctttcgtaca

SEQ ID NO: 636209 - DNA, 217 bp, Homo sapiens
aagcggccgccctatttttagttaataatttcaaaggagagaaacattctgatataatacagataaaaataatagctaggctagggcgcggtggctacatgccgtagcgatacccaggcactttagggaagccgaggtaggacagtatacacgaggtacaggagtatcgaagaccatacctaggccagacacggtagaaagcccgcgtataccacta

SEQ ID NO: 636210 - DNA, 339 bp, Homo sapiens
  misc_feature (23)..(23): n is a, c, g, or t
  misc_feature (36)..(36): n is a, c, g, or t
  misc_feature (52)..(52): n is a, c, g, or t
  misc_feature (185)..(185): n is a, c, g, or t
agcccaggatgcccccggaaaanagctccctggtcnggaatcataccttccngcaaccttctaaacttccacttcttatatggcccctgggggagagtgtaggctcagtgttcatgcccggattctttggctcagattggttgtctggtgccatctgtgttccttcctgcctgtatgtttgtcantccctccctccctccctcccttcttcttctcttcttttttctttctttctttccatttcttttctttctttctttctttctttctttctttctttctttctttctttctttctttccttccttccttccttcctttccttccttccctccctcc

SEQ ID NO: 636211 - DNA, 395 bp, Homo sapiens
tcgaaaaggcgatactagcgtaaatcataaaatgggtatgttactacccacattattctataaatggacaccgatgggtaactgaagcaataggtcatgctgtaccaacttcagaggctgctagtggcgggggtctagttctgcatctgctcaaagaaacttgtaggtatggattatccgtagccgttctgctgcatcttggacaggtggcgctcctctggggtgacagcggcgtcaacctccaacacaccatgatgaatggctgtgtactgtttcttcttcagcatcaccaaggtgatgacgatcactgtcgctatgacaacaccgaccagcatgagtccaatgattgcaacctttgaatgaacccaaatcttctgcacagaacaccaattttt

SEQ ID NO: 636212 - DNA, 134 bp, Homo sapiens
ggtgctgtgaggaccacatacactgctgtcccgcggggtttacgtgtgacacgcagaagggtacctgttgaaccaggggccccacccaggtgcccttggatgggggaaggccccagcttaaccttagcctgcca

SEQ ID NO: 636213 - DNA, 343 bp, Homo sapiens
agcctgagctgtgtctctgcctcactcgtgactatagctttttcacggtggaacatgtcctaggggtgcagagacatgcttgttaccaccgctctgacaatgggcagggaaatttcggtgctcgaggactgtgcccaggagcagatgcggctctgagcccaagcgcgcctgcttgagacaccgggtccagcaacaggtcaagagcaagcaccttttgcaggagaatgaagtccaggtgcttgatacaggagatgccaatactgccattgatcttggacagcgcgaggcagcttgccaattgctcacagagtttcaatgagaggtgtgctcagtggattttacg

SEQ ID NO: 636214 - DNA, 313 bp, Homo sapiens
cgtccgagttctctctgtgggggtagacagatactagcttgctgaatataacttgtaaagggtggggcttgtgagtctcagccatgttgagtgataccgtgctgcccgagagttctgtgctgtagatcctggtctcttggactgttttccccataatttcccatccctacctttcctaccctgcaagattgtgttggatataacttgctcactaaggcttcaaaaagcgggtcattttcccccctggtttataaattgggctcttattccaggggcccccctcttttcccctaggtgccacaagagagagcgt

SEQ ID NO: 636215 - DNA, 352 bp, Homo sapiens
aaacaggaaagcgcctgatgaaacactgaagaaagccttacaggtcacttgaggaggttgttttagctctgataaaacttcagggcaattttggttgctgattgaacttcgtgctgccatgaagggccttggaacttgatgaagatactctaaattgagatttttggcatcaaagaactaagcaaagaaatcagagacataaacagggtctacagagaggaactgaagagagatctgggccaagacataaacctcagaccacatctggagattttcggaacgctttgctttctcttgctaagggtgaccgatctgaggactttggtgtgaatgaagacttggaatagctgtg

SEQ ID NO: 636216 - DNA, 825 bp, Homo sapiens
ggagctccaccgcggtgccggcggaaatgggaacaataataaccggaataacgaccatcgtggtggcaacaacaataaccatcgtaatggcaatagcaatggtcgccggaacaataataatcataatagcaacaataataatcatagtactaacaacaatcggcggtcatcaactgatcgtcggcgttaatttttaagtaaggggatgtgcggcaatggccaaacaacacggtaagcacccagataccgccctcgctcaaaatcggaaagcacgccatgactacgctgttgaggaaacctatgaagctggcattgcgctgacggggacggaaatcaaatccgtttcgcgatcggcgggtcaactttaaaggatggtttcgtttcaagtttcgcaacggttgaagcctggatgcaaaacgttcacattagtcccgtttaaagagggtaaaccgttataacgttgacccgttgcggtcccggaaacttttgttgcacaagaaagaaatcagtaagctaggtgcagcaacgatgactaagggtgtgacgattattccacttaagatgtatctcaagcatggatttgcgaaagtcttaattggagtcgctcacgggaaacgggaatacgacaaacggcaagatatcaagaaacgcgaacaacagcgtcaaatcgaccgggttatgaaacattactaggcatcgattacgttagcgttgcatcgctgcaccatacaacgagtatggcagcgtcataaaaaggtcttccaagaattaattcgattcttggaagaccttttttagtatgtgttgttggtggttctgtgccgt

SEQ ID NO: 636217 - DNA, 836 bp, Homo sapiens
gctcaagcaagaatcacctcagagtggcggcggagtgatcgtcaataacaccgatagcatcctaatgtcctatgatcacgtgtgatactcactattcaatgatccatgaacgaacgtgccacgaagaccttctaaagggaccaatataatgggcactgtctaccttaccccttaccgggtcatctttcttgtccaagggcaacgtgattgccatgcagtccttccatcgattgccattttatctcattggaaaggactgtgagatcaacgcaagccctgtattttggttgctacaactactatctaatgcgtgccaacagtgaaggcggaagcagcggaggtgtgctgagtgataggctctgcttcctaccccgttgactttcacgagtaggtcggcgccattgagttccggagcagcgcgtctgctccaggtggcctctcctgcctccagaggtgaagttccccgaatggtggtagcgctattgtgggtactcttacatgcccagcggaggcctatgtcttatcccccgtccagtcgccaactggaatgtgcccctgccctccgtggtagccctatccatcgatcccactggatactctcccagggcagcacagcagtatatgagcagggattgttaagggatagtctgacagcttccaatcagcaaacttaggcttaggaaccccctgaaaccctccggattagtgccctattgttgctcgcaatgtctggcaacctgctggaaggcagtgcaacatgcgtcggtgcctgtatgcccagtcccgtcaggaggctaatgcgaaacagcgcgcagctccgatgtcctgcacaatag

SEQ ID NO: 636218 - DNA, 1776 bp, Homo sapiens
tatccatgcacctatcagaaaagagagatgctgaataggaacagtctattaggatgtgctactacgcactgcgtgcattttgagacggtgggctgtagaatctacattgatcgcaatgctgtttaccagttatcaatcataatgttaagcctaatgtgaatgacctgaacttattataaatcataggattcacaagggaccacggtcggtgctactagttatcaccacgagtcgataaattccgctcatagggtcaggagatctccgatcgttgtctcgattcgtcttcatctggcgatctagcttgccagtacaaatcactttaggcaaacatctatgagtatcgttggcgcaattatcattgttatagaaagcccacgtagtaacaggatttggtacggtagtcatagtattgatttcccctcagattaaacgtttgacaatgcttctcttcaagttcgtttagtgcccttttcactcttatcatgttatagccagcgtacgattggtttcaattgctcctaggatagatcacttaacagagcattatattttaccttgggctagctagtagctcagttataatcccattgggaacctctatcacttggaaaagcatattcgtatcacaaaattaggaagttgaaagtcacctataacatcgttttgattcatcaacagcccaccattgcgaaattcagtgaagttttctaggccccaactatgcgcaattccgccgcgaatttgtgtttgtgatttgcacccacggccagacgaatttaaggccctttttttattattacacgcgattgaaaatagttatcagcaaattgccgcacggacttaaacagacgggtcactccggaaattgggagatcctaaaccataatatttttccaggaaaaagctagttggaccttagtcaagaatatttaaagagacggatcttcagagaacgcaggacatggcgacacaccgcgccactgattatacaacggcattccacttacgcatcgttcctggggcacctgctgcaacaggctcaaggaactgtcaatggggtcgcctttatgggtccggttccgcagagacaccaacccattttgggtgcaatatcggcgaactaccaaaaacaagggctaccccaagttttcccaaaaaaattttccccacaaatttttaacacagagcgacagtaccagagatacattcccaatggggactatcccatgttggggcacgacctgtaaggccctttgcgtaggtccacaatgtggcggtgcatacgaacgcgcacacagcctcgcggtttaaacaggcgcgctaaagacaaccgagcattacgcgtatagagttaacctgtggggcgacacacctgggtgggagcaacacgctcactactggccgacaacatgataaccttatatgaaaaatcaccgtccgcttttggaaagacacactatgcggtcttcacctcttatcaccaagagacctgttcagtcatggctttatatggcgcccacgtgataattaacacaagggggacaacaacaccctttagcataagaagccgaccaatttggtgccacacaactatacatgtggctgcactcaaaactagaccacgcatagcaagacgaaataagaggatggcagacctaactacatcctcataaacgccaaacataatcatacaatcaagcatacatgaatagcgtcgacggcagccgcgccaaccacatcaagaggatgacaactaccaccacagggcgcgca

SEQ ID NO: 636219 - DNA, 176 bp, Homo sapiens
ttaattgatccttgatgtgatgttcttctgcatagttcgttcattctagagatgttcccgggccgggaccgttggctttctcctgtaatccctactctttgggaggccagcacagatcgctttaggtcaggagttcgggtccagcccagccatcatggtgttaccatgtctaaact

SEQ ID NO: 636220 - DNA, 315 bp, Homo sapiens
gttcatactcggaacaactattgttctgaaataacttaaaatcagctatatactgcttgatgcgaaatctctgtctatctgcattcaactgatcacagtctctattacacaaagatatacctcctgaactcactgctctttattagagctttctagtcaagcatactacaaagctgtaaatatactcactcttacaaaaaattctaataaaaaaccacaagtaaatagcctgggctcaagtgatcctcctgcctcaacctcccaggtagctggaactataggcctgcacctccttactgctaaccggaggatcct

SEQ ID NO: 636221 - DNA, 353 bp, Homo sapiens
  misc_feature (130)..(130): n is a, c, g, or t
cacgagggcaatctcagctcactgaaacctccgcctcccaggttcaagcaattctcctgcctcagcctcccaagtagctgggattacaggcatgtgccaccacgcctggccaagtttgtattttcagtanaaatggggtttctccatgttgatcaggctggtcttgaactcccaacctcaggtgaaccgcccgccttggcctcccaaagtgctgagattacaggcatgtgccaccgtgcctggcctccctgatctcatttttatccttcctaccttggaccattttaccgagccatgtttccagcaaccaaccaaattgtccttaaaatctctgatcctccaatgctggggga

SEQ ID NO: 636222 - DNA, 1011 bp, Homo sapiens
  misc_feature (16)..(16): n is a, c, g, or t
  misc_feature (349)..(349): n is a, c, g, or t
  misc_feature (662)..(662): n is a, c, g, or t
tgtctgtccggtgttnacccagacacaagagcggacacagcgcacagaacagttaccatgtgttcgtcgacttgtgtgtgtgttggaccacatctgcgttcttactaagtgtcccgtagctggccggcgaaggagattgctgtcccccggttctcatcacggcacagaggttccacatgtcgggggatcccgccgccattctgggggaccgcgtgatgtgctgacgcactaccttgtgcagaacagtagggttgcgtcgtgtcagcgcagcccctctcatgcgtggcctgtgtggtacacactctctcgcgctggttttttcagggcacccgcccaagggtgggtcttnccagcatcagcggtcacgcacctcctttgggcgggtatctcagatagcccgcgccccgcgtggttctcaacccttaatcccggggataccgtgggtcggccccccctgtttcctcgggggcatttcccgggccccccccctgtttgttggtcacccgcttgtgggaccacacatcttttgccgaggacatgcgctttgctggaacagggtccctcctgtcctgtcacccgcggggccggtcggcgaccgtgatcttggccacctcccgcccatgctcgcttgtggggaacacaagcgtattctctgtcaacancccgtggggaagactgcccgatgttgcctcttttcagcgggcaaatgctgtcttgtgtgccctatcctcgatggtagggctcccgcccccccacacagggggcagattctttcatggagcaccctgtatattggcccccttgagtgcgcgggcgacgacggcttcgcctctcactatctgcgaggcacctccttgttctggcgccaacgccgctcgcagaatgccgtctgagatcagcactggcctgggcggtccgatcgacggtgtgcgactgctctccgagccgcgccccccaccatttggcgtggctttcgcggggccccccaaaaccccccctgcttcaacaaac

SEQ ID NO: 636223 - DNA, 1365 bp, Homo sapiens
  misc_feature (316)..(316): n is a, c, g, or t
  misc_feature (1001)..(1001): n is a, c, g, or t
tcatcgagctgcggcaggtctgcgtggcgcagtcgcggcttgactaggttgttcttcttctgccgtgggtgtttctatttgactgtactactgtgtttctggtgttttttcttccactgctggctttgttggtcggtctcctcttctgtttctcctccttgtgttcgtccaccagcccctgtgttttggtctgcacacccgcgtccctaggcggggtctccccatcgcgctcgtcgtcatctacttaggactcccttttttgttcccccagacaccacccccggtggttgtttcgcacgactaatgattgtgtctnacctcagtcaaccctccccctctggcggtaccccggtgtacacttgtgccccaatggcgttttctcgtcgccttatttttcccctcggtttttaatttcccccccacccccgcgggtcgccacttctcttcttctacccgggttacccccgcctttctaatcgcggccccttccattgccccagctttgagggaagaccccccggtcctgggatggtcaatgaagcccggctgtccttcccagcgcccaggaacgttgattgggtgtcccacacgggctcggaggttctcctccctgccccaacccactgggtaacatctgcccatcgctcaacaatcatccacgggaagaaggtgggaccccccccccacaggtcccccccagagcttgcacagaaggatcccgggaaccgtgaaagttggcgccaacgttcatccccttggggcccccgcccagcaatcccaggtggccccctgttcgaggaagtcttccccctacacgtgcccctctggccccacccgggtccaaccgggcctccatgatggcccaacaccaccacccagccatcttctcctctgcatcctttctgagaggacacccctttctcgcccacgtattgacccaagcctgcgcgtatacaccgggaggcccttctcctggacaccaagttctccgcccaaggagngaccaatgttccaaggacccacactttgaatgagaatggaacaccactccacgggagattgtgcacacacgctcacttcgaatgagtatcccatgcggccaccaccggccacgaataacacttctcctggggcaccccacggaagcacctgaagtcccccacggacacccgggagccctcatctgccttactggttggccccagccctgcctgactgaccacccccctcacgagcccacgatcacgggacctcacgcatctctttttcaataataacctggagctctctgttggcctgccaacaccatttacttttcctcttatgagactatttatctttaataaagccctggatataaatcca

SEQ ID NO: 636224 - DNA, 1518 bp, Homo sapiens
gtgcggtggtgggtgtcttgatttggttctcgcattatttgggtgccgtgttggttggtggctgggtggggtggcgtgtgtgtgttgtgtgtcggttgctgtgtcgggtggcattgctggtgggtggtgtgggtgggcgatggtgggtggtggtgttgttgttggcgggggggggagtggtgggcggcggtgtgtgttgtgtgtggtttgttgggttgcggctggtgttgcggtggtgggcggctgggtggggtgggtggctggggtgtgtgtgggttgggtttctgtgtggttctgtctttgggtgtgcgctcggacggggtcagcgggttgccctgtggagtggtgtggttgcgctgtgggtgggggtgctgggtttggtgcgtggttgctgtgtgtgtctgcaggttgggcggggtgggggtggtcggtgttggtgccgtggtttgttgtgttgtgtggttggggcggtggggtggtcatgtggggggtggtgctggtggcgctgtggttgttgttgtgcgcgttggtgggtgagggtggggggtgggcggcgccggtgtggtgtgggggggtgttgggtggtgtggtggtgggttgggggggtgtgtggtggcgtgggggcgtggtaggtggtgggccgcgtggtgctggtgttggtcctcgattgtgtggtgtgtgtggatggtgcggcgttggttgtcgcgtcgtgttgtgctgggtctcgtagtgttgtgtggtggctgttgtgtcgtggctctgtgtggtgcgcggagcgcctgctgggctctcgtttcgtcgtctcggctgtgtggcttgttgttgtattgcgtcagcttatcgtgttgcggtgcgggtgaggttcgtttcgcgtgtcgcgtggtggacttttgctctgcgcgcgggtattgttgtttgtggtggtgcggtggagtattgtggtggtgtgagagagtgggagtggtcgtgtgtgggggtggtgtgagggggttgacacgatgaggtggtaagggtaaagggggttgtgttgacgaagaggggtggagaaggttgcacggttgtatatatgtggtcttgttgtgtgggtggagagggcctggggtgtggagtgtgtgagtatgtggcgcagatgtgggtgggcgtcggtgttgtgctcttcgcgcgcgtatggtgtggtctcgcgggggtgtggttctaggagcgccgcttgttttgcgtcgggtcgcggtcgtctcctctctcgccctgagttctctccctcactcgggcggggacgtattgtctctgtgcgcgtggtcgggaatagtgggagaagggtgtgccagagggttctgacttgttttgtgtggccctgttgagggggtagggcgccggtctgttgcccggtcgccgcgtttgtggagggtgggccgccttccgcctcttgtgttgccgcgcggacgcgggagaatgaggggacggggagagaagaggtcccgcaaagagagagaaaaaaaaggagggcacatgcaaggaaga

SEQ ID NO: 636225 - DNA, 81 bp, Homo sapiens
agccccaaccagacctctctgtacttctgtgccagcagccctggccgtgggaggcccttatctggaaacaccatatatttt

SEQ ID NO: 636226 - DNA, 167 bp, Homo sapiens
tgcatactctggtcctggaggatcctctcaagtcgaccaggctccagcttaacgatattaggaggtcagcacggagctcacgatgtcgacggaacttgtccagggaggcatgcaccgacaatggtgaatacacatcgaacaggctccatgtttacgttctgtggaag

SEQ ID NO: 636227 - DNA, 1355 bp, Homo sapiens
  misc_feature (1148)..(1148): n is a, c, g, or t
  misc_feature (1164)..(1164): n is a, c, g, or t
ggcctgcgtcgccggtttaagcgcagtgcaggcctgtggcctgggggcggcggtagtgagcccagctgctgcgctccagcccccttttccctccatgtgtttctctcctgctccctgtgagtaacttgtgctcctgtggggctcctgctctgcctgccctgcactgcctgtcctgccacccatgtgacctgctgcctgacctggccatacctgacctgcataagcaaagcacacttaccagactgtgacccttcagctttgcggcaatgctcgtgagacctgcccttcttacccacaccttcctggcaccacacgcaccagctgtgacaaccgtctaccacgtttagaatgaaagcgggtgtgggacactcgacgtcgtgtgatagcaatttgtggatcattgacacggaacgtgcacgtggacttcgcagatcactgtgtgaattgcctatggcatctgacaactcctgtgaaaccccccacagagtcagatgccttgggttctcctagagcgaaaccttttttgatcatctgcgacccacacattagggccaaaagagtatcaaaaacatgttggaagttgcctcagaacacacaagacttatagaactagggagccaatcatacaacagatcgtcctttggaaaagcttcatatagataaggaccaacctttatcaagggagacgactatcccccattcccacagcatttcttaaaaagttaacagagcattggcataccgtagcgcatttttgcaattcctatccaaaggatatatcacaatacaagtatacagtaccccccccagaaagccgttggctccgccgtaaaccacgtttggacactcacacagtgcctttatgcaacaccgtttccaaggcgttggcagaaaccaagttaccgggacaactcccttcatgtggcagacagggaatcccttaggagcaccaagttgatctaatgacattgcaaacagcagaaccagttttctcgaaagcaattccttcccagctcaagcagaatttcacttcaaaaaccgctctataacacgtctttgtcgcacactcactcaacaccaacgcgtggggacgcacacacggcaacatttactttccacagtgcaaacaccccggttagtgtgatgcnaaaacgccacatttanctcgggcacataacccacacaagcgcctaatacgaccaacacaagtaggcatcacgttaggtagacaaaacgatgtgtcgcttattgagtgagaccaccacgatacctgtattagtcaaacgacactgggtatctgcacggtgggtcttaacccctaggaaccctatgtgaacgatctagaacttaccgcg

SEQ ID NO: 636228 - DNA, 1412 bp, Homo sapiens
agatgtgtgggaagggggggggggggggtggttgggaggtgggtgttggtggtgggtgggggtgtggtgggggtgatgagggggggaagggtgtgaatgggtgtatgtagttaagtgtgtgagaatagttagtgaaagagaatgtggaggtagatttgagtgtgttgttgtgtgttggaagtgttatgtgggtggggggggggtcggggatgtggagggtgcgtctgtttgtggtgttgttgttggcttgctgcgtgttatccctggtggtgggtgcgcgcgtgcccctctgggtgggttgtgcggcgcgtgccggggttagggttagttctcctgcggcgccgtgggcggcgtggtcccgtgctcgtgtggtgtgtggtgctggctatgtgcgttcggtgtgtgggtgggtgggagggggtggggttgtggttaagatgggtgggggcgggcggcgggggggggggtggggcggtggtgtgggggggtgttgggtgtgctttgctgtttgctggtggggggtctgttgtggttcgctgcagtggtggagttcgcttttgtggtgttgtgttcctgcggagagggggtgggtggggtgagggttgtggtagttgtaaatatatatgggtgtgagttgtggtggaggggcggctgtttgtgtttttatgttgtgggtgtatgtttgttttgtgtatttttgtgtgtgtagtggttgtttgtttgtgttgttttgttttttgtttttgttttgttttgtgttttgtttttgttttttgttttgttttgggtgtgtgtgggcaggccagggggggcagcgtctcaggccgtgcgagatattgtcaggagatcgagactgcccggcggaggttctggtggagcctgttgaacgggtccgcgggagaatatgcttccggcgtaggcgaattctgcgaatcatatcggtgtccacaaggagccaccgcgattctcattctcacagatgtgtagaacgtggccgagagtgtttaaaagggtcaccacggcacggtttaagtggccacgtttaaaaacttattgctaatttgcggggccacattcgtagggagatgggtgaggtcacagagtgagttccacttttccgaattggccaaggccgaatggcatcgtttcaaagaacttttgactggagagaatcacagatgtggaatatttgtcataaataaataatgaaaacctaaaaaaaaaaaaaaaaaaaaaaaaaaaaaaaaaaaaaaaaaaaaaaaaaaaaaaaaaaaaaaaaaaaaaaacctcaaggggggccccgttcccaaattcaccttatagggagtcaattaaaaattaactgcccgtcatttaaaaacttcataactggaaaaaccttgcctttaccaaattaaatcaccttgaaaaaa

SEQ ID NO: 636229 - DNA, 115 bp, Homo sapiens
ccagcgtaattttccaatccatcctgctccaacctcaaacaagccaccattctcctcacaactctcgtgacaaagccaaaggacaagaggtgccacatactctggcggggatcct

SEQ ID NO: 636230 - DNA, 502 bp, Homo sapiens
cagaggtccgctgaggcagtctgtccttgggactaacaaagtcatctgctgtttggggaaatctctggtgttgggaacaggcccccaaatctggccataaactggccccaaaactggccataaacaaaatctctgcagcactgtgacatgtttgtgatggccatgacccccaccctgaaggttgtgggtttactggaacgagggcgaggaacacctggcccacccagggcggaaaaccgcttaaaggggttcctgaaccacaaaccatagcataagtgatctgtgccttaacgacatgttcctgctgcagataactagccagacccatccctttatttcagcccatccctttatttcctgtaagaaatgtttttagttaatctataatctatagaaataatgcttatcactggcttgctgtcaataaatatgtgggtaaatctctgttcaaggctctcagctcccaaggccgtgagacccctgatttcccactacacaccct

SEQ ID NO: 636231 - DNA, 103 bp, Homo sapiens
gcggccgcctactactactactactgctcgaattcaagcttctaacgatgtacggggacatgttccaaacctcattgaataaaagcaatgaaaaccctaaaaa

SEQ ID NO: 636232 - DNA, 197 bp, Homo sapiens
ctcaacgctttatacttcttaaacagatcttctttaatttggaggtgagggactatagcgtttttgaaagcatttgtctttttttttttatgggcttcatcatattttaatgaaaagtctgatgctattgcctaaacaattattaatgcgtgtcaagttttctatctatacttggtttagaaaagtctccgaaacta

SEQ ID NO: 636233 - DNA, 230 bp, Homo sapiens
cagtccccttggggggggaaacggccccatttagctttaggtttgaaaggaaaacaaaatagggggaaaaaagggggtttccagttgcaaacatggactttttgggtcagctcttgatgaggaccaaaaatcagtaggttttttggggctgcagccaacaagttggcagttgaggaaaaagacctgctccctggccttggcactgcgggagatttttcagcttgatgaaa

SEQ ID NO: 636234 - DNA, 868 bp, Homo sapiens
caagcgtcggtgtgtcacatatggtcaggctggtttcgaactcctgactctggtgatctgccgcctcggctcccaaagtgctgggattacagacaggagccaccgctcatggcctgcgcctcccctttttctgtagaagacatcacgcatctaatagacctggtgaagccagttactcactatgaccctctctcacatatttgtttgttgatacaagggcctctctgtcgcccaggctgaagatgcacgtggctgctgatcatagctcactgcagactcggttcctatactcatgatcctccagcctcagcctcctatatagcaaggcactgcagggcgcacgacaccatgccatgcctcaaacattttctctgtagagatcgggagtcacactatgttgcccaacgtctggtcgcgacctcctagcactcacgtgtatcactccaacgcacgtacaaggccgtcccgaacgctgcatgggattaactactagattgtgatacccccacatgactaggccactcaataattctactctatggggaccaatatactcgagttcctgctccctggaccagcctgggtccctacttatcctctatcacaaaacactagacgtgatctgaattctagcaaccagctctgtactaataaagcacatgcatgagatgtgccacgagcacaatcaactacagctcactgttacacctctgaattcccgggccgtggcgcatacacccggctcagcctccccgttgctggactacgtgtgcgtgacacatacctggtgcgtatgataaccaaaggaacgcactggctcgtgacaggggctgcatactctgacaaaacgatgcctaccacatggttg

SEQ ID NO: 636235 - DNA, 462 bp, Homo sapiens
caattccattccagcgtatggattagcaatcaggagtacgacgagtcgggcccctccatcgtccagcagttgatgactatccattgcggactcagcagatgcgtagcatttgctgcatgggttaattgagaatagaaatttgcccctggcaaatgcacacacctcatgctagcctcacgaaactggaataagccttcgaaaagaaattgtccttgaagcttgtatctgatatcagcactggattgtagaacttgttgctgattttgaccttgtattgaagttaactgttccccttggtattagcgtgttaccctttaattttctgtgatttctctctatagctgcgtgtggcctggtcacttggcgggcggggcaggaacgtgcgtgtggtccacgcctctgtggcctggtgcgtctgtgtggccctgtctctctgctctgtgccggtattgacgtgtcctg

SEQ ID NO: 636236 - DNA, 803 bp, Homo sapiens
gactgggcagacgccaagcttctcccagtcatcggtagcgatacggctcactggcacggactccattgtggctgttgacaggcaagacgaggcctaagtcagcccttcaggcatcgacgtctttgatcgattacatctataggtgtgctcctatcatatatatcgtgtcttcacatccgtaatttggcccgccccttgttcaacctgacagggggcctgaccagcctctgacgtggtcctttaccaatcagcacaagcagcccgaagtgaccaacccatgtgaccgcacagaacatgcgagtggctctgcctgctgagccccaggtgggcctgtcctgcacctgttccccatggggaagccggcctggacccacggccccattcgttccttttcgcctcttccaagcgcccccccagattgtgtctcccgcgcgcttgtgcggcactctgtacctcgtcgacagtcgctctcagccggttggcacgcgtgttccctcagtgcacggacgccagccccaagtgcctgctgccaacccccgctaacacgggtgaccaaggtgtgaaccttggaccagctgcttgggagcactgtccgcaatggcagggcacctgtgactgctaccccctttcttggcatgccccacgtgcgggtgccccacggcgcttcaacgggcccaaatgcaccccagcaggtgtgtgcgggctactggtgccaacaacaagcacctagcactgttcaaccagggcaaccagccccagtgccgattgcctacccgggctttcttgggcgacgatgccagtac

SEQ ID NO: 636237 - DNA, 821 bp, Homo sapiens
gctttctccctgtgtcccccactgtcagcaactctgctgtgtggtgagtggaccgcttaccccactaggtgaagatgtgcagcccaggagagctgactcaggcctcatcaagtacttcctcttcgttttcaagcctcttacttcttcgtcctcggcagcctgatcttctgcttcggaatctggatcctcatcgacaagaccagcttcgctgtcctttgtgggcttggccttcgtgtctctgcagatctggtccaagagtcctggccatctcaggacatcttcaccatggtcatcgccctcctgggttgtgtcgtggggccctcaaggagctccgttgcctcctgtggcctgtatttagggatgctgctgctcctgtttgccacacagagtcaccctgtggaatcctcatctccactcaatgcgggcccagtctggagcgaagcttgcggggacgtcgtatagaaaaccatccgaaagtacggcaccaaccccgatgagaccgcggccgaggagagctgggacgtatgtgcagttccatgctgcgctgctgcggcgtggcacttaccctgcagtgacttggtctccaacgtcctccatcctggaggaggtagccggtgtccggatggctgcaccgcgttgcccgtgctcctgtcttacgaacttggtcggcgaccgaagcgagctcccggcagatccctcagataaggtgatctttgccccaagctcggcaggcttgggcccctgggggcggtccacgccccccagtcgcagactttgggccgtgccttggagagcccttttccggagggctgcggcgggcc

SEQ ID NO: 636238 - DNA, 141 bp, Homo sapiens
  misc_feature (119)..(119): n is a, c, g, or t
aggcccagctaaccgatatacggcaggtccgcacggtgctctacgtgtccgacgcgaacttgtacagggcggcatgcaccgcaatgatgaatacacgtacgaccaggctccatccttancgttatttggtcggtcagcacg

SEQ ID NO: 636239 - DNA, 500 bp, Homo sapiens
  misc_feature (251)..(251): n is a, c, g, or t
  misc_feature (306)..(306): n is a, c, g, or t
gcttaatatactatgttcttagattctgtgctaggaaaccacagaattcaggacactaccttcctgcaaggaccctgggtacttagtcaccatcacagacatttgtagagcacaatctatgtccaagagaccatgcttggtgccacagctcaaagaaaatgtctgtagattggttcgaacctaaggagggactcaccggagcctttcctgggtatgacagcatgcttactctctcccaagtcacaatctangccaaaatgggagatgactacggttattgaaagtttagatcttggttaaacagcntccttgaataagataaaatgaatctgttgataatgccactttcttttccaagtttttttgggaaacggggctaaataactcattcattcataaattcaacacttttcttagcatcaaactccatttcaggcttttgggaatggggctggaaaaacaaagggaaaacaaaaagggccgggtcttaaccttttggg

SEQ ID NO: 636240 - DNA, 194 bp, Homo sapiens
  misc_feature (21)..(21): n is a, c, g, or t
  misc_feature (28)..(28): n is a, c, g, or t
ccaccatgcccagctaatttntattttnagttgagacagggtttcactacgttggccaggctggtcttgaactcctgatctcaggcaatccacccacctcagcctcccaaagtgctgggatgacaggcgtgagcaaccgcacccagcttaaggtttttttgttttgttttgtgacaagagcaagactccgtctc

SEQ ID NO: 636241 - DNA, 229 bp, Homo sapiens
  misc_feature (54)..(54): n is a, c, g, or t
tttttgggaaaaggaaaccaaaggatttaaaactggggtttgggggaaggtttnagcctttccccccactcccctgccccacaccctttattccccagcccaaagagacgctgcttttaccaggaaagactattgaaaaatgttttattttatttttttttgccctttccatccttgaaaaaatggggaaaaaagaagaaaaaagacaaaatggcccataaaagcccca

SEQ ID NO: 636242 - DNA, 895 bp, Homo sapiens
gacagtctccatccaggatcaatccctagatctcgatggtgcccctcatcaggtggatcgtgagcctagcgtgactgtgcctctgaagtaagtatgtctagagtccagaccaggactttggcaaaggaggctgattcggattccatcaaacgcgtctacacctccatcgaactagctgcgcggcacccctaggggccgcctaatcagtctccccagacctgccgccgcctacagtggggtccatgactccggcgtctgacacggccgtggagcatgctcgggcggttggttgaccttgtttgcctggcggctcgccacatggggccacgcggtgctgggtggtggttgtctccatgcgttcgtgtgcctgcgatttgagcgtggccctctcgtgtgttggtctcagtggtaaaatgtacgtaatcgcctttgttccactagtgggggcatggaacgtgaagacctcatcgttgggtagcgtgatatctcggtcaattcttgagtcgaccgaaatcagggagggtcctgggactaccctagagtttcgcactagggtgctgtgttgatagtcccatgcgtcggcagccatgtgccccattcatgcgacctgaagtccctcgtaatgttctaacggtacgcttgttacagctggaagcggcattcaatcgatcgtgggtgggaaacacctagtagtcaccagtgtaagcgctgctactgggagcggtataggaccgggcctttggacgatcggggcccagcagggctcaaagcccaccatgcctcttgcctaagaaccatggcaacttccatggggaactctatgggagttggtttgaaagacactttagatgagccagaggcctttataccttgctctcgggaaatgtggttagcg

SEQ ID NO: 636243 - DNA, 538 bp, Homo sapiens
aaggctgtcacagttgatttaacaagtatgatataagaaatgagtcggtattttaccagttctatacagtgatggaatcttctcgagttgcgtatttataggaattagaggcgctgcatgatttacactagaatgcttttcctcatttcaagttgcacatagaagaaagaaaagaaggcttcttctctagtaagcattagcatggtctaagagtgatcatccctattttttgtctaaaaccagttttatcagagaaacaaagcaacaatttctacatctgcaagacaagtttggcttcagccattatgtatagatagatgtgtgtgggtgtgtacgtgtgtgcacgccggagtcaattcctatcatccagggtaatactgggagacgcccacagagttcactatagaaaaaaatcttcccgaaacatcacaaagttatcgggatacattataagcttgcattatttcaggaatcagttctgaatattattttgcttcttactgttaaacataaatgtataaagtcttgaaaatacaaa

SEQ ID NO: 636244 - DNA, 216 bp, Homo sapiens
gtaaccgcggtgacgaacgacgcgacaccctcctggggacacgtgacggccgggcgcccagacacgacggggctgtctcctcgccaactttctactaacacactggacacgcgacgacgttttgactcccacacatttacaacacctccgcacccaactttcaacacttaccctacttgttcctacctgacacgtgacgcttgacgaccttgcacc

SEQ ID NO: 636245 - DNA, 428 bp, Homo sapiens
agtgggctggcccaggcaacatcctttcatcgggattcgtgtgtttgcttcacgtgacatgttacgcgcacttgccggctatgcactgtgtggccggctatgggtcagctggctgctcgtggtgtacaggtccccggagcgcatcctgcctgggtggcaagtttctggcggtcacgccctgtccgctttcgctccaggtcacactgagtgagctcctgggggaagaagccctggaccaggcaggcgatgaccacgttcccatctggctgggtgctgcagaggctcagcgggaagaccttggggctggtcggggatgctggaacacagaatgcactgtgaggacgcggccctctcctctatactgcctctcctctatactggaggaacccagcacagagaggcctggtgactgccccatggtcacacag

SEQ ID NO: 636246 - DNA, 116 bp, Homo sapiens
acgcgtcaagtactctataggtcggcattcttgaatgacagggaaaggcaaacatctctacagaggtgtgatcgaaagcattggatattaggtacacggaaactttaaatgactgg

SEQ ID NO: 636247 - DNA, 368 bp, Homo sapiens
ttatccaggagaatgggtttcttgttgaaatccgaaattttttgggtgaaaaatacctccgcaggggtcggatgagacccggtgttgcttgttcagtatttccagcccagaaaaatgaatttatccctgaagggaatggccttgagcttggttcaaattcagcgggtttggttcagccagccccccccgtttaaaacaaggatatccgggaatttttgggtgggatttatgtctttgaaaaaggaactgttcagccgggtgatgaattagatttaagagtttcctgggtacagaaagaagatgcccgatggccctttagacccccttgtgatattttaatggtgccataaaaggccttttggtttgga

SEQ ID NO: 636248 - DNA, 950 bp, Homo sapiens
cgacttctccgtgtccttaaagcgtcagggaagaacaaacacttcaaggtgcagctcgtggacaatgtctactgcattgggcagcggcgcttcccacaccatggacgatggctggatggaacactacaaaaaggctgcccatcttcaccagcgagcacggggagaagctctacctcgtctaggggccctgcgatgtgacgtgcgccccggctcccatcatctcgcctcccgtcgctcgccacggtgcgtacgctgtcccgcccggcccttggtgggcagaggtctcctcccgcgtggaacggccccgagggcttctctgcgagtctctctttatggttcaggtcgctgtggtcggttcgtctcccatttgccatccaggcctcacactccacactcgagcccaacccggctgccagactttagaggagggtgagtgagccgtgcgacgttcaccattagttccttgtccatcggagaagtggcggctcggtgcattcatagctcgttccctgttcgattggcacccctctttaagcagaggacgctggtggcaccgtgtgagcgctggatgcgagcctaaggccacccagcggtagtcgcccgtgtccctgggcgctcatgcgtgctgggcagagcaggtgcgatggccccagtcctagcagccctcgcccatgtctgtgcccttacatggctcccggactgtgcagggtaggccgaatacgtttgctgatacgcaatactggaaccaccgggtgcgatggcagtgaggagacttgccagtgcctttggggctgtgtttgccctacgaacgattctggagggcgtgtctgcgaagaggcccggtgactcgaacgacgatgtttggtatttccccaattgcctcccctgtgctttcctctgccccggttgttgatccccacttgtttttctcccgatgttttgccttgtgc

SEQ ID NO: 636249 - DNA, 267 bp, Homo sapiens
ggagaacaaggcgtgaatatactgatactctaaattcataaaaaccgtgttcgaaaggtttagctgttagaatcgtgggaaaagtgatgcatggatccttgcaagtttatgtctttgggttttattttctattttagattttggtttagtggttttctgctgttcttccacgtctgaatccctttctagtgttcggatggcacaagtcaccacctctgggaacaaaaacttcaacctcctgtgtatctgaggcagctcgcccctgag

SEQ ID NO: 636250 - DNA, 137 bp, Homo sapiens
tctagaggatccttaatatgctgtctcacatcttactaatcgttggactctgggactcatgcagtctgccagttcaacttccaaaagtgctgggattcagacgtgagacactgtgcctggcggataatattctttga

SEQ ID NO: 636251 - DNA, 737 bp, Homo sapiens
accagctacttactgcttatcttcttcattggaactcatagttcacgcaagctcctagtagactaacagacagacctgactggacacccagcaacagcctgcagcgtacgcttctgcactactgaaactcctcctgcatgcgacacagcttgctgacaaacacagctgcccaagggccactggctgacccatgtcatgttccatgcaaacacgagcttcggatccatccatggacaccgagctagcacacgagcgtgcatctcagcagctggcagctctagcgatgatccgaccgaggccgagcgatctccccgcacctcagcgcacattctctcgacgtctctcccgcctggagcgcgtctcactgcctcctgctctacccgtccttggctcgccatacccctccctcctccccgcacagctggctccgcgctctccgccgacacaccgctggccaacgctccctgcctacggactcgcccttctgccacgcactccctccctgcactgcctgcgctctactgcgcccctccccatgctgcaacccgactgctcccccacacagcccacgagccctggcgctccctcggcgcgcgcacgctaccacacgcacgcacctgcccacatgcactgctgcccgcctcacgcccactacctgcgctgcgcaacagctgctcggcgcctggctggcacctccccctccacagctaccactggcacggccctctttctccacc

SEQ ID NO: 636252 - DNA, 381 bp, Homo sapiens
agaggatcctcttgtgccccagaacctaacgttgtggcacatgatttacactgagtgggaccaagcctgcagtgagatctggctgtctctgtgaatcaaatgcctaaagtatacgtaggagctcctgatctaagcttggaggcatcgaagggaggattaaactttccaaaatgaagcttgccccaatttgggatctctactccgggggtcgacttgcacgtcaattgcacgggggcacaggtttctggcgaactgaagggggcaggttgtggatgtgaacctggaaggggctcgggatttcagcaccgacatgtttgactttaactttggaaggaccaaaaagttgaaagggagccttggggccactgggtgagatcaaag

SEQ ID NO: 636253 - DNA, 212 bp, Homo sapiens
atgcatatgctgtgctgatgaaagattcatgttgtctgactttatttgaggctgtcaacatcacctaacagttctttttttgtaattatacgcaagtagtgggatacatgtgcagaacgtgcaggttagtgacatagggatacatgtgccatggtggtttgctgcacccgtcaacccgtcatctacatcacgtatttctcctaatgctatcc

SEQ ID NO: 636254 - DNA, 131 bp, Homo sapiens
catggctacagtttacggaagatgtcgacgagaagcacaagatgctgaggacataagacacgatctggagcaagagatcgccagctaccgcagactgcatcgagggccagagacgccaagaatgattggtt

SEQ ID NO: 636255 - DNA, 492 bp, Homo sapiens
  misc_feature (37)..(37): n is a, c, g, or t
  misc_feature (63)..(63): n is a, c, g, or t
  misc_feature (80)..(80): n is a, c, g, or t
  misc_feature (132)..(132): n is a, c, g, or t
  misc_feature (154)..(154): n is a, c, g, or t
  misc_feature (189)..(189): n is a, c, g, or t
  misc_feature (259)..(259): n is a, c, g, or t
  misc_feature (268)..(268): n is a, c, g, or t
  misc_feature (332)..(332): n is a, c, g, or t
  misc_feature (475)..(475): n is a, c, g, or t
taccaagtatatcaaattcaccatcaagctttcaagnaatttcagaccctaacctctgggganctagtaatttcagaagnaacaaagattattacattatatctacatcaaatgggtctttggagggccggnataaccaggagggaggggtgtnccagacaagagccatgaagatcctcatgaaagttngacaagatgacaagttctgctggatcaaccaggaataaagatccaacaagacgtccagaactagaagctngtacaaatngaagaagttcgacaacaagtccctttgtaaaaccaaatccaggttctagcacagacggcaacancgccggacattcggggaacaacatgctcggttccgaagtggccttatttgcagggattgcttcaggatgcatcatcttcatcgtcatcatcatcacgctggtggtcctcttgctgaagtaccggagagacacaggaagcactngccgcagcacacgacca

SEQ ID NO: 636256 - DNA, 794 bp, Homo sapiens
attttggctgctgtagcctggtctgagtcgaggggtggcacgcgccgcgcgccccaggaatctcgggacagaagggtcccgaagagtcgcgcttgtgtgagagaaatcccagatcctgtgatgggggacaccagtgaggattgcgctcgatccatcgatttggaaggcacgtgatcttggacttgtcaggtctgggtggtcttatctttgcgagtccaaatagtgcggtcatgcgacgcagcatgtcttcagaggctcctgcttccccgctccttctattatctcggagcgtggacttggtggctttcccgtgaaaacggagagagcgagacggagaaggacgatggggaggacgaagaagacattccaaagtctcctcctacaaggactgggaagagagcaaggatgaccagaaggatgctgaggaatgcagggctggtgaccaggctggtcaaaatatccggtacatacgacagacattatcggtctgctcgggtagagactccatcccatccgggtggtgtgagcgaacgagttggggaacgcagtcggcagagagagcgggagcggcgggaacatggtgtctattgcctcgtccagagaatgaaatggttggcagaagagaactcgcgggatcgagactattgaccgcgagagggacagagatgagggggatagaacgtttgcacagcagcgatcagagcgagaatggggggccgagcggagcccgggaagaaatgagccgagagccatgaattaccaagatgggcagccttaggttcggaagagagatg

SEQ ID NO: 636257 - DNA, 814 bp, Homo sapiens
  misc_feature (14)..(14): n is a, c, g, or t
  misc_feature (19)..(19): n is a, c, g, or t
  misc_feature (22)..(22): n is a, c, g, or t
  misc_feature (32)..(32): n is a, c, g, or t
  misc_feature (311)..(311): n is a, c, g, or t
  misc_feature (461)..(461): n is a, c, g, or t
  misc_feature (468)..(468): n is a, c, g, or t
  misc_feature (475)..(475): n is a, c, g, or t
  misc_feature (478)..(478): n is a, c, g, or t
  misc_feature (485)..(485): n is a, c, g, or t
  misc_feature (538)..(538): n is a, c, g, or t
  misc_feature (567)..(567): n is a, c, g, or t
ctaagtgccaattntattnggntatcaccaanattgaaaccacggcgttggtttataaaacaaaagcagtgtacgcgattccggatgtgatatgcaggacagcggaattcgagcggctggatgagcatgcgaacgctcatgtcagctgcagatggcagcacacggcgctcgcacgggcatgagggtatgggctgcacgccaggtctacgacccagtactgtctgactcccgagtcccagagctgggtgagcccgccacaacaccagcacacaatactacaattccgcctagggccacaaggcttccctgtnttccccccaaggaggctgtgctgtcttggctggacccagccaggcccagcgacccctctccctgcatggcatcctccagcccctgtagaactcaacctctacagggttagagtttggagagagcagactggcggggggcccattgggggnaaggggnccctccnctntgtagtnctacagggtccaacatagagccgggtgtccccaacagcgcccaaaggacgcantgagcaacgctattccagctgtccccccnctccctcacaagtgggtacccccaggaccagaagctcccccagaaagcccccagagcccagggtcggcctgccccccccccatttccccagtgggagcaaactgcatgcccaaagacccagcggccccccccggtttggtttgcaacgcctggcatactatgtggatgtgccagtggggtttgtaatgagagccctttcttttttttttatttccctggagcccaataaatggctgtaaaattccca

SEQ ID NO: 636258 - DNA, 967 bp, Homo sapiens
  misc_feature (967)..(967): n is a, c, g, or t
ggaggtcggggctgcgggcgctcgctggtggctggacccggaggctgctgcgtgcgccggggctccgtggcctggattgaatccgatcgggagccatgagcgtggacaaagctgagctatgcgggtctctgctcacctggttacagacgttccacgttccgtcatccactgtgccagcacatcaggacctgagcagcggccttgccgatagcctatgtgctgaaccagaatagaccccatccttggttcaacagcgggcatggcatccaagggcatcatcggcaagatccatggtccacaactggacagctgacaggtccagcacatctgaagcatggtcttacgagagccatagtagcagtactcccaggcatgtccatggacgcatccatgtgtcagcaagagcatctcccagcatgtgagccatcattggagagttctcagacccggcagagctcggaaagctgcttcagctggtgctgggctgtgccatcagttgcgagacaaagcaggaccacatccagagaatcatgacgctggaagaatcggttcagcatgtggtgatggcaagccatccaagagctcatgaccagagacaatcatgactacccatggtcaccagacagacgtatggcaactagacaggcagaaccgaaggatacaatacctaagtgaggaggctgcggaggggacgaaataagaagagcggaccggaccagaggagagaacagaaacaacaggaaagaagaacaagcaacactggagatagcaaacaagacacacacaagaatacgcaaaaaaggagcgagaaccaagaaccaagagcacacgagcgcgaagagaaaccagaagaacaataggacagaacgacaggcagaacagaacgcagacacgagcgaagcgccgcagaacacacagagaacaaaacacaaaaaaaaaacaagagacagacgcaaccaagcaaacn

SEQ ID NO: 636259 - DNA, 978 bp, Homo sapiens
  misc_feature (737)..(737): n is a, c, g, or t
  misc_feature (978)..(978): n is a, c, g, or t
gtggacgcaaagactgggcatgctccgtggcggtacgaggtttggtcacaagtaggaagaagccagtgcaccagaccggcaagggagaagcgggagcggccgggcaggcggcggtggggtcccgctgaccggcgggaatcggtagctggcgaggaagagcgcgaggtgacagcagtggagatgggcgccggtcccgagaagtcgtcccagatctgcgtcggcggcgtctttctgccttcgccctcggaggcgggtagcagttctggaaacccccagggggtctggtacaactcttggggcagccaagggtccccgccgggtcggtgttaccggaatcgggcataggaccctcccctccgatctgaagtggctgggggcagaaggagccgccccccggcgagtgttggcagcgacaagtcggcaatactggcggcgccgaccaggaggtgtccgggcatcagagcccacggaaagtgcgggaagaacgaggccgacaacccccgggagggaagggacgctagccaagagcaaggaggtgggccggcccaatgggggctcggctgccccagggctcttccgcgggtggtagcacgttggggaagcgacacaacccaaggcgcccatagggccgaacccaagcgagacgggggggcacgcgggagtactcacattccaagtgttcctgacagcaattctaacgacgggcccgtcaggggcctctgccagaggggacgttnccttcaataggttgcggccgcgtgtcggtgcacacaacctgtggttgggaaacctggcgcctcagatcaaaattaaaacagttccgggtgggtccatgttcgtgggcagcgaacacgttcctgaactcttgcccagaaatggggtgaatagccacacacgcagagcccgtcgtatccccttggggggaccacagcatagtgtggggtgtcacatgatgtgtgcgaggcgcccacaggtaan

SEQ ID NO: 636260 - DNA, 290 bp, Homo sapiens
atctccgattaggtgggccacggggtaatgaagagctcacggtaggcgccatctccagaaaggatcctactgtcaggtggttggtgagtccagagtggctcccccagattacaccgctgggtggcaacctaattatttttcattaaacttttagttatggtacatttcaaacgtgtgcacaattaaagagagtcgtacaatgaacctcgtgtgtccgaaactcaacttcgacaacgatcaactaaatgcccaatcttgttttatctgtatctccacacacttccccctct

SEQ ID NO: 636261 - DNA, 373 bp, Homo sapiens
  misc_feature (322)..(322): n is a, c, g, or t
gacccccagccatgccccgccgcccccaggttcaccgacgcccggtagcgcatcctgcccggccggcctggcgcccgctccgctgcccgcgctccgggtcccgggctcggcggcggtggcggcggcgtcagcgagggagggcccgccccccgcaccgcccccacccgggcccctgaagcgcggggcttccccggcctcccccgcctcccgcgcggccgggctggggtcccctccaggtggggttggtggaggtgggggtgtcggggcggggggtccgcgggccgggggcgggggcgggctccgcctgagtcaggttttccanggagggacgccgttggcacccagggtggagcccgagaacctcgcgcggccg

SEQ ID NO: 636262 - DNA, 170 bp, Homo sapiens
gaattttcaggtatttataagcggctacgaccaattttaatgaccccgtttcccaagaccttatcaaaaacaaatgaccgtcaaagggggatttgaaggcttttattgggttgatactagcaacacacattccaaaacaacaggtatgacgcgttcatcaaaagatcaga

SEQ ID NO: 636263 - DNA, 105 bp, Homo sapiens
cagtgagatgaaccaagtgattggatggggttttgagttgctggaataatggagttccagtgtccaatgcataagccccataataaattatatatttggtgacca

SEQ ID NO: 636264 - DNA, 181 bp, Homo sapiens
gttatggaaagagataagataagccctgtatggagcacttgtgcatggggcgcagtgttctcgtatacacccggggctgcccggctgccaggctctgcggcctcaccttgtgaactacatgggcaagcagcttcttccagtgggctgaggttgtcgtgtgcagaccaccatccctgcggta

SEQ ID NO: 636265 - DNA, 334 bp, Homo sapiens
cacgaggcggaggccgggccatgcggggctgtttggctggggcaggcggtgggctgcccggagggacagctgcggcaaccggcggggggcgtcctgatttggaggtctaaggtgctgccatctcccgaggggccgctcgggccccttccggcccgggtctggttgggccgcaggaacaaggcggactgcagttcccgggtctggacctggcctacggtttcagcgcccgggcccgggggcgcggatccggcagccatgtgtggatcttgaaacgccacgtggtcttctgaagcgctttgagagttctaaagggatttatattgcaaactgatta

SEQ ID NO: 636266 - DNA, 158 bp, Homo sapiens
gggctgtggcaggagaatcgcttgaacccgggaggtggaggttgcggtgaattgcactccagcctggaaatgagggcgaaactctctctccaacaaaatttagctgggcttgatagcatgcacctgtagtcccagctactcaggaggctgaggtggga

SEQ ID NO: 636267 - DNA, 703 bp, Homo sapiens
  misc_feature (438)..(438): n is a, c, g, or t
  misc_feature (493)..(493): n is a, c, g, or t
  misc_feature (510)..(510): n is a, c, g, or t
aggatattgaaatggataacagtagttaatctaccgaacttagtctaaaagtgtatgagaaacttttgcatcatgacaatgaatttttaaccatgtatctccaaataacctccatataaggctatatcacattaatagcatatattgataataagtgattttccccatgagataccctgtcacaggggaagcactctgctaatttggaagatgtatggatatgcattcgatgcttatcaggaagtatatttatcagagaatttgccgcatgtccatggcacaggtctattgtagtattccataaattatcttttggctataaattctgctgttctttaacagccttttctatgactatgtactccttgatagagagatagacccttgtgtagtctgagatctttactacaagttgtcttctctgactctgtttagtangaccacgtaggcagatcacctgtgatcaggagttcagaccagcttgtcacatggnacaccctgctctataangatcaggattcactggagaggcgaggcacgtgtattacagattgttcgatgctgaagcttgagaatagttagacccttgagcacagctgcaggagcatgaatgtgcactgactcagccttggaatacagttgactgtataacggaaacattgcaggaaggactatcgaccgttgggcagtaggtttgttgggc

SEQ ID NO: 636268 - DNA, 140 bp, Homo sapiens
tgtctgtacttataatttcttaaccatgacattgctccatagattatctcatcttgctagccttacggtattctaatgggaagctcatgagaaccaggaacaaaccagcacatcttttgaaatttactcctttgggacta

SEQ ID NO: 636269 - DNA, 353 bp, Homo sapiens
ctacggacgcaggctgcctttcttcggttggtctcgggtgtcgaggcggtcggcgaattccagcggatgtttgaccaggtcaagtccggccagcggtctctcgactccctgacagcgtggatcagcagcaacacacaggtatcagctgtttaccgtgacgaactggtcaagcttgctgcgtcgtactcaagcagcagccaaaaggccgctgacttccaggccctgcttggaaaaagcaaggagccgcttgataaggcggcggcgggtgcgcgagctctagctgattctcagtctgcatcctctgccgccgtatcgggcggggctcaggcttgggataagtgcgtccgtagcgg

SEQ ID NO: 636270 - DNA, 145 bp, Homo sapiens
aagacgacagaaggggttctgggcctagttgtccctcccctctggagcccccgtcctgtggtctgccacagtttcccctcctaatacatatggctgttttccaccctcgataatataacacgagtttgggcccaaaaaaaaaaaa

SEQ ID NO: 636271 - DNA, 298 bp, Homo sapiens
  misc_feature (134)..(134): n is a, c, g, or t
  misc_feature (136)..(136): n is a, c, g, or t
  misc_feature (160)..(160): n is a, c, g, or t
  misc_feature (174)..(174): n is a, c, g, or t
  misc_feature (235)..(235): n is a, c, g, or t
  misc_feature (265)..(265): n is a, c, g, or t
caagataggttgggtcgggcaaggagggatgtttttatcctctttctttccaggcttctgaattcccttctgagttaatgtcaaatgacagcaaagcactgtgtggctgaataagcggtgagtgtttgcttgtncnacccgtggtaaactgcccctgggntgtgtgcgcgcggntggttgtttttgcttgtgtatctataaaatgtctgatttggtaaatgcatgcttacttcgnggtgttacccgtactcattgtctcactggncatgaggggcttgtagctttgggtgctcgggtc

SEQ ID NO: 636272 - DNA, 190 bp, Homo sapiens
  misc_feature (120)..(120): n is a, c, g, or t
  misc_feature (132)..(132): n is a, c, g, or t
  misc_feature (155)..(155): n is a, c, g, or t
  misc_feature (176)..(176): n is a, c, g, or t
aaggcaaacattttgggcaacaggcttttactcggattacagttggattcatatccctaacattttagataagaatggaaagccaaagcaccagagaggggttagtcctgttcaaaatcntgttctttttgnggactgccgtggccaatataaanagaggttcagggctagttggntggtgttggcgtgg

SEQ ID NO: 636273 - DNA, 838 bp, Homo sapiens
ggacgcgtgggtcgccagccgttcacgcgttcggtcctcctatggattgaatcaccgtcctcgcccgtcgaaccatggacgcccccaggcaggtggtcaactttgggcctggtcccgccaagctgcgccagatcagtgtaggttagagatacaaaaaggaattattagactaacaaaggagttggcatcagtgttctttgaaatgagtcacgaggtcgatcagatttttgcccaagattattaacaataccagagaatcttgtgcggggaatttgggtagctgttccagaaaaacgtataaggtgatatttactaggcaaggaggtgggtgcggcagttcagtgctgtccccttaaacctcatagtgcttgaaagcaggaaggtgtgcggactatgtggtgacaggagcttggtcagctaaggccgcagaataagccaagaagtatgggactataactatcgttcaccctaaagcttgggagttatacaaacattccagatacaaggcactggaacctcagccagatgcctcctaccgctgtatttatagcgcaaatgagacggtgccatggatgttgtacgttttgacttaataccccgatagtcaaggggagcagtactggtaggtgaccatggtcctcaaaaactacacggtatcaagcccaatgggatgttccaaagttggagcacataaaagcaggtggcccacgaagcatgtgactcagcagggggtcaccgggaacaagacgagaaaacggagaggaaagccacgaaagatgcctcgactgacaaaaggagcagagaaaagctacattaaaaacgagccgtagaatacgaa

SEQ ID NO: 636274 - DNA, 742 bp, Homo sapiens
  misc_feature (30)..(30): n is a, c, g, or t
  misc_feature (118)..(121): n is a, c, g, or t
  misc_feature (123)..(124): n is a, c, g, or t
  misc_feature (202)..(202): n is a, c, g, or t
  misc_feature (209)..(209): n is a, c, g, or t
  misc_feature (221)..(221): n is a, c, g, or t
  misc_feature (223)..(223): n is a, c, g, or t
  misc_feature (232)..(232): n is a, c, g, or t
  misc_feature (235)..(236): n is a, c, g, or t
  misc_feature (239)..(239): n is a, c, g, or t
  misc_feature (242)..(242): n is a, c, g, or t
  misc_feature (260)..(260): n is a, c, g, or t
  misc_feature (262)..(263): n is a, c, g, or t
  misc_feature (281)..(281): n is a, c, g, or t
  misc_feature (299)..(299): n is a, c, g, or t
  misc_feature (310)..(310): n is a, c, g, or t
  misc_feature (313)..(313): n is a, c, g, or t
  misc_feature (389)..(389): n is a, c, g, or t
  misc_feature (427)..(427): n is a, c, g, or t
  misc_feature (538)..(538): n is a, c, g, or t
  misc_feature (576)..(576): n is a, c, g, or t
  misc_feature (630)..(630): n is a, c, g, or t
  misc_feature (637)..(637): n is a, c, g, or t
  misc_feature (660)..(660): n is a, c, g, or t
  misc_feature (664)..(664): n is a, c, g, or t
  misc_feature (675)..(675): n is a, c, g, or t
  misc_feature (697)..(697): n is a, c, g, or t
  misc_feature (700)..(700): n is a, c, g, or t
  misc_feature (710)..(710): n is a, c, g, or t
  misc_feature (723)..(723): n is a, c, g, or t
gatccagtgcacattatagcgccgcccgangccctcaccttccccctcccaacctggcccctagagtacacccaaaacagaaaaaaaaaaggaaacccagatccctgctcctcctctnnnngnngggggcttggccagggagccccttccataggtcccagcaggcaggagagtggacccctctgtgcccagagagcaaggntccaggntccaacaacagntngaacatgcnggnnggngcnggagcagaggcctgtggntnnggggggggaaaggggggngggaagggcactgcctgnggggtgcgggngtntggtcatcccggggatgcacgcagcagcttccgggcatcaggggcctgcccctggctggttagcgctttgacagcncgtgggacagccagttcagaccatcgtacagacctgtnccttgggtggcacaggtggcctggacataccacgtgcggctgcgtaagttctgttgccccagcttgttagttagctcgctcacgggcatggcgttgggcatgtcctgcttnttggcaaataccagcagcactgcatcccgcagctcgtnctcctgcagcatcttctggagttcatcagcagattcttggacccgctcccggtnattactnttcaccacaaagatgaggccctnagtnttctggaagtngttccgccacagaggccgaatnttnttctggcctnccacgttccagantgttaaacagatgttctta

SEQ ID NO: 636275 - DNA, 677 bp, Homo sapiens
  misc_feature (108)..(108): n is a, c, g, or t
  misc_feature (228)..(228): n is a, c, g, or t
  misc_feature (242)..(242): n is a, c, g, or t
  misc_feature (257)..(257): n is a, c, g, or t
  misc_feature (354)..(354): n is a, c, g, or t
  misc_feature (479)..(479): n is a, c, g, or t
  misc_feature (613)..(613): n is a, c, g, or t
tggccggatcggcgttttattctataatttttaattagtgacgttgacatctttcctatcgggcttttacatattttgggcttggaggtggccttcacttatcttcancaaaattatctattgagatatcttttttttcctgtgatttgggagtgctcttgatatgctgaaatgtgtgcactgccacattttgccctatttgttcttcagtttggggtttgcttgcanttgtggggggggcnttcactggatggaantgttgataattcatcaaaagcaaatctattgagtcttttttcttcatggctcctggcttcggtcataaactcttacaggtactacaatgaacactcngcactgtgggtaccatggtgcagatgtcttttgtatccttccagaaaaccatttgaggagtgacttttgcaaaatgtaccagtctggcaaagtatgcagtcaggcagagtacttctgctattganggggccaaaaaaggcaggggaagcaactcagactcttcaaacagggcaagagcgaggtctacacaaataaagaagtatgcggcaacctgcgtttgtctagtgggtataaaaatatgaactgctgatggcctgangtgagtttcaaagggacatttctgggggactgggcatccaaacataggcacgtgcaggagaagg

SEQ ID NO: 636276 - DNA, 112 bp, Homo sapiens
  misc_feature (13)..(13): n is a, c, g, or t
  misc_feature (32)..(32): n is a, c, g, or t
ctaccccttcccnagtctctggggtcaggaanaatcccttattttaggttgtgttttgtttttgtatagggaccccagggcagggctagtaacagtttttaaataaaaggca

SEQ ID NO: 636277 - DNA, 359 bp, Homo sapiens
tcgaccgggcgacagagtgagactccgtcgcccggcatggagtccagcgacgcaatctcggttcggttcactgcaacctccgcctcccggattcaagccattctcctgcctcagcctcccgagtagctgggaatacaggcgcccgccattacgcccggctaatatttgtatctttagtagacacggggtttcactatgttggccaggctggtctggaactcctgacctcgtgattcgcccccttcggcctcccaaactgctgggattacaggcgtgacaccgtgccgggccctctctcttctatttaaaaggataggcacagcttttggaactgaatgtctttcctgtcgacgcggccg

SEQ ID NO: 636278 - DNA, 462 bp, Homo sapiens
ctcagcagttttaggaaatagagggggagaaggaaggtatgtaccttccttccaccagggaggcacgcccagccctaaccagccagcgaggcagtaggtcctcctagctaatcttcacaacctgggctggtgtcgggaagactttcgttccaatgttagttttggtatcctgtccgccatccgttaaaaactttgtcatctaaggtaagtcacatcacagtattgcaaagcccccgtttcctcacagaatggttgtttgagagttatcaatgtaaattacttggcacatgtaggcatgtgacagactgtagccaatgttactcaaggtcattttccactgattcatactttgacccatttcctattgtcgattctaacacacattttcaaggcagcttcctgataatacggctgtaggatttttctgcgaaataaatccaaaatgtccattcaaacccgata

SEQ ID NO: 636279 - DNA, 985 bp, Homo sapiens
  misc_feature (198)..(198): n is a, c, g, or t
  misc_feature (219)..(219): n is a, c, g, or t
  misc_feature (222)..(222): n is a, c, g, or t
  misc_feature (246)..(246): n is a, c, g, or t
  misc_feature (634)..(634): n is a, c, g, or t
cagaggttggctctggcctcagtaccctgagtcgcctctgcccacattgtgtcctgtgggggtggggtcaaccgctgctgtgtacagaagcacaggaacggatgtgtatgtaactgtttaatgtgggatatgttcccctattcctgtatttcccttaattgcgcctcgcgacgtgtgttacgcccccagttgcagtanttaactgggctgggtagggtngcncagtctttgggggaggttaggganttatcctgtgcttgtaaataaataaggtcatgactctacgctttttcagttgttaacttgtgtgcattgaaaatattgaggaagcagaatggtggtagccccacgcacaggggtaagacacgcaagaccagcaaggcgtggaaactcatgtgctctcttatattatcattgtgggattaattctaaaccaacagtcgattcagataggtcttatggttccaatatattttatttcaacaaacaccaacaaaaaccgtccaaagtaaacaaatccttggggcgttcaaacaaacaacaaacaaaaccaaacaaactccgcagcgaggggtgccctgggttaccccaaattcagcccatcatacgtggagtacgctatatacaaagttcnacatgggcccgatcgctttttacaaacggtcgctggacgtggcgagagaacccctgtggcggttaaacccaaactataatacgcgctctggcaggcagcaatccccccctttcgcgcagactgtgcggtaaatagacgacagaaggtgccggtaacagggtacgcgccgtatccccaagcaggtttgcgacaggacgtgtacatgtggcgaaatggggcacattggtatagcggtttaactaatttatggttagaacattcggcggtctcaaatattttggtgtgaaatcagagtcaatatttattaacacaaatatgggcgagacatgggtaaatatcgcctttctcttc

SEQ ID NO: 636280 - DNA, 248 bp, Homo sapiens
gctttatctactggatgagttccgctgggagatggaacatagcacgtttctctctggcctggtactggctacccttctctcgcaagtgagccccttcaagatacctatagagggacttgaggacagagtgtttgttgaattgcaataccagcatcacatgggtagggggaaccgttgggacaaatttttagacaatacaagacttggacctgggaaaacgcaatcctggacccacagggattatatag

SEQ ID NO: 636281 - DNA, 294 bp, Homo sapiens
tttttttccctaaacccccccccccccctttttaccggggggggggggggggtttcaaaactgttttttttcattgccccttttagtttggtgggaaaagggggggttttgaaaccccggcttggtcacccccttcgaagggaagggaaaattttttgggccccccctggtttttttttttggggggggggggtttttggtttttggttttttaaacccggcttttttttggggacccccttgccccaaattttgtccccggtttttgggccccctttaaaaggttttttggga

SEQ ID NO: 636282 - DNA, 559 bp, Homo sapiens
  misc_feature (334)..(334): n is a, c, g, or t
  misc_feature (356)..(356): n is a, c, g, or t
  misc_feature (360)..(360): n is a, c, g, or t
  misc_feature (372)..(372): n is a, c, g, or t
  misc_feature (390)..(390): n is a, c, g, or t
  misc_feature (435)..(435): n is a, c, g, or t
  misc_feature (469)..(469): n is a, c, g, or t
  misc_feature (490)..(490): n is a, c, g, or t
  misc_feature (506)..(506): n is a, c, g, or t
  misc_feature (514)..(514): n is a, c, g, or t
  misc_feature (520)..(520): n is a, c, g, or t
  misc_feature (537)..(537): n is a, c, g, or t
  misc_feature (551)..(551): n is a, c, g, or t
caaaaaggcttggtatgccaaaatggcgccactccaaacagttccccagcgaccctataaggggagggcttcccaccatttattcgcccccagtggggacaaaaaaaacccagttaaatttaagggtggagacaaagttctggagcctttgagcaagtttatagaagaacatgccccaaaattgagcaggcccaaggaaaagcttttaaggccttaggttttcgaaaggtgggagaaggcaaaccccctgggtggcccatggttggggggtcccccccgaggccggcaacaaaagacagtatttcggattccttttttttttttttaatttttnaaacttgggggtttcccttcangctntgaaaactgaanaaccatgaatggctgaanagtttagtccagatttttacaaaggaaacatctatttttatcatnatttggggtttgaaaaatttttttttaccccttntaatttttttatttttcaaancaaaaaatttttttgngggaaaangttttntttttttaatttaaggnttaaaattcctttnccaaatca

SEQ ID NO: 636283 - DNA, 573 bp, Homo sapiens
  misc_feature (455)..(455): n is a, c, g, or t
actatgaatgacactttattcagtcattttctttacaactgaaactctgggaattcaaaattaacatccttgcctgtgagcttcttgtacacaccagaaaaagtttcaaccttgtgttccacgttgttctgctgtgctttgtctaagtgaacttttatgagccggctgccatccagtttcacacggatcctcttacccacaatttcacttgggaagactaagtcctcaaggatggcgtcgtgcactgctgtcagggtacggcttctggggcgcttctgcttatttttcgtacggcttttccgggttggcttgggcagaatcctcctctgagcaatgaagaccacgtgccttgcactgaactttttctccaattcacgaactagcaggacttggattttctgggaaagattaagctgaggaactggtacaaaaaattatgatagcttttcggacancgacaacttcggatttccttggctgccgtgatgttgagttcacgcagctgcgccttaaaatcgaggttcactccagtcgagcacgcctagagatgcagatcgactcgtcggttctcgc

SEQ ID NO: 636284 - DNA, 412 bp, Homo sapiens
gatcgaccactctgtcaggccatcttgaactcctgggctcaagtcatcctcccacctcagcctcttaagtagctgagactacgggcgcacaccattgcgccagctaattttgtatttttataaggacggtgtgtcactgtgttgcccagcctggtcttgaactcctgcactcaaaacgattcacccacttccggcctcccgaagtgttgggattataggtgagccactgcacctgggccaggacatctctaatatgaaataggacacggcacggtggcttacatctgtaatcccggcactttgggaggctgaggtgggtggatcacctaaggtcaggagttcgagaccagcctggccaacatggtgaaactctgtctctactaaaaatacaaaattagccaggtgtggtggt

SEQ ID NO: 636285 - DNA, 250 bp, Homo sapiens
gctgctgttaattatgttctgaggacacgccctcttttttgtgtttaaaggagaaaaatattcacgtcacgtgctccgcggaaggtataatttcctcgctggggtctgcaccacctccctcgtctcgggtaggtggaatgttcgggtttgagaaagtaaggagaacccagggtggtatccgctcgtgggctcttaaccccttaagtgattttggaccaccgtgccttcccttcaagattctttttatcca

SEQ ID NO: 636286 - DNA, 195 bp, Homo sapiens
aaagtgttgggattaaaggggtgagccactgcgcctggccaacactatcctgttttaagaaccaggtttgtggtcagacctcggatctggttgctaattattttgggctcttgttcaaaatcctggtttataaaatttgatggatgtgtgtttaataaactagcactaagtgttgaagtggaaatctctttttta

SEQ ID NO: 636287 - DNA, 887 bp, Homo sapiens
gactccccatcttcaatcgcatctctgtttctgagtgacaaagtgactgcccggtcagatcagctggatctcagcggggagccacgtctcttgcactgtggtctctgcatggaccccagggctgtggggacttggggggacagtaaatcaaagtaatcccccttttttccagaaattgcatttaaaccccaattccccttgaacctcacgcttggggccaggtccccaaagtgtgcaagctcagtattcatgatggtgggggaaaacacaaatggtagcatatttcaagggaggcaatgaaccctctcccccaactcttccctgcccaaatctggtctcctagaatcttatgtgctgtgaactaataggccttcactgcccctccagtttttatagacctgaggttccagtgtctcctgggtaacttggaacctctcctgaggggggaatcctgggtgctcaaattaccctcacaaaagcaagtagccaaagtcgttgccaagagcccagccataaattcagtggggcccctttcatttcatgacgactttacttattctaatactgacttttcatacgtatttcatactatattgaggtcgtcctgggcttcacctggtaatttaactttcctttttcgataatacttgacacaccgaccgattattacataactgattaaaggcaggacctaattaatataatttaggtaaatcgttcttactcattaagcctttaacaaacgtcgtattgaacggtggtatgggggcaagtttttgtaaagtaaagcaatcttggagttgccgaataaaagaaaataacagaaaaggaaaagaaaaggtgtgttgtggcgacgctgtggatacggaaagaaaatgttgatgtgc

SEQ ID NO: 636288 - DNA, 728 bp, Homo sapiens
  misc_feature (33)..(33): n is a, c, g, or t
  misc_feature (64)..(64): n is a, c, g, or t
  misc_feature (102)..(102): n is a, c, g, or t
  misc_feature (113)..(113): n is a, c, g, or t
  misc_feature (151)..(152): n is a, c, g, or t
  misc_feature (164)..(164): n is a, c, g, or t
  misc_feature (169)..(169): n is a, c, g, or t
  misc_feature (187)..(187): n is a, c, g, or t
  misc_feature (192)..(192): n is a, c, g, or t
  misc_feature (197)..(197): n is a, c, g, or t
  misc_feature (210)..(210): n is a, c, g, or t
  misc_feature (218)..(218): n is a, c, g, or t
  misc_feature (225)..(225): n is a, c, g, or t
  misc_feature (235)..(235): n is a, c, g, or t
  misc_feature (294)..(294): n is a, c, g, or t
  misc_feature (334)..(334): n is a, c, g, or t
  misc_feature (340)..(340): n is a, c, g, or t
  misc_feature (360)..(360): n is a, c, g, or t
  misc_feature (413)..(413): n is a, c, g, or t
  misc_feature (416)..(416): n is a, c, g, or t
  misc_feature (551)..(551): n is a, c, g, or t
  misc_feature (627)..(627): n is a, c, g, or t
  misc_feature (644)..(644): n is a, c, g, or t
  misc_feature (659)..(659): n is a, c, g, or t
  misc_feature (661)..(661): n is a, c, g, or t
  misc_feature (666)..(666): n is a, c, g, or t
  misc_feature (680)..(680): n is a, c, g, or t
ggccccctgggtgggcctgatccccaatttcanccttcccccgggcatagggcccaggccaggncgctcacccgaatgttgctgggactccttgtgccctangcccacggggnggaggcagccccaacattggggatggtcccccaagatnntatgaggaagcncagcntccggcaggtagtttttntatcnacgcncacctgctcaggnctgctgcntccaganctctagcganaggtctccagagccggccaccaccaggttgccctcagcacagaccctattgagcccatngtcatgcctccgggtgcaaatggtccttggtgggtctgtnggtttntgcacccggatggtcttgtnagtggatgtggtgtacaaggctcccacggagtactggatcccagtaaaggganttntgtggcccacatcaaaggaccggataagctggaagcagccgttgcggttggcgaagacgtgcagcaggccctggttgttaccagcccagagctggggttcctggtaggacatgcagagcaggtaggagttcagcngcagacgctgcaggacgctgttggctcggcggtccaccaccaccagggtgtggtcctcgctgcctgagaagatgtnccggtcatccgccagcngggtcagcacgggtntngagtntagttgccggtgcntcaacagggctgggccggctctggggtcgtagatggtcaccttcttgt

SEQ ID NO: 636289 - DNA, 615 bp, Homo sapiens
cccctcggacacatttttttttcgaactgaagcctcctgtttccggagaaatgtttgagacctccctgacctgttccaagaagaccccgggctaaccaataacctcttgaaatcccgctttcgagaaaagacatccactgctgccctccttttgagggttgccaaggccagcacggggtttcgcctgtctaaacacttcacgagatttgcccccaggagctttatacggcgatccgggggatacacacaagataccggggtaacagctacaggtccgtgacatgacgaactccggggggcctaccctgtgagtttcaccatttacagccctgttgggtgtgagccgctccatcagatgatggattcagggcgaaaaccaggctgattgggagtgctaatctagagcggtttggacattggccccattgacgacctgcctgatgccttgtaccaaaagaaaggggctttctttcagtgattttttgcttattggctgggttgcgggagcctggattctctaaaagaaggggctattcgaacccttttgactttacaacccactttttgaaaattttgtgcaaggccaaagtgggtgtcctttcctacaaacactct

SEQ ID NO: 636290 - DNA, 308 bp, Homo sapiens
gcgataagatgcgctggcgatggtgacggttcctaacgaacagaccaactggtccttgtagtcacgacttaacaccggttaccacctgtgtggagaacaatacagctcacgtggtgataatcgcagacgatgtgaatcccatctagctggttttcttcttgcctgccccttgttgaatttttatctccccaaaactgcattatcaagggaaaggcaagactgggacgtctagtccacaggaagacctgcaccactgtcgccttcacacaggtgaactcggaagacaaaggcatttggcccttatcgag

SEQ ID NO: 636291 - DNA, 159 bp, Homo sapiens
cggtacccagaatattctggggacaaaacggaaaaaccagtctccagcagctccccgattccctccatcagttttcggtgtccccggctccgagctcatccactgctcctgcgacgtcgccggccgccgctccggagcccccctccttgccgccggcac

SEQ ID NO: 636292 - DNA, 315 bp, Homo sapiens
  misc_feature (21)..(21): n is a, c, g, or t
  misc_feature (31)..(31): n is a, c, g, or t
  misc_feature (62)..(62): n is a, c, g, or t
  misc_feature (114)..(114): n is a, c, g, or t
  misc_feature (203)..(203): n is a, c, g, or t
  misc_feature (207)..(207): n is a, c, g, or t
  misc_feature (238)..(238): n is a, c, g, or t
atagatgtacatatagatcantgggattganctgagagttcagaaagaagtgcatatatttntgtttaaccgattcttgatgagggtgccaaaacaattcaatgggggaaagantagtctttaaaacaaatggtaccacacaaatggatatccacaatgcaatataatgaagctagatttctacttcacaccgtatacaaaantttnctcaaaatagattaaagactagatgtaaaangtaaaactattaacctcttagaataaacctaggtgtaaatcttcatgaccttgtatgagacaataatagttttttaa

SEQ ID NO: 636293 - DNA, 135 bp, Homo sapiens
  misc_feature (59)..(59): n is a, c, g, or t
  misc_feature (75)..(75): n is a, c, g, or t
gtatatgtatcgccaacacttgcgttatgaatgatagttgcttgagatgagaacactanttggcagtgtgaaccntttctgcactacttgtatccactggactcaggataagtccaagaagggactacactgttt

SEQ ID NO: 636294 - DNA, 404 bp, Homo sapiens
gtcagttcctttgtggaggccaccagtcttggccaactcaacattgggctccagtcccacaactgccactatgtggtcagtatctggggtcctttcgactttcaacttgatcacgcacttgccactgctgactccaacggattgcacaatatcattgggcatcaccttaaccccctctcgtctgactttttccatggtccatttgctgaggtattcaggaggatcttttccatatttcctttctcggggaagagtcgaaatacttctgtgcccaaagctcgagcctttctgccaagagcacaggccagttcgctaccaatgaagcccccaccgataattctttctgatttgacttcccgtgaaatcttcttcaagcttttaaaatctccaatctttctgaaaag

SEQ ID NO: 636295 - DNA, 244 bp, Homo sapiens
cgtgaggactagaatatgctgtcatcactacagcaggcagtatattgaactagggcggaaatgcgataaaatagtacagagtgtgcacacgggctatcattgatccaggtgactctgacatcatgagacgcatgccagaacagactggtgaaaagtcaaccttttcacctacaaaatttcacctgcaaaccttagacctgcaaaggtggtcctttaataaaatatgcttgttagcgcgtgctgt

SEQ ID NO: 636296 - DNA, 776 bp, Homo sapiens
ctcctcgtctcagtagcttgcttcgtgggtcggtccctcgcgacacacgagctccaagccgctcctctcttttcctgaagcccttcaaggcggtcttcggtttccttctttccagccgatcctcttcagccctgtgaagatggtggaccgcgagcaactggtgcagaaagcccggctggccgagcaggcggagcgctacgacgatatggccgcggccatgaagaacgtgaccgagctgaacgaaccactgtccaatgaggaacggaacctcctgtcggtggcctacaagaacgtggtgggggctcgccgctcctcctggagggtcatcagcagcatcgagcagaagacgtctgcggacggcaacgagaagaagatcgagatggtccgagcctaccgggagaagatcgagaaggagctggaggccgtgtgccaggacgtgctgagcctgctggacaactacctgatcaagaactgcagcgagacccagtacgagagcaaggtgttctacctgaagatgaaaggggactattaccgttacctggcagaagtggccaccggggagaagagggcgaccgtggtggagtcgtctgagaaggcctacagcgaagcccacgagatcagcaaggagcacatgcagccaaccaccccatccggctgagactggcgctcaaatactcggttttctactatgagatccagaaaagccccgggggcaagggtgccactgggcaaaaccgcttgaaaaagccatgcgagtcgacatctggagggaccaa

SEQ ID NO: 636297 - DNA, 246 bp, Homo sapiens
cttgcattgcttccgggcggatttagaggaacccccgtaggccgctagaggcccagttctccaacaggatgtacacgaacctgctgagagagatagagtacatgggcaaagagatccgtcctacctatgctgacagcaagagcgccatggagctcctgaagagaggtatcattcatgctcaggccctaggcagagagtgcctggcagagacagagcggaacgcccgcacgtaacaggaagcgcctc

SEQ ID NO: 636298 - DNA, 537 bp, Homo sapiens
cgcagtggctcacgcctgtaatcccagcactttgggaggccgaggcggtcggatcacgaggtcaggagatcgagaccatcccggctaacactgtgaaaccccgtctctactccaaaagaaaaaagaaaaaacaacaacaaagaaaaaacaacacgtgtggcgggcgcgcgcccgcgggccccgcgggaaaagctttccagaaacacacaacgcgcgggggcgcgcgcgcgcggggccccgaagaagggaaaggggaacaggggcgaaatacgggcggggcatccctataggagagaaccgcggggaaagagagaaacaaagggggcggggaggaatcctcaacccattataacaaaaccgcccgcggggggggaaaacagcgggagcgggttagcggaaaaaaaacaccaagagagagagagagagcatctctgagaggggatccaataaggggggaatatctattacaaaggcgggggcccaagagcgcggaaccgcggaacactcataaaattagcgacccgccgcgcgggggac

SEQ ID NO: 636299 - DNA, 212 bp, Homo sapiens
cttttttttttggccctttttaaggaaatttctttaacccgggggcgggcccggggttttttgcccggttttcctttttggccttttcccccggttttcccgttggttttgggggggcccccccacgggggggttttttttttcccccgtcctcccctttccccctgggttttggggggaaaaaaaagggtcttttcccttttttttgccca

SEQ ID NO: 636300 - DNA, 156 bp, Homo sapiens
ctatttctaccaaaaatacaaaaattagccagcatggtggtgcatgcctgtaatcccagctcctcgggaggccgaggcaggagaatcgcttgaacccaggaggcggagcttaaatacagagtagttattaaaggcaactgatttgtacactgaaca

SEQ ID NO: 636301 - DNA, 676 bp, Homo sapiens
tctggtgatataggcttctcatatgattcaattacaggtacttgcttgctactacgggaatttccatctcctccgataaggagaccatgaaaggctgctggaggtgactgtgtgtacataaaggggacgggctgcaccaccaccggctggatgacgggcaggatccccgggcctccgtattccagtgccgcgagagggcagcgtgccatcacgtgggtggcatggacagcggcacgccgaagggctgcacgccgtggagaaggggggtgagtattttttaatcgggtgggctggaaaaaggcatgctcaacccaggcgaggctctccgggtgtgaggacgggaactctcagagaggagggcagaattcccagcctgaagggggtgaactccgctggtcaccgtgaggtccacgggctccatctgtattccgtgcgacagaccttcgggggtctgaaagaacttctcaggcaagggtgtggagtaagatgaccccatactggtaaggcttcagggatcccatggtaataagaggggtaatgacactgaaacggggtccagggcctctggctggacaggaacggggtcaaacattgagcatttctttaagtaaaaccttcatagggggaccggggtgtagggcttggcaaggcgcggatgcagggcgccgcgacgaac

SEQ ID NO: 636302 - DNA, 530 bp, Homo sapiens
  misc_feature (20)..(20): n is a, c, g, or t
  misc_feature (57)..(57): n is a, c, g, or t
  misc_feature (138)..(138): n is a, c, g, or t
  misc_feature (148)..(148): n is a, c, g, or t
  misc_feature (180)..(180): n is a, c, g, or t
tgcaagtggcgtgattcttngctcactgcaatttcccacctccggggttcaaagcanttctcctgcctcggcctcccaggtggctggcattacaggtgcatgccaccacatccagctaatttttgtatttttggccancatggtgaancccagtctctactaaaactacaaaaaaatttngccgggtgtggtggcgaacacctgtaatcccagctactgggcagaggttgcagtgaaccgagatcacgcctctgcactccagcctgggcaacggagcaagactctgccttttaaaaagacacacacatgcacacacatttgtaaaacgaagacaataattagtacccacttcctagggttgttttgaggattaaaagagttaatatatacataataaatcttttaagacagttcctggtcatttaaagacttagcattagccattattattaatatttagaaatagagtccagcccaggtggcagaatgagaccctatctctctctctctctctccctttgaaaaaaaaa

SEQ ID NO: 636303 - DNA, 816 bp, Homo sapiens
tcgacagaagcgagactccgttcctaacataaataaactattagatctgaaatgtgttgatcggaacacaggccgatgtgaatcattctactacacagatattcatgtacaccactgcccattgagtagacataacacaaggagaccttaagcatattacctaacataacatcacgagggtagctagaacataagaggcagagttattccatcactcaaaataacatcaggctccacccgtggggacaactaaactttttttgttgtaaaaacactctacccatagagttaactacagtgggggccctttaccccgtgttaagaaaaaggcctccgtgacccctagttggagccaaaatacaaatattgtgggccaaacgttgagggaactaaaatcactgttcatctttttaggaagatggcttgggtgagtagtaactggtttatggttatggtttacagcttgccctaatttattagtaagaagaaaaaccaaggctattttggaagagctacaaatatgcttcatacaaaatataatgatctagaataatggctgattaataaataaacccgcattatatgtggttatactcactgatactactttctatgcatatcagtgaagtgtatgtgctcttttaaaaaccttccaagatacaatatttaaaggtcttccagaaaactcattcctgatacaatagtattttgcttgcagcaattaaaataatcctgtttctccaagaacagaaaaccggaacaatggagtgtctctctggtaaggtgggagtacaccaattgaaacccgtggccatg

SEQ ID NO: 636304 - DNA, 714 bp, Homo sapiens
gcagtgatgtagagctggcagtgcctgatggcgcgttgacgcggagttgggtggggtagagagtagtggggcggtagtcgtggtggtggtgggacgaaggagtgaggctggcgaatcacttgataaatggatgccgacagcaggcagccgcaagcctcaaattccacggagggtgagcgcagtgctgtgctcttcatgggcctacttctttcatgaagccacagtgtgctccaggttgccactaaaggcacacaacaagtgaacatcacttcatcacattacagtcggttggcaataaagcatctgggactgcattgggttcctggacgatgccgcagtacgtccatatacggtggaacacgcagatttcgcacgacacacagcggagacagttcaagcaaatgcccaatcaaagagcacgtatgcaagaggggacacatgatgcagcagtggcgctgcccccagtgacaagaagaccatcgtggtcatgcaaacagaaaaaatgttgaagctgacacaacgacaaagcgaaacaacacgagaaaaagaagcttgaggaacatgtgaagaatgggtggacagagtagacaggtgaagcagccacataaggacttcacgtcgagaagaaaaagggaacacgggtgtagagtagtacatgtttgaaacatgagggaagaggattcatgaaacagaagatgaaaggtcagaagatac

SEQ ID NO: 636305 - DNA, 426 bp, Homo sapiens
  misc_feature (24)..(24): n is a, c, g, or t
  misc_feature (80)..(80): n is a, c, g, or t
  misc_feature (111)..(111): n is a, c, g, or t
  misc_feature (203)..(203): n is a, c, g, or t
  misc_feature (298)..(298): n is a, c, g, or t
aagggccaaaaaaacaccaagganaccacacaatggaaaaaagagaaacaaagagagaaggtgaaaaacaaaagcaaccnccgggcaaagagaaggagaattgaacagcanaattttgaagatcgtggtaaaggcaggcagtcatagagatatgtgttagtcacaggagtcaaaacttatgaaagaggtttaacatgaatggnacattagagattgggggcagaaatttaaaaccaaaggactgctttttgaaacctcaaattatagaatgcatcctaggaaagagctttagagtgtnagttgtggaaacattaaaataattctgaattaattaatctgatatgttggaatctggatcttgaaaaatttgtttccttgaaacaggcatgcatttaaaaataaagcttaaacaactgtatgcaaacc

SEQ ID NO: 636306 - DNA, 366 bp, Homo sapiens
acatgtgtgacttcacttgcagtgctgcctaccccgcagtctcgaccccgctaacgccaccctctcaaaatccggcaaacacattccggcccgaggtccacctgctgccgccgccgtcggatgagctggccctgaccgagctgttgacgctcacgtgccttgcacgcggcttcagccccaaggacgtgctggttcgctggctgtcggggtcccaggagctgccccttgagatgtaccttacttgcggatcccgtctggtgcccagccagggtcatcaccaccttcgctgtgaaccggcatgctgcgcgtgctcatctgaggaccatcgtcggggtatcctctacagtatacctgtggcatgtaagc

SEQ ID NO: 636307 - DNA, 442 bp, Homo sapiens
  misc_feature (410)..(410): n is a, c, g, or t
  misc_feature (426)..(426): n is a, c, g, or t
caggtacaacagctatacgatgctgcgcaggctcgcgagctggacagctccgctctcaacgcctaggagatcactcagttgcgccctaagccccgccattgcggggctgtgtcagtagaggcacgcgggatcggccttagtgcatggggagtaaaaccagtatgggaagtaatgaaaacttggaatctcgcgagagccgtatcgagaagcttgaaagtgtgcaccgaatttcgctactcggaattgtggtttttgtggctcttacagtggtcggcattgtatttgccggggatctttcagtcagtcgaatagccgttggaatcatcggtgtcacgtttgtaatggcattcgcagttcaacggcagagagttggatcgctattaaaggcggtacaccatgagccatctgancgcagatagaccgganaagagcatgaaaattt

SEQ ID NO: 636308 - DNA, 698 bp, Homo sapiens
tgagcggggcccttcgggagcgtctgaggaggcgcggtgccgctgcgggctcgggcgccgctagcgcgccggcccgagcccctggacgaggcccacggagctcgctcgccccgaaccagccggccgatgtgctcaaccatggagcgcagctcgggggcggcggctgtgaagcatacgcggcgctgtgggcgcggcgagtaggggcccgggcggcacgcggtggcgggaatggggctgactgctcatgatcctggcgtcgcgccgcgcctgggttcctttcctcacgctcctcgccccagttctttcctgcctgtaccgcaacaacagcccgagccgcacgtcggacgaggcccgtcccggcgcgacgccgacgggcgcttcccgacttaccatcaaccgccagtcgccccgcgcccctgactccctacagcgcgaactcacgctcttacttgcgctcggacgcgccagccgaattgcaccgacgccccctacccgtgaaacctggggcaccgacccttgaacggcggcgggacacgtcatgtactccccctcacatccccgtcggcgtcccacaccccacagaactactacactttccccccctgtccaccactgtgccggtcatctgcacactttgtccttactgtacacccacacacctccctcccggagacacagcatactgcgctctgcaaccc

SEQ ID NO: 636309 - DNA, 1036 bp, Homo sapiens
cttcaaagctccacatcagtccttccaatatgactaaccagaacacgaaatgagtacctggagcaagatcaaacagcgactgtattgagaacctataggaatgcgtgccgcaacgacacctggcgagtccaacactgcacgcgcgatatacctgagagacgctcataccactggagtgaggagtagagcgatcgacggacgaacgacgatctcctagacaaggcgcattctacgatactgcgtccatctgtaccacaagcgacactttgccatgatgagcgacagacgattctaccggacttcctgactacgacggaagcggacgacgcggcgtgcagccagccaataggacaccttccgtttttcccaaaagcttatcaccacacacaacaggcccagagaaagaaggtccacacagagcaagcagcgaactgtattcaacacggaggcaaaaacggaccccccaggcaaggcggtaacggacaatgcaaactacggaacaaggtttccaacaccggcacaatctccaaggcgcaaggctccaccgaccgccccgaaatagcggcacgcggacaacgcacaaacgtaccccaagcgccaccagggccaccgcacaagaaggcgcgacgatcaccccaacaagacgagacaagccgccaaaccgggattaccaacacaacgcgcatccaaggcggagctcacctctagagacacaactttgacgtacaaaactaccgatttaccattaagacccaaaagagcgctctcaccttaggacggcctattaataatcgccctataggcacctatggacaaggacgtttcagcaccacataatctcaaacaccgccattctaacaaaccactaatataccaccacaccacaaaatactcccccacaacccaatttccatactacacaacctagctcaccataccccttacacctttctgtatctacccataaacgtacactacacccctattcatctatgcacaacccataaacttatccccacaactatacctatcaccc

SEQ ID NO: 636310 - DNA, 465 bp, Homo sapiens
tatacccaattaaatctcatggacttgtctatattgccagagtgaattgtttattataatttggtggaaacagtcctggtctgctttaaataaaattaatcagttaccgttttttgaagtggaggtagaggcagtagttataagtgaaattacctctgtaataacctgaatagaatcacattgtttttgggagcaaagcagtatgttgtatgttatgtgcaccagaagccatgagaatccttttctaatcccagctgtaatgtcacctggctgtgtcacctaggcaagtcaccttccctctatgaggtctgtttcatcatctaatgacaaagttggaccagttgatcatggcattacttccggttaaatgttctcttatatatgattttatttcctagctagtcccttctctctcctggtgccatgtttccaaaatcataggacagtcctagacttactgcacag

SEQ ID NO: 636311 - DNA, 241 bp, Homo sapiens
taaagcgccagaagaaattataggcgaggctgagatttaaaaggagagctccaaaatggaggcttggaccaggggcagcccaggagcttatcaaaatccaattgaataatcaaaggggggagcctggccaaaatgtttacttgtctgtaggtagccttgtcagatgatatgcaaatgattccccccagtgtttgaagttcaaaccaaggaaaactatcagaaaaggcttttgcttttttta

SEQ ID NO: 636312 - DNA, 231 bp, Homo sapiens
  misc_feature (156)..(156): n is a, c, g, or t
gcatgtatggaacaagctggaggagcaggatctagcctccacagtccactccaggctcatgaaggggaacaagcgtgaggagcaggggctgggccgcgaactgtggcgccctaggagcccatggtggaggaggaggccctgatcgagttccagcgntcctacggagagctcttcggaggttcttcgtgcaagaaaaaccatcaatccagggcggccatccggcctgggtgt

SEQ ID NO: 636313 - DNA, 365 bp, Homo sapiens
  misc_feature (344)..(344): n is a, c, g, or t
accacgcgtccgcgggacgcgtggttttcttggcatcaaagaaagtgatccttccaagctgcagcacaatactaccatctgtcggagtgataccgtaatggagaaacggacatttagggtgcctctgggaaagggaagacgctgtgtcgtttgaggagatgtattctatgagtggcagcgatgtcagggaacaacacagagggagacatacttcatctattccccacaactcaagacagagaagtcaggtagcattggcgctgcagatagccctgagaactgggagaaagtctggcaacaactggaggctgctgacaatcgccttcttcttttgactgctgggngcccccagagggaggagatgt

SEQ ID NO: 636314 - DNA, 316 bp, Homo sapiens
tcggaccttcgttatacgttgtgagtcagactcctggctgtatcactggctcatacacgttgattgcacgtacacggaacttatattcgtaggtcaggcagcaggtccttggacgttgaaagaggtgctgcggatgtggtagtacccttccacgtcttgttggctgagtcccagatctcgatgctgtaggactgtacagcactgcccccatcatatgaggagccataccaggacagggtcagtgaggagctccgaatgtcagaggcacaaggtgtgccagctggggggtctggcttatccacgacagtgaggttga

SEQ ID NO: 636315 - DNA, 700 bp, Homo sapiens
  misc_feature (1)..(1): n is a, c, g, or t
  misc_feature (479)..(479): n is a, c, g, or t
  misc_feature (514)..(514): n is a, c, g, or t
ngattgtgcaccggtatctctcagacaccagacgtcagagagagagcaggttgtaaaatatgtcttagacctaaaagggtatgtggttcttagttgattgtctcctggatctgggaaggaaggaaagaaaacaaagaggaaatggggttctttatagaacgtggatttttcctacaagagactttgcagggcaatttcaaggtatggcaaggaaatatatttttgggtaaaacattttgattttcttcttgttatgccagagtctgattggaaagtaagtcttgatatacagggttaaataaaacccatctgatgagaatttatggtttgtagggcataactccctaagccccttagataggaatttcagcaagataaaaaattagagcttaggccaggcacagtggctcatgcctataatcccagccctttgggaggctgaggcaggtggatcatgaggtcaggagtttgagaccatnctggctaacatgatgaaacccctgtctctactaanaatttgaaaaattagccacgcattggaagtgcctgcctgatagccccagctactgggtgaaggcctcaacacgggaagaatgatttgaaacctggaagtccggaggtttgcaggggaggtccaagaatcaatcccatttgcactgaaaccctggggcaaacagggccaattccgcgtcttacgggg

SEQ ID NO: 636316 - DNA, 149 bp, Homo sapiens
tttttccttttctccctccgggtctctttttgactccctccccctttatgctcgcccagcctccccctgctgctgagaagtgggggagggtctcggctccaggttcccgccccaccggggccgggcgagcatggggggcaagcagagca

SEQ ID NO: 636317 - DNA, 1701 bp, Homo sapiens
gggaatctcgagaatggagttttaggaggaaatagtcgaactagtctaagctagtgagggaaatgtggcttaagtacaactgtagaattctccctgcagcgtctagtaggcttgtctccatgcttgagagagggagtaagtgaggtgatgggagtgagactgtcttactggggatctctctcattgagaatgagacgtgaacaggagacaactattctcacggatcaacgtcttcatcaatgggcctggacccatgtacctgggggaactctgcgggactgcatgacacacttgggaagcttacgtaaagcatacctttttctcatgccgatatgctatgcaaaacgcaacatagttgcacttcgtttctgatcaatgcacatacgccgaggcatgccgtcctttagaccaggaatcccgaggagatttgcatccagtgcaacctagttagcatccattgtgggattgccactggaagtggttccaccgattagcattggaactgacaggtttgaggacggccaattccaatgtacatgggacacaagccaaacaagggcactgaacaccttacgtcccccacggcgggtggctactctactaaataaggagtacattgcattgggcaatgccaagggttggccggtttacaattggaataggcggtccttcacacacaattacgtttctgtaacgggaatgtacttggcttccaagagggagagaatgaattatggagggggtggagcaaaacagttgagtatagagtgggaacattaaacctacttgatgggttatgtgacaatccgttttcacgcagagttgtactatggtgtgaattatgacaaccggatattgaggaggaccaatcattgtgtaaccaaataaaacgagggtatggtgtgtgtggatgatgaaacatgttgactcgactagccagtcgtgattttgcctgtggatgggaaaacctgggctcttgccgagactggatagacatagtgtggcttgccatgaataggatatccaatcgccgtgtcctggactcgcatgtcctacgcagcatgctagagcatagaagtgcgcagccacctgcttgccacaacacaaacccacggccatgagcactgtatacacatagctatacttattcaccatgtaacacagagtcgtacacataccagcgatacagcgcgccattcctaccacagatgtgatactagacacgacacgaggcggtgtagtacaagcagcacgaaaccaaacctacgaccgaggcacacgcgagcatcataacaaaatgactcaacaacagacaagacgcaggcagctagcacacaagcgaagcagcaaaaacaacatcacaaccactcgacacacgaacgactcaacacaaagggggcactatcatatagaacacacaagacaagcgagacacaccgaccgctacggcggagacgattaacccacgggaggacatcgacacagaagcagcacacagtagcaacgatagagacgacgaccaccagactagaccaagaatgacatcacacgtcgcgcatcacaagtccacagcatcgagatgaacagacgacaaccagagacagagaaagaaacaagacgaaagaagacaagcactgagcacgcacgtagcagcacactcagagcaccacgacacgaccaaggcagacacagaaagacgcc

SEQ ID NO: 636318 - DNA, 328 bp, Homo sapiens
tggaaacttcccggggcgggtcaggaccagggtagggccatggtaaggcctgaagaagggaagggccaggcagcggctggaccagagaagggtcagggccaggatgtagtaggactaggggcagagccagcactagggctgagccagggcagagcaggagagattacattaggctattatgtaaaatttttattttagatttttaagataactatagtagtagtaatgtctatactatgttgtttgtaatagtaataatatttgcagtaatcactaaattttaactaatactgtctttgtttccagtagtgttctatgagtataattt

SEQ ID NO: 636319 - DNA, 283 bp, Homo sapiens
cattgttgacttgcttggaccaatcattgatatgtcatcttcagtcttacagaaaaaccccacagcgatggacgggcacgctccgagatgtcatcaggcacgcggggtgctggcagtggaagctctcgtcctgggatgaagcagccatcagtgggctccacggctggctgcgtgttgtgagggtcaggtagataagctcctcaacaacgtagccgatgaagtagtgggcgctgttaggcttccctccgatgacgcccagggactgggggatcattgaagcagt

SEQ ID NO: 636320 - DNA, 561 bp, Homo sapiens
actacaagtcaaatggaggtcggctttggatgctgggaaagactggcttccactgggggggacattgcaatcagcgcacagttagtggaccacggatataacactcatcgtttcagaaagccaccggccagacaccaatatgggctgaaggttcggagaagggacgttggaagaccctggcacattttaagggcatctgaatttactacagtgaagtgatctaagacagcaaaggcagctgctaaggggtaaacacaggagaaaaggctcacgatagccaaacggcaggaataactccaagtaatcatcaagggtgcccaaatagagtcccatatattttgccaggatgactggtccatataaggtagcatcagggtcggcctgtaaagccggcaccgttcctcttcagcggcacaccaggcttccttgggagccaataaggaagaaaggattccataatggggttgaggatcggggaggtaattaggagaggggccaagctcgggcgcaaaagcttcatatctttcaagacaaagggcatatagaagagtgaggcaaagc

SEQ ID NO: 636321 - DNA, 114 bp, Homo sapiens
  misc_feature (1)..(1): n is a, c, g, or t
nagatccccttattcgatattccgatgtgggcggctatttattatcggtggcgtcttttatggttttaccgttgttgcctggagcatcctcaggaagacctaaatgtgaccatt

SEQ ID NO: 636322 - DNA, 380 bp, Homo sapiens
  misc_feature (120)..(120): n is a, c, g, or t
gtacttagaggatcctgtgtaggctggtcaggatgccacctgccttcccctgtcagctggaagatgctgtgtcgagcagctaccctttgctgtgatatctgcaggactgggcaccatggnccaaaaatttgtgtccaggaaagaggcgagaagtgcaacctgcatttcactttgtggtcaggccgcgtctttgtgctgtgactgcatcacctttatggagtgtagacattggcatttatgtacaatttaataggtgtcttattttattttaccttcaaaaacaaaaacgccatccaaaaccaaggaagtccttggtgtactccacaagtggttgacatttgactgcttgttccaattatgcatggaaagtcttcgggtcg

SEQ ID NO: 636323 - DNA, 158 bp, Homo sapiens
ctgtcgctctagaggatccgtgatacaccctacccaccctatacaccaaagacattgctgacttcaagaagcccttctttggtactacgcggcatgttacaacatagttatgtgtacctgctgtataatcaacgtgtactatttacgactattaattt

SEQ ID NO: 636324 - DNA, 634 bp, Homo sapiens
  misc_feature (223)..(223): n is a, c, g, or t
  misc_feature (420)..(420): n is a, c, g, or t
  misc_feature (634)..(634): n is a, c, g, or t
ccaggtggttgaagcttaaaaagactacatgacaaggacctgagggaaccaggattcctccctcctaccagatgacacagacaagagttcctggagaatgggagtgctaagactttcgacttctttgtaagttgtgtactgctttggagagtgaatgctgtcaagagttcctcagattacaaacagcagtggtgccatttgcttccccatcttcatgttacanacctggaaaggctagaacagacattaggcgtcagcatcttgacttttccccagcatcacatacagacatttgctcgggcaccaaagtaggttccctgtgttaggacaattacactggccatgccataatggtgaataaaactctcttcttatgaggttctctcttaacttctttggattagtaaaagctgacatgtngtctctagctattagaatcccatacatagtgtattagttttcgagcagcgtttcaagtatctctggcattaagacatgagtcatcttaatgtggggatgggtggcaaaactttgcccattgagatattggtttgctttaaaaacaagcctgcctaatattatcctttccgaagtgtgggctttggcggagaccttaatacggtaacaaaaatan

SEQ ID NO: 636325 - DNA, 359 bp, Homo sapiens
cacgcgtaataactgtaataataatatcagctataacaaagccatgggccgggcgcgaatggcttacgcctgtaacccgagcactttgggaggccaaggtgggaggatcacttaaagccactgcactccagcctgggtgacagcagcaagactccgtctcaaaaaaaaaagtactctttttggataaattcttagaattgacatttctggacgaacattgagtgactactcattctgctttgccaaggctgaggggttcctcaggacacaggtcttccagtgctaaaactggtgaaattccccggcaaaccaggacatcactctacacttatttcagcgtctgacgggcatcctctaga

SEQ ID NO: 636326 - DNA, 404 bp, Homo sapiens
tggagtgaggccacagcatgacaatcgtttaactgattcaaacccaccaggtgagcttggccaaaagggacatggtgggagagaaagaaacaaagaaaaccatgtaagcctgcaggcaattcccgccaattctactctaggagcaaaagccccgagtggagttctagtatttgggatgcttttctttcatactaggttggtgcagaagtaattgccacctttaatggcaaaaaccgtgattacttttgtaccaacctaaatataacatgagctctaaatggaagcaactacttcagtgaggctcagcccagccacagtaaccgcagggctcctcctcgtggccagaagctgaaatgacggcagtggtgccgcctggtgaatgaattggttctgtgacccggaaa

SEQ ID NO: 636327 - DNA, 310 bp, Homo sapiens
aactcctcctctgaggcatcaggcttgagggctggtccatggtacgaagtcctcctccagctgtctgctcggtctacggcacctcagccctctcctccgagcgctcccagtctccttccaggatcaccagctatcctgaccacctcttcatatttgcggtctgaatcctcagcgatgtgctatggctccttcagctgcatctcctgcaagttccatcttctcctcataccttcatgggccggttttcgatgaccttcattcctctctcgctctcatcagacgccttctcggcctcctccagcttctgcag

SEQ ID NO: 636328 - DNA, 295 bp, Homo sapiens
ccttcccagtagctgggactacaggcgcccgccaccatgcccggctaattttttgtatttttagtagagacggggtttcaccgtggtctcgatctcctgacctcgtgatccgtccgcctcggcctcccaaagtgctgggattacaggcatgagccactgcgcccagcacaatgtgggaagctaatggacaagcagtttagcaatgttacataaatattaaagagtagcagtacgtataggttataaactcaagacacaccttctaacatcaattatatttgtatgctgatagcat

SEQ ID NO: 636329 - DNA, 379 bp, Homo sapiens
cagctctcccttctagcgtcgctggacttccggtctgtgggctgtgtcttcatgtcttgactcaccttctgccgttacgacacgacctcctaccctttttacgcactgtccgttgcctttttcccctctcgacctttctgtttgctccttttacgttctttccctctttctgttccctttctctgctcacacttctgccttccttctccgtgtactcttgacactttctttgacggttccttcaaaccacgcactttttgaccttctctgtctgacacggtccactacctcttttcctctggacttggttcctggtgtcttacttcttcctttgttgcggtcttgttttcctggactggtcttggtgcttgtggctgtt

SEQ ID NO: 636330 - DNA, 677 bp, Homo sapiens
  misc_feature (20)..(20): n is a, c, g, or t
  misc_feature (66)..(66): n is a, c, g, or t
  misc_feature (91)..(91): n is a, c, g, or t
  misc_feature (113)..(113): n is a, c, g, or t
  misc_feature (119)..(119): n is a, c, g, or t
  misc_feature (125)..(126): n is a, c, g, or t
  misc_feature (141)..(141): n is a, c, g, or t
  misc_feature (148)..(149): n is a, c, g, or t
  misc_feature (152)..(152): n is a, c, g, or t
  misc_feature (169)..(169): n is a, c, g, or t
  misc_feature (171)..(171): n is a, c, g, or t
  misc_feature (180)..(180): n is a, c, g, or t
  misc_feature (189)..(189): n is a, c, g, or t
  misc_feature (206)..(206): n is a, c, g, or t
  misc_feature (210)..(210): n is a, c, g, or t
  misc_feature (212)..(212): n is a, c, g, or t
  misc_feature (216)..(216): n is a, c, g, or t
  misc_feature (218)..(218): n is a, c, g, or t
  misc_feature (236)..(236): n is a, c, g, or t
  misc_feature (243)..(244): n is a, c, g, or t
  misc_feature (248)..(249): n is a, c, g, or t
  misc_feature (251)..(254): n is a, c, g, or t
  misc_feature (263)..(263): n is a, c, g, or t
  misc_feature (290)..(290): n is a, c, g, or t
  misc_feature (301)..(301): n is a, c, g, or t
  misc_feature (376)..(376): n is a, c, g, or t
  misc_feature (384)..(384): n is a, c, g, or t
  misc_feature (417)..(417): n is a, c, g, or t
  misc_feature (427)..(427): n is a, c, g, or t
  misc_feature (458)..(458): n is a, c, g, or t
  misc_feature (470)..(470): n is a, c, g, or t
  misc_feature (496)..(496): n is a, c, g, or t
  misc_feature (539)..(540): n is a, c, g, or t
  misc_feature (552)..(552): n is a, c, g, or t
  misc_feature (672)..(672): n is a, c, g, or t
attatatatttacagaaganaagcatgcatatcattaaacaaataaaatattttttatcacaacanagtacatatttgttatttttaaaangctacataatagatacaagttntcaagntatttnnttattttgttgtttnctgttanntanctaaacattcatcattngnggtgcaatngtcataganataagtgcctgagacantagngngggngngtgagggattggcaccanagagatnngggnntnnnngcggcagcncctgcattcatatgtatgggtcctggngtgggcaatcnccattattccacaaagattgcaaacatgaacctgaaatggatctgatgcctcaaacaatctttcccttaaaaacngggctgcnccatgggcaatctgacaatctcgtcccattccnccaaaacccnggccaccatcacgagacccaccctccatggnctgtctatcgangatctgaataggtcccctagcacganactcaattttatcatccaccaaatgcttcaaacgctggtaacnngccgggccaatnaatatttgtcaggtgatttttcgaccagtaaacccattgtacaggacctcatttcctctgagatgatagccataatcagaaaaaagattagaaatcttctgcacgttaacagcatcattnaatgg

SEQ ID NO: 636331 - DNA, 140 bp, Homo sapiens
ctcatttttgtgtttttagtagagacttggtttcaccatgtttgccaagctgtctttgacttcttgccttaagcaattccattccgcagcttccaaagttttgggttcaggcgttcactttcacccgcaaattttttctt

SEQ ID NO: 636332 - DNA, 1457 bp, Homo sapiens
  misc_feature (1138)..(1138): n is a, c, g, or t
aattccgaagtgtgctgcacaggatgtggctactgtgtcatgcgtacaggtcgattaagagtatcttcccatgccagtgaggtggagattacacggggaaggcattcaagtgtgcctgaccgaggtacaagaaggctagtgctgtagcaacgacaccgtatgtgtacatcgtcgtagagacgaaggaccctatgataatgcttcgtaagcttgagttattggaataaaacccatgtgccgtttttcagagtggcactaatcaagttccatgataatcgtattgacatgggcccaagtcgaatggctgtcgtctcaatggcacttgatgggatcacctgatttcggctgtgatgagcgttcacttgtgcccaggagagtgagacatctcctgtagaggcagaaagagaggattccgtcgaagcaaatgccatggggggtaattccactgagttggtatccaacttacaccggcacgttatcaccctttgaccacaattaccaaagggaaccaatatgaaggacgcttgggacactaggcgtttggtgctgggggacatggcggttagctacagattccccaatgacctcacaatcccaaagggaacgccttgttgtggattttggccatttcccggagccaggccaagggacttcttttacctggaacttcgcaaaggagagggaaagattaggcgccagggcatggcattattccaaggcgttagacacaccagagggataccattttaaacggcctgaggttgggtggcacttcttcatcccgtcataaggcaatgacagcacagaatgtgcctttgaacttagcgcttaacttttctgttaacatatgtactcccctcattgtacgtagaggaaaaggtgttgaacatttcacaccggagaatcaatcttcggctttgtgaagggcggttttcactagggacctccgggtttaccaacgcgatgcacatttatcaaagactgaaagtggtaaaatctgcaaaatgtttggtccgacatgcggacagacatttttgtgaccaggactcttctccagaacgaaaacacgtttccatggccactgataggagttgaggggcgttacaacacacgaaattgccccaccggcgtattcatnaaagtttgagcaccgaagcaaatttgcccccccaagaatttgtgttgtagcaccgcaaattgcaagatggggtaaacaactcctcacttttacacagggcggttacaacatccactgggtgtggttcagcaattccatagtgggagcaatggtcgagagtcgccggacaaaggttagtatcggacctaggtagtgggcgaccccccttgggtatagcacattcaaccgctgggattgtgccagagattgagccctaggcgagtcctcttggctcttctgactatgggcagaacctttacgtactaagcaggacatccgt

SEQ ID NO: 636333 - DNA, 134 bp, Homo sapiens
tcgataagggcccacgtggtacaacctgtttctactaaaatcacataaattagccaggtgtggatggtgggtgccatgtatgtcccagcctactcgaggagcgctgagagcagtgataatcactctgagactcg

SEQ ID NO: 636334 - DNA, 174 bp, Homo sapiens
gcgtacacccctccttaggcacctggtggtcccccgctcgcgggaggtcacctgattgatgccgaaattagtgcggacacccgatcggcatgcgcactacagcccagaactcctgggctcaagcgatcctcccacctcagcctcccgagtagctggaaggcagaggcagggcgt

SEQ ID NO: 636335 - DNA, 570 bp, Homo sapiens
tgagcggcagctgtgctgctcagagatctccgactgtcccagacgggctggtgtgggcttgggatcctcctggtgacctctcccgctaaggtccctcagcgcactctgacccgaagaatgggccgtggtgtgctggccgtgatgtacttcaccatgaccgccaccacgagtcagagaatggtgggcgtgcaagaagaaacagaaggcagaaggcactggatgagctgaccgaccgaggtggcaaatggagtgaccacaagctgtccttggatgagctgggccgtaaattcccaagatggacctgtccaaagagccttcatacaacacaggcgtggctcagcgacatttctgggctcgaagcatgggcccaaacagccctcaacaccaactcgccacaaacccacttgacatgggtcacaagttctagcctgtccaaggtgtctacaggggaggttctcccctccattgctccgtggaatcagccgagatataccatcatgatttcccagagccctacagagaatccaaaggcctgccaatgggaaggattgacaccgtcgcagcgcacac

SEQ ID NO: 636336 - DNA, 231 bp, Homo sapiens
tggtagcttctctttgtagatagctaataaaatcacttaattcagggccaccttcatatttcttgggattaagcttctatgtgggctgggagagaagtatatggtaggaaaacctctgacttcatatggagaaggcacatcattggctgggggattcaatttgggtattacaaaattttgggtcctaaggcaggagattctcgccaatgttcttaatactaggggctccag

SEQ ID NO: 636337 - DNA, 1117 bp, Homo sapiens
gtttttcacatataaccatcccgcatattagagttccttgatttcgtgaaagttctcgctccttccattggccctggcaaccatgtatggacactcacggtaccgttttgtgaaaatgttgggtcccccaggtgcatatatcggttcagacataaacatgtggctaaaaggtggaagcgtgtaaaatagaagtgtgattaataagagggggtcgaaggcccatttcaaggagggtgtgttatgccataactaaatgggtgtaaattcgtcttcagtgaacacgcaccagagatttccgcctttttctaagattccaggaaatgttccacaatctcgttagtcatgcgaacccaggaatgctccgatggattcttagaaagatgaacctaaagtgggcacaggtcgggacttggtagtacaagcaagttcttcaaactctggcgggccaaatattctggcccctcactagaggaacattctggggcaatgtttcggagacatttctttggtccatttatacctttgtgcggggttttgagggttaacgttgaggatagtgtgtgctacttggcaatcccagtaaattagaagccacgcgggtagcctgctaaacatcctattaatgcacagggcagtaccccagcaacgacaaataatcgggcccaatatgtcagattgtactgagtttgagaaaccccagcgataatggaaccctaggtgtctgggctctggaactgggactttgtcccttcgtaatgatgtatctctttccagcctcattcagctattcttactgacataccagtctttagctggtgctatggtctgttctattagtgtacgtagttctcgtatgcgcccgtcaaaagcgcatctatggttcgaaagtcgctaactcgcccaaggtgatggcatataagaagtgggcctttgggaagtgattagatccaggagtgcagagccctcatgattaggattagtgcctttattgaaaaaggcccacagagagtctaactcacccgttccatccatatgaggacgtggtaagaagatgacatgtatgagaaccgttaaacagctgtcgccaaacaccgatattactcctggctgatctgac

SEQ ID NO: 636338 - DNA, 206 bp, Homo sapiens
aacgaagggaggataccggatcaggagagaaagggtaggtgagccgaacgggggagtatactctacaaacgaacaagagagatggaaacgagtataccgtataataacggcgcatgagctggaagtcctaggcacagctcaaagcctccttatcacgaaccgagctggggccagccatggcaacctctctaggtaacgaccacatc

SEQ ID NO: 636339 - DNA, 108 bp, Homo sapiens
agaggattcttcacacgccgagggacatactgcacacgccgaaacccactccccaccccaaatcttagtggacgaagttgttgccggtctctattgacgaagttgttg

SEQ ID NO: 636340 - DNA, 466 bp, Homo sapiens
gccacactcctctcagccatgtcgatgcttcagttatgtcagcgaatggagagacagtaaggaaagacaagaatatgctgaattattaggaacagttcagccactaaagccgagcgaaaagggatgagtgaggtccccacaaacctggcggaatactgcatcaaaactaaaaggttgccttcccaatgacaacagctcagatttgctttacgacggacttgtatgatgacgacattgatgatgaagatgagggaggaggaagatgccggactgttatgatgatgatgattctgggaaatgagggagtcgtgacgtgctccttcagtgcccctgtactggccttccatctcagggcaaaaggaggggagcaaggtggggacctggccattggcccctcagcaaaaaagctatttcacaagcgtgattggggattacagtacggggtaccggaggctcgaaatatcgt

SEQ ID NO: 636341 - DNA, 296 bp, Homo sapiens
tatctcactggtgatgagtgaatcatggttagcatggcgaatttgagacatcattgatgaactacagagctagggaacaatcgtagagaacctcacaggcaggctaaacaagtgtggggtagatcagacccagatttgacgtgcaactcaacgatctggcacactggcagactaatctgcttccatcccgtctattatggctctcatcgtactgacaaactcagctggcatcatggaccatgaagaagcaagacgaaaacacacaggagggaacatcctgggattctttttccagc

SEQ ID NO: 636342 - DNA, 159 bp, Homo sapiens
ccaaccacgtcataatcctttttcctagctatcaccaccaaagtcgttagcgcgtccttccttcttcctagcttcctctcaccaaatgcgcagtggtctccgtggactctctttacctatctctcaccgacgatacgtgctgcgttgcgtcggcattgc

SEQ ID NO: 636343 - DNA, 513 bp, Homo sapiens
tagctatgggatgaacaggataacccgtgaccaattccagaagtatggcccaagcggttgatccggccttcatgatgggccgacttcccatccatgttctgaccttactccaaccaatgttctgtttggatgtccttgttttttaaaaaaccaaacttttttttgaaccggcccttacttttgtcaaccccttgtggtgcaccgacagttgcattaagccgttttttaagggtttaaaaggacttctgcacttaaaccgcttttttagaccaaaaaacggtttttttttgaaatcttaattggaccttaaaaagggaaggaattaaaaaaatccggggcccaagggaattggaaacactttttaaaaatccggtaaacattttggggttggcgggggttggcaagtacttaaaataaaatcctccaaaaaaaagattgtgttagaaagaattcacaaaccggttttggggaaaaacccaatttaccaaattaattgggggtggcaaattggcg

SEQ ID NO: 636344 - DNA, 383 bp, Homo sapiens
  misc_feature (126)..(126): n is a, c, g, or t
  misc_feature (156)..(156): n is a, c, g, or t
  misc_feature (251)..(251): n is a, c, g, or t
ttgagatggagtctcgctctgtcacccaggctggagtgcagtggctgatcccagctcactgtaacctccacctcctgggttcaagccattctcctgcctcagcctcctgagtaggaatagttgganttacaggcgaccgcagccatgcccggtttntacttttagtagagacagggttttgtcgtgttgatcaggctggtctcgaactcctgacctcaggtgatcccccactgccttggcctcccaaagtnctgggattacaggcgtgacacgcgcgccccgcctaaagagcctgcatttttaacaaaaggaacatgtgattttggaccccatactggaaaaagacatttggaagggacaagtaatttgtttttaaaaattac

SEQ ID NO: 636345 - DNA, 396 bp, Homo sapiens
tgccttcaactgagatcataccccttccttccagcctggggggcagagccagactctgtctccaaaaaaaaaaaaaggaaaactctgtgatgggcctttgtttagtaaatcccttcaggatttatccctcctttccccccagcagctttctttcctgtcaactagaaaggagcaggatgtaataaataccttttggggtggctaggcccccccaacttttaatcatctccccttttccttagacatttaaatttcaaggcagggaccctctggggactcagaaatttgaagaagttatttggttttcccaaatgccccctgcggggtattgatttgttctttacaactattgttttcatatttctccccctaaataaatctctatgagagcttcca

SEQ ID NO: 636346 - DNA, 112 bp, Homo sapiens
agttcgacggagactctctaaaatgatatgctttccactggagagtgcacccatatcattttagagagggctgagggagaagctctactattgttcttacgtgaaacatcac

SEQ ID NO: 636347 - DNA, 365 bp, Homo sapiens
aggaggcctcctggggtttccccagggcagtaggtcaaaagacctcatcacagttttccttcctcttcaagcgtttcatgttgaacacagctctctccactcccttgtgatttttgaggggtcacccctgccagcctcaggcaacataaaaagcctcctgttctttttatgcttggtttgactgagcctaaagttgaaaaaatgggtggccaaggccagtgccagtgttttggggcccctttggctttccctcactttttgaggctccagctggtcctgggacatgcagccaggactgtgagtttgggcacgtccaaggcctgccccttcaaaaagtggaataaatgtggcctttgcttttgtta

SEQ ID NO: 636348 - DNA, 359 bp, Homo sapiens
tccccaaagctcaggcacccagtgtgtttcgtcataccgctgatgcccagctatgtaaccaccagacctgccaatgactgcagccagcatcctcaactatcagaacaattcttttagaagaagaacccacctaactgttgcggctgcaagaaagaacataccatgtgccgctgtgtcaccaaacagctccaaatgtgcgagaaacacagtggcagatgttgatgagaaagcaagtgctgcactttatgacttttctgtgccttcctcagagacggtcatctgcaggtctcagccagcccctgtgtcacccacaacagaagtcagtgtaggtctctcaacctgaagtatctgcagggagg

SEQ ID NO: 636349 - DNA, 114 bp, Homo sapiens
tgcctcatgtaacgggagagcagcacacacgtctggggcctctgcgcaaggggatgagcagccacacttcgggtccccagtgtaaggggagctcagcagcacaccctctggggc

SEQ ID NO: 636350 - DNA, 110 bp, Homo sapiens
tcgacattgctctgctagtacattcgtgtgggctctgagcagagctgtgacagctaccagacacaggcctccctgtgggtctgtcccaatgctgaagctggtctctccgc

SEQ ID NO: 636351 - DNA, 172 bp, Homo sapiens
  misc_feature (140)..(140): n is a, c, g, or t
gataacacatacgagtccataggacactaaacatgtctcagctgtgtgagatagactttacagcagcggtgcagtgtgcaggctgtatccagcacttggcagcagagcaggcgatcctttgagctcaggcacatagcaanaccccctcctagcccaccccacccgtcgtgtg

SEQ ID NO: 636352 - DNA, 421 bp, Homo sapiens
agtcactgtacagagcagttgtgactacaggtgcgatccaccacacctgtgtaagtctttgtatgatacgttgagacagggtttcactgtgttagacaggacgtccattctctcctgagctcacacctggagagtgagagatttgtgaggctacaggcatgacaactggttgcgtgcgagagctcaagaccagcctgggtaacacagagggaacctgtcattgaagaaatcgctgcttgagtaaataaatgctgcttgaggggcacctgtgactgctgaaatggccacttagttgttgaacgactggatgacttgcaaagaatcgtaggcgagtttcattacacctctgagcgtatctgaccaccatgagttgggttattttatcaagatctagactcaccgacagacacacctgttcacc

SEQ ID NO: 636353 - DNA, 91 bp, Homo sapiens
gcagtgactccggggcgagcgccgcgagtccgcagtagttcgggccatggacggctgggagcctgcgctctacccgatggcggggtgctgc

SEQ ID NO: 636354 - DNA, 1043 bp, Homo sapiens
tgcttccctgatatttgatggacgtccctgaactgttgacctgatcatgaattccagaccaacctggtgctctatccccgcatccacttccctctggccatatatgcccctgctgatctctgctgatgaaagcctatcatgaacagcttactgtagcagagatcactcattgcttgctttgagccagcaagcagatggtgaaatgtgatcctcggcatgctaaatacatggattgctgcctgtatataccgagttgaccgtgcgattcccaaagatgtcaatgcatgccatatgacaccatcaaaaccaaagcagtaccactccaagtgacgtaggactttgagtcgtccccatatgtgacttctacggtatgtgcaattaatataccacgaccatcccactgtgcgtgcctgtccgtgggatctgggcacaaagggtacaagagagctgtgtgacttgctgagcattaataccatcgagctagttccgcctgtaagtgcactcggggctccgcctggtacctacgaggcgtttcgaccttgattgttttagccaatggcgtctccttctcgttcacttgagtcacatgggtagaggggatggccgaatggcccgttatctcaggaattcccctgaggcactttggctgaccttgtacaaagcgattaattcctgagcgtttggcagccatatacgggttgcctgtgaactaggatgacgctaattcaattctcctcccttgtggtgcgcgtccttctagcctccatagtcatggaactgtcctataagtgtatcgtcttactgtctatttgccgtactggtattctacatcgttgctgcgttttaatcaagcctacgatatgggggctcgtagtaaagtttcctgggggccaccttccggttccacggggttgccagggccccgggggccataaaacgaacccggcgctaaaagccgaggggaacagtggagcgtgggacccttcgggacacgggcccagacacggaaataactagtacgccatttattgtcaatgcgccga

SEQ ID NO: 636355 - DNA, 760 bp, Homo sapiens
  misc_feature (15)..(15): n is a, c, g, or t
  misc_feature (176)..(176): n is a, c, g, or t
  misc_feature (189)..(189): n is a, c, g, or t
  misc_feature (210)..(210): n is a, c, g, or t
  misc_feature (214)..(214): n is a, c, g, or t
  misc_feature (227)..(227): n is a, c, g, or t
  misc_feature (231)..(231): n is a, c, g, or t
  misc_feature (254)..(255): n is a, c, g, or t
  misc_feature (278)..(278): n is a, c, g, or t
  misc_feature (291)..(291): n is a, c, g, or t
  misc_feature (304)..(304): n is a, c, g, or t
  misc_feature (308)..(308): n is a, c, g, or t
  misc_feature (317)..(317): n is a, c, g, or t
  misc_feature (320)..(320): n is a, c, g, or t
  misc_feature (322)..(322): n is a, c, g, or t
  misc_feature (386)..(386): n is a, c, g, or t
  misc_feature (479)..(479): n is a, c, g, or t
  misc_feature (525)..(525): n is a, c, g, or t
  misc_feature (531)..(531): n is a, c, g, or t
  misc_feature (538)..(538): n is a, c, g, or t
  misc_feature (591)..(591): n is a, c, g, or t
  misc_feature (638)..(638): n is a, c, g, or t
cgcccagttcctgtnccagactgaggcccagcccccttcgcccgtttccatcacgagtgccgccagcatgtctgacaaactgccctacaaagtcgccgacatcggcctggctgcctggggacgcaaggccctggacattgctgagaacgagatgccgggcctgatgcgtatgctgnggagcggtactcnggcctccaagccactgaatgnggcngccctgcatcgcnggcngcctgcacatgaccgtggagacnngccgtcctcattgagacccccgncaccctgggtgcngaggtgcagtggnccanctgcaacanctncnccacccaggaccatgcggcggctgccattgccaaggctggcattccggtgtatgcctggaaggncgaaacggacgaggagtacctgtggtgcattgagcagaccctgtacttcaaggacgggccccctcaacatgattctggacgacgggggcgacntcaccaacctcatccacaccaagtacccccacccccccccaggcancccacncaccccngaggagaccacgactggggcccacaacccctacaacatgatggccaacgggancctcaacgtccctcccatcaatgccaatgactccctcaccaacaccnaccctgacaacctctacccctcccgggagtccctcatagatggcatcaagcgggccacagatgtgatgattgccggcaaggtagcggtggtagcaggctatggtgatgtgggcaagggctgt

SEQ ID NO: 636356 - DNA, 107 bp, Homo sapiens
gctgtagtaccagcaactcgggaggcagaggcgggacaatggacagaacccgggagaagagcagcagtgagccgagatagcgtcagcgcactccagccagggcgaca

SEQ ID NO: 636357 - DNA, 822 bp, Homo sapiens
  misc_feature (15)..(15): n is a, c, g, or t
  misc_feature (176)..(176): n is a, c, g, or t
  misc_feature (189)..(189): n is a, c, g, or t
  misc_feature (210)..(210): n is a, c, g, or t
  misc_feature (214)..(214): n is a, c, g, or t
  misc_feature (353)..(353): n is a, c, g, or t
  misc_feature (366)..(366): n is a, c, g, or t
  misc_feature (370)..(370): n is a, c, g, or t
  misc_feature (379)..(379): n is a, c, g, or t
  misc_feature (382)..(382): n is a, c, g, or t
  misc_feature (384)..(384): n is a, c, g, or t
  misc_feature (448)..(448): n is a, c, g, or t
  misc_feature (541)..(541): n is a, c, g, or t
  misc_feature (587)..(587): n is a, c, g, or t
  misc_feature (593)..(593): n is a, c, g, or t
  misc_feature (600)..(600): n is a, c, g, or t
  misc_feature (653)..(653): n is a, c, g, or t
  misc_feature (700)..(700): n is a, c, g, or t
cgcccagttcctgtnccagactgaggcccagcccccttcgcccgtttccatcacgagtgccgccagcatgtctgacaaactgccctacaaagtcgccgacatcggcctggctgcctggggacgcaaggccctggacattgctgagaacgagatgccgggcctgatgcgtatgctgnggagcggtactcnggcctccaagccactgaatgnggcngccctgcaattcagcctagcggctgccccatgcaaacaaattgaacccgggcttgggaacgaaaccgggggccaggtccccattccaaattcttgaacgggaacccccccctttccgggttcaaccccccctgggtgcngaggtgcagtggnccanctgcaacanctncnccacccaggaccatgcggcggctgccattgccaaggctggcattccggtgtatgcctggaaggncgaaacggacgaggagtacctgtggtgcattgagcagaccctgtacttcaaggacgggccccctcaacatgattctggacgacgggggcgacntcaccaacctcatccacaccaagtacccccacccccccccaggcancccacncaccccngaggagaccacgactggggcccacaacccctacaacatgatggccaacgggancctcaacgtccctcccatcaatgccaatgactccctcaccaacaccnaccctgacaacctctacccctcccgggagtccctcatagatggcatcaagcgggccacagatgtgatgattgccggcaaggtagcggtggtagcaggctatggtgatgtgggcaagggctgt

SEQ ID NO: 636358 - DNA, 184 bp, Homo sapiens
cacgaggctggtgggagcggagggagggagccgagagatccgtgtgcacgtgtggatacacggagggacaagcgcggcggcgggagacactcgcgcccccaccagactcaagtcctcactcgactctcacggtcttcgttgctcgcatagttccctgtccaggctatgaggtcggcttgcgggg

SEQ ID NO: 636359 - DNA, 519 bp, Homo sapiens
gactacatctgtgaattctgtgctcgatctttccgcactagcagcaaccttgtcatccacagacgaatccacacaggagagaaacccctgcagtgtgagatatgtggatttacttgccggcagaaggctccctaaactggcaccgacgcaagcatgcagagacagcagctgccctgcgattcccctgtgaattctgtggcaaacgctttgagaagccagacagtgtggtagctcactgtagcaaaagccacccagccctgctcccagcacaagaccacctggtctttggtgtctagtcccagcatttctgcccctgaatccctgcagtctcctgagggggctagcatctctaccacttctgactctaatcctgcctcctcaacatccatttcttcacctggggtgccagaccccaggaacagagagaaaagttaggtgagtgcagtggagggtagagcaccattgggctccagataccaggttttagccttcaaagaaataataaatggtattttatac

SEQ ID NO: 636360 - DNA, 1212 bp, Homo sapiens
  misc_feature (58)..(58): n is a, c, g, or t
  misc_feature (93)..(93): n is a, c, g, or t
  misc_feature (256)..(256): n is a, c, g, or t
  misc_feature (700)..(700): n is a, c, g, or t
  misc_feature (945)..(945): n is a, c, g, or t
ccaagttggtatgaattgggtggtattaggtgtgtgcaagtcccaccagggcaagggncggagctggtcgtgccaatcataattgtactatangtgtgggcccagactggcgtgtcgtagatgcgggcagagactaactgagcatctgatcttaccgatgtagggactcgcttcttgttgtctaaggaagtatgtatcgtccgtgcgtgctggccgacctagagtgaggttggtgcgagcgaagagaggagcgtanatgacgtcgtgtgttgcggtccagtagactaactgacaaactgaccgtgcgaccaccatcgaagtatgagggaccgcccactcacttccttcgtgttaggtgtatcatcaccaaccgccacaaccaatattgtgttgtcgtcaacagcgccacaaattagccactccccccttcttgtagtaagaccgttttttctacacaccaccggtggcgccaacaacacgtctcaaatttttttctacaatatatcgtcgtcggccctctcatcgacgggaagctactttgtatcaacagatcgtctcgtctccatatgttatcttctgattttctgtgcgctctatggcgcaacacactctctcttcacactactctctggacacacgctcacagctctcacacaggagtgtcgggacagtctcagttatagacactctctttgctctnccaaagagagacacttctcacacacattctgtgacactctctccactctaagtgagacagttgttgtgtgaaaggaccatgtgttgagcactagacacactctgcgctatacactctctgccgctgtacaccaccccagcagtagtgtacacacctctctctgtgggagagaacactcttctctgtgtgtggtatgagtagacacacagaggtgtgtgtctctgtgtgaatctcagcagagagantcgcacttcttcctattcttatacacggagacttccacacacatatctatgtgcaccacgccctattatacttccctttaacacaattttatccaccacacacacccactaggggcccacactcacccccccaccacttacccacacactttaaccctccacattcacccgcgggaaacaccctcaaggtctaaacccctatccccccttttcctcctatcctcctcacaccccgacatccattaccgggttttccttctttaaata

SEQ ID NO: 636361 - DNA, 438 bp, Homo sapiens
ttggtccagaccaggaaaaatagtagctccagaactttatattgctgtaggaatatctggagccattcaacatttagctgggatgaaggacagcaagacaatcgtggctattaacaaagatccagaagctccaattttccaggtggcagattatggaatagttgcagatttatttaaggtggttcctgaaatgacagaaatactgaagaaaaaataagtcaaaatcatatcttaaggaaactgttgaaagtattcagctgaaatcatagaaattcataatctgaagaaagaaattatgctaacagcagctagaatgccttttgatgaatcaattattatattcctttttaattttttgtggtttcaaacaattattttttgacattttctaattctgaaataaaaaacataataaagttttgtcatcctttaagatta

SEQ ID NO: 636362 - DNA, 81 bp, Homo sapiens
aggaaccgccgcaggagggaggcgcccaaggtggtggaggagcaggagtccagggtgcactacaccgtgtgcatctggcgg

SEQ ID NO: 636363 - DNA, 501 bp, Homo sapiens
tacgctgtgaggggtgataaaaaggcataaggctgggcgcaaaggctacacacactgaaaaccaaaaactttgggaaagactaaggagtgaggatcaactagaggtcaggagttggagaccagtctagccaacatggggaaaccctatctttactaaaagtacaaaaatgggccgggcttggtggtgcacgcctgtagacccagttactggggagtctgagacatgagaatcccttgaagctggaaggcagaggttgcagtgagcaaagattgtgccactgcactccaccctgggcaacatagtgagactctgtctcaaaaaataaaaatagcaaagttctctaggcccagtccaagcccagcgacagcctggggtattcttgaatctagtccctctcctccatgaattcattctgtacacgagggaaaaggaggagtcccttggaagactctgtccttgactctttggtttaggcctggcttttgcggctttctgaaatt

SEQ ID NO: 636364 - DNA, 594 bp, Homo sapiens
cctcagtggccagtgtgggcgtgggcggtttggggcgcttggctggtggtggccactgcatcccttaatttatttctctgctgtttctgttcttgagaaattgggggtgggagtcctacacagaggctgcccctaccctcacctgagtgtacattttttgtgatgggttttattttttattattttattttattttttttttttttgggatttatgatgacttccaccccttcgttcatcaccccggcttcccgaggccaggctcagcagatataacgccggagccctggcgtcctaggaagggggcctggcaacctcagccctcttggccccacactcctactggcgggctcagaccaggggctccccctccctcctttcccccctcttggccctagtggaacatgcccggggtgctctgagggggctgcggagggcatggctgggttcccaaggggggtagggcgcccggggcacccaggcaaggtgggcccctcccggtatagccccttcttcccaaagcctgcactatagttctcctcgtgatcaaacactgtaatacagagcatggtcggaatctgaaaaaacaaaaga

SEQ ID NO: 636365 - DNA, 486 bp, Homo sapiens
taacctgggccggcatcttggacttctaggttcagcaattctcgtgccttactcctgagtagctgggatttcaggcgtgcaccaccacgccctggctaattttttgtatttttagtagaggtagggtttcactatgttggctaggttggtctcgaactcctgacctcaagtgatccgcccgcctccgctacccaaagtgctgggattacaggcatgagccacgaccacgcccagcctgtcttttgaaaagtgtctgttcatgttttttgtctacttttcaatggggttgtttgatttttttttttttaacagtaaagtggaagcaagtttattacgaaagtaaaggaataaaagaatggctacaccacagaacagctaggtggtttgttttttacttgtaattttaagttccttatagattctggattttagacctttgttgggtgcgcagtttgctttttttttcttccatctgcaggatgtttg

SEQ ID NO: 636366 - DNA, 115 bp, Homo sapiens
aacctggccccaatttgtggacacagcgcaaaagccaatttaaatcagaatatgatatcaaagtgcataattacattcgggactgccagcaggttaaagtcttaagtctttaacc

SEQ ID NO: 636367 - DNA, 683 bp, Homo sapiens
  misc_feature (520)..(520): n is a, c, g, or t
  misc_feature (563)..(563): n is a, c, g, or t
  misc_feature (574)..(574): n is a, c, g, or t
  misc_feature (625)..(625): n is a, c, g, or t
  misc_feature (650)..(650): n is a, c, g, or t
ggcaatgcctcgccctgcttcagctcacgcacggtgcgctgcacccactgtcctgcacccactgtctggcactccccagtgagatgaacctggtacctcagttggaaatgcagaaatcacccgtcttctgccttgctcacgctgggagctgtagactggagctgttcttgttcggccatcttggctccacccaatcctacactttctacaaggctgaatggatgcactttctcttttagatcatgttccttcttaaaagtgtatttttgagtgtacatactttgatagcccagctttgccattcaggcacagactattccatctaataataagataaaattgatatttctgtgcagatactggatatttttgctgacttttgcaaattagcttttttcttttgccctgctaacttcacgtattacttctagtagttgttttttgtattttctataattgttatgtaagcaatcatataatctgaaaatagagacagttttacttctttctttcttatttntatgaacttacatattcttttttcaaggtagcccttgatattntacatctttgnaggcggatgtagagatgcactttcacctattacgttgtagaatcaggttgntgactttccaccccttaacagtatngcattttcaaatcatgaacacagtatctgactt

SEQ ID NO: 636368 - DNA, 430 bp, Homo sapiens
ataacccagcggccgctgtgattttcaatgtgaaacctatgtttcacacttgtgacaacttgttaggtctcataaaaggccacatcattgagcaggtctggtgagtgcctttacatgctgattgcgttcttattggtacacaaccaagacgatgtttgttgcaggatctaggtttccctaccaatctcggtagactgccctgccatgccccatctatatctgccacctgttgtgtatagccacccgaggtaaaaactacttggggatccgtgcacgttaacgattactaggaccatgcagaaaccagagagtttaagaataccgcattggaccctattctcgatagttcccctgctctagttctaggtcccagtacttgatctagatcatggttattttacagcctactttagttccattttctctcctt

SEQ ID NO: 636369 - DNA, 260 bp, Homo sapiens
ggaaatcgatagagtgttgtaaggattattgtgtcagttttctaaggctgctgtaacaaatcgccacaaacttggtgggttataaaaaaaaaaactcaaccttcacagttcttggagggcagcagtacccaatcaaggtgttggtaggggcacaacctctaggtcccccaccttttttgcaccagggacaatttttccattggaccgggaaggggggattgttttgggatgattttggcacattacatatactgtgcact

SEQ ID NO: 636370 - DNA, 152 bp, Homo sapiens
gccggtaccttgactatgtcctgggtcgtccaagagcaataattgttcacatgacaggtcaagtcacctccagagtgtataactaatgtaacccaagagtgggcgaatcgcatggcggttgttgcaagcatctgtctgagaaccaaggtaac

SEQ ID NO: 636371 - DNA, 514 bp, Homo sapiens
ccagaaactttaattctgttataatctcctgcgtgttccatgattaaaagatttatggtctcagttactgattgcagcaattaaaagacaggacatgaaagtgaaaacatttggttctgtggaagctgcttagagacctaatgacgcagagtaggagagagcttttcttttttttttttttttttttttttgagagtgtctcactctgttgcctaggctggagtgcagtggcacgatcttggctcactgcagccccgcctcctgagttcaagcgattcttctgcctcagcctcctgaggtgggagaattgcctaaggccaggagttcaggaccagtctaggccacgtagcaagaccctgactgtacaaaatttagctgcatgtggtggtgtgtgcctatcatcccagctacccaggaggctgaggcaggaggatcacttgagcccaggatatgaggctgcagtgagctatgatcatatgattgcattccagcccagttgataaaaccctgtctt

SEQ ID NO: 636372 - DNA, 404 bp, Homo sapiens
cctcgtgcagcaatcagtaacacgaggcattctcataaaacactagggcaccctgtgcaatcactaacacgaggcattcgtcataaaacactagagcaccctgcgcaatcactaacacgaggcattctcataaaacactagagcaccctgcgcaatcactaacacgaggcattctcataacacactagagcaccctgcgcaatcactaacacgaggcattctcataacacactagagcaccctgcgcaatcactaacacgaggcattctcataaaacactagagcaccctgcgcaatcactaacacaagtcgttctcataaaacactagagcaccctgcgcaatcactaacacaaggccaagatcttataaaacactagagcaccctgcacaatcactaacaca

SEQ ID NO: 636373 - DNA, 195 bp, Homo sapiens
aaaatagaaaggagtatatggattaaacagcatctaactaataacccgcaaaagaccaaaatacagacgataacacatcaatatctattctgtagggatgacgtataaagagcattatgcactcagattttaatccaactaatacctaatagaacaactcataattaaagacaaggaattagacaggggtggtgg

SEQ ID NO: 636374 - DNA, 226 bp, Homo sapiens
aaaatgttactgaactattgactgaagtaaatttagataaaatacagcttttttccttatgggcatttgtttggtgtcaggtcatcataactaggtatggcattgctatccgtggatacagacgctagctcttaaaggattttgttttatgtaactgtgatattggaatgtcactcacctcatggtctgtctatctcatgtctcaggaaaccatgctccagtatcg

SEQ ID NO: 636375 - DNA, 119 bp, Homo sapiens
ttagggtggcatttggtttatttgttgtggtggcaatcagtggtagtagggagtgggagggcttatatttggtttttccagactataaagtgggacatatgtgtgtcgattgttgcttt

SEQ ID NO: 636376 - DNA, 798 bp, Homo sapiens
  misc_feature (26)..(26): n is a, c, g, or t
  misc_feature (82)..(82): n is a, c, g, or t
  misc_feature (87)..(87): n is a, c, g, or t
  misc_feature (108)..(108): n is a, c, g, or t
  misc_feature (118)..(118): n is a, c, g, or t
  misc_feature (121)..(121): n is a, c, g, or t
  misc_feature (127)..(127): n is a, c, g, or t
  misc_feature (140)..(140): n is a, c, g, or t
  misc_feature (165)..(165): n is a, c, g, or t
  misc_feature (170)..(173): n is a, c, g, or t
  misc_feature (292)..(292): n is a, c, g, or t
  misc_feature (297)..(297): n is a, c, g, or t
  misc_feature (345)..(345): n is a, c, g, or t
  misc_feature (362)..(362): n is a, c, g, or t
  misc_feature (374)..(375): n is a, c, g, or t
  misc_feature (387)..(387): n is a, c, g, or t
  misc_feature (391)..(391): n is a, c, g, or t
  misc_feature (397)..(397): n is a, c, g, or t
  misc_feature (408)..(408): n is a, c, g, or t
  misc_feature (415)..(416): n is a, c, g, or t
  misc_feature (431)..(431): n is a, c, g, or t
  misc_feature (435)..(435): n is a, c, g, or t
  misc_feature (440)..(440): n is a, c, g, or t
  misc_feature (442)..(443): n is a, c, g, or t
  misc_feature (445)..(445): n is a, c, g, or t
  misc_feature (621)..(621): n is a, c, g, or t
  misc_feature (687)..(689): n is a, c, g, or t
  misc_feature (751)..(751): n is a, c, g, or t
aagttcagaaatttctgtaagacaangtacattaatgaaatgtttccaaagaaatactgaacaatatatactctagtttgcngacgntccagcctcaagagcttcaancctaattctngtncaatanaaatcagcatggntcttagatgatctagaatacactgngtttnnnnatccacagctggtttcatttttaaccattatgaaaaaccagtactcctattccatcaaatgtgttttataagcaataataaattcagatccactgtattatgcaacatacatctttggnaagcnacataaacagtgagatcagatcagtagaaatatacacagttaaaaganatacacaaagtactgtngttttattaaannctactacttganacanacatcnttccacaaatngcataannctgtagaatgatgantggntttgngnnanctttacagaagcttaattccaattgtatcttcctgagggtggtggcaaagggtatttccttccttctctgggatatccctgtctccctccacgatcatctcgtctgggtggatacccaccaggcccagctagcatctggtactggtttggctggaaggctgcattctgggtttgcngcatccggttccatgggagcagaggttcagccccaacgcctctgtcaaacctttgctgccggcccnnnggaggaggactcgccaggaatcctgggggctcatatttgacataagttttggaatctgggcntgtctctcaaaagcggcctgtataagtttcctggtaagtcacaggtg

SEQ ID NO: 636377 - DNA, 114 bp, Homo sapiens
ccgccatagcccgggtttagattgttatcccgaaagacaattaacagcccaatatctacaaaaaatcccaaacatataactgaactcctcacacccaattggcccttatccgag

SEQ ID NO: 636378 - DNA, 1051 bp, Homo sapiens
gtggcacatgcctgtaatcccagctactcaggaggctgaggcaggataattgcttgaacccgggaggtggaggttgcagtgagccgagatcatgccactgcactccagcctgggcaacagagtgagactttgtctcaaaaaaaaaaaaaaaaaaaaaaaaatttgggggatgaaattacccaaaatgaaattcgcttagaaaacctccgccaagcgggaagcctcccttttctcacccttttggttcccctttgccgattaaaattcagccacatatttagcaaacagttgaaagaaggtctcgtgtttaaaacatgtgattgacagcagtccttaactattgtttttcgaggggtgacacttatttagattggaagagaggcttgcatttgggcagacgtgatttgctataggaagacccaatttgtgttatgatagcttcatccctgtgcggggaaaatgctttcgacattatacgcctctttacccacagactgggccattcatagttgaacagggtgggtaacacctttggggcttgcccaagaaacatttatatcggttccccctttaccttaggaggggaaagattacccgggtcatccaacagttctgtatgtaagctattttacatttgctcacccaagccatattccgtcggggaaaacaccaagttgctatctaactctgacaaagggtttatcacggcttcagggctgacacaaaattgggatgggtgatcctatgtgcattggggaggagcccttggcttaattccagatgcggcttgaaatcaagtaggggggctcgaaaagggtgcccgatttctcgcatatttcaggggccccactgtgaaggcgggttgggaatcatacctgggctaaatgagtgtattcagcctgtgtcacgtgtactggaacggtcggaatcttagagtgtccggtggatttcagacacttcttgaagtcatacgaaagacatgtcgagcgcaacagggggatgcggacgttacacagagtatgaggaacacttgggccagtgtggtatatgc

SEQ ID NO: 636379 - DNA, 765 bp, Homo sapiens
  misc_feature (737)..(737): n is a, c, g, or t
agtctgcctccaatagtaggaattttcaggtcaatgcgaaatgcctcggtatgagctgttagatatatcttgtaatatcttcaggcttatttgaccaaatagtatagctggttcacactgttcacatcagacataataggtatcaaagcaaataggcattagagatgatagaggatcatcagcacagtgggtaaaaggttcagttcagatataggtacatattatagtaaagcaaagaagtatcacagaatacatataaggataaataattcagatatttaaagatacttaggttaagtgaaagttttataagtgcttgtaatacaaatcagaaacatggtgagacatcaggagaaatcatttttgagcaacaaagtacctaagagggctgcatggacaaggaaaacttttccctccctaagcccataccttctagcttgactaatcgtgttcccatccccaggtcccagcaaacattctaagacgctagaacaggtttactgggaggaattcgaggcactgcagcttcatgtgctgagttaaagtaagtctctggaaatagaagctgaagaatcacaatactcaatctaatttaaccaaagtctaattagagaatctaccagaaattgagagacttgctagacataaatttgcctgtataggaagtcacgtatttgtcatcctttcaaatttttaaatgtatggtataatcagcaaaatagaagtaaattatcaantacagcctaaggagagatattttcgttt

SEQ ID NO: 636380 - DNA, 94 bp, Homo sapiens
gagaaaaaccttacaaatgtgaagcatcttataaatcctgtaagcgtcttataaatcctgtaggtcaagctaggcataattcagcataggaatt

SEQ ID NO: 636381 - DNA, 681 bp, Homo sapiens
  misc_feature (82)..(82): n is a, c, g, or t
agcgggctggggacccagtgagccgagaggccctctgggctccacttatgcatatgcaccaaaaaaaaaaaaaaaaaaaaangggttttttaaaaccaaaaccctttaaaatgttaagggccccagggcgggaaacccggtttgggggcccccgagtaattggataacacgggggcaaaaggttaaacagcgagactaatttgatacattcctgggggagccaataaccgctagctgcgagggagtttttgggcatagcagtggggcgcccaatttaggggagacctctcctaaaagcgaagctccaagaagcacccaaaggagaacgagcatcagttcacgatatctcccggatggaggtatacacacccacccgggcaccacgagagggagaccttgggcgccccaaaactccccggggttgggcccccccgtgggggggcaccccaaaagggtttgccccgccaaaatagaggagtgggctcgaacaaaaaaggacaacacaatcttgtgggaggcaacactaggggcacacaggtggagtgattgaggtatggaacaaacacgggggggggacataacaacgattgtccacccaagagtaagggaaaacacaccacgatcccacgggggagcgacgacgaggggagcaggacccaaagggacgcacacaaacaacag

SEQ ID NO: 636382 - DNA, 991 bp, Homo sapiens
  misc_feature (991)..(991): n is a, c, g, or t
cccaagtccagagttcatgtccaagctctcgtggaagagctacatgattggcacctatgccagtatggctatgtgttcggcactaccacccccgctcgtatgatggcctctgagggattcgggtaccatgcatcgagtctcagccctgccagtgggggatgagagggggcgtgtggtggacatctagtccaggtctgatgttatcaatctggcggcagaacaagagcacctacagacaacctagatgtatctgctgacgtaaagccttgcacaaccactcgatgcacatacactcttgaggggtgttctcaccgtgcttacctgccgtgagactctgtgcagaccatcagtcaagcaggctagtggaagcagaggttcaacgagcattgttactggtgggtgaagatgatgtggtcacaggtgaacttgtatcactggcgtgagcatccttgtaggccctggttgctccccggtcggagtgaccgcacgtcctgaggctcggggggattgcggcgtgagtgcacgcagcaggtgatattgctcaagtcagttgccttggatgctagctctgttgggagtcacgattgacattctgattggagttgttgactctgttccctgtcctgcgcccctgccttctgatctccggagctgaggccaggatgggggggatgcgagccatgattatcggcggcccttatcctgcatgcattagtgcggagacctaggccatagccagtctagcaccggaactctagatgtattccccttactggtgatgtgggcaggacgtcggggttcggatccgaagaatccggctcgatgctctgcgcgtgtggtcgtttccacggatcactgctaagtttgagatggttccggcggatgggagcaccctggcttccgagaggggcgggaggggcccgacaagaaggccaggagtacaggggggtacgaaaacgggggtcttctctcttcttcttttttctattgn

SEQ ID NO: 636383 - DNA, 870 bp, Homo sapiens
  misc_feature (20)..(20): n is a, c, g, or t
  misc_feature (389)..(389): n is a, c, g, or t
  misc_feature (611)..(611): n is a, c, g, or t
  misc_feature (701)..(701): n is a, c, g, or t
  misc_feature (705)..(705): n is a, c, g, or t
  misc_feature (718)..(718): n is a, c, g, or t
  misc_feature (720)..(720): n is a, c, g, or t
  misc_feature (725)..(725): n is a, c, g, or t
gcctagccttcctgccaagnttggattccagaaacacctcttggtgcctcagttttctcatctgtttgtgtgtgtgtgtgtgtgtgtgtgtgtgttggtagatagggtctttctctgtcacccaggctggagtgctgtggtgcgatcatggctcactgcaacctctacctcctgggctcaagcaatcctcccgcctcagtctctcgagtagctgggaccacaggtgcacaccaccatgcctggctaatttgtgtgtgtggttcatttttgtagcgacagggtctccctatgttgcccatactggtctcaaactcagctcaagtgatctgcccgcctcagcttcccaaagtgctgggattacaggcatgagccagtgcgcccagcccggntttctcatctgtaaaatgggttgacaatgcccacccagataatggttgaaaggactcgtgaaaccacgtaggaggcacaggcagacaggcacttgtgggggtccatgaatgagcctcagtgccagctcccccaggcagcttccagcttcacactgtctgggcagaggagtcttcctaaaacagaggactgtgtggagcacttctccaagagaagcctcttgnctcaagtcagtgacactgttctccagcccaccaatgtcatgtgcccaagctcatcatacttttcctcaaaccctgtctgtcaggaaaatnctantcacccgaaaatncntgtgngatgcccacttgctcatttaaatggctcacagggttttctaaggaaccaagaaacatttctctgtgtggaccctgcgctggtggccactgggggctccattctgaggtccctttatagggacctaccagaaggggggggaagccg

SEQ ID NO: 636384 - DNA, 172 bp, Homo sapiens
ctatacattgcaatagccgacgcctgtatgttaccactggactgctgaacaggatcgtgtctactggctttctcatcaagaagaactcccaacaaaatcagtcagacaactcttgaagttggcttatcaaagtgccaataaacagaatgtatggctttcctcgtggcgatca

SEQ ID NO: 636385 - DNA, 558 bp, Homo sapiens
tataagcttgatagtcaggagttcaagaccagcctgggcaacatggtgaaaccccgtctatacaaaaatacaaaaagttagccaggcacgatggcaggtgcccgtaatcccagccactcaggaggctgtgttcaagctaatcgcttgaacctgggaggcagaggttgcagtgagccgaaattgtgctatagcactccagctagggcagcaagagcgaaactccatctcaaaaaaaaaaaaaggataggggttctctgaaaaaaccccagaatctcaccctgagggaatccctgtggcccaaggttaaaacacttcttgggttaaaaaaccaaccatgtgttggttacggggattttaaccccattaaattaaattattttccccttgagcccatggtggatatgattattaaccaatggggggaaaaaaggctttccctcatagatttatatcctcattattggtagagggaaggtgtgaatttgaaggtcacactgggggcacccacaaaggcattaatggtggcgaacaggttccttcggtggctacattggagac

SEQ ID NO: 636386 - DNA, 744 bp, Homo sapiens
gatcctgtgcggtcacttagccagacgatgcctgaggaaacccagacccaagaccaaccgatggatagaggaggaggttgagacgtctgcgcctttcagcgcatgaaattgcccaggttgatgtcattagagtcatcaatactttactactcgaacaaagagatctgtctgagagagctcatttcacaattccactcagagtgctacttggacaaaatccggttatgaacagcttgacacgagtcccagtaacacttagactctgggcaaagagtctgcgatattaaccgttgataccgaacaaacaagatcgaactctcactattggtggatacgtggaactctggaagtgaccaaggcattgactatgatccaaataacctgtggtactatcgccaagtctgggaccaaagcgttcatggaagctatgcaggctggctgcagatatctctatgattggccagttcggtgttaggtttcttattctagcttcatttaggttgctgagaaagtaactagtagatcaccaaacataacgatgatgagcagtacgcttgggagtcctcagcagggggatctattcacagtgaggactagacactacggtgaaccctatgggtcgtgtcaacaaaagttatcctacacctgaaagaagaccaaactgagtactcggaggaacgaaggaataaacggcgcatgtgcagaaacttctcagtctgttggctatccctcactcttttgtgg

SEQ ID NO: 636387 - DNA, 197 bp, Homo sapiens
  misc_feature (130)..(130): n is a, c, g, or t
  misc_feature (178)..(178): n is a, c, g, or t
gcttcctcaagccaagctccccaggcccaggtcaggctcacggtggcctccaggatcagctcctgccctccaatggcgtctccagacccgaaatggtctccggtcggtgggctcctccacgccagcttgncgtcccggcgacctctgcaggcccaagtcgtcctgaagtcgcgtcgcncgccctgcctcccagcaag

SEQ ID NO: 636388 - DNA, 109 bp, Homo sapiens
acactcaacacacagtagccttactcatgggctccggagttgttctaacgctcacaggaatgctgcagaaagatacgactacttactagcagaagtgaagtagtcgtat

SEQ ID NO: 636389 - DNA, 319 bp, Homo sapiens
cttgtgtctggagtgtatggtgcgatctcagctcacgaaacctccacctcctggggttcacgcgattcttctgcctcagcctcccaaatagctagaatgcaggcatgtgccacacacccggcaatttgcatttttagtagagacagggtttctccatgttagtcaggctggtctcgaactcctgacctcaagcaatctgcctcctttggctccccaaagtgccgggcttacaggtgtgagccactgcacccggcctacaatttctttttcacagttatagaaaacaagcaaagaaaaaaaactagacacaagggaaaca

SEQ ID NO: 636390 - DNA, 284 bp, Homo sapiens
gctcgactgtgattgcatgcaaatcatatagcaatataatgagtcattgaaaccaaaagttttatgcagaaagcatgtcaactcagaactatataataatcatgggtctaataattaggaaatgtatgttgataaggaaaaacatttcattgataccaaataattttctcactctttaactgggaaaactttttttctcattagagtgacgaaaagttaatattcattaaggacataaaatataacgtaagatcgagcaaatattcaaggttggaggcgtcgac

SEQ ID NO: 636391 - DNA, 113 bp, Homo sapiens
  misc_feature (90)..(90): n is a, c, g, or t
ggttcaggcaggctctggtgtggctgtgacaccaatcacctccaactcctgtgcctcctgtcgtggctcgttcgggtggctgcatcacangtgtgtgatggtcactgtggcaa

SEQ ID NO: 636392 - DNA, 879 bp, Homo sapiens
taaaaaaaaacaatttctcatttcctcccccaaggggggaagtaaggggtggatcaacaaaagagggcgcaagcaaaggggaggcccggatgccacgagaggtacgagagcggggagagaccaggaagaacagacagcgggagtaacacccacccagccggagggggagcagcacccaccccggcgtcctcctcagaggagaggagcagacaacacccgaggggaagaaacacaaccagcacactattgtcacacaagcacacacacggaggggggaacaatagaactagaacacgacccgaggggacgacacaaacgcggagggaggaagggagctctcactcacacacacaccaaaagaaaagagtgaacagctagaaggaagcagcgagacggcacccaagagaggggagagagaagaagaagagacgaaaacagaagagccagcccgcacgacgacggcggagaaaccaatacaacacaaaaaaccaaaaagaaggaggagggcgagggcgcaacacaaaaaaggaggcgtagaccgacacacaacaaaaaaaacaagaagaggagcgcaggctagcccgagcgaaaaagaagaacagaaagaggggcggacgaccgacagaacaaacagaaaaatagatcgacgacaggtagcaaaccaaaaagagagggagagcagaccacaaaaaaaacaaaagacaggcagcaagagcaacaccaccaacgtgaggggggagcgacaacaccacaaagcacgcagacaaccaggagaaggagcagaaaaaaagaacgacgcaccaaccagaggacacaaagaagagagagagagggagcagcgacacaaaaaaaacaacagacagacgacacggagcacaa

SEQ ID NO: 636393 - DNA, 566 bp, Homo sapiens
tccataatgtgtgcccacgcttcgatagcaactcaatcaagtagaagaaagggtatcagtgattgaagatcaaattaatgaaataaagcaagaggagaagtttagagaaaaaagtaaaaagaaacgaacaaagcctccaagaaatatgggactatgtgaaaagaccaaatctacgttagattggtgtatctgaaagtgacagggataatggaaccaagctggaaaacactctgcacgatattctccaggagaacttccccaatctagcaaagcaggccgacattcaaattcaggaaatacagagaacacgacagatactctttgagaacagcaaccccaagatgtataataatcagattcaccaaggtagaaatgaaggaaaacatgtaggggcagccacagaaaaatgtagggttacccacaaacggaagcccatcagactaacagtggatctctccacagacactctacaagccagaagagagtggagccactattcaacattcttaaagaacggaataaccaaaccagaatctcatctccagaccacataagcttcatacgtg

SEQ ID NO: 636394 - DNA, 389 bp, Homo sapiens
  misc_feature (62)..(62): n is a, c, g, or t
ccccttatcacacatgaattattttctggtagcacattttaatataagtgactttaagaggncgggcgcggtggctcatgcgtgtgagcccagcactttgggaggccgaggcggccggatcacgagatcaggagatcgagaccatcctgactaacatggtgaaaccccgtctctactaaaaaatacaaaaaaattagccgggcgtgggggcgggcatctgtggtcccaattacttgggaggctgaggcaggagaattggttggacccgggaggcagaggttacagtgagcagagatcgtgccactgcattccagccggggtaagagagcgagactctgcctcaaaaaaaagaaggcttagtgtgcaactcatcagagttgcacagggca

SEQ ID NO: 636395 - DNA, 200 bp, Homo sapiens
atgatacaatcagctcggtacctgtacattcgtgtcagcccaccgccgtgcgcttgtgtcatgccctacgttggtatatcacatcaatgtcttacgaaaaggaaataggccagtcctgccaggagtgaagaaagctttgggcatatatggtcctgccgttgtgtaatatactacaagaagtggatctacagatagtatag

SEQ ID NO: 636396 - DNA, 424 bp, Homo sapiens
  misc_feature (136)..(136): n is a, c, g, or t
cagactccagtgtacaaagcgtttaacgagcatactatacgtctagtacgagcggtgcgatcgccgagtcactcactgagcttctctgaaagcgtctcttgcatcctctatgaaatacgtgatgcttacggagtcnacctcatcagtgcggccctctcgtggagccagtatcaacagctacctgtgctgagagggactctacctggagaatccagaaatcaagatccggatccttggggagcccaagcagaaacgcaagctggtggctgaggtgtccctgcagaacccgtccctgtggccctggaaggctgcaccttcactgtggagggggccggcctgactgaggagcagaagacggggagatcccagaccccgtggaggcaggggaggaagtcaaggtgagaatggaactgtgccgtccaat

SEQ ID NO: 636397 - DNA, 1816 bp, Homo sapiens
  misc_feature (1092)..(1092): n is a, c, g, or t
gggcggctgcgcgccagtgtatgtggtgggggttgcgcccgggtggtggtgtggtggccggcagctgcttcgctgcgtgtgggggcgcgcgtgtttcgtgcagttgagcgcgggcgtttgcgtactgtgtgtgtgtaaccagcagctggttgtgcggtcgtgttcgtcggcaggtgattgcccgctgtatggttccccgtgctcggcgatcaggagcgtgttgcagccgcgctgtcctcgcttgtgagggttgtgccgatagcgctgggtgtgagtacgctcgggggagggttttggccgctctggtgttggggtgggcccagggcgcccttgggcgctgtttccgcgtggacccatgtggggacgacttgggtgagcgtgctgttgatgttgggggaggttgtgtagcgctgaccacaaaggtgttgtctgagcacgacgccatagggctgggggtggttctacgggggaggggggtgttgtgccgcggcttccggtgtggggggggcggtgtgtcgtggtggcggcgctgggtttagggggatgtggtgggtcgcgccgtgttgttgcccggggctagtttgtgccagcgcggggtgtgcgggcgttggtggtcgcctcataccgttggtggggccgttgctcgcggcgccctcttgtgtgtggtgtcgtgaggggtgacgttgggtcggggaggaggcgcgcgtggttgtttcccccccgctgggttttggtgtagagaagtatgggtgtaatactcctgccgtaggttgtgttttgcacgcacacatgagggtgagtgcgccctttgagtgcggtataccgcgacagagggggtgcaagaaggaacgctacgccggggttcgcacgcggcttgtgtggtggtggcgtgcggggggagagagtgcgcctggtccacgcggcgacgaggggctttggcgggagatcgcaggggttttgacccacaacgtcgggcagaggtgagagggggagcaggcccgctggggcagatgacgacaggcccaacagaggaagagggcgcgccgctgcaaagggggcgccggggcgcaccaacggcaggctcgccgtggngctccgcaaaggaggagagaatagggggctcacaacgggggccacacagggcctcggcacagtggcgccccacagcgtggtgggacaacagacacgacacagcgtgtgataggagttgcgcgcgtgagcgcgcgcgggggacagcacatgatgctcgcgccttgtgggacgcgggtgggaacacacgcggcgtacacatgggtagatgtgtgacggtgttcgttggcacacgacgcagttgtgtttcacaggactcccgtgtgtgtctatgactgagagatttgtggttgtttcgcgcgcgtctatgtgatggagcgcccatctgtgggggtaaataatgatgatgtgcgcgcaagtgtgtggagatatgtgagaacaccgcgtggacattcgcgaattatgcccagggcgcccaaggtgatagcgccgcctcttgtgtgcagacgcgccacgccagttgcgtggcaccgtgtggggggacatttccgccgagagtaggatctaccgggtgtggacgaagaataatgcaccaccttaaggaatatccccgtggttcgagctcctgagctccagacccactgagtgcccctcctgtgtgtgcccctggcccttttttcctgaaccccttttaattttactcattttttcctttgcccttgattttttagactcagtgccattaaattcactagaaaccccgaaattataaaaaaataaaaaataa

SEQ ID NO: 636398 - DNA, 961 bp, Homo sapiens
  misc_feature (961)..(961): n is a, c, g, or t
cggacgcgtgggtcgacccacgcgtcgcttcccaataagccatttgagtaagaatcccagcctcaggttctgcttctcaggaacctaaacgagaaaggaactcttttcaggtggtcgtaacactcatccctaagaacttgtccctaactggaagacgtagcccctctaacaacagaagcaatgtagattaaggatgttgattcttttaaatgtatctacttagtttcctggatccaagatatatcagataatcaacactgggcaaccatccatgtgtagctttctttgggtaagaagatcatcagtgggtgctaagaccattgggtgaaatttagttgggaaataggttattattaatcacatagggaaaaatacgcttttataattaaaagaattggcattaccaccttaacaaagtgatcaaactcagcatcagtgatattggagcaagccaacattacatgcctctcagagggatgataggaaataaacaataacacttaagtagcattcttgccagaaatatttaacctgaatccaatcattagaaaaatatcaaacaaattcagcttgtgagacattctactagacaatgggcctagagaatgtccttgtgtttggcagctgaaggttcattaaaaagtgttaaataagggcgggtgtgatggctcgcgcctgtgtgttccagcacttttgggaggccgaggcgtattgatcaccggggtccaggagctcagaccagtctgggccggattggtgaaaacctctctattttaattccaaaagattgcggatgtgggctgctgtgtaccgctactcgaggtgagggagaatgctgaccgggggggtgtgggccctgtcctcgctccccggtacagtcttttccaaaaaaaaggggcgattatacgcggcaccctttaggcgagggttagcgggatagagggttagtcttgtggccatn

SEQ ID NO: 636399 - DNA, 978 bp, Homo sapiens
gctgtgacggggttcccagaagaatgtggaggaagccatcgaccacatcctcgatctggcacggagtgataatagctagactgacgtggtggacagtgaggcggctggtggtatacatgaaatccccaggagacgaagaggccacgggaccttccagagtgcttgtgtggatgcgggacgcaacctggagcggcaggcagtatgatgagaagggttccgtgaactatgagcagttgcatgagggaatgttcccatgcttatggggctctatggttggttccctaatgaatccatcctcttgggggcccgagcatcgagtaatgatcatatgatgaatacgagaccttcgtcgctaggccgtgcattgacccgagtccgaaccacaagcaattggttctgtcttcaagtctgacaccatgtgggtggatcctccgataaatagttgatgcgtcttccccccctttaacactgaggtgccctgcaggggaagctctaagttgcctggcatgtagttggtgccgtgacgcatcttccgaggcctgtggcgtgtccgttcgaggacctggctccgaattgtttaaagactgaaacacaatggtcatgaggcgattcgtgctggtggatagagcagattgcacaggatcacgtggtccagcccgagattgttcaggtcaggcactcatggcctttcatcactgatgatgctctccggagccgtgtctaagtgattcccagcgttccctgttgtcgatgaccctgaggagaataagagttctttggacttttattgagcaaaccaaacatcctgaggccttggtggggggccctcattgtcggggtgggggggacactttgatactgtaagtggcgcatgggtccaaatggcgttcccgcgacatcgaattgcttgatagccgttcgcagatcggggccaccatacgggagcggtaaacttgggcataacgtgtaacgccagag

SEQ ID NO: 636400 - DNA, 298 bp, Homo sapiens
gtatcattggctatcaggatgccttatttgagacaatagaggcggaattgaatgaattgggggccggtagtgttaagtcattgctagcaggagtcttgtgcttgggagatgtgaccgctgagagtgagagcatgcgtggtagcgagcgcgatttcatgctcaatgctcggtcctgctagactgctgggagacaggcaggaatgtggccagggaaggttgccatgagacaaaagttgggcctggaaaggcccttgtgaggcatgagcttggcctaaagaggccactggatgagggcatg

SEQ ID NO: 636401 - DNA, 204 bp, Homo sapiens
gcgtataactagtacggcgcagtgtgctggaatacgctacggaagcacactgcaacagaaactagtatagatagtatcttgaagtatgactacttaaaaacataaggtagtaaaggaaagacatacagactggtaccacgtagggcatgtacagcacggcagcaggaaccctagctataccaacaaactagatataagtaccag

SEQ ID NO: 636402 - DNA, 285 bp, Homo sapiens
cctagtgagagtcatacatatgatggtcagatgaaagctctgggatccgtgctactctctataattgctcccttatgtatcgccttcaaggcctcgcaacggaatctggaactagctgtgtcttcaatggttcagccacaactggggaatgagtgagagggtattgtgcgtaaatacagaggacaaggggctagccacatttgcttggataattacagttactgtgctccaaacgaatacaaactggcgcctccccatcgtgactcatgacggctgcatcgcgag

SEQ ID NO: 636403 - DNA, 591 bp, Homo sapiens
  misc_feature (279)..(280): n is a, c, g, or t
cctctccttccctccaaaacaaaaaaaaaaaaaaaaaaaaaaaaagaaacccccacccccccccttccctccccccccccccccccccccccccccccccccttttttttttttttttttttttttttcaataaaaaaaaaaaacccaaacattttgttgttttttttttttttctcctccttttaaaaaaaaaaaaaaaaaaaaaaaattttggtgggggggggggggggcgggggcccccccccccccccccgtgggggggggtggtgtggggggtnntggtgtgtgggggggggggggtctctcccccccacaaaaaaaaaagaattttttttttttttgggggggggggaaaggaaagaaaaaaaatttatttttttttttttctccccaaaaaaaaagagaaaaaaccccatagggggggggggccccccccccaaattttgggaaagaaaaaaatacctttttttttggggggggggaaaaaaaaacccaaaaaatcccgccccccccccccccccaaaagggaaaccccaatttttttccctttgcccaaacccaattgaaaaaacctgggaaaaaaaaaaatc

SEQ ID NO: 636404 - DNA, 1087 bp, Homo sapiens
gtggtcgcggatgggggctagacgggaacagcagagcgaggtccagtgcaccgaagacttagagcaatgaacttgtttcgcattcacagtgacgctgtgatggtctggtgcagggtcataatattcatcgatgtggcagatgacaggtaatgaccagtgatgctgaacattcaacaagccgcagattctccaaagaaggaaaatgtgatgaggtggatgagtacggtggcatctttggaggctctctgaccaggaagccgagcacccgctagtgctgggtacatgcatacctttagccaggagtagggcgccatggaaacggaaaaacgaattcaccagaaaacattgttcgatgttagattgggctacctcagcagagtaaacggtagaaagtgaatagatgattaacagaagttaggcatgtgactgtagtagtatcccagtttgacatttatagaaagtatataacagttgcgagatagagggtatggaaaagaaaagaataacgaaacgaaaagaatacgaacacacaactggcctgcgcgatagaggaactcgacacacgactgaggctcagagggagccagagccaacgagcgagggccagaccaaggcgagcgcagtggcccaggggaaaacacaaccagaaccaaaagcaaaggaatagcccacgagggacacgcacaccaggcaccagggtcaagactcagagcgcatgacagcgtggcaccaggaacacaatgggaggcaatagcaattggacgcgcctggcttatgtaccaccacgacaattaacactgctcacttgacgctgggcgataatttggaaacccgcacacctgggaccccaggaagaacagccgaagaggcatcacaggtgcagaccccaccagactgggaaacggacgggatggggccccgaactcaagagaggtaatagcgggaaccaaatgagcgccgcaggaactcacgccggccaaggacgagcaacatagcggaagtaagacggaggccaccaaacaaagcacgacagagaactaggagggcacataccgcggaatacagtggaggcacagcaggagtgacc

SEQ ID NO: 636405 - DNA, 347 bp, Homo sapiens
  misc_feature (252)..(252): n is a, c, g, or t
  misc_feature (257)..(257): n is a, c, g, or t
  misc_feature (279)..(279): n is a, c, g, or t
  misc_feature (290)..(290): n is a, c, g, or t
  misc_feature (298)..(298): n is a, c, g, or t
  misc_feature (304)..(304): n is a, c, g, or t
  misc_feature (317)..(317): n is a, c, g, or t
  misc_feature (319)..(319): n is a, c, g, or t
  misc_feature (340)..(340): n is a, c, g, or t
ttcggcacgagcacattccaccttactaccagcacaccctagagcacaaacccattatacccaatataagagatatagcgcgtatagaattttggaaaaccctgggcgcatatagatataggtacccgaagagagaagagatgaaaaatttataacccagtgcatatttataggcaggggtctaaccccatataccctttctgacatattgatttaacctagagaataacctttgcaagggagagccaaagngctanagaccccccgaaacccagagcngagctacctanagacacanctaaanagagcacacccgntntatttgagcaaaatagtgggngagattt

SEQ ID NO: 636406 - DNA, 228 bp, Homo sapiens
  misc_feature (26)..(26): n is a, c, g, or t
  misc_feature (206)..(206): n is a, c, g, or t
tttacacaggagcgcatggccatggntttggaaaggagaatggaaaaatagaagaaggtcggccgggcttggtggcttatgcctgtaaccccagcactttgggaggccgaggtgggcggttcacctgaggtcaggagttcgggaccagcctggcaaacaccccatctttactaagcgaaaacccatctttactaaaattacaaaanttagctgggcatggttgcgcat

SEQ ID NO: 636407 - DNA, 434 bp, Homo sapiens
tatactcaactgtctctgcgtgtggacacagagtacgggaaaatgagaacaagataactatcactaatgaccagggccgtctgagcaaggaagacatcgaacgtatggtccaggaagctgagaagtacaaagctgaggatgagaagcagagggacaaggtgtcatccaagaattcacttgagtcctatgccttcaacatgaaagcaactgttgacgatgagaaacttcaaggcaagattaacgatgaggacaaacagaagattctggacacgtgtaatgaaatgatcaactggcttgataagaatcagactgctgagaaggaagaatttgaacatcaacagaacgagctggagaaagtttgcgagcccagtcatcaccaagcctgtaccagagtgcaggaggcatgccaggaggaatgcccgggggtaggaggt

SEQ ID NO: 636408 - DNA, 368 bp, Homo sapiens
tacatttacagactctgctggtccctaaagactggtaaaacacaggttttcacctattagccaaaatccccctgccatttaaaaacaacttctgtctcatgagaggcagtacagcttaatagtctggctcaggaggctgaggaggtggatacctgaggtcaggagttcgagaccaggttggccaatatgggtgaaaccccatctctgctaaaaatacaaaaattagctgggcatagtggcatgtgcctataatcccagctacttgggaggtcgaggcaggagaatcgcttgaacctgggaggtagaggtagcaatgagccaagatggctccactttactccagcctgggcgacagagcgagactccat

SEQ ID NO: 636409 - DNA, 413 bp, Homo sapiens
tcgtcagagctatcatcatcgatctgaactttgggatgcactggttccacaaagagatcttatttttgtgctgtgcccacgattttagtatagaatgatttttcatcagtacataccatagcttgctcgattttgttgtcaatagctaccacacttgcaccagaggagctgaaaaagaggagggaaaaaggtcatcgataaatggaatttatcttaagcgtccaagataaaaaggatctcccaattttgtgatattgctagcatcatatttcgaatgttatttaacactatgtaatgtatcaccccccagaaaatgccagcccctctcttactaacgaatatccaggcatctccctattttagtaagccacaaaggactaaattacatcatgtggggaaagcctgttctctgg

SEQ ID NO: 636410 - DNA, 344 bp, Homo sapiens
gccggccgcgtcgacttcacaatagccaagatttggaagcatcctaagtgtccatcaacagatgaacagataaaatgtggtacatatatacatgagatcctgtcgttttcaacatggatggaactgggggtcattatgctaagtgaaataagccaggcacaaaaatataaactgcatgtcctcacttatttgtgagagctaaaaatgaaaacaactcggagatagagagtagaaggatcgttggttaccagaggctgggaagggtaagcggggtatcagggagagtgagaatggttaacgggtacaaaaagtcgacgcggccgcgaatatagtagtagtagtag

SEQ ID NO: 636411 - DNA, 891 bp, Homo sapiens
gtaccaagtgaacagagtacctagttcatcagccgtccagtaaagcaacccaggaaactgactgggtctctttgcctaccgtattaacattaacacattgatgtactgtattctgtactttactgcacccagcagactttcaacaactcattgatccaaagatacatgcacagtctgagcaccagctatggtgctcataacttctttcaagcacttgaaccctttcaatctgtgatgattcattcaaattggcaccattgcatgatgagaatacacattgtcatgtaatctgtgcacatgacagtgtgtgtgtgtgccacgtagcatcactgtcatcagtcttcaaaaatcgcattatactggccaggggtggtggctaacgcctgtcacatcccaagaaactttgggcaggccgcaggccgggtggatccactgtggtcaagggagtttgcagatcagccaggacaacctggtgaaacccgtctctactacaaaatccaaaaattagctgggacgtgatggttgggcgcctgtaatcccagactacttgggaaggctgagcgcaggagcaatcacttgaacccgggacggcgagaggttgcaagggagcccgagatcgcaccatatgcactcccagtcttggggcaaacgagttgagaattaccagtctcaagcaaaaacaacacacagcgcgacaaacacaaacaagacataaaaccgccatgcactgagtacaccagcgcgacccattaacacaacggggaagccgcaccaacacacggcgaagacaaccacaacacagcaactgcaaaggtaccaggactagcgaacaagcgagcacaaaaacaacacaaccaaaaagaggcccgacgagaacgaaaccagaaacag

SEQ ID NO: 636412 - DNA, 156 bp, Homo sapiens
aaaaacaagacaagcagcaacagctgttttgttggggctatagatttaggtcaggcatagtcaatttcagattacctaagagtggatatatgcatatggggaaattatacccttcccctttttatttgcccttgcgatccacctccttttgagagg

SEQ ID NO: 636413 - DNA, 1005 bp, Homo sapiens
gcggtgcgcggcctcctgaggggagcagcccgatggaatctgccgggagaggtccgggaggtgacatcgtccagcatgcgcacgtgctatcggaggactcgtggtatgcagtgaagatccctgggcccggtgcatgaacctcgccatctcaggacgctgacgtccaatacacaaggacggagatgggcttcgctgagggatgtctccagttgaaagaatagggctcaggttacttaatgaaggagttcatgaggaatgcttcgctattactgacacacggccacaagtcccaaccccagttctgtgcagtgcttgtggtgcctctgctgaggacgtgatgtgaggagttgctagtgccgtgcgtccgtgtctcgagtgatgagagggagctgctcgcagcgtggttgatactacgcccgtcacctgagtggcgtagtgcttctagtgggtatcagtgacactggattgacccaggaaagaactttggtacccacgttgctcgccggacatcgtggtctgatcaatatcgagtaaggagttgtggatggagggaactcggtggaaagaacgttcgccggttgggtccactgacacgagaggaacttccttggggtggccgaaggcagtcctagtacgcggatcgaggccacttctggggggcatggtatgttgcgtgggccaaggattcagtgcggaggggagggcggctgacctttgaacatggcagcggggcctggaggttctccgcagtgtacgggaagtatgggagggcaacgcgaaggacagttgcgtcaccagcgcggaattctggcaccggggctcggggctagtggaaggcatgggggccgcaggcccgtaggaaatgcaacggccggagaagttcctggggttcgcgattgaggtaccagagggcgcttgcctaagagagattgatagcatggggagtcatctcaaaaaagagcggccaggaaggtaagtgggctacttttcccttggggaaggcca

SEQ ID NO: 636414 - DNA, 149 bp, Homo sapiens
agcttctattgattgcggttatcgtgtcacgcggtggatgacacgaaatagctcaaccctgggtgttcagtatagcttagttaatctttcgtttattgctaaaggttaatcactgctgtattcccgtggagggtagtaggctacggcta

SEQ ID NO: 636415 - DNA, 730 bp, Homo sapiens
cagaagatctacagagactacaaggatgaggatggcttcgtgtacatgtacactactgcctcccaggtagacattaggcatgtctggagtcatgcagtcccccatggatgggtagacacgccttgaggacgagacgcctgcaatcctctcttagcccatgtcgggcaaggaatgtgtgctctagacagtacagtgtcatgatgctggcagaagggatggtatctctcctgtgtatacagcggcaggagtgtgagaagcagggatgcctggggtgatcagctccaaccagtggcagcagagtggtggctcttcctagtttagtttttgtgctccgtgttcttgtgtccttctaagaaaaatgtgggctgctcttgaaagttatataattatcatttttttttttggaacacagggtctggctctatggcctaggctggagcacaggggcatgatctgtggctcactgcaacctccgcctccggggttcaagtgattcttctgctccacccccagagtggctggtattacaagcacatgccaccacaccaggctaatcgggatcccagtagagacggggtttcaccattgtgtggccaggctggtctcgaactcctgacctcaggtgatccacccacctccggcctcccaaagtgctggcgatcacaggcgtgagccatggtatccagcatataaccgtattctaaataagacatgctggcttgtgtagaac

SEQ ID NO: 636416 - DNA, 1073 bp, Homo sapiens
taacgacggagtgccagcgagggattcggggaactaaatgaaccgtgcgaggatcctggctagccactctggaatccgataccgatatctcttatgacctcaggcgactgacaaagggaacggtgtctcatcccccttcctcctctcctccctgatcctgagccttagccatggccgatgcagggtgctgggcctgagcgagaccggtcactgcagtacgaacggctctaccggtgatcaaccagagactcctgcattgcactttgcgggatcgaaggtacggaagaaaatcgaggcagaggcatttatactttctcgcttctgagagacgttgcctcggagagcctcttcctcagggagatagccgcgtaacgcacttacctatccacatacttccggtacagaccggtagaggcgcaggaagtaccaaacacgggtagcatatggcactaaccgtgcacgacattgtgtgcactaagtgagccacattgggcctgccgttccatcgcaaactgactgcttgtatttatggagtacaacctcagggccttctggcgaagagctccaacggtatatacgtgcatgcaggtaggcaacgaatgagggctggtggtgcatctcaacacgtagtgtaacggtagagcgcgaccgcgataggacggagctgtcggtgcaacccttaggcagcggacccgcagcggacgaactcatggcgttcttgaaattgggacaaccctatacagccacttggactctacccaaaagtgacactgggaagaggctttcggcatagcctgctgggatcttcttagccagccacccgggaaccatgatgccccttgctcacatatcaacggatggccattccaaggtgcgccctttcccgttggtattccaccgtagtaggagccaaactgacccatggggtacctcaaacaggctagtgagcgtaaacgcaacaatcacaggcaactacagctagtgggcatttccaagggcgacactaccattatccaagcggggccacactccttcatttcatttagaaggaccattgtacagccaattccccc

SEQ ID NO: 636417 - DNA, 362 bp, Homo sapiens
tcccgactggtcgaccaggttgcgatccagattaatcccaccagacttctattgcacacttcgcaataagccaccgtcctttggtcgtgagttcacgtaatactggtcccgtgcacgcagccgtggtgccacaccttaggtgccgcaagctgcacaccaactcaggtctgacctgctccatgtggatgtaccggatggagcgtgcgctgtacgtgttcactctagctcctggcacgatctccgacagagatcttcgagcgccttctagcacattttggtcaaaggcgcgagttttcctgttctcagtacttgttgttgtgcgtcagctcgttcggctccttcatccggtaccttcctgacct

SEQ ID NO: 636418 - DNA, 254 bp, Homo sapiens
aaaagcccccccggggggggggggaggtaaaggcctttcattttttcccccaaggaaaagggggccaagaattttttccttttggggaggggggggggcttccccttttttttttttcccccccccccccccaagttttttacattgggttgggtttgggggcccaaatagggggtttgtttttttccccccagggcaagggggttccccattgcaaaaccttgcccaaaacagtaaaaagggcctgcttgcca

SEQ ID NO: 636419 - DNA, 165 bp, Homo sapiens
attcgcggccgcgtcgacggccaggcgtggtagctgggttcacaccagtgatcccagcgcttcgggaggctgaggcaggggaatcaccttcagcccaggagttgccagcctgggcaacatggcaaaaccccatctctacacaaaatatacaaacttatctgggca

SEQ ID NO: 636420 - DNA, 775 bp, Homo sapiens
tgtggcaaaatatttaattggctagccatccccatggtgagccgcttggggtgtgaggggtgaagctgggtggtggatcacagcatcttctggaatagggcgatggcctcatccaccattcctgagctctgcttctgtctgtatggagcttggatttcatctggcctcctggatcttcgagcggacactttgacaggatagcccgaggcagtcacgggtacccgcagacgctgggcctagccgatgggcctcaaactcgcttggttttgcaggtttgcccagctcccgtgcagggtccaccaagcccctgaaagctgcaggtggatggagcagcgatcaagaagccagagccacagcgcaaccctggggggcgggagcccccagggccagaaacagccaccacaacctgcgctggccaggcctgacacgataagcccgacaccgccgatgccaggcgcccgtggcctcatccgcatttccaggaaacatgtcaggcacggttccgggtgaaggttgtatcggcccggagagatcagcacggctcgcgtgatgcttacgccagctcaagggggatcttgccatcggagatcatccaggcaacccatctgagggcctcggaatggggtaacacaacaggataggggactctgcgaatcctccgggcagccttgggaacagccctccgtagagggctaagttaaagcagccgagcaagtcaggactgtatggttggggcactcgttcctgttcccattatctgtttgcctcgtaattg

SEQ ID NO: 636421 - DNA, 890 bp, Homo sapiens
gagactgaccgcggggcagtgaggagatgtcagaccccggcccggaggaggctcatgcgggattcaagcggttacaagaggacccacctgtgggtgccagtggcgcaccatctgaaaacaacatcatgcagtgaatgcagtttatattggcaccagcaagggacacctttggaagatggtactttaaactagtaatagaattttcctgaagacatatccaaataaacaccaagtgttaggtttttatccacacagtgttttcactccaaagtgtgtattgctgagggtagccatatgttagatatccttcagaatcgatggagtccaaacatatgatgtatcgttctatcttaacatcaaattcagtctctgggtgggatgaacgcggaaattctaaggggtccagctccaatagacaaggccagagcagtttatcagggaaagcaaaacgagaatatgagacaagaagttcgggccatttgtttgaacaacagctggaagtgattcataatagaacaagtggtgtgtgaactcttttcaatcattgttgtgtataatttagctctcattaagaaagggctaacaaattatacgctgccaaggttttagggattctggacgacaacaaaaagaaaattccttcaggtgaagaactaaaaagctggggtatctgataaggtacttgatgcaggggtgactagttatgcggctaattggataatcggaggatgaacagggctagagggggggatcagaagaatcactggacatgtatttcactgagctatgaatgagtaaggacgatagttttgatgaggagaaaaagggaaaatatgtgaggggaccatggaacaaagtgagagaagaatagtagtctgttttttgttaac

SEQ ID NO: 636422 - DNA, 252 bp, Homo sapiens
ctttaatcaaagacaaacagcgctaactgtatctaccttagacaaagacaatccgccctctctattaagagacctacgctatcttcttttccagctactatagcactcaccagtaagagcctcctgctccgccctcttcttctggcggtacctagtggctagctgtcttgtttagctaccataaatttcagcttcttatccagtttctcaccctttacttttgctgctaccatcttctctccaggaggatcg

SEQ ID NO: 636423 - DNA, 785 bp, Homo sapiens
ctaataacggcacaccaagcagcatctcacgtcttcgaaactgtctccgactctaagaccccttccaacaaccaggctaggctcccctatatatgctggaaactaccccctgactctgagaggtgaccatgtaaccacctacatctgtgtgggcctttaaagagctgggccctggacttagtgaagaccgatttcagaagaggaagccaccataactttaccagatggcttcccctgcctgccttgaaggttttgttcccaactctgggtggcacccgagttcagagttcttcagaccggttagccctattactttctacagcccattcaccctccctgggcccttacttactcccgcacttctgcctcactcgtatcttatctgatgtgacctcccaggtctacctcatgctccttctgcctgtttggaagagctttagcgccagctatgagttctatcggtactttgagaactcagccacccagtccagtacccccagtgtttaccccaaactccaccagaagtccagagaactggataatgttctaccaaccacgccagtgcgtagcttgccagctcccatctgaaagccattactgaatgaggtaataattcttgaagatgaacttgaaaagcttgtttgtactaaagaaaccccagaactagtgtcagaggcttatcccctcctaggacaagaaattttaagttgattcagccccacgttcaagccagccaccattgctgggaagaggccctttttcaggtcgaccaactgctacgaaga

SEQ ID NO: 636424 - DNA, 738 bp, Homo sapiens
aagactttggatgccccactcccgggaactgttggcgtgattgccccgggctttcccagacatcatccgcctttactggcgctcccaaaggctttgggcaaggtcatccctgagctgacgggaagctcactggcatgccttcccgtgtcccccactgcccacgtgtcaatggtggacctgacccgccgtttagagaaaacctgcgccaagtattgatgacatcccacgaaaggtggtgaagccacggccttccgtgagggccccctccaaggggcactcctgggctaacacactgaggcacccacggtggtctcctctgaccttcacacacgcgattcaacccacctcctccaccctcttgagacgctggggactggcacattgcccctcgcaacgagccaccttgtgtcaagcgtcattttcctggtaatgagcccagcgaaatttggctacacgccaacacgggtggtggagcctcactggcccaccactggccttcccacaggaagtaaagagcccctggagccacccacgcccccagcacagagcaaccacagaaggaaagagagaaaccctcacactgctggggaagtccctgccacactcagtctcccccacacaccactgaatttcccctcctcaccgttgcccatgtagaccccttgaagaggggaggggcctagggaaccgccccattgtcatgtacccatccaataaagtaccctgtgctctaacaca

SEQ ID NO: 636425 - DNA, 376 bp, Homo sapiens
gctgccatgggactttcagcccccagttgcttatccaaatgtgacagagctggacccaagccaggttgcacacttctggattgggataacctgctctccctgggaaagtcggccgagggcccaaagctgcttaggggtttgaggttggtgcccccccccaaaatagtgcgttttctgcccctccctgcccgcgtttcagggcctcggtccatagaaaacaccccccccatggccaggtggaagggtttattagtccctgccagcaactgtcctccctggtgcagttggcctggccagccccctggattggggacgggccaggctgggccaggtcgggggctcagtttgggaggtaataaaagcagtcccaccccca

SEQ ID NO: 636426 - DNA, 410 bp, Homo sapiens
gacagatgggtcggtatgatgcaggataggaggagagggatacacaggagcaggaatatcaggtggaagggatcttggtgagcatacagaaggcatagtcaacacacccagctttccttcagaaccacctcttttcatcagcccggaatctctataaatagtgctggactgccatgatctgatggtagctgtcagaggcatctggaactcatggccgggttaagaacaagtgggaaggtctcctttcccccttttctctttcttttacccttctcccctctctcttcctctcagccttacccccaactctagtctttcttggcttctagtgagcgagcaggagatgctctgagagtcaactgggaatgcagctgataagggtctgctgggtgcaggaaatgtcggaaggt

SEQ ID NO: 636427 - DNA, 115 bp, Homo sapiens
gtatatcgagcatgttgtgactacctacaatcacagaatgcagatacttaaaccactgaggaaggcagtagatcgaactagcatcccgatggataactagtaccgattcgtcccc

SEQ ID NO: 636428 - DNA, 116 bp, Homo sapiens
gaatcgagctcggtaccggtgcgtggggatgctggtacaagttgtgggactgcatgctactgtctagagcttgtctcaatggatctagaacttcatcgccccccccccaagtgcct

SEQ ID NO: 636429 - DNA, 221 bp, Homo sapiens
tccccagcctccagctgcagtacgtcccactgaccttcactccaccacgcagaccactgcaaggagttcctggaaggcctgccggtagctagcactgaagactatatattctattggtataagccgtccccttaaggggaagggaaatcaaatataatatttactcgttagacataaggaaatttaaggaaagagacagcttgcttaacagatagtcgcgc

SEQ ID NO: 636430 - DNA, 357 bp, Homo sapiens
cgactgtggtctgtgatgaggtgaaatgagatgcatgcagactctggtcccctgccaaagtgggctccaagaatgtcatccctgccctgggaactggtggatgccccattaagaatgcacgaggtccctggcaaagtctgactgtttacttgtgatggtgtgtgatattcctgcgtgaagcgaggctgaccaagtctgcattgactaacaacaacgactgatgaaagacaatactcgagcgcttttcgacaacaatgtgctcttaaagctgccgtaagtcccgtgtctggaatgagtgccagtgagcgttggtaggacactgtacaggcaggctctcatccttgtctcatccctgct

SEQ ID NO: 636431 - DNA, 183 bp, Homo sapiens
catatggggctggatcatcccctggagtgggacgtgtcatgtgcatagtagcatatatttagcaacatccctggactccctgcaccagatgccagatagcagtccccttcccccaagtagtgacaattaaaaaaatgtgtctagatgttgctagtgtccctggggagacagaagtggtccccg

SEQ ID NO: 636432 - DNA, 226 bp, Homo sapiens
cggctgactgagtctatatagaatcctgcctccttttacagagttagaaagagaatgccaaacactccaaaaccagatccaaatccagagtgagggatctattcaggccccagagtactgcacagagctatctgatggattctcagctcagttgcgactaattatagaaaagcctgttggaagacatgaattcagcagagggtgctattagtgcccagttggtacc

SEQ ID NO: 636433 - DNA, 140 bp, Homo sapiens
ctatttcgatacacggtgctataacgataccacggtgctatacgataccacggtgctataacgataccacggtgctataacagataccacggtgctataacgataccacggtgctataacgataccacggtgctataacg

SEQ ID NO: 636434 - DNA, 633 bp, Homo sapiens
gctgggtgcagtggcttgtgcctgtagtcccagctacttgggaggctgaggcaggagggttgcttgagactagcctaggtaacatagtgagaccctgtctcattaaaaaaaaaaaaaaaggcatggtggccgcactgtatcccagctactcaggagactgaggctaaagatcctttgaacctaggagtttgagaccacctgggcgatatagtgaggccccatctcaaaaaaaaaaaaaagcggggggggggagttggcgctgtgtttgaaattgggccgtgcagcccaaacaaacaaggggaactaggaccgacagtgactttcaccagtcttgttaggtcacacattgaggaggactggcggggctctgtcatacctgttgcttctacaagactcccttattttgactgtaaaaagctagcgctaatactcactgtgttctccaatcccaggtagccattggtagcagctgtgggttaggaggttgagcagctgccccaggatccaagttgtggtgctctgaactggcaagaacctagggcaacccaggaaaggccgctgatctgcctttataagcccagtcatctgaaaattcagggcctgcctgcaaggacaggaatcccccaaaaaaac

SEQ ID NO: 636435 - DNA, 365 bp, Homo sapiens
atcctctttgatcaacagcggaggcgcaaccttgataatgtcgccatgggttggcttgcccaagagtccattatctcgaagttgtagacacaccttccttctcgcgccagtcacaccttcaagaggtagcttcatgagttcttttctcaagataatgcccattttgtgcgcttttctcacgcaaggttttcttcttataaacctctcaagggttgcgatggccactcgacagcatagtggattgcccgtgtatgtggacccgtgctcctgtggtttaatggtcagcatgatgtctttatcacacagcagtgcagacacagggtatgagcccacagagaggctctttacgaggaggtatatctcag

SEQ ID NO: 636436 - DNA, 139 bp, Homo sapiens
atagaactagatgcaagaattgaacgtaattgcccctcgtgtaaacattttttcccaaaaaagttagcatcgaatcttggagtgcactacatgagttatgggaaggagcatactgaaataatggacacgaattgtttca

SEQ ID NO: 636437 - DNA, 1027 bp, Homo sapiens
  misc_feature (258)..(258): n is a, c, g, or t
catggctccagtggagcacgttgtggcggatgctggggctttcctgcggcagtgcggctctggaggagcatcgggaagaacatttacaccatccgggaggtggtcactgagattcgggacaaggccacacgcaggcggctcgctgtcctgccctacgagctgcggttcaaggagcccttaccgtgaatacgtgcggctgggttaaggtgagctcagtcgattcacgcacccgatgaaagcaccgtcgtgcacatttcntggtttccatcgtgcctctacaaggcctaagacccccacaacgaaacagaacacaaggatcactcagtcttgttgagcctgagtaacctggcaattgtgagttcctgtcatcgttactggatgacaacgcctttgctccaaacatacgagtcactgaatctgcgatggatgcgtagctgattgtacaggaggtgacggacgataccaaggtgagagaggcaggcagcgaggaacgaagaacgcggttgtgcacagacagcaaacaagatgacgagctgatgactgacaggggagtgggctggtatagaccccgcagtgagacatcagagcagaatcccagcacggagcctggagcacgtgtgacagtcccgcgacggacgctgctgggttggctagcctgtaccatcagacttcgcgcatgcgagaatgttcctgcgtgcagcatgggcgctgcaacgtgctaggacggtgaacaggcatgctagattccgtgatggcccgtagctacagtcttgctgctgccatgggctgtttcaaggacaacgtctggacatgagcgcgagtgttctgctcacacttgtgggaacaagatcctgaagaaaagtgtccgtgaccagtcagcgacgacggcacctgcacattgcacgttctccctgaacccaaggtgctgaaccccgaggctccggtactcgcttcccatcccaaagggggccaatacgcatcaaccccatctcaccgaggatccgcgcttccttcagtgcgattctcg

SEQ ID NO: 636438 - DNA, 259 bp, Homo sapiens
  misc_feature (44)..(44): n is a, c, g, or t
gggaaggctgaggcgacggctcacctctgaagtcgagaagtccngaagacccagtcctggactaacgtggcgaaaacctgtctctactaaaaatacaaaattagccgagtgtggtggcgcaggcctgtaatcccagctattcgggaggctgaggcaggagaatcgcttgaacccaggaggtagaggttgcggtgagccgagatcgcgccattgcactccagcctgggcgacaagagtgaaactctgtctcagaaaaaaa

SEQ ID NO: 636439 - DNA, 319 bp, Homo sapiens
cttcctcacaacattgctcaaaaatggccttcctcaggctcccagctgacatgtatccaccaggaatccactgctcttgtctcttgctgttctcccagcaggaccaggcttcggccgagaggcgggtgccctgagtaaatgggagaccatgactggattacagaccccgttctagggataagatcagagtcataggctggctaaagtaataaacagacctttttgttctctatgtcttttattcctactctctgccccaagaaaacagggttcccagaaaaatggggtttttacagcttttgactgcctggtaccccat

SEQ ID NO: 636440 - DNA, 215 bp, Homo sapiens
aaaattattgataagctgaatgaattaaaatttaagtataactaaggtagtatattttaaatgtgactgtacacatatgaaaatagtattctttctttaaaaaaaatcttgggcctggtcttgaactcctgggctcaagtggtctgcccacgtcagtctcccaaggtgctgagattataggcgtgagccaccgcacctgcctggtttctttactt

SEQ ID NO: 636441 - DNA, 157 bp, Homo sapiens
ctgagggctacctagagtatgctaaccctcagcagctcattagcatacaaaaggacgacacttttgaaatggtaagggttttaggagttgtatgtcaggaaacaggttgaagaccaaatatgtatttcacagtatcacagttacagctggaatttca

SEQ ID NO: 636442 - DNA, 735 bp, Homo sapiens
  misc_feature (41)..(41): n is a, c, g, or t
  misc_feature (63)..(63): n is a, c, g, or t
  misc_feature (207)..(207): n is a, c, g, or t
  misc_feature (218)..(218): n is a, c, g, or t
  misc_feature (229)..(229): n is a, c, g, or t
  misc_feature (294)..(294): n is a, c, g, or t
  misc_feature (321)..(321): n is a, c, g, or t
  misc_feature (349)..(350): n is a, c, g, or t
  misc_feature (356)..(356): n is a, c, g, or t
  misc_feature (359)..(359): n is a, c, g, or t
  misc_feature (372)..(372): n is a, c, g, or t
  misc_feature (395)..(395): n is a, c, g, or t
  misc_feature (398)..(398): n is a, c, g, or t
  misc_feature (402)..(402): n is a, c, g, or t
  misc_feature (406)..(406): n is a, c, g, or t
gggcgcgcgggtagtgaggcgtcgtccgtactggaggctanctcttgtcgcggcgcgggagtnacatcgtttccaatctgtccgcggtgcgcaccaagacagagccagaatgtcaggatgctgaacagcagttttgaggatgaccccttcttctctgagtccattcttgcaacccgagaaaatatgcgacagatgataagaagtttnctgaacccttnggaagagactngctcagtatctctgatggtagagggagagctcataatcgtagaggacataatgatggtgaagatncttgactcatacagatgtcagctcttnccagacaatggaccaaatggtgtcaccnnatgagnaanctatatgcagaanttagaaagaaacttcggtcaacnttncagntggntccaaatggacattcatttgggttctttcctcagttatgactttattccaaaattagggagatgaaccggcaaagttttttcagggcctcaactcaaaattcgtcgagctccccaggagcgcatttaacgggaaaacccggaaagcacttgagagatatctgacgggggcttaggaacaaatgggctatgggtcctcatttccatgaccgagctcatgtccttcacaagtcacgcaccacgtcagactgacttgaagaggcaaccagggtcaccactttgatggacgtagctcagctagatgggagggcactgcggttggggccacccg

SEQ ID NO: 636443 - DNA, 907 bp, Homo sapiens
  misc_feature (190)..(190): n is a, c, g, or t
cagagttatagaacgagaaacttccagtctatcaggtcacgaatgcaagaacacaagtcagatttgaaaggctacaaagcctggtgctgctcaacattaccagagcctgcaatctgcggagactcagtcgaatatgggtattcagtcatgatgcgtcggaatgaaaaattagcttctcgcactgattganatgcctatagtgacgtaactcttatatagtggctcatatttgagcacaagaaggaaattgctttctcagatcccactcctgatggaaagctgtttgcaacacagtactgtggcactggtcaatttctggtatataattttcattattggcacagaatagcacgtacaagacaaattcttgcctacaccactagaagacttctattgcacgagaatggattggttgctgactttaaccaggaactagggccattctgattcacacatgaactcaggactggcaactaaccatatggttcgttccattttcagtaaacattggaaacaatgcagtaatagcttattgttgtggttgttcttgaaagaagatatttcattatcttttacagaaatttatgattgatgtattttatctatagttatttagacatgtttacttgcatgcagataattcgttcatagtggactgaaaactaatgcaaggactatggtctcagtgataagtatatttcgaagttcttaatatggcaatataccagtgtacgcttggtactgtattgttgtataattgatctgctgataccagtgataggcttacagatcgtatttgcacagagtggaaagcactttccaagttattgtccaggagggtgcactattaagtgtcgggaattcgaagcttatctcacaggcctgaacaatatttgaagaaccccta

SEQ ID NO: 636444 - DNA, 389 bp, Homo sapiens
  misc_feature (72)..(72): n is a, c, g, or t
taagcagcagtgtctgcctcaagaaagaaaaaaaaaaacttttcaaatatacttaatacatgaaaatactcncgatgcaaaataagaaaatagttatgggcccagcacggtggctcacgcctgtaatcccagcactttgggaggccaaggcaggtggatctcttgaggccaggagttcgagaccagcctggccatcatggtgaaaccccatctctactaaaagtacaaaaattagctgggcatggtgacatgcacctgtaatcccagctatgcagaaggctgaggcaggagaattacctgaacccaggaggtggaggttgcagtgagctgagatagcgccactgcactccagcctgaaccacacagcaagactctgtctcagaaaagaa

SEQ ID NO: 636445 - DNA, 170 bp, Homo sapiens
  misc_feature (57)..(57): n is a, c, g, or t
  misc_feature (145)..(145): n is a, c, g, or t
tttttttttcctaaggtattttagccatccttatttcttcttttcagaatggtatantcctgttgtatatccattttgatatcttaatgatttataaccctttataaaaatagaatgagtgctaatcctttgttatgtgtactanaaatacatatttttttccagtctga

SEQ ID NO: 636446 - DNA, 206 bp, Homo sapiens
tgtgtagacgggttctcacagatgttggtgtgcgtggtcttggaactaccgtggctcgtgattcggcccacttcggctcccgtgtagtgtggattacaggcatagagactactgcgacccaagcgatttagtattttaagtagagacgaggtacacctacgttggtcagcctggtcttgaactcctgatctcaagtgatccgccca

SEQ ID NO: 636447 - DNA, 465 bp, Homo sapiens
  misc_feature (405)..(405): n is a, c, g, or t
aggatccatatatatttagtgggaattataccaatacggtatgtgactttggagtcgggctggtttcacttaaggtaaggttttcaaggttcattcaggtggtagcatgtataaatacttggttcatacagatgtggcatatctggttaagtttatctaaggtattttattagtactgaatcttttaagataataggttggttatttatttatattcaatcatctcacttctcttacggttggccaggatttcttagtggaggctctggaattttcacctccttacttttcttatttaagacttcggtttcttctaactccacgggctagtacctctagaacaaggttaactaagtgtgataaggacatccctattgtgtttcttttctttttaggttttgggtntgagacggagtctcactctgtcgctaggctgcagaacgagacaccgtctccaaaaaaaaa

SEQ ID NO: 636448 - DNA, 694 bp, Homo sapiens
atgcaaaaaaaaaaaataaaaaatttaaaaaaaaaaaaaaaaaaaaaaaaaaaaaaaaaaaaaaaaaaaaaaaaaaaaaaaaaaaaaaaaaaaaaaaaaaaaaaaaaaaaaaaaaaaaaaataaaaaaaaaaaaaaataaaaggaaaaaaataaaaaaaaaaaaaaaaaaaaatttttcggcccctttcccccaatatcctttaaattttgccaactttttcccttggccccaaattcgggtttatttggccaaattccccttttagggggcccttaccaaaaaacgtgcccagcttttaaaaaccctgaatggggaaaacccttgggtaccccaaatatatggctttgggaaaaattccctttttgccaaatggggtaatttttaaagagccccccccaaagggctttaccaaaatttggcgccctcaaatggccatgggaaattttaagcggtaaattttttttaaaaagcgggcaaaatttttggaaaaagaacttcatttttaacccatgggcccaaatttgcaaaaccctttttaaaataaaagaaatctccccttaagggtttattgggtccccaatttgcaaaaagaccccttttaaaaactcggggctcccacttaaaagggcaaccctttttctgggggggcccatattggactctatccctcagttttttgggttggggttccc

SEQ ID NO: 636449 - DNA, 3613 bp, Homo sapiens
  misc_feature (1113)..(1113): n is a, c, g, or t
agcggatgcgctgtgcgcccggccggcgtggctggctgtttgaggactgcgcgcggagctccgtggcgggtgtctgaagtcgtgagtttactgcttgtaaggaacatagcgatcactgggaacctggaagtagagactcctttctgccatccatccgtccctcgggctgctgcgaatccccccgccggcctccaggaccccgggctgactgaacgcccgcaccggtcccgccgccccagggcccgctacgcgcccggcataatgggagaaaaatcacgacggaaaggcccagcccctcgccatgcagacgggaagcttggccgcacgtgtgatcacccttacgccccttggagtttcaccccctcttcgcgggctccaacagcctgggtcaggcctccttgtcctgtgtgggcctctcggctgcaagaacacagtcccgagccccggcgagcccgcgcgcctcccacccgccgtgcacaggctgcactttacgccccagcactgcgcctgcgggaccatctggatcgcttttccattctgatgacgtcctgtacttcgtggctgcaggctcctcaagccccaggtctgtgcagagacgagcaaagcagcagaatatccgtgccacagctttctggagcacccattttactaccagatttggaaggaacgaagttaagtaatttccaggaatcatctcccctgccccacaaacatgaaagaaaagacaagagaagcaccccagaagaggaggggagaagtgccccagaaaaaatcatccagtctctgaagctttgcccaggtgggcacaggccagccagcctctcctctggttgcccagctggctgcaggctgtcatttaaccttccgcccagcatgcttttgagtgtgcagaagtgctgcatgccctcttctttgaaaacctgttgagcaaatgcctccgcattttatgcaccttcaacctccacagccaaaggcccccaagaccaaacatgctgtgcacacacagcagctctttgtgtcccactcctggccgatctcctgcatcatctcgttgagcttcattgaaccccgcagtctgcatgctctgtggaactcagggtcttcattttgcangaaactcagggtcttcattttccgtggaactcaaagtcttcttgctctgtggaacttggagtctcagggcctttgtgctccatggaacttggggtctgtgtgattcatggaactcagaatccttgtgctctgtggtactcagggtgtgcgtgctctgtggaactcggggtctgcatgctccatggaaagcaccaggatgcacttgaccccccacacccatacatacatccttcattttattcctggccctcacctgtccactctgtgaggcttcttcacccccactctcctttgagctcatgccgggtctttcagactggcctgaagcatgggtgttcgtaggggggagtggctgatgtcacaccttcaggcaaattctgctagtgtcacacctgatggagctgcctagggaggatgtttccttggaggatgcgccctggcagccactggcttcttacggtgcctgcactgctgctgctgccatgggggtgccacagggccacactgggggctgttctggaattggtggttttcatttccaggttaggtagggactggcaggcaccttggctgtccttgtggcttctgtcttgaccctggtcctccccaggcagctgattttctgggctgctgctcttccaggaagaattaaaggtgggaatggctgaaacctcagctttggattcacagagaccctaggctgtgtcatgcagaaagggaaaggattgcagatggtggtgggatcagccgaaggcagggccttcactgtgatgctggagccctccatgctgggatgtttgcatacagcccaggttcagttcggtggtccatcagcgagtcctggatctggtctcactcacaagccatggacaacatgagctcagtttgccaggactcttggggttagggagagctcagcatccgggtggctctggttccttctcatgctgaaactctgctggtgttcctccatggggcaaatgtgggtttttctgaggtgcccctcttgctggagttgaggatgagaaatgttttcagtgggtttgcaccctccacacatatgtaagaggtgttgtgtttcattcctgtcaggatccattgctgcagcttcctgaagttgtgtccgttaaaaggcagggacccggtgtccaggctacagagggtgactccaggttccacaccaccactgtggaccagtgtgcctatggacttaggagagttcccagatcgcacaagggggctgccccagagggtgttcagcttgttgccaacagttgctgaagccaaagtctgcaaccttgatgttcaggtcaagtagccagaaacaggtgttctggctttaggtccctgtggacaatgccattctctccttcccaggctactgatgtcctgggttgctcctcttatggtagaagctcaagatggaatggctggagcttggctgcctccggttagagcctgggctctgtattgcagacatcacctggcagaattcctcatgggccccttttgtcgtgggtgcgactgctgggccagggttgtcgtgggtagtaaaggtatttaccaagacaaccgtgagtaaagaaaggcaaatttattacagaaactatgaaaatacattgcaagaatgcaacatgcagcacagcagagaaggggctgtctgcaaagataaagggctggagggaagttttctaaggttgtgctggacggcgctatgtgcaggtgagcttgtgctatatgctaagaatatgttggaataattttaactgccagacctttcctcttctggtgcccgagggaaacgccctgctgcttttagctgtcttgtaacccacacgccttttcacttctgaagttgcaagaataacggctgtggtttttcacacaaaagggttgcagactgggttaggtccctgttccgccaacctggctgtttcccagtttcagttaacttagtggtttactagagccccacacctttctctttcatatggccatgatccaggaggtaatccgtcacctcccctccactagagtgctccatggccagggataatccgtcacctcccctccaccagagtgctccatggccaggggtaatcctcacctctcctccgctagagtgttccatggccaggcagtgtttcctgggtccagagcacctcaaacaatttcagtgttgtggtgactcagggccttcaccatacagacttgacagcatagtctagaggctggaggggctctgtgactcccattaatgacagtcactgccacggtttccccaggcaggatgtgccaggagaactgctccatgttggctcagcagaatgttattataggtagctcaaaaagagagggaacagggcttctctagattatttcagggaacgagctattatttgaatgttaatttaagactattttatcaattaaaaatgtaaggcccaagaaacttcagtgaggaagaatgaacaaattgaataaatactgttaaacttta

SEQ ID NO: 636450 - DNA, 413 bp, Homo sapiens
  misc_feature (150)..(150): n is a, c, g, or t
  misc_feature (182)..(182): n is a, c, g, or t
  misc_feature (187)..(187): n is a, c, g, or t
  misc_feature (212)..(212): n is a, c, g, or t
  misc_feature (278)..(278): n is a, c, g, or t
  misc_feature (295)..(295): n is a, c, g, or t
  misc_feature (309)..(309): n is a, c, g, or t
  misc_feature (402)..(402): n is a, c, g, or t
agtgtcatggaggcctacgagcaggtccaaaagggacccctgaagctgaaaggcgtcgcagagctgggagtgaccaagcggtgaggcccgagggcccgcgggattccgtcttcatcccccttagaccttttctcgggacccctggccctnatcctccgaccggccgcctcctcatgtctttntccangaaaaagaaaaagaaggacaaaganaaagcgaaactcctggaagcaatgggaacgagcaaaaagaccgagagagagagaagcaacacggcntggaaaagaggaccccnacccaggcagcctncgagaaatgcaggagaagcggcaaatggaagaatcctaaagaaggcatccaaaacccacaagcagaagtggaggacttcaacagacacctggncacactcacag

SEQ ID NO: 636451 - DNA, 3707 bp, Homo sapiens
  misc_feature (777)..(777): n is a, c, g, or t
  misc_feature (1207)..(1207): n is a, c, g, or t
agcggatgcgctgtgcgcccggccggcgtggctggctgtttgaggactgcgcgcggagctccgtggcgggtgtctgaagtcgtgagtttactgcttgtaaggaacatagcgatcactgggaacctggaagtagagactcctttctgccatccatccgtccctcgggctgctgcgaatccccccgccggcctccaggaccccgggctgactgaacgcccgcaccggtcccgccgccccagggcccgctacgcgcccggcataatgggagaaaaatcacgacggaaaggcccagcccctcgccatgcagacgggaagcttggccgcacgtgtgatcacccttacgccccttggagtttcaccccctcttcgcgggctccaacagcctgggtcaggcctccttgtcctgtgtgggcctctcggctgcaagaacacagtcccgagccccggcgagcccgcgcgcctcccacccgccgtgcacaggctgcactttacgccccagcactgcgcctgcgggaccatctggatcgcttttccattctgatgacgtcctgtacttcgtggctgcaggctcctcaagccccaggtctgtgcagagacgagcaaagcagcagaatatccgtgccacagctttctggagcacccattttactaccagatttggaaggaacgaagttaagtaatttccaagagatggggtctcactctattgtccaggctgatcttgaactcctagcctcaaacaatcctcctgccttcagcctccccaagtgcggtatnacaggaatcatctcccctgccccacaaacatgaaagaaaagacaagagaagcaccccagaagaggaggggagaagtgccccagaaaaaatcatccagtctctgaagctttgcccaggtgggcacaggccagccagcctctcctctggttgcccagctggctgcaggctgtcatttaaccttccgcccagcatgcttttgagtgtgcagaagtgctgcatgccctcttctttgaaaacctgttgagcaaatgcctccgcattttatgcaccttcaacctccacagccaaaggcccccaagaccaaacatgctgtgcacacacagcagctctttgtgtcccactcctggccgatctcctgcatcatctcgttgagcttcattgaaccccgcagtctgcatgctctgtggaactcagggtcttcattttgcangaaactcagggtcttcattttccgtggaactcaaagtcttcttgctctgtggaacttggagtctcagggcctttgtgctccatggaacttggggtctgtgtgattcatggaactcagaatccttgtgctctgtggtactcagggtgtgcgtgctctgtggaactcggggtctgcatgctccatggaaagcaccaggatgcacttgaccccccacacccatacatacatccttcattttattcctggccctcacctgtccactctgtgaggcttcttcacccccactctcctttgagctcatgccgggtctttcagactggcctgaagcatgggtgttcgtaggggggagtggctgatgtcacaccttcaggcaaattctgctagtgtcacacctgatggagctgcctagggaggatgtttccttggaggatgcgccctggcagccactggcttcttacggtgcctgcactgctgctgctgccatgggggtgccacagggccacactgggggctgttctggaattggtggttttcatttccaggttaggtagggactggcaggcaccttggctgtccttgtggcttctgtcttgaccctggtcctccccaggcagctgattttctgggctgctgctcttccaggaagaattaaaggtgggaatggctgaaacctcagctttggattcacagagaccctaggctgtgtcatgcagaaagggaaaggattgcagatggtggtgggatcagccgaaggcagggccttcactgtgatgctggagccctccatgctgggatgtttgcatacagcccaggttcagttcggtggtccatcagcgagtcctggatctggtctcactcacaagccatggacaacatgagctcagtttgccaggactcttggggttagggagagctcagcatccgggtggctctggttccttctcatgctgaaactctgctggtgttcctccatggggcaaatgtgggtttttctgaggtgcccctcttgctggagttgaggatgagaaatgttttcagtgggtttgcaccctccacacatatgtaagaggtgttgtgtttcattcctgtcaggatccattgctgcagcttcctgaagttgtgtccgttaaaaggcagggacccggtgtccaggctacagagggtgactccaggttccacaccaccactgtggaccagtgtgcctatggacttaggagagttcccagatcgcacaagggggctgccccagagggtgttcagcttgttgccaacagttgctgaagccaaagtctgcaaccttgatgttcaggtcaagtagccagaaacaggtgttctggctttaggtccctgtggacaatgccattctctccttcccaggctactgatgtcctgggttgctcctcttatggtagaagctcaagatggaatggctggagcttggctgcctccggttagagcctgggctctgtattgcagacatcacctggcagaattcctcatgggccccttttgtcgtgggtgcgactgctgggccagggttgtcgtgggtagtaaaggtatttaccaagacaaccgtgagtaaagaaaggcaaatttattacagaaactatgaaaatacattgcaagaatgcaacatgcagcacagcagagaaggggctgtctgcaaagataaagggctggagggaagttttctaaggttgtgctggacggcgctatgtgcaggtgagcttgtgctatatgctaagaatatgttggaataattttaactgccagacctttcctcttctggtgcccgagggaaacgccctgctgcttttagctgtcttgtaacccacacgccttttcacttctgaagttgcaagaataacggctgtggtttttcacacaaaagggttgcagactgggttaggtccctgttccgccaacctggctgtttcccagtttcagttaacttagtggtttactagagccccacacctttctctttcatatggccatgatccaggaggtaatccgtcacctcccctccactagagtgctccatggccagggataatccgtcacctcccctccaccagagtgctccatggccaggggtaatcctcacctctcctccgctagagtgttccatggccaggcagtgtttcctgggtccagagcacctcaaacaatttcagtgttgtggtgactcagggccttcaccatacagacttgacagcatagtctagaggctggaggggctctgtgactcccattaatgacagtcactgccacggtttccccaggcaggatgtgccaggagaactgctccatgttggctcagcagaatgttattataggtagctcaaaaagagagggaacagggcttctctagattatttcagggaacgagctattatttgaatgttaatttaagactattttatcaattaaaaatgtaaggcccaagaaacttcagtgaggaagaatgaacaaattgaataaatactgttaaacttta

SEQ ID NO: 636452 - DNA, 3693 bp, Homo sapiens
  misc_feature (1113)..(1113): n is a, c, g, or t
agcggatgcgctgtgcgcccggccggcgtggctggctgtttgaggactgcgcgcggagctccgtggcgggtgtctgaagtcgtgagtttactgcttgtaaggaacatagcgatcactgggaacctggaagtagagactcctttctgccatccatccgtccctcgggctgctgcgaatccccccgccggcctccaggaccccgggctgactgaacgcccgcaccggtcccgccgccccagggcccgctacgcgcccggcataatgggagaaaaatcacgacggaaaggcccagcccctcgccatgcagacgggaagcttggccgcacgtgtgatcacccttacgccccttggagtttcaccccctcttcgcgggctccaacagcctgggtcaggcctccttgtcctgtgtgggcctctcggctgcaagaacacagtcccgagccccggcgagcccgcgcgcctcccacccgccgtgcacaggctgcactttacgccccagcactgcgcctgcgggaccatctggatcgcttttccattctgatgacgtcctgtacttcgtggctgcaggctcctcaagccccaggtctgtgcagagacgagcaaagcagcagaatatccgtgccacagctttctggagcacccattttactaccagatttggaaggaacgaagttaagtaatttccaggaatcatctcccctgccccacaaacatgaaagaaaagacaagagaagcaccccagaagaggaggggagaagtgccccagaaaaaatcatccagtctctgaagctttgcccaggtgggcacaggccagccagcctctcctctggttgcccagctggctgcaggctgtcatttaaccttccgcccagcatgcttttgagtgtgcagaagtgctgcatgccctcttctttgaaaacctgttgagcaaatgcctccgcattttatgcaccttcaacctccacagccaaaggcccccaagaccaaacatgctgtgcacacacagcagctctttgtgtcccactcctggccgatctcctgcatcatctcgttgagcttcattgaaccccgcagtctgcatgctctgtggaactcagggtcttcattttgcangaaactcagggtcttcattttccgtggaactcaaagtcttcttgctctgtggaacttggagtctcagggcctttgtgctccatggaacttggggtctgtgtgattcatggaactcagaatccttgtgctctgtggtactcagggtgtgcgtgctctgtggaactcggggtctgcatgctccatggaaagcaccaggatgcacttgaccccccacacccatacatacatccttcattttattcctggccctcacctgtccactctgtgaggcttcttcacccccactctcctttgagctcatgccgggtctttcagactggcctgaagcatgggtgttcgtaggggggagtggctgatgtcacaccttcaggcaaattctgctagtgtcacacctgatggagctgcctagggaggatgtttccttggaggatgcgccctggcagccactggcttcttacggtgcctgcactgctgctgctgccatgggggtgccacagggccacactgggggctgttctggaattggtggttttcatttccaggttaggtagggactggcaggcaccttggctgtccttgtggcttctgtcttgaccctggtcctccccaggcagctgattttctgggctgctgctcttccaggaagaattaaaggtgggaatggctgaaacctcagctttggattcacagagaccctaggctgtgtcatgcagaaagggaaaggattgcagatggtggtgggatcagccgaaggcagggccttcactgtgatgctggagccctccatgctgggatgtttgcatacagcccaggttcagttcggtggtccatcagcgagtcctggatctggtctcactcacaagccatggacaacatgagctcagtttgccaggactcttggggttagggagagctcagcatccgggtggctctggttccttctcatgctgaaactctgctggtgttcctccatggggcaaatgtgggtttttctgaggtgcccctcttgctggagttgaggatgagaaatgttttcagtgggtttgcaccctccacacatatgtaagaggtgttgtgtttcattcctgtcaggatccattgctgcagcttcctgaagttgtgtccgttaaaaggcagggacccggtgtccaggctacagagggtgactccaggttccacaccaccactgtggaccagtgtgcctatggacttaggagagttcccagatcgcacaagggggctgccccagagggtgttcagcttgttgccaacagttgctgaagccaaagtctgcaaccttgatgttcaggtcaagtagccagaaacaggtgttctggctttaggtccctgtggacaatgccattctctccttcccaggctactgatgtcctgggttgctcctcttatggtagaagctcaagatggaatggctggagcttggctgcctccggttagagcctgggctctgtattgcagacatcacctggcagaattcctcatgggccccttttgtcgtgggtgcgactgctgggccagggttgtcgtgggtagtaaaggtatttaccaagacaaccgtgagtaaagaaaggcaaatttattacagaaactatgaaaatacattgcaagaatgcaacatgcagcacagcagagaaggggctgtctgcaaagataaagggctggagggaagttttctaaggttgtgctggacggcgctatgtgcaggtgagcttgtgctatatgctaagaatatgttggaataattttaactgccagacctttcctcttctggtgcccgagggaaacgccctgctgcttttagctgtcttgtaacccacacgccttttcacttctgaagttgcaagaataacggctgtggtttttcacacaaaagggttgcagactgggttaggtccctgttccgccaacctggctgtttcccagtttcagttaacttagtggtttactagagccccacacctttctctttcatatggccatgatccaggaggtaatccgtcacctcccctccactagagtgctccatggccagggataatccgtcacctcccctccaccagagtgctccatggccaggggtaatcctcacctctcctccgctagagtgttccatggccaggcagtgtttcctgggtccagagcacctcaaacaatttcagtgttgtggtgactcagggccttcaccatacagacttgacagcatagtctagaggctggaggggctctgtgactcccattaatgacagtcactgccacggtttccccaggcaggatgtgccaggagaactgctccatgttggctcagcagaatgttattataggtagctcaaaaagagagggaacagggcttctctagattatttcagggaacgagctattatttgaatgttaatttaagactattttatcaattaaaaatgtaaggcccaagaaacttcagtgaggaagaatgaacaaattgaataaatactgttaaactttaaaagtaaaatcagaaaaacttcaagggggggcccgggtcccaaattcggccttatagtggagcggttttaccattcaatg

SEQ ID NO: 636453 - DNA, 4282 bp, Homo sapiens
  misc_feature (1113)..(1113): n is a, c, g, or t
  misc_feature (3659)..(3659): n is a, c, g, or t
  misc_feature (3679)..(3679): n is a, c, g, or t
  misc_feature (3681)..(3681): n is a, c, g, or t
  misc_feature (3686)..(3686): n is a, c, g, or t
  misc_feature (3691)..(3691): n is a, c, g, or t
  misc_feature (3694)..(3694): n is a, c, g, or t
  misc_feature (3714)..(3714): n is a, c, g, or t
  misc_feature (3717)..(3717): n is a, c, g, or t
  misc_feature (3723)..(3723): n is a, c, g, or t
  misc_feature (4271)..(4271): n is a, c, g, or t
agcggatgcgctgtgcgcccggccggcgtggctggctgtttgaggactgcgcgcggagctccgtggcgggtgtctgaagtcgtgagtttactgcttgtaaggaacatagcgatcactgggaacctggaagtagagactcctttctgccatccatccgtccctcgggctgctgcgaatccccccgccggcctccaggaccccgggctgactgaacgcccgcaccggtcccgccgccccagggcccgctacgcgcccggcataatgggagaaaaatcacgacggaaaggcccagcccctcgccatgcagacgggaagcttggccgcacgtgtgatcacccttacgccccttggagtttcaccccctcttcgcgggctccaacagcctgggtcaggcctccttgtcctgtgtgggcctctcggctgcaagaacacagtcccgagccccggcgagcccgcgcgcctcccacccgccgtgcacaggctgcactttacgccccagcactgcgcctgcgggaccatctggatcgcttttccattctgatgacgtcctgtacttcgtggctgcaggctcctcaagccccaggtctgtgcagagacgagcaaagcagcagaatatccgtgccacagctttctggagcacccattttactaccagatttggaaggaacgaagttaagtaatttccaggaatcatctcccctgccccacaaacatgaaagaaaagacaagagaagcaccccagaagaggaggggagaagtgccccagaaaaaatcatccagtctctgaagctttgcccaggtgggcacaggccagccagcctctcctctggttgcccagctggctgcaggctgtcatttaaccttccgcccagcatgcttttgagtgtgcagaagtgctgcatgccctcttctttgaaaacctgttgagcaaatgcctccgcattttatgcaccttcaacctccacagccaaaggcccccaagaccaaacatgctgtgcacacacagcagctctttgtgtcccactcctggccgatctcctgcatcatctcgttgagcttcattgaaccccgcagtctgcatgctctgtggaactcagggtcttcattttgcangaaactcagggtcttcattttccgtggaactcaaagtcttcttgctctgtggaacttggagtctcagggcctttgtgctccatggaacttggggtctgtgtgattcatggaactcagaatccttgtgctctgtggtactcagggtgtgcgtgctctgtggaactcggggtctgcatgctccatggaaagcaccaggatgcacttgaccccccacacccatacatacatccttcattttattcctggccctcacctgtccactctgtgaggcttcttcacccccactctcctttgagctcatgccgggtctttcagactggcctgaagcatgggtgttcgtaggggggagtggctgatgtcacaccttcaggcaaattctgctagtgtcacacctgatggagctgcctagggaggatgtttccttggaggatgcgccctggcagccactggcttcttacggtgcctgcactgctgctgctgccatgggggtgccacagggccacactgggggctgttctggaattggtggttttcatttccaggttaggtagggactggcaggcaccttggctgtccttgtggcttctgtcttgaccctggtcctccccaggcagctgattttctgggctgctgctcttccaggaagaattaaaggtgggaatggctgaaacctcagctttggattcacagagaccctaggctgtgtcatgcagaaagggaaaggattgcagatggtggtgggatcagccgaaggcagggccttcactgtgatgctggagccctccatgctgggatgtttgcatacagcccaggttcagttcggtggtccatcagcgagtcctggatctggtctcactcacaagccatggacaacatgagctcagtttgccaggactcttggggttagggagagctcagcatccgggtggctctggttccttctcatgctgaaactctgctggtgttcctccatggggcaaatgtgggtttttctgaggtgcccctcttgctggagttgaggatgagaaatgttttcagtgggtttgcaccctccacacatatgtaagaggtgttgtgtttcattcctgtcaggatccattgctgcagcttcctgaagttgtgtccgttaaaaggcagggacccggtgtccaggctacagagggtgactccaggttccacaccaccactgtggaccagtgtgcctatggacttaggagagttcccagatcgcacaagggggctgccccagagggtgttcagcttgttgccaacagttgctgaagccaaagtctgcaaccttgatgttcaggtcaagtagccagaaacaggtgttctggctttaggtccctgtggacaatgccattctctccttcccaggctactgatgtcctgggttgctcctcttatggtagaagctcaagatggaatggctggagcttggctgcctccggttagagcctgggctctgtattgcagacatcacctggcagaattcctcatgggccccttttgtcgtgggtgcgactgctgggccagggttgtcgtgggtagtaaaggtatttaccaagacaaccgtgagtaaagaaaggcaaatttattacagaaactatgaaaatacattgcaagaatgcaacatgcagcacagcagagaaggggctgtctgcaaagataaagggctggagggaagttttctaaggttgtgctggacggcgctatgtgcaggtgagcttgtgctatatgctaagaatatgttggaataattttaactgccagacctttcctcttctggtgcccgagggaaacgccctgctgcttttagctgtcttgtaacccacacgccttttcacttctgaagttgcaagaataacggctgtggtttttcacacaaaagggttgcagactgggttaggtccctgttccgccaacctggctgtttcccagtttcagttaacttagtggtttactagagccccacacctttctctttcatatggccatgatccaggaggtaatccgtcacctcccctccactagagtgctccatggccagggataatccgtcacctcccctccaccagagtgctccatggccaggggtaatcctcacctctcctccgctagagtgttccatggccaggcagtgtttcctgggtccagagcacctcaaacaatttcagtgttgtggtgactcagggccttcaccatacagacttgacagcatagtctagaggctggaggggctctgtgactcccattaatgacagtcactgccacggtttccccaggcaggatgtgccaggagaactgctccatgttggctcagcagaatgttattataggtagctcaaaaagagagggaacagggcttctctagattatttcagggaacgagctattatttgaatgttaatttaagactattttatcaattaaaaatgtaaggcccaagaaacttcagtgaggaagaatgaacaaattgaataaatactgttaaactttatgcttctttcagcaaatattttctgctcgtctctatgagtcaggcnctttgctagataacatacananaaacntagcntcnatccaatatggtgtgggtantgnatgtcnaatttaaaaataaaagtgctatataagaaacctctcagtgccctggaggcagggtccagagacatatcctgtggatgactggggctgaggtttaagggatgagcctcggtgatgagacagacgggagagggcaccctaggaaaagcgtcttcaggcaatcgtggttcagtgagctgcagccgtcgcgcaggagattgaggagcgcggcctatctggtgatttgctgtggttatgttctgtaaactcgccttgggtcctgaagtattgcttctggggaaacacagggtaaggttcctgcaagcctctggttgcaatattttcaactgccaaggcaccattcatgttccatgggttcattttccaacatccctgtaaaacaaggcagtcccatcagtgttgaaaactgctctccacatacccttttcccgtagagtacttcctgatctacagagctgccactcctgaaaagctaacactttccatgccatgctgccttttgaaaggtgccagccaggcagcattagctaaggcctcttttttgggttttncttcaacaaca

SEQ ID NO: 636454 - DNA, 758 bp, Homo sapiens
  misc_feature (39)..(39): n is a, c, g, or t
  misc_feature (46)..(46): n is a, c, g, or t
  misc_feature (278)..(279): n is a, c, g, or t
  misc_feature (281)..(281): n is a, c, g, or t
  misc_feature (283)..(283): n is a, c, g, or t
  misc_feature (285)..(286): n is a, c, g, or t
  misc_feature (288)..(291): n is a, c, g, or t
  misc_feature (296)..(296): n is a, c, g, or t
  misc_feature (298)..(298): n is a, c, g, or t
  misc_feature (310)..(310): n is a, c, g, or t
  misc_feature (376)..(376): n is a, c, g, or t
  misc_feature (407)..(407): n is a, c, g, or t
  misc_feature (417)..(417): n is a, c, g, or t
  misc_feature (438)..(438): n is a, c, g, or t
  misc_feature (454)..(454): n is a, c, g, or t
  misc_feature (457)..(457): n is a, c, g, or t
  misc_feature (459)..(459): n is a, c, g, or t
  misc_feature (461)..(461): n is a, c, g, or t
  misc_feature (464)..(464): n is a, c, g, or t
  misc_feature (466)..(466): n is a, c, g, or t
  misc_feature (471)..(471): n is a, c, g, or t
  misc_feature (473)..(473): n is a, c, g, or t
  misc_feature (476)..(476): n is a, c, g, or t
  misc_feature (492)..(492): n is a, c, g, or t
  misc_feature (496)..(499): n is a, c, g, or t
  misc_feature (512)..(512): n is a, c, g, or t
  misc_feature (515)..(515): n is a, c, g, or t
  misc_feature (521)..(521): n is a, c, g, or t
  misc_feature (530)..(530): n is a, c, g, or t
  misc_feature (535)..(535): n is a, c, g, or t
  misc_feature (540)..(540): n is a, c, g, or t
  misc_feature (544)..(544): n is a, c, g, or t
  misc_feature (560)..(560): n is a, c, g, or t
  misc_feature (584)..(584): n is a, c, g, or t
  misc_feature (587)..(587): n is a, c, g, or t
  misc_feature (597)..(597): n is a, c, g, or t
  misc_feature (607)..(607): n is a, c, g, or t
  misc_feature (609)..(609): n is a, c, g, or t
  misc_feature (618)..(618): n is a, c, g, or t
  misc_feature (623)..(623): n is a, c, g, or t
  misc_feature (633)..(633): n is a, c, g, or t
  misc_feature (648)..(648): n is a, c, g, or t
  misc_feature (660)..(660): n is a, c, g, or t
  misc_feature (662)..(662): n is a, c, g, or t
  misc_feature (669)..(669): n is a, c, g, or t
  misc_feature (671)..(671): n is a, c, g, or t
gggcctggcggctcctgcaggatcatgcagctggggcgnggcggcnggcatgcgacaccccaaccccagccctctaatcaagtcacgtgattctcccttcaccccgcccccagggcttcccttctgccccaggggggttcccggtggcttcaagttggggattggttaaaaataatctcggtataatatactttgaagttgaagacgtctgtgcctagcaatatttccagttgaccaaatattctaatcttttttcatttatatgcaaaagaaatagnntnangnnannnnttatngnaagagatacaangggaagagtgtaatctaaacttccttgtggtattaccttgtatgctgttacttttattttattccntgtaattaagtcacaggcaggacccagtttncagagagcangcggggcgcccagtgggtcangcacagggagcccggnccnancntanangcccngngcnttcaggaaagggcggncgtnnnncgtcctggaacgnctncgggtngcctacacnaggcnttaanctgnagtcgctagaaaactngctctcaaacttcagggtttttcntcnctcaaatttnggaccaaagncncattccggngtttngcctgcctcngatgctgggacccgnaaggcgggcgcncnggtcttngngctctttctagcgcccccgggtcctgtcccgggggctccccaggaccccctttccgaaaaagcgtgaacaagggggtaaatttttat

SEQ ID NO: 636455 - DNA, 601 bp, Homo sapiens
ggtggtttgcttaggcgcagacggggaagcggagccatagcatggcagtgggccgagagctgggtttgtctgcaaaacttactgtgagcccgcggagacctcattcgacgaaatctcgtctcgaccgaagagctgaacgctgagtcgggcgagtattggcgctccgcgatagcaaactgtgaggtctcggacgggtcgaatttacccgtggtcaagatccggctaaggccgcaccgggaaactgctggacgcttgatggagaaggacccacagagcgtctgttctgaacggcaagcagccctgctgcaggcgtgctgtgtccgctattgtgcggtgctgtgactgacgggcaaagatgacatgctggacttaacatccgtgaggacctgtaacgactacgaagggattctactctacgacgcagatcagctctgcgagaactccatgggtctctcagagctagggactttagggccaaacggtccaatactcgaacaactgcttcggcgattgcttagatacccggcaagtcaggccactactcaagcaccttccggaacgggtggaatcggggtggtgaaacctcgagcccaagaagggg

SEQ ID NO: 636456 - DNA, 355 bp, Homo sapiens
  misc_feature (1)..(1): n is a, c, g, or t
ntgtgtagtcccggcatccatgagacgtgattctcttcacacccggctttctctacatgagggttctatagacgtgaacaacctacagctcgtcattaagggtttctaactcggcggctgagacttattaaatgtcttgcagacacatctctaacaagcactccataagagcctcctccttattgaatacctccgtcgtgttccttcggtcccgcaccgcccggtcgagtgccatagcagcaccttttccaaggacgtgtttggtgtgcattacatatcttctccctcggctcccatgtttctctgaaactcccggtatgaagcctcgttaagacatcatacagtctcaaactct

SEQ ID NO: 636457 - DNA, 110 bp, Homo sapiens
cagtcttcctgcaggatcattaactttgaaccacactgtctacggaggctgccatctgatgagaatactctatcgcccctatcagaattttcagaagttggactaacgca

SEQ ID NO: 636458 - DNA, 504 bp, Homo sapiens
tcaagatggcggttggggggtgctcatttactcagcctgcccctgtctacccctcatgagagggagcatgtgagccaacaagtgcaggaactggagcgagtgcttttgggcactggcaggaaaaaaaactccatttacttggctcactgttctcaaccccttgtgggaggggacgtataggctatgggtatgggatccaactgaccgcttttgggcgcaggtgggagcaaactccatgcggacctgcagcagtgtccaggtagggatgcctgtgatctcggaagcctcagagggtgtgttatgatgctctttcagctctttttttttttttttttttttttttattacatattttttttttttttttttccatctgcggacagcgtaagtgttatcagctcagtggggcttttgcctcatcacgtgggcagttgcccttcagcccatgtgagggcagagggccagtgtgacagccttcctgggtcccctacccagtgcatcctt

SEQ ID NO: 636459 - DNA, 808 bp, Homo sapiens
tgcaggaattcgctcgagtgctaatatttcattgctgttacaatgaaaattcattaccgagttactggttctatgcgaccatggccgggcccctgcgcgccccgctgctcctgctggccatcctggccgtggccctggccgtgagccccgcggccggctccagtcccggcaagccgccgcgcctggtgggaggccccatggacgccagcgtggaggaggagggtgtgcggcgtgcactggactttgccgtctgcgaatacaacaaaaccaacaactacatgtaccacatccgcacgctgcatgtggtgcacaccctcaagcatatcgtatctggggtgaactacttcttggacatggagctgggccgaaccacctataccaaaacccaacccaacttttacaactatcccttccatgaccaaccacatcttacaaggaaagcattctactcttttcatatctacactttccctagacagggcacaatgaccttttctaaatccacctatcacgactcctatggatctataccagacttgcctatacctatcactctctattcacaccctcccacctcctatattccacccctttacatattatcccctaccttaacgaaagcttccccaatatcctctacctctatacacacatataaatcatccacaaacctttattactcacaatgaagtttcaccttcttcttccttctatctctattacctccgtatcatcccttcactcctcctcctcaataaatcttactgtttctataagaacaattctcacccctatcctcctcctctct

SEQ ID NO: 636460 - DNA, 162 bp, Homo sapiens
agatttcggactgatagatgaagtatcatattacgtccactagccaaatcactttatagactccatagaccgaagacctccatcatactaacctgacatcggaggacaaccagataagctacccttataccatcataggacaagtagcatccgtactatact

SEQ ID NO: 636461 - DNA, 157 bp, Homo sapiens
agtgggacgaggggccgaagtgaaggaagaatacgaaggatattatctcttctgttatttttttaagaaacattgtttggggggcgccatctccctgtccctatcactgttagagggctaattttatatcttataaacattttataaaagccaggtc

SEQ ID NO: 636462 - DNA, 171 bp, Homo sapiens
tgtgtcatgagtatagatcagaacaggtttggtcgatggaccttgcactcaagtgaggacgacaggccatgcctttcacgtgcatgcagctcactgtatttcagtcctcaatgtttccgcacagtgcccacctagtaagtctgtccgacaagcctggctagaaggcagtac

SEQ ID NO: 636463 - DNA, 436 bp, Homo sapiens
tttagattgtttacatagttaccttttaaccccagagttagtatcaaaaagctgcatgattatgtcgaggtgtgttttcttagttgctctaaaatcatcctagcctatgtgtaggaatgggtaaaggccccttacacaaaaatggagttaatgatgttagctctttagctgatgcatagttagcaattccccactgtcgcaggctcatgcctacagtgctggtccggttagggaccgtgggtccagtcgttctctcatctgggtgcttccttgctgtaacatggtcaatgtggggcaactggtggaaatgaaactattagacctgacagccatttggtgtacaggaccttatacttacaaaatcgtaaaaaggaccctataacccactcaaaaaggatgtagggacatgtctgtaagatgagtggacctggtaaaa

SEQ ID NO: 636464 - DNA, 913 bp, Homo sapiens
cccccgcgggtatatacaaaccccggtttgttgagcgcagccgcccttcgggaggagacccccccctttgtggtgtgtcccacctacatagcaacgcacgtccggggcggtacgtcatccgccctcccgctttcttttttctccttcggcccggctggatactggtttttctctcagccagtaggcgaggctatgtacacgccggcacgcaagcactagtttgtgggcgcgagtcgtcacaccctggtgtgtgtcctcatactcaactccgcgcgcgtggctccgtcccgcaacgatttacccgagcgtagttttttattccaaactacctgctctccaccgcacgttttggtcttggtcgcactgcgcggggtgtgcgtttttcccatcctctctctgtgttggtcgttgcggcgggagtctgctcccccaactcaccatgtggtgctggttttcttttttcttcctctcctcctcccctccccgcgtgcgtgtgtttgctacttttctgctgtctgacttctcctcccacgccacgcccccccccgccggtctcggttatcctcccaccccgcgccgtcctcctctctttcttcgtcctgtcttttccttctcgcaccgcccggttgttttgtgtgcaacacacgcctctgctcctcttccttgcctcgttcttgttggcttctctcttcctgaatgcccctctgcttcgcctccccccccccgccgatgagtggaggagccgccggctcccctctcttttgttttggggcccctcggctgttggctccgcctctctcttctctccttctctccccccctggctgtcgggggggagacatctccccccctctttttgggggggttttttttttttttgccccctttttaaaattttttttcctccccccca

SEQ ID NO: 636465 - DNA, 2196 bp, Homo sapiens
agttgattgtgagttattatgttgttggtgtattatggttgtgttgggatgttattgtggggtattgggatttgatagttggagtggttggttatttgtggtcattgtggtatgtgtgagtgctgtgttatgttggtggagtttctgttagtgttattgttgtgattgtgatgtagtgtgtggtagtgatgatgtgatgtgtgtagttggtttgttttttaattgtgttgtgttagggtgtgtggtggtgttggtggtggtttggagtgttggttgttgtgttgtttgtttttttgttgtgatggtgtgtgatggttgtgttgctgtgctttttgtgtcgctcttgtggttgctatatgtgtagtcatctatatgcggtcgtaaggtgtgtctagtgctatcgttgtgtactgattgctgctgtacttcgtgttgattgttctctatgtgtgttcggattatgtaggtctgcggtctggcgtctgttttgttgccctgtagttcttgttgtgttggcttgttgctgctattgtttgtggttgttagttgttgttctgtgtcttgtgttagttgtgtttagttcttttgtttttgctagttgtttagttgtgtgcgactcacgcgtcactatgagcgttgggtgtatgcattatcttcgttcgtttcgtcgatattctacgcttgcttgtttgtttatgtctggtagctattctgtactcacgtcgctgtgcatgttggtgtctgtgtgtgtagtgtcttatgtgtatcttcgttactcattgactacgtgtcatgttcgttgttgtgtgtttggtgtgggttcgttctgccgtccagtcctatcgttcgtgtgtgtggtagtgtgggcgttcgtagctatggagttgcagttgtcctctcccctccttgcatcgttttgttgtttgtttgtgttgttccatgtttctgttgtctatctgctgcggttgtgtttgtttttgtttttatttccttatctcttgcgttctccttccgtgttatatggttgttttgtttcgcttgtggtggctgtttcgttatgatttgttgtcgttgtgcggagatgtcctatcggtgggtggtctggggtgttttgtttggttcgtgttgagtactcggttgtgtggtggttgtcctgtgtggtgtttttgtctctgcatcctctgagtggttggtcgtgcattttgttttttttttctatgggtggggggcgctgccgaagttgctcgcgttatcttccatccgctgggtgttgtgggtcggggtactacacgctgctcgttgtttgtgtggtgtgttggggtgggggcgtctcgcctctctcggctttggttgttggtggtgcatggttgctgtctctgcagctgtttttgttttttttgctctcctcgggcgtccctcgtcccgctcggtggggtgttctctcgtcctgcgctcgtatctatgactctctgtcccctctcgcttgtgtctgagtgctattgtactctcttcgttgtttcggctctctttttgtgtgttgtcactcttctttctctcgcacctgctgcgtgtgtttcgcagtgacagagactctcggggggtggtctgctcacgcgtgtgtcgtctctccatcgcgtctttgcccctctcagtgtgagtgttccctactcggcggtctctcccatttattgtttgttttcctttgtcgttacgctgtgtgggtgagaggagagtgtttggtgagtgatatgtagttgtcctgttgttttgttcagcatagatgccctctctcgcgatggtagacacatctctagttcccaccgcacataaataatatatatatatatgagagagagagtgatggtgtcactcactcatataggtatattcttgtcacacgacagatagagataatagatggtgtggtagaagagatagattaacaccgcgcgcgtcggttaggctgtattctgtagtgacacaccaccactctcgtctgttgttatgttcgctctcgtcttattgtggtggttgttgtgtataatagagtgttgttgttgctctgcgcctacagtgtgtttgtgtgaatatatatataataggtaggtgtgtctcccccgtcgtgttatgtatataataataaaataataataatataataatataattataatagatatatataattaatatata

SEQ ID NO: 636466 - DNA, 324 bp, Homo sapiens
tcccagctacttgggaggcgtgggcaggagaattggttgaagcgaagaggcagaggtggcagtgagctgagatcatgccattgcactccagcctgggcaacaagagcgagactgtgtctcaaacacacacacaaaattaaaaagtaaatcttaaaaatttagaggcctggcaggcacggtggctcacacttgtaatcccagcactttgggaggctgaggcgggcggatcacgaggtcaggagattgagaacatcctggctaacatggtgaaacccatctctactataaataaaaaaattagccggacatggtggtgggtgtctg

SEQ ID NO: 636467 - DNA, 264 bp, Homo sapiens
gttctagataagtagctagtctgttgtaacatcagggcagcaattcagatttctggattctgaattcatttttttctgggtcacagtacactgcctttaggatgtgtctttttaaacttctttttcctctaaattataaaatcagtttataccttttggggaaattgcagaaaaagttaaaagttcatgttgtgtattcagtcatatagtctgccttttttccttttttcttttatatttttctttggaaccagatctcctctc

SEQ ID NO: 636468 - DNA, 261 bp, Homo sapiens
agcaaccacccaactatctataaagctaggcatggccatccccttatgagcgggcgcagtgaataataggcttacgctctaagattaaaaatggcctagcctagttcttaccacaaggcgacagctacaccgccttattccccatacgagttatgatcgaaaccattagcccagtcattctaccaataggcctggccggcgtcctaaacgctaacattactggcaggccacctactcatgcacctaattggaagcgccacc

SEQ ID NO: 636469 - DNA, 940 bp, Homo sapiens
tctagcgtgaggcaccgataagacgcatcgctgtgtcacaccagccctgtgtcttacatgctggggagtgagcgttgaagcggcgtaggaggataatgcctacactcctatttcagttgcatataactcgttgatctagatgtgcagagtggtcctatcgcaagtgaatacacgactcgccatcattgggttctatcccagtggtatatagctgcgttgtgcaaggagaacgattggcagggcatcatcatgatgccaaccgaggatcagagagattcgctactgtgaagccttcaaatttagttacacctggaataccgcattagccctactcatatagaccccaagcgatggttccctaataggtagcgagaaccctgcgtgtgtagtgaagacttgcgtgtatgacgaggcggacctttcagatgcacgagaccccaacatagcgtgacttaccaggttacattgcctaccgacggttgctcagggcagaattcggaaagttactgagtactcctgattgagtccgggttagagcatgtggacgcaaacggtgaacatttgtgctaaccgccttaggaggaataacagatgcctgtggtcccataattcctagacacgttccagtattccacacaattacggggttataccgaccctccgattgatttggactcagggacactcccatacttggttgcagccgctgattagacggtatacgaattgtagcaagcgagtaaagaagtgcctacgtgatctgaggtttcagagcctgagtaatttcccacggtcggtatctctatctactttcaacattcctccctgtaacgaatggacgcgagaaataacggcctaatttacaacaaagcgccttacccccgttaccatgatatcgatctcccacttaggtattataacacacctagccaactccaga

SEQ ID NO: 636470 - DNA, 216 bp, Homo sapiens
cgtgatctctgacgtagatttccagttgtaaacagatcccgatcgaaacccaggctggagtgcagtggcgcgatctcagctcactgcaccctccacctcctaggctcaagcgattctcatgccccagcctcatgagtagctgggattacaggtgtgcgccaccacaccctgccattttctgtattcttagtacagacggggtttcgccagtgctgc

SEQ ID NO: 636471 - DNA, 101 bp, Homo sapiens
ctgcggagtcgggctggggtgtgtgaacccgtgctggctctggctgtgcggcttgacctctgtgtctcaggctgggggtctctgcccctgggacccactgc

SEQ ID NO: 636472 - DNA, 528 bp, Homo sapiens
  misc_feature (34)..(34): n is a, c, g, or t
cttttcttttagtcagtgctgtcatatgccatgncaatattgtatttaagtctgttctcacagtgctaataaagacatacctgagactgggtaatttataatggaaggaggtttaattgactcacagtttagcatggctggggaggtttcaggaaacttacaatcatggcagaaggggaagcaaacacatccttctttacatggcagcagcaaggagaagcgctgagcataaggggggaaaatctccttgtgattcatgcctgtaatcccagcactttaggaggttgagttgggtggatcgcttgaggtcaggagtttgagaccagcttggccaacatggtgaaaccccgtctctactaaaaatacaaaaaattagctgggcatggtggcaggcacctgtaatcccagctacttgggaggctgaggcaggagaactgctcgaacctgggaggcggaagttgcagtgagccgagatcacaccattgcactccagcctgggcaacaagagtgaaactccgtctcaaaaag

SEQ ID NO: 636473 - DNA, 267 bp, Homo sapiens
atgttctaggtgcagcagcagggcagtggtgtcatctgtaagcagtggcaggtagagagaaataaagatgcaaaggatatttagaacaaaggattgactagatttactaactgtttggacactgggggctaaaatggaagagggtgaggtagaggaaggatcggggatatctctcaggtcttcggcttgaccagttaggtgactcatggagccacgtcctcagtgggaggagagttctgggagggcaagtaaagagttcagtttggg

SEQ ID NO: 636474 - DNA, 322 bp, Homo sapiens
  misc_feature (2)..(2): n is a, c, g, or t
  misc_feature (35)..(35): n is a, c, g, or t
gncgtgctgcggtcgctctagacggactccccggncacatctgacccagactgctacacagacgtggattcagtgactctaggcagacagcagcagacaggattccaggaaccagtgttggatgaagctaggactgaggagcaagcgagcaagcagcagttcgtggtgaagataggaaaagagtccaggagccagtgcgatttggtgaaggacgctacggccgaccggaacggacgcgctaacgactttggtggtgacacgctacggaaacacggacttccaggacaggacgcgacgcgcaatttggtgatgacacggtacg

SEQ ID NO: 636475 - DNA, 464 bp, Homo sapiens
cccactctggttatcccacctgtcaaagccggctcattgtgataggggttctcagacatcagggactgggatagagatgagcactgagagagatgctctgggactggctccaggcaggtccagtccatgtactgtaaacacatcagaaggaatggagggtgaggcagagaaagaatagggaacaagtaccctggggcccggcaagaacaccataagtgactcaccataagtttctctttcactattaatactctggaatttcccagcctctgtctcatgctcatgttctgatttcaccagaaatcggtcaattgcctaatcctcaaatcaagggggggggggcaaaagaacaggtaatagccagctatgtaacttggacagggactttctttgtattagaaacagttcacgacaatcaacaacaaacgaaattaaggtaagcaattagccgccaaagttgtcta

SEQ ID NO: 636476 - DNA, 167 bp, Homo sapiens
ttttaaaaaaaaaaggctcccatgcctgggcaaaaaaaaaaatggggaacttaataaacccgttgttccgcctccttggaacatgggggcgagtggcggccggggggcccccaggaaatacccccaaaactaacttgttttcccccaaataaagttttcccccccca

SEQ ID NO: 636477 - DNA, 280 bp, Homo sapiens
  misc_feature (37)..(37): n is a, c, g, or t
  misc_feature (118)..(118): n is a, c, g, or t
  misc_feature (165)..(165): n is a, c, g, or t
  misc_feature (248)..(248): n is a, c, g, or t
cagcaatcgtcatgagtgaatgaatttaaaattaggnatatgatagctcagaaggcgggatatatacgaaaatgaatcctgacttttaaaggaagtatattacagacatgagagtccngagaaagaatcataaaagagatcttgatggttaagaaaaaaataganaccttagtgttatctgtggtgtgtgtatttttttaatatcttattttgaagaataacggatcagacaatgatctgggtgcttntgggacccagaaataagttgaggggaggatgt

SEQ ID NO: 636478 - DNA, 854 bp, Homo sapiens
gtatctcctcctcctcctctttcggtttcatttcctcttcctctcctgcctccttctgttccttcttcttcagttcttcctccttcttcatctcctcctcctccttctccttcatctcttgctgaaaagccctcatgcgcttcctctggtccttggagtgaagcctgtgcctgcgtgcctcttggtcttcatcttcactgtagtactcttcatcttcactttcttcctcattgggactcggagcaaaagggaagatgatatttcgaactccagggagcgggataggcttgggaacgcgcacttttctttctatctccacacattcgagaatcagctcatccaggtcggccatttctgttgaccataagagctctttgcggaagaattccgacaggcctttgaggaattggttttggaggcggcagtcatcccaagacaagaattgggccaggaactgaaaagcatctgcatagctgccgagggtacagtggccctgcttgagcttgcgaatggcctttttagccacacgtggggggatggggccacagaattccttacggatttcatccaggaagcgcgggaagttggcatgcaaggggcttccttcctgggtgaccgagatggcccagtccttggcttcgccagtgaaaaaggagatcagaaaggccacccgctcggcgcccccggggaaatgaacctcatggtcggctatgaaggtctctagctgcatcaggaattcagccaggtagactgggtctcctgaaaagggctctatctcaggccgctccagcggtgccagagggggttgcgggggcggatcctttgacgcgggcggaggcagcgccggcggccgc

SEQ ID NO: 636479 - DNA, 288 bp, Homo sapiens
  misc_feature (277)..(277): n is a, c, g, or t
tttcttttttgccggccccagtgttgtcccggattcgcttattccggccctgtagtccgcgaagtgattttccgcttttgcggctcccttctttctatgttcagatcttcggagccacttgccgaccacactcctagcgtaagacccggttgacaatgggagtatgggggggacaactcgggcggggagtgttgcagataattagtcacttaattgcccgaacctaaaccctgaaataaggggggccaagggactttttgccctggaaaacttgggnaaaggtaaaaa

SEQ ID NO: 636480 - DNA, 288 bp, Homo sapiens
tatgtactggcttgcctaggctggggcttgaactaagtaaagaagccaaggtgtgcagatctagatcgcagagaagtcagtctcattctaacacattgcaactactgttagagtccaccccatggagctgttgcagattgtgtatctttgactgaattctatgagtatatgtatgttcagactaaaacaaatgttgctagctacggtcggctgtccggtctcagtaggacattgacagtcgcaagctatcaccctctgcagaccttggacctgagtgccgcatgcatt

SEQ ID NO: 636481 - DNA, 354 bp, Homo sapiens
ccagatcactaccatcacctcaccatcaccaccacaaccactcatctccctaccaccaccattatctcactcaccatcacaatcctcaccactaccaccaccaccatcttcatcctcaccaccatcgtgaccacatcatcaccatcttcatcaccatcctcaccaccatcatccccaacacaaccatcatcactaccatcatcctcactaccaccaccaccgtcaccatcaaccaccatcaccatcaccataatcacaatcaccaacatcatcaccaccatcattctcactaccaccatcaccatcaagtcatcaccaccatcatcatcctcattggtgatcgtggggttgtaa

SEQ ID NO: 636482 - DNA, 781 bp, Homo sapiens
gtaacggcgagggatctgacttgcatttctgcctgtaacacggttcatccccgagttactccgctggagtctgcaggtcacgaatggcgaagggcttgtgacttctgcagggcgagtgactggaaaccagcgcatcacttcagcagggatcctaggtgtgttctctgctggtgattccccaggggaggctccttctgcgctgttgcctaggggcaacccctgtgtcagcctgaagccactcagctgacagggccaaaacgggctggaccaggcagtctctgtcagagacgaagccctgtggctgatcggaaggcagcctgttcctccaggacgtgctgcggcgttcaggccagtctccaatgaagccgttcaatagtattattgagcatctgtcagtggtattcccagtgttacgacagcactgagcttgctggtgttattaataaaagtgcgaagtcaaaataggcaagaacgtcaggtcgtcaggattgagtatgggatgaacattgtccaagagagtgacagaacatattctaggatgaacagaagaagaagaagggcactgggtgcgaagttcctgtgaaatatgccaggaggtgttcaagatcagatagaaggtgctgtgtgctcaaatgtgggccacaagtatcacaagagggtgctttaacgcagtggcttataggggcagaggcttgcccgggctgcagggtcgtgatctcctgacagacagagtcaccttctggaagaggctggcccgagtcagaaatcaggaggtgccttc

SEQ ID NO: 636483 - DNA, 730 bp, Homo sapiens
tttataggatgcgttcttaaatgccatctttaaaattgggccccaggacgtgcataaaattcgttggttcataagccataaaggcttgggacatctgaggattgccattcattgttctaccccgcagatagtcattgaatggtctccactgtcaaaattgaggtgtggggctggggattatgcaattagctgaagccgcgttgtgcataagcgctctgtagatttttccgtcgcaaatttaccagtagagccactctctggagcaagatattggttattgctagcatgaagctggtaagtgaccagtttggcccagcccttcccttatggcgctacagtccctgtctgtcatagtcaaatgtaaagtcagggctgtggccagttttgccatttcactgatctgccttcagcttagcatattaaagctcttgatggagggtgcgatcactctttccataaaaggcttcactcgctaagatcgtcatacccagcaagaaagaaatggaagccccatccccttgggcttgtgatgttattactaggaataatggtgtttattgcaaatgcacggtcctttttccattgcaatgtcattccactggaaattggcctatatgtaaaaaaaaaatgagtatagttttacatttataatgtacgctgactccgtccatatggttgattgtaatgtgcacctgtaatataaaatgtctctgtatatgcaataaattct

SEQ ID NO: 636484 - DNA, 1486 bp, Homo sapiens
  misc_feature (787)..(787): n is a, c, g, or t
  misc_feature (1486)..(1486): n is a, c, g, or t
atgagtatctcttctctactgagattccatagtgcatatggctctattgagaggagtcctaatctattgattccccctaaagtcccattgtcttgtaagcctcgcgactcgacttgcgcatcggagttggtgatcttcggctcggaagtattgctacctatcaaaagaacgttagaggcgtgtcgtcatcgagtcagtgaataacagacgcatttaagaggtacaatatgcatacaatttctccactggaccatatgagctagcttgagagtcgtacctctccgtcttccatgtgtattctatctagccatgatgatgcggcattagattgattcactagtactcacattacgtggacattgagagctaaaacatgaaacctttgacaaatcagacctacatgttggtatgtatgtctgtacggatctacagcgtgaaacaaatatggctgatcgatagtctaactatgaataatctctctattccgagaagcaccacactttgtaaattgcatctcaagctctgggacaggcatcctctcgttcgtcaaactccattctgggctcgacaagggtaagcggcttagcaacttcgccttcgatttgtcaacataattctcatgtgagaccctatggcaagaaagcgataccaattggacattagccgtattaccttgtggaccaatccaaccaaagaacgggaactaggtccaatataaccctaacaatcccctctctccaacgcggtaactttgtgcgataagagcgtactcctgaggatcggcgcntatcgataataaggtagagacctggttggctacgaatggtggatctttttcctataatgtgcacaaaagctcgatcagggagaggaacaccacctttcggtctcgattataagacaccacatcaaccaattttattattatttggagccccatatcggctccggagggaaaaggagaaacatctttcctttgaatcggccgttatgtaattaagaccccaacggtgtgaaaagtttcgcgctttgttatttccattatattggactttacaaactatacgtgggtccattaatcattattggaaccttggcggtaatcttttcaaccaagcgaattaatctgtgtagggtgccccaaaagggtgttggcttagtaaatttaacacggctttcgttacactatgtactttgtgtattggaaccgaaaaaggtcttcaggtagggggaagacattcatccggtcggaactcgaaacgcggagggaattgtgagagtatagtatgttttggagcaacaccccttcaggattggcaatctccccacagggatgttgagtataggacccaagagcccctttcccatggttttcacatttttcggggccggaaaatattgcaacggccttattttcaatatcagggctccctttaggttcccccgtttaagaattcccgcccgtatgaattcccatttacgcacn

SEQ ID NO: 636485 - DNA, 273 bp, Homo sapiens
ctgaggatcccgcatctgctcattgtcagactcctgcatccatttaactcattagcattcccgattacaggtgcgtctctgccattgtctgcctcttccacaactccccttcttctcctattaagtccttggtggtgatattcggagctggtgtctacggctgcgtctgacatggtggggcacgccggtaatccgatgcatggggattaaaaagaaagcgagagttcagggactctggcagatcaagctgccgtagtccgcggcggcggagga

SEQ ID NO: 636486 - DNA, 705 bp, Homo sapiens
  misc_feature (270)..(270): n is a, c, g, or t
ggtcctgatccgtgcgcccgcttggcggcgtcactgacgcttcgctccggtcctcggatcccgagcgcggggaggcagaccggtgtagtgagggtgcccgggagcggccgctgtcaggtcctgctggcgtgccatgtgtacgccggtcggactggctgagggcgggtctggatggccgtcgccgcctcccgccttgggctggggcattcgtcctgtccgctctcgccttgacgccctttgcgagactcctgccagccagccggggctccncggggagcaagtggactatcgtgcctgatcgcgaccgactggaccgtcccctggttccgccgtgacatctgttctggttctcctatctggccaaagacctatcgatagtgccatccggcgatagactggtagtgccctaacggcgcgtccttggttgagacgtcgccgcttctagtcggccgacggtcggaccttgggactaggctgccccgcttccctgcgccgtgcgcttccggcttctgaaccgcgtggaccctcatccccgtactgatgagctgcttgtccccatcctgctgccgtcctggggacacagagccctccgtggtgcccgcgtgattgtgattggagccaaggacctcacttccttccatctgttccctgtccttgccctataagtgatggggcaagcctgcagaccgcccattggtgttcttg

SEQ ID NO: 636487 - DNA, 459 bp, Homo sapiens
cttcaacgcgccgtcagagccgcgcagcaaattcccgtccgcccatatccggccaatgcgggcgatcggtttgctcgacacggcgaccgaaagattggcagaatagctatacgtcgttgtcgcgggccgggtattgctacccccgttgacagtccgcctttcgatcaaatcgctcgcccatataaccgtgccagcaaccctcatcgtaccaaatatcgctggaattgcagttgcataactcgacgtttgcagttccagttcctgcaggcgcggccgtcgacggcgagggccacttccaactatagcgcgatcgagctgctggccaagcatggccccaacagcaccgccgacgggcccgccaatcgccgtgcccaacgcggtcaaaaccagtgtacgcacttcaacctcccattacacgccagcgatcgagaatgtgccagtcgggaaacgcaggcccat

SEQ ID NO: 636488 - DNA, 668 bp, Homo sapiens
aacttaggctatgtataggcctgcgtgttaatcggccgagggtctttgcatgcgtattacctgagtcggtcagcgcctggaggacctcagcagccatgtctgaagccccatagtgaagcctgggactgccttcattcagacccatgcagctgcacgcagccatgtgctgacacattcctgtgagcacatgtgccgcctggacattgattcaccacccatcacatgcccggaacactggcatcatctgtaccattggcccatgcttccctgatcagtggagactgttgaatgtgagatgattaatgtcttggaatgaatgtggctcgtctgaacttctctcatggaactcatgatgtaccatgctggatgaccatcaatgaattgtgctgcacatgccacggaaatgctttgcttcttgaccccatcctctacctggccctgttgcttgttggctctagacactaaatgtgacctgagatccgaactgggctcatcaaggtgcagctggcacttgcagatgtgtgtgagcttgaagacagggacgccactctcaaaatcacgctgtgataacgcctacatggaacagtgtgactgagaacatcctgtggctggactaccaagaacatctgcaatgtggtgcgacgtgggcagcaagatctacgtggatg

SEQ ID NO: 636489 - DNA, 343 bp, Homo sapiens
tatttgctttcctctccactatcccatccgtatgagaaaaagagtgtgtgcactgatgataacaggatcttggatgataggctccatcaactcttgtgctcacacggtatatgcactccgtatcccatattgcaagtccagagccatcaatcattttttctgtgatgttccagctatgttgaccctagcctgcacggatacctgggtctatgagtgcacggtgtttttgagcaccaccatttttcttgtgtttcccttcatttgtattgcatgttcctatggccggattctccttgctgtctaccacatgcactctgcagaagggaggaagaaggcctattcg

SEQ ID NO: 636490 - DNA, 122 bp, Homo sapiens
agaggatctgatggtgatcttccgggttgtgcatctttccgggttgtgcatctttccgggttgtgcatcttccgggttgtgcatccttccgggtgtctgcatccttccgggtttctgcatcc

SEQ ID NO: 636491 - DNA, 954 bp, Homo sapiens
gtatcgttgaggacgtatctcacaatagttaactaagctatctatgaacggagcccactggcagaatcatactatatgtgcaaactccgtagacatatccttagaaatatgactactgtacagggaattattacctctcatctatcgctctactacgtattctatgcaattagctgttggaatgttccatgcggctaggtgcaaattagcgtttgagaaattaggaaagatgaaagggtatttcaaactatgaggaagagatggcagttccgagattggtcccctgattatgcaggggttgcatatgatagtgatagtcatggtaagaaactcgcaatcgttctcacactggcaagatatctccctgtagtcttgataagaccaacttgcaggacgaaaaggcatctaggaatgcccccgtctttagtaccaatatcacgggagcatgcttatacatctaatatgacggtgagtcaaatagtgtagatgagtttcggcattacacgattggctggctgactttacgaataaattctggcctaggggacccccatctttacagaggatttgctgccagggaggcgttcttcaagggagcctctaacaatccaatgaggccaggtgagaatttggccgcggttacaagacttagtgtaacgaatttctatgctccatgagtaggatggatccgatttctgtgggagtcggcactactggcccagtgtggttgatagtattcgtttgcattcgccatcaatgtaccacttgactttctgcacggcaattgcaaaaatccacttgaaagggccatctggaaccataaaaacattccctgtgggccaaacatcctttccacgaaaattggggatcaacacacaggtcagcaaaaaccacgggcggatccaccctggttgtttacaactcttcacatgaaaaccccaaaaaggtccactg

SEQ ID NO: 636492 - DNA, 340 bp, Homo sapiens
aacgtccatgtcacactatctggtaaatggctttacacctgcaaaactgaccctaggttgtagctacccgatatggttggctgcgtccccacccaaattgtcatcttgaatgtagttcccataatccccatgtgtcgtgggagggacccggtaggaggtaatcgaatcatgggggcaggtttttcccatactgttctcgtgatagtgaatacatctcactaaatctgatggttttataaagggcagtttccctgcacgtgctctcttgcctgctgccatggaagacatacctttttgctccttctttgccttccaccatgattctgaggcctctccagcc

SEQ ID NO: 636493 - DNA, 370 bp, Homo sapiens
gagaaaacgaacggcagggaatcactcataatggggagaggtacttcgagattacatgggcacagcgagggaaacatcacacaccagggcctgtcaggaggtggggggcaaagggagagagagcattaggacaaaaacctaatgcatgtgggcttacaaccttgatgacaggttgataggtgcagcaaaccaccacggcacgtgtatacctatgtaacctgcacgttcagcacatgtatcccagaacttaaagtaagataaaaataaaaaataaaaattaaaaaagttaaaaaatactaggtgtggtggtgtacatctatgtttaaagaaagaagacaaaaaacccagatttggttgtagaaaacaatgc

SEQ ID NO: 636494 - DNA, 92 bp, Homo sapiens
agaagaaaaaaaaaggtttggcaggccatctttttttgttcttaaaagtaggcttaccccaataataaagtgctcttaaaccccaaaaaaaa

SEQ ID NO: 636495 - DNA, 395 bp, Homo sapiens
cggcatcgatggaattagtctaacaccttattcattcacttgagcatgattcttcgaccacgggtgtccatgagttgctagtgtattcccacagggaaacgatcacctttagcgtctttagtctcaaatacacaatctagcgtgactggcaccatgaagtttcagcacgtgctcttaacgctcagtgatgtataatccctgcccaacaagctgtcagatcataccttctcatatactgcggtgcgcagcttcataccaaaatctgtattgattctcccttatgaaagcatagatactatttatatacttttctaacaatctcatattgttgtgagaaaaggaagatgcacatgttgtgtgttagttggtagctcactaatgttagtgcattacac

SEQ ID NO: 636496 - DNA, 1044 bp, Homo sapiens
  misc_feature (30)..(30): n is a, c, g, or t
  misc_feature (38)..(38): n is a, c, g, or t
  misc_feature (42)..(42): n is a, c, g, or t
  misc_feature (44)..(44): n is a, c, g, or t
  misc_feature (48)..(48): n is a, c, g, or t
  misc_feature (178)..(178): n is a, c, g, or t
  misc_feature (214)..(214): n is a, c, g, or t
  misc_feature (227)..(228): n is a, c, g, or t
  misc_feature (232)..(233): n is a, c, g, or t
  misc_feature (243)..(245): n is a, c, g, or t
  misc_feature (273)..(274): n is a, c, g, or t
  misc_feature (276)..(276): n is a, c, g, or t
  misc_feature (285)..(285): n is a, c, g, or t
  misc_feature (304)..(304): n is a, c, g, or t
  misc_feature (309)..(309): n is a, c, g, or t
  misc_feature (343)..(343): n is a, c, g, or t
  misc_feature (360)..(361): n is a, c, g, or t
  misc_feature (370)..(370): n is a, c, g, or t
  misc_feature (411)..(411): n is a, c, g, or t
  misc_feature (457)..(457): n is a, c, g, or t
  misc_feature (520)..(520): n is a, c, g, or t
  misc_feature (527)..(527): n is a, c, g, or t
  misc_feature (873)..(873): n is a, c, g, or t
tgttctctttacttgtgaaatcagtggcanccctgatntcanangtanagaaacaagatggtggactttataccctgagtttagggaatgaattggatctgactctgccactgtgaatatacatattcgatccatttaagagggcctgtgcccttatactctacactcattcttaacntttcgcaaacgtttcacacggactaatctttctgancgtaaatatttanngaannaaacgtagtnnngtatcaacctaaatgagtcaaagttcannantattcattncaatcttttcataatgtgncctangaatataatacattgctagtgacatgtacatacngtatatagccggattannggttataangtttgtaccatttattttatgacattttacaatgtaagttngaaactaactgtggtaggagaaagtttcttatggaacgaatacccngtcaaatttaatcaatcttgtgcctcaacatactgttgatgtctaagtatgcctcagtgggtngagaaanatccccattgaagatgtcctgtccacctaaaagagaatgatgctgtgcatatcactgtgatatgtgcaccaatacctactgaatcagaaatgtaagggcattggtgatgttggatataccttcctgtaagcaacactttacgtcttacattttctctgagtgatgtcccacaaaattatcatgacaaatattaccagagcaaagtgtaacgggcaacacttgttcgctcattttacgctgtctctgacataaggagtggctgaatagctgggaaagtaacatctcctggcatcccttcattaacaagctatgcagtatcctatgccagagcagtgcagctctgggngtccgagggagcaatgctgtgggaggctaaatttaatgcgctgaaaactggggctaaagaatgagccaggaagaaagaaccccataaggggggattaacagtttatggccaaggaaggggggcttccgcagaaaaacagggaaaggggcccgaaaaaacaaagggtggccg

SEQ ID NO: 636497 - DNA, 834 bp, Homo sapiens
  misc_feature (310)..(310): n is a, c, g, or t
  misc_feature (317)..(317): n is a, c, g, or t
  misc_feature (663)..(663): n is a, c, g, or t
tgaataacagtccaaaagatattgcagtgtgtcacatgctatgtcatatagtagttgagcctaagattgataactatcatgtgactcacttggacatgtactatatcggtagtatacgccggattaaaggttatgacccgttgggtaccagttcagttctagtgacattccacatggtaatgttgaggaactaactgtaggtaggagaagggatgttcctatatggaactgcagatactccatgctcaagcactcgaactcgtcttgtgcctcaacatactgttgatgtctaagtatgcctcagtgggtngagaaanatccccattgaagatgtcctgtccacctaaaagagaatgatgctgtgcatatcactgtgatatgtgcaccaatacctactgaatcagaaatgtaagggcattggtgatgttggatataccttcctgtaagcaacactttacgtcttacattttctctgagtgatgtcccacaaaattatcatgacaaatattaccagagcaaagtgtaacgggcaacacttgttcgctcattttacgctgtctctgacataaggagtggctgaatagctgggaaagtaacatctcctggcatcccttcattaacaagctatgcagtatcctatgccagagcagtgcagctctgggngtccgagggagcaatgctgtgggaggctaaatttaatgcgctgaaaactggggctaaagaatgagccaggaagaaagaaccccataaggggggattaacagtttatggccaaggaaggggggcttccgcagaaaaacagggaaaggggcccgaaaaaacaaagggtggccg

SEQ ID NO: 636498 - DNA, 105 bp, Homo sapiens
  misc_feature (6)..(6): n is a, c, g, or t
tgagancacgccactgtactccagcctggacaacagagcaagactccgtcaaaacaaacagacaaaaaaaaaggaaacttgaaaatagaccggataggccaggac

SEQ ID NO: 636499 - DNA, 115 bp, Homo sapiens
aaagattgtaacattggatttgtctgggaatcactttgaaagcttctaaggatattgtaataggtctttaagacagtgatagaactaactttaatattggataggatgatttata

SEQ ID NO: 636500 - DNA, 573 bp, Homo sapiens
agcggttcctcagtgaggggggagaggtgtccaacatatcatcatgacggtcacaaatgtgtgggagtctacaatttctgtccaacgcctttccaggtgtgtgaacagctcagccagcagctcctgcaagtgctagatcctgtgagagggtggcacagaactctgccaggagggccaggtgcttgtactataagcttccgcatgcgccagagaaacctcctgctcccaccgactgcagctccttgaaggcctatggggatgcccagagcatacaggcttcccagcagcttcgagagggtaccatgccagaccgaggcaatctgactgttgagcaagacagagacatgttgatgaaatgttgggcatcctgtatagagcaacgcctttatcttactggcttctcagaacagaagtgagagagccggataagtaccattgctgcttgattgctgtccaagtcgtgactgccaccaagtagctccaggagctcctcatgccttgtggccttcttgatgaggtggtccacctgcttctctatataggggggtgattctccaagatctttgaaagaac

SEQ ID NO: 636501 - DNA, 458 bp, Homo sapiens
ggcggggggttcctgcagacccccagtgcccccgagccgtgcaccggagtgtgtggaccttcagggccacccttggccctcgggcctgtcgagacccagtagtgcaggccccgtggacaaggacagaaaggtctgcagggagccacgtggcagacgggcccagcgtcctgcagatgcacctccgtggagccctgctcagcccaggaccctgctaccccgcgaggtcatcactacttgccgagctatgcacacacttgggggccacctcccgcattctgcccttacggacatcatgccgaggggtcttagcccgcggacagctacaactgaacctcgcggaagaatcagccactaagtgcatggaaggccagtcagaatgatgaagagccccatgtaggtctgatagaacagagaaggagctcgcttgagtgagcgccgacaagccagctatgtaacca

SEQ ID NO: 636502 - DNA, 176 bp, Homo sapiens
gctatcgaggacatgcgaaacacctaccgcagtcgccagcacagagtgggcactccatgtaaaattagtttcctcttttccattagcaagtttctggaactacttaagaatactagaagtaccctcaaggtaccacagatcactagcaatcttcccaggcttcctctttgttccac

SEQ ID NO: 636503 - DNA, 389 bp, Homo sapiens
  misc_feature (177)..(177): n is a, c, g, or t
catctctaaggatccccgaatcagaggctaggtatatttctgggtctgcctagagtctggtagaatagtgttatgtcattaactgagagaaggatgagaagttagccgagggcgtctttgattgtgtgtatgggttgaaggtggttttatcggaaactgaagcttacagaggagatngcacttgcaaaggtcctgtaggcagaactgctgtggatggaacagagtttgggaagcaaagaagtggcagctagattaatcataaggggaagaggcagatcgtgtgcagggccatgtagagccaatgcaagaacttttactctgagatgagaaaccagtgtacgggttttgtttctttttgagacagagtcttgctctgttgcctaggctga

SEQ ID NO: 636504 - DNA, 213 bp, Homo sapiens
aggccccctcgagtcgaccgatcgttaagctgatccaacccaataatgcaggatagcacaagccattcaggaagaatctggttcattaaccaaaaaactccatttaggccccacctccaacactggggatagatttaacatgagacttggtgggatcaaacaaacgatatgcaaaccatagcaatgcccaatgctaggcagtattgggtgtga

SEQ ID NO: 636505 - DNA, 119 bp, Homo sapiens
ggcacgagaaaagatctacctagtttaatagacccagaagcttaaaagaaagattgggatctattaaactaggtagatcttttcgtattgatcataataaaagtgaatcattactattg

SEQ ID NO: 636506 - DNA, 316 bp, Homo sapiens
ggcaggacgtatgtgactctgctctgggactgggtctcgaagctacagaggacgcgactatgacgccaaaagcacagcattctggagccagcattcatgtaatttccaacaagcaaggtaatctcataggagataggaaaagctctcactcttacgtaactcctcacatgcagcagtgacagacacaatctctggcttgatattctccacttgctcgcttgaattgtagcttgcaagagaatggccattgaggcgaggccgccagtcggggcacaagtgccccatcaccacggcccaaactgctcctgactcaagc

SEQ ID NO: 636507 - DNA, 764 bp, Homo sapiens
gtctccgcgtggggtgcgcgatataggcgcccttcacctggcggtacggccggagggagcggaggtgacgggagtcgggttctcatggcagagcgggggacaatctggcgcacgaggcgggacgctttcatctcaggatgcctggattccatcgagccgcgcctctatgatgaatttcacaggaccgcgaatccgagacgctggaacgctagcagacgcgtgagggcttcgaaccgaagacggagcgtgctgtgcactgtgcttccggagcgagcagtgaggacgaaggtgctgctggtgagtatgcacgccgtggtacccagaccagatggattgtcccaggaggaggaatggaaccgcgaggaggaagcctggacggtgcgtgccgtgagggaagtttactgaggaggctggagtcagagaggaagagactaggcagacttcgtgggcgatagtttgagaaccaagatcgaaagcacagaagcatatgtttatgttctaacagtcactgaaagtattagaagatagggaagattctgttactatggaaggaagagagagtggttcaagagtagaagatgtatcgaagggttcgtccagtgtcataaaacttgtagcatgcgagagtatctggaaaagctaaagctgggttgtggccccagtcaatggaaattctacagtccattcgcttcgggataataatgccttgtttgtaaacgctgacagacctctgggttggcatctagtgtaagatagagagaatg

SEQ ID NO: 636508 - DNA, 157 bp, Homo sapiens
ttcccccccccccccctttttcccgggggggaaccggattcctgggggaattttgagccctgaaatccccggttcccttgggggggaaaattggttttgggaacagaaagggggccctttcccgggttccccggggcccaaaaaaaggttttttgga

SEQ ID NO: 636509 - DNA, 243 bp, Homo sapiens
tgggttgccttccctggtgtgagggcggggatcctgttgatggcaggtccccggtgctccctcctgtggctggagggaagggttttgcctgacaccacccagctgggtgtaactcatctgctgctctttggtaggatgtctggggagcgcaggggtttttcctgccttcccgactttgcctctctgagggttaaataaaattttgggggggttgcccgaaatgagataataatggagaaagga

SEQ ID NO: 636510 - DNA, 326 bp, Homo sapiens
atgactatcagcttcactgtccgccttgttactaaaggcaatcagatgacactcactattggtcaggggcagtggctcatgcctggaatcccagtactttgggaggccgaggcaggcagattgctcaagcccaggagttcgagacagcctaggaaacacaggaagaccttgtctctaccaaaaatacaaaaattagcagggtatgatggcacgtgcctgtagtcccagctacttgggaggctgaggctcaagaatcacttgaacccgggaggtggagattgcagtgagctgagattgcaccattgcactccagcctgggcaacaag

SEQ ID NO: 636511 - DNA, 109 bp, Homo sapiens
tcctgatacaccctatcactctatacaccccgataccactataccacacttataactgcactacagtataagaaaagcactacctggtggtatagcctggtggtatagt

SEQ ID NO: 636512 - DNA, 1399 bp, Homo sapiens
cattactctagaaagtccttcgatatgaaaaatatggaatggcctcgatgaatatatatgccgtgcattgctgcagtagtatttataggaataaaaaaaagggtttaagaaggcgtgtttgctctagaaaattaccgggtcacagatttagctctcttcagtagtgtcgtctgaacgagggcagcttgaattcatgactctaaatcttgatgatgggtcatctctcactacaaactctcactagacacacggggttcctgcacaagcttggcaccaatcactgtcgtgcccagtcctggacttgcggtagagatgcaacgcttctgacctggagactagcagcactgagagagacaaccaggtcttcgcagtaatccacacgagccccacggagatccaacgggcaggtcggcgaggcgcttgggcaaccgtcacgggttggactcatgaatgccgacacagtacggggaactgcgtctgcagaccgatcccaacgggtgacccgcgagagctagttggcgacttgagacacctcggacccgctggcatctaacggcacctcgacctctcccccacacagtcagtaggcaactgctgtggtgcggctcctgctgaaccgcacgggctcgtctcggaacgcgtcagcgacccggtacgtggcacacgcgggacagccgtaagcgaaaacttccctacacgcgtctccatggacacccaagggtacccgcccataagagaagttgccccccgtcaagacgggcgccatcactcccccccttgggaaccactggcgacttacccgacgccctccgtcccgcctggcggcggaacaacacgacacccttggccacagacaagcgccccccacaaaggcacgatggggccccccccgctacacccaggcggcgcaaaaacctctaccccgcacgcttagaagacctcccacctcgggcacctcagtcgcctagccacacggggtctcaccccgcaaggcccagacgcacgcccccttcccacaacgcccccacccggcaaacaccaggcttgccgaggtcaactcctcacaccacgcagcggccaccgcacacaacctccaacccccgtctcccccccccccagccgcaacccgcaccccgaccctcccacccaggccgccacgacattccccgccagcaacccgcagcccaacccctgcctcccccccacgcctcgcgcgctcccgcctcctcactcgtcaacaaccgccccgccccctcgcaggcacggcttcccacacactcgccgccccttccccccccctcgcatcccacctcgcccccggtccaccacgacctccccccgcaccccccacggcccccaacagccccccccacacagccaccgcgccccgcccccggcc

SEQ ID NO: 636513 - DNA, 325 bp, Homo sapiens
agctgtaatcctcagagggtacagtatccttatagaggtctcacaagaatcttttcttatctacgtcgcgacatggaacccagcaacaagaccttaataagaaagacagaagagtaggaactcctcaaagtacaaaaaagaaaaaagaaagcagaagagccacatgaaacgcagaatacctgatttcaaagagatcagaccggataactcctgacaacaacatcgagactagaaaacagacaggcactgtctttgggaagacagacaagacatttgagactctggagttgaggaacatatggagacgggacacactggctctaaa

SEQ ID NO: 636514 - DNA, 458 bp, Homo sapiens
caaacgatatcaatccacccttccacatatcacgccccacatactatgtctttgtctcttaccctacactaatctttttgtataaatacatcatcgcaataactaactaactataacagacaaaaaaaaccctgtgtgctgcccggcaggtctggcaccctctcggcggccgcatccttgttcggtatgctgcgtctctcaataccctccatgttactatttctcctggttaagtgacactacatgtaaagatcgagactttcactgctttatatacgtctcggtcaaattagaaatcataacccgaacccgacactttaacacaagactcttaattctacgtccactgatcagtgggatagaatataggcacgggggcgctgtccttgtgcaagtcgccgagcaatgtctagtgcttgcccattggtagagcatggatcgtcccccctaattatgtc

SEQ ID NO: 636515 - DNA, 325 bp, Homo sapiens
gagctgtagtgggattttgactaatccactgcactccagttcccgggtgacagcagcatagaccctatctcgttacaaatacaaatcagactttactccatatgccacttttggttctttatgatgacagtctgacatttatagagcctatatgtgcaaagcgcagtgctcggatatctcgttccacttctcgttgaagtgcaagtcaagtctatccttatccttcttttacagacttaggagactgaggattacagagatcaagttccctgtcctaggtcatactgtttttcttgttcaaaaacccaagcccacggtcaaccca

SEQ ID NO: 636516 - DNA, 1011 bp, Homo sapiens
tgatgtgtggactaggctaggtcaggctggtttagatgtcagctgccacgtagttatcgagcgcttctacacgccttgtgggcatcattcggcaacagcgggctgctcgtaagcctggtggaaagcctggcctctgggtgcctggggctggcgcgggtggccggcaattcggcggagaaaggccgactctggcggtgtgacaggcgcaaatccaagggtggcggcaagatgaatgaggagatctccagcgactctgagtagtcgagagcctagcctccaaggaagcctgaggaggaggaggaggaggagctggaggaaactgcactaggaaaagaagctgcgcttggtcgagttcatacctagaggcacgctccgtcatcaagaggaggagaaggctgaggcccgttgcatttgagtgagggaccaggtggcggtggtcgcctcaaggaggatgtcgctttgaggcaagagtgggcaaggcatgcaggacatcttggtgggcaaagaggacgatccaagccccagtccttcagtgtgacattcgctgttcttacggggggtcgaccaaggctcttttattcacgattgttggagtacgctcacgccggccgagtgactctacgtcgcaatcttccgtctgcgttgcccaaagagaactgcaggccatcaatctaagggtggcacgcgctagtatgaatttttggaccgggaaacggcctggcacttgttgagtttcctcttccgtaggcccaacatggaagggggtttgcccggaggggtgtaaaaaaagtctctccggcttggggccatacaaaggccagagggccgcaacaggtttcccgtactgttgccaatttgggttccgagagttccttcaccgttcccggaagcgggggcgagaaagttaaaccctttttggcgcattctttgggggttgggacccccggacaagggtaaaaagagcctaccgtttccctcaatttttttgggcgaagtgggccctcacagaag

SEQ ID NO: 636517 - DNA, 688 bp, Homo sapiens
gacggcaggcaggtgtggcgctgccctgggcgggcttgacccccaacccaagtgagcggcctgctcactcctcagctgcaggagccagacgtgtggagtcccaagctagaaggcccaaccctgtgtctcttcaatctcccctgggaaagggtggccccccccgaagggctgcaaaccaccgaggattggcctgggttgggcaaacatccctggggcattggacaccacggcgcaggcggggtgggtcaaccaagggttgaaaacgcaaggcaaaggtctcccccccaacttttcaaaaagcgcaccaaggaaaccccctttgaaaagtttgcccaagaaaggaacacccccttcgttaaccgaaaaagggcccccaatgtttgcaccaccgcgggcgggcaacttccgcggcggagggaaacaccaaaaaagctggaaatgcgccaaaaggggggccctttaattttccagaatttcccagaaacttttgggttttggcgcttttaccaacaagacccaagagacgggcaaagcggcaagaatggcgccaaaaaaccacaacaccgggcccaaaagtcgctgcggtcgcaccatcaggcgccaacaggactaattttcgggggaccccaaaaggagggtttcccccttttttcccacaagtgggggccccttcccaaaggttatatcg

SEQ ID NO: 636518 - DNA, 226 bp, Homo sapiens
  misc_feature (20)..(20): n is a, c, g, or t
  misc_feature (144)..(144): n is a, c, g, or t
  misc_feature (196)..(196): n is a, c, g, or t
  misc_feature (220)..(220): n is a, c, g, or t
atctagaggatccctgacgnagtgcatggtcaagatactacattgtctaaagttaggggaaaaaagtaaaaaggctgtgagttctgtgcaagagctcatttgtagacttgcaaaatctaactaattttatttttaatgcttgtngttagagcagtgctcaaaattacagaagcttcaaattgttgtgttttcacanaaatttgctacatatgttgacatngaatgt

SEQ ID NO: 636519 - DNA, 378 bp, Homo sapiens
tactgagatgaagcacgggaaaaggagactggcgacaagatcgaaccaggagacaccgggaggtgtgagctctagctcgaaaataatatggtcacaaggcaaatcaataaagaagagggaatgaagaaagactacaggcactgaggagagatcaacaggagagctagctgatgtctgatagaaataaggatgagggtatcccataaactgaatcggaagagaaataatagctgaaagccgtgcccgaagtctggggaaagatataaatacacactattatgaaaaggtcagaggtctccaataagattcaatctaaattatatgaagacatataatcaaacttcaagacaggattctgatgggagcaagactggcgca

SEQ ID NO: 636520 - DNA, 163 bp, Homo sapiens
ccggtactaaagcaacccgactgcactctgtgtactcgcagcttcctacctgctttgtccactctcttgttactgactcctcccaatttgctgctcattccctgacctgtcagcaccagctcccccaagtctgtcacttccatttagtccctgcctttcactg

SEQ ID NO: 636521 - DNA, 345 bp, Homo sapiens
  misc_feature (4)..(4): n is a, c, g, or t
  misc_feature (78)..(81): n is a, c, g, or t
  misc_feature (87)..(88): n is a, c, g, or t
  misc_feature (101)..(101): n is a, c, g, or t
  misc_feature (133)..(133): n is a, c, g, or t
  misc_feature (169)..(170): n is a, c, g, or t
  misc_feature (197)..(197): n is a, c, g, or t
  misc_feature (199)..(200): n is a, c, g, or t
  misc_feature (298)..(298): n is a, c, g, or t
aganccacgagcagcaactaccatgggtgagaggatctgggggggggtgtgacccttgaggtcagaagaggcctcgannnnttaggnntaacagggttggnagctgcactaaagcctggggcagctccctttncaaaaggacactgcccagcaacagcaagggcacggnntggtcaccatcccaggtcatcggggantnntaaagtgtgctcccaggtaagcagggtcaaaccacccccaagagcctcacttttccctggtggctctgccactgaactgactcttagaaaccggaaanggatgttttttttagccagaaaaccggagggaattttgataggcaca

SEQ ID NO: 636522 - DNA, 293 bp, Homo sapiens
gccagcacttaatgcaggctgaagctgaccctgggtggactcctgctctctgccagcccctttctcaccccttggtcccacggcccctgtggctctctcccctctgctagaatctcgctgagggattggtgggtgagggggtggtcacgcactggtgtggagatctggtgccccctggaggccggacaggaagtggccagtggcggacaaggtctttgagaactcggtggcatcccgctcctgatggcctgggtcccaccgcccctcccccagccttcctgacagcagaggag

SEQ ID NO: 636523 - DNA, 438 bp, Homo sapiens
actctagagtatcccctgtattgccggtgctggcctgtagattgagtcctgattcaagctttgcctgatttcagtgttatccactcctgggttgcaatgtgaaggaggcaataaattcccttctttgcttcagtcaatttgaattgggtgttctgtcaatggcaactgaaatgttccaaccccaatattgaatttttttttaaacaaggtctcgccctgttgcccaagctggagtgcagttgtgtcatcttggctcaccacagcctctgcctcccggattcaagagattttcctgtctcagcctcccgagtagctgggaccacaggtgctcgccgccacacctggctaatttttgtgtttttagtaatgatgaggttttgccgtattggccaggctggtctcgaactcctgacctcaagtgatctgcctgccttggct

SEQ ID NO: 636524 - DNA, 375 bp, Homo sapiens
ttttggagatggagtttcgctcttgttgtaggcactcaggctggagtgcagtggcacgatctcagctcaccgcaacctctgcctcccgggttcaagcaattctcctgcctcagcctcccgcatagctaggactacaggcatgcgccaccatgcccagccaattttgtatttttaatagagataggttttcgccatgttggtcaggctggtctcgaactcctaacttcaggtgatccacccgtctcagccccccaaagtgctgggattacaggcacgagccactgtgcccggccgccttttatgtctgtcacagatgtgtgagcaaagttttatattctactactgggtagcctgtggactacagcgtgttagttc

SEQ ID NO: 636525 - DNA, 212 bp, Homo sapiens
agcatggctgctttagtgactcttctcttcacagatgtccggaggctgcactgcagcgcagccgcttttgggcgggcggccacgtggcgactacagcaggggactggctgccaacaccctccggctacggggccccttaccgagctgcccagactggtcatatgcggatggccgccctgctcctccaatgaaaggccagcttcgaagaaaag

SEQ ID NO: 636526 - DNA, 264 bp, Homo sapiens
aacgtaacacaggtacctatacgtaacacaggacctagacgctacagtgtaggaatttgaagatagatagaacaccgaccttggattactccggttctgaactcagtctcacgtatggactttaatctgttgaacaacacgaacactttaataggcggctgcaccatcggagatgtccgtgatccaatcatcgagagtcgtaaacccgtatagttgatatgcgactctagcaataggattgcgctcgttatccctacgggtaac

SEQ ID NO: 636527 - DNA, 103 bp, Homo sapiens
gccatctccagcaacgttgcagatatacggtgacacctggccttgaccgggcggctcgaacctggcggcctgggaccagcgtcttcttcctcaacagcccgtt

SEQ ID NO: 636528 - DNA, 649 bp, Homo sapiens
  misc_feature (36)..(37): n is a, c, g, or t
ggggaggggaagacgaacgagggcacgagtacaccnnaaggaacagcaaataataatgctttttatttagaacatgcagaaaagatatgcttttgaattataatacacaaatcatattggtctatttaataataacatattaataactcaacattagataagtatgagcattatgtgacaggcaatgcaactgttacagagtatggagaatagcagatatatttgcacagggaaacataggaaactttccgtaatggaggtcgaatggtaaatagatgttaagggaagggaaaatgggagatgacaggtgagaaaaggcattacagatagtgaaagatggataatgccccagaggaaagagagctgcagggactgcacagcagcagccaggccatttgctctttttcagacaggaatgaagcacagctggtagaagggcgggacagaggcaaatccattgacaactggagtgggggtaagggtttttgggtcaaccagagattttagggtaaaggtttggaaaagggagggcaggaataaaaaaagtttcatggcggggaagggtttttccaaaaaaaaaagggttttctgttgagaaagggaatgaaagatttaattttcttaaaaatgggaactttattcaaaaagg

SEQ ID NO: 636529 - DNA, 157 bp, Homo sapiens
gctagcagtagcatcagcaggctggggtggagcagggcatgttagtttagcggctgactctcaaccccatgggtagtgtttggtgaaggttgagggacctggactgctaggtggggggcatctggagtggtttagtcagctgtgaggatgcggctgg

SEQ ID NO: 636530 - DNA, 271 bp, Homo sapiens
ccctttaaaaagggtttgcctttttttttaaaaaaatttggggcccccccccccccccgcccggaaggtttgggggaaaggttttttcctttccccccggggcccaagggccccccctttcctggttaaagccttttccccccccccctttttttttgggtggggcaatggttttccctgccccccccccggccctgttttttttttttccccctttttttaacccctttttgtttgttttttttttcccgttaaagggttttttccggga

SEQ ID NO: 636531 - DNA, 531 bp, Homo sapiens
ggctgcaggaactcggcacgagctaggcagtgggggggggtcggagaaatgccaggactaagggacgttctaagaagagccggccccacctcgaaagacaggggggcgagacgggggaggccgcggaggcagagggaacgcaggctccaacggacgagcagcaggaaaacgtgacctcacccatggacgcgcataaacgaggccgccaccacgccaaacaaaccacgcgcgcgcacaatcagtacggaaccaacacgcccgacggcgcacgagcatgccgggccgccacacaccccaccgaccccaaaacgcacggcacggaaacaaacgcgggccctttacatatctcgccggggaaaaacaggagagggcgccctgccaagagaaaaccacgcaagacagaacgccgaacaacaaggaaccggacccacggacagaggcgacagaacaccacggccgaggagctggacgctaggccaagaccacatgccaaccccggggggcgcgaggaccccgcggggagggccaccc

SEQ ID NO: 636532 - DNA, 734 bp, Homo sapiens
aaacagccatggtgcgtataccccccagtgacctacactgccaggtccctaccctggccctgggggcacacagcacagtcctggtcccttcagtgagctgcaccatggtgacagtgcttgcatgtggagagatctttgagtgggatgcgcctgtgcatgactgtgtgtgtccccactgccagcagtgccatcagcaccaagatctcctacaaagattgggcttgatgaattatctgtgctgggtttcttctgcagcttcatgggatgtgatctgggctgctgcctgatcccctgcctcatcaatgatgttcaagtgatgtgacgcacacatgccccagctgcggagtcgctacatctacccgtatcggatgctgcctgtgctaactggattctgggactctgggactcccccggcttgtcggtctggccccctgtgctttgctcccttgcgctcagtggtccacctttcccgctcccacttggggcttgggacgcctgtgccaccatcccctagaagtcctgtcctcttcaccctgtccctatcttgcgcctgtttcacttcttctggctcgcacttctcgccgggcgactctgtgtgcccaggggtcgtggtgtggctgggtgcttgcacctggtgcttgtgtgttgctggctgcttgtgtgtctgacggggagatctctgcaggtggcctgctgggcctgttctctctgccgccgtgcggtcgcccatctcc

SEQ ID NO: 636533 - DNA, 726 bp, Homo sapiens
ttcctgggacgtccggttgacgcgcgtgtgctgcagagaccatgtgtggcgacggggcagaggctgatggcagcatccaggtgacagtggaatgaaccgggtacaggagcccagtgtggctggaccgtgtgtgccagcatgttctctgagtcaggtccacctgcagacatggtgtccgcacgcctagtgcctcacagcaaggaggagctacccgacacatcaaggactgtctgcgacgcagcagaagaagggagtgaggaccctcacggcggctgctgtcagcggggctcagaccgatcctctccaagctggagccccagattgcatcaggcctgcgaatacgccctacagggggctggatcaagttggatggagaagctccccatcctgactaggagcccacggagaaggtcctggctggacaccaatggagcttgtgtcgtctaaggtgtcgggggcccaagagatggtgtctagcgccaaggacacggtggccacccaattgtcggaggcggtggacgcgacccgcggtgctgtgcagagcggcgtggacaagacaaagtccgtacgtgaccggcggcgtcaatcagtcatgggctcccgcttgggccagatggtgctgacgtggggtcgacacggtgctggggacgtcggaggagtgagcggacaaccacctgccccttacggatgccgacatgacccgcatcgccacatccactggatggg

SEQ ID NO: 636534 - DNA, 512 bp, Homo sapiens
  misc_feature (16)..(16): n is a, c, g, or t
  misc_feature (47)..(47): n is a, c, g, or t
aacccctggctggaancctcacctgaagcaacctgttggaagggtcnaggggaatggcttcctgaagctaaaccctggcaggaaactgggctaacagcatggaaagctgcaggcagtggggcagaggctcccctaagaggctccctgtctccccacggagacaaagttgtcccagccccggctcctaaatagccgatacagaaggcaaaggcagggattcatcactgtgtggccttaactgcggtggggtctgcagcactcaaatgagtgcattaaagtgtgtgggttacgtggctgccagcagtacacccccgaactgttgccaccaaaggctgggcatttacagctgatcctctgtacttcagcacacacaggctccctctctccagccctcctgcctctcagcacaatctgggagtggagtgaaatgcgctgctgctctgccttcctgtcacatatgggagaaccacccctggcatttggatctttagactccaaggaggggaaccaca

SEQ ID NO: 636535 - DNA, 1160 bp, Homo sapiens
  misc_feature (531)..(531): n is a, c, g, or t
tctaattttttcagttgagctgctgttttcttccatgcaatatgtgttatacctcaattgtgtgtgttttagaaaaagcgtgggtgagagtgtgcccctccttacattaaattaagcaatgtgcaggtgttttgtgcatgtgcaaaattataaaaaatttaaattgtgctccgtgattctattttgtgtaaatgtggaagaaacaatctcattattctttctcataacccggataatgtggagggaagacatagtgtgcttgtggtgcattttgtgatatattattgtgagagttctcatatttttctccaccaatgtgtctcatatactttttgtgacgccagtgtgtgggtattctctctcatataagtatatctcccatagtgtcacatgtgttacacattccagaaatgtggcataaatataatatacgcgtggtgtgtattaaaaggtttgtgtgggtgttgtgacacagcaaacacacagatgtgggaataattaaacctgtgcaaatgtgtgggtgctaccacnaaaaaaaatgcaaaaacaaaaaaacaaaaaaaaaaaaaaaaaaaaaaaaaaaacaaaacacaacaacaaaaaaaaaaaaaaaaacaaaaaacaaaacaacaaaaaaacaacaaaaaaacagaaaaaaaaaaaagggagagagaggagagaagaaaaaaaaaaaatatataaacagagagaagaacacagaagaaaagacagagtaccgtaaaacgtgcaatgatataaaaaaacagagagaaggacacaataaaagaagagagagcagtactaactaagaacaacaacgagaacgagggagagacaagaaaagagacagaaaagcagggcggaccgagggaaaaaagaaaaacacagacgaacagcagatagatcagacgagaagaggagaaacccaaactcaacaacatatgagggtggggagcggaaaaaaataaaggaaacagaccaaaacaacccggaccaagaaaaacaagaaacaaacgagagacggagagaggataagaccacacaaaacaaaagacaagaaagcggaaagggagtatagaaaaacaagacaacgatctatgaggagtgacgaagcacagacacaggaggaacaaaaggatataatagaaaacatttacgcg

SEQ ID NO: 636536 - DNA, 286 bp, Homo sapiens
  misc_feature (36)..(36): n is a, c, g, or t
  misc_feature (88)..(88): n is a, c, g, or t
gcacccaccccgccgttgcgctgagcatgcgcgacntagctccctgagcatgcgcggggactccttgaagcccgggagctggcgtcgnaaccagtggaggtggctatggctgctctctgcaagctctgcctcctgggttcacgccattctcctgcctcggcctcccgagtagctgggactacaggtgcccaccaccacgcctggctaattttttgtatttttagtagagacggggtttcaccgtattaggctggtctcgaactcctgatctcaagtgatttgcccg

SEQ ID NO: 636537 - DNA, 162 bp, Homo sapiens
tcattgagcaccaggtggttcctgacttgcacagtcgtactcccactcctccagctttgtacgctggggctggcgttgccctcaacgaccagtttgtcaagctcatttcctggtatgagccaactaatttggctactgcgactgggtggtggacctcatggc

SEQ ID NO: 636538 - DNA, 795 bp, Homo sapiens
ggaaaattatgctggcgcaaagtctagtgatccaccttctcctagtgttcttccaaagcctcctactcactggatggcaagcactgttgaaaattccaaggcaaaagcagggagctgatggcagtacacttagaaacgctcctcagagttcaaacttagatttcagatttcagtatgtgtgtgaaacataattttctcccatatccctggtactcttgagaaccattggtacaagacaatgtgaaatttgccttgtgtgcaacatagccaattggcaaagatgttagtttagaaaattacatacaaacagcttgtattatatctctatatttccgctaaatacgtgtataccatgtattatgtgtatattcgttcatacttgcagaggtatattatacgtgacggctatgacagtatgtatttctgccctgcccacattgcagcgtgtctcgtcatataatacacgtggataaattctccctgtgtgctaaggcacatggaagaccgatttgatttgcacaaggtactgagatttaagtccaagaagacagctgtcatatctccaggtgaccgatctaacatgtgaacagtttgactaactgcacatactgaagtttaagactctgtgggcacaatcacatgctagcctgaggtttgtcactctaacattgatttgtagctctgcaagttactgaacaactcctattcccattttgctagactccaattccggctcgcaatatatccattccacgcttatgcctctaatgtaatggcaccaaattgctgtctcaa

SEQ ID NO: 636539 - DNA, 212 bp, Homo sapiens
ggaggggtaacggtggctggcgactattttcaggtacatccctctcatccacattccgatactcttcattggcagcaaatatctttgtcttcaaatcctattttgttggcttctaggaaaccagagcacatcttgtagtttcttcttactcgctgtagagccagaggaagatgcaatatatacacggatcaccatcctgaagaacagcatgg

SEQ ID NO: 636540 - DNA, 423 bp, Homo sapiens
ccgccagctaggcaagttgcaactccagtggtagcccctcagtgcgcccttcacggtcaatggttaagacctctatgtctatatgagcatggtaaaggatggtgcctggtgcggtctgtgtacatacagcggggtttcattccatggaagcagtgcacacggtagtcaatacggccagctccatgctagcccgcgacttcgttcaggttcctatagagctccaagcaggtgtgttgccatgtgtcctatccgtgcccttgagtcactttcacagttgactcttggcagcagactctctctcgagaatgccaggggtgctgacacctttgaggtagtaatgggtcagcgtatagagctcagaaggagccaggctcgagtggttgtccaacattccagcctcgtagttgatgtgcatgatgttcg

SEQ ID NO: 636541 - DNA, 442 bp, Homo sapiens
tctacatggatcccccctcgaaacccagtattgataatttatacttactattagccctttacagttttcttaaccttcctcttttacttgcacgctccatatatttatcgtcatacgcgttgtttcatcactaaagtatcctgtgattttaaacagtaatgccattggtttattgataagagcacgattttcacgtagcaagcacagaggctgttagtgagagttttcttcatcggctgctttcatcttggcacatagccctcgttctcctgccgtttcttgggcaaaactgctggcctcacctgtcacaatgtttcagtgtttccctgtggtttaatgtgaagtgtatccataaagctgatagtactacagaaaaaggaatgaagataaagataagaaactaatcataattttaccagatcgcagttttgattgtacatag

SEQ ID NO: 636542 - DNA, 877 bp, Homo sapiens
  misc_feature (60)..(60): n is a, c, g, or t
  misc_feature (144)..(144): n is a, c, g, or t
  misc_feature (154)..(154): n is a, c, g, or t
  misc_feature (171)..(171): n is a, c, g, or t
  misc_feature (248)..(248): n is a, c, g, or t
  misc_feature (281)..(281): n is a, c, g, or t
  misc_feature (298)..(298): n is a, c, g, or t
  misc_feature (317)..(317): n is a, c, g, or t
  misc_feature (319)..(319): n is a, c, g, or t
  misc_feature (357)..(357): n is a, c, g, or t
  misc_feature (521)..(523): n is a, c, g, or t
  misc_feature (533)..(533): n is a, c, g, or t
  misc_feature (659)..(659): n is a, c, g, or t
  misc_feature (661)..(661): n is a, c, g, or t
  misc_feature (679)..(679): n is a, c, g, or t
  misc_feature (705)..(705): n is a, c, g, or t
  misc_feature (731)..(731): n is a, c, g, or t
  misc_feature (736)..(736): n is a, c, g, or t
  misc_feature (748)..(749): n is a, c, g, or t
  misc_feature (762)..(762): n is a, c, g, or t
  misc_feature (777)..(777): n is a, c, g, or t
  misc_feature (783)..(784): n is a, c, g, or t
  misc_feature (790)..(791): n is a, c, g, or t
  misc_feature (794)..(794): n is a, c, g, or t
  misc_feature (807)..(807): n is a, c, g, or t
  misc_feature (862)..(862): n is a, c, g, or t
tttcatataattttcacttgtcacatataaatttcacctgtcattgtcacaaaatattantttgatttttttaatcattaaaaaaagtaaaaaccactctcacagcccttacattaaaaacgaggtgggccagatttggctgcnggtgggagtntgcagaccccagttctngaggggtaaactaatggtttaatgaccacagctgctgctcacacatcaagacagacagacatgggccgggcgttgtnactcatgcctgttatctcagcactttgggagantgaggcgggtggttcanttgatgtcaggtgttcganancagcctggccaacatggtgttaccccgtccctactganaatacaaaatattagctgggcgtggtggcatgtgcctgctatctcagctactggggaggctgagacaggagaactgcttgaacctgggaggtggaggttgcagtgagccgtgatcccaccactgcactccagtctgggcgacacagcgagactcccactcccannnaccccccccngacaggcagggtcagaagtgtgagtcctggattccaaggtggcaggtgtaatcagggagctaagaattcattatttttctcattcttggtccagttacctacagaaatggctcctgtaattacaanancaggaggtagggccaggncctgggggagaggagaaggggctggnagtgcaggagtgagagtcccagggantggcncactccctgttnnggtgggagttganacaagtgcaggcgcngaatcnnctctgnncgnttcaggtacacanactaactactactacacaactaactgacggacagacaacggggacactggggacnaactgtagaccgaac

SEQ ID NO: 636543 - DNA, 187 bp, Homo sapiens
ttttagacagggcttcacccggtcactcagtcttgaatgcagcggcgggatctcagctcactgcaacctccacccccagggctcaagggatcctcccacttcagcctcctgagtagctcagaccacaggcatgcatcaccacaccagggttttgtcttgttctatttttattagagacagggtctca

SEQ ID NO: 636544 - DNA, 593 bp, Homo sapiens
  misc_feature (13)..(13): n is a, c, g, or t
cggctgacattcnatgcaagtatgctgagctgaaggaaaagattgatcgacgttctggtagatagatggaagatggccgtacattcttgaagtctggtgatgctgccattgatgatatggttccggcaagcccatgtgtgtgagagcttctcagactatccacctatgggtcgctctgctgttcgtgatatgaatcagacagttacggtgggtgtcatcaaagcagtgaacaagaaggctgctggagctggcaaggtcgccaagtctgtccagaaagctcagaaggctgaatgaatattatccctaatacctgccaccccactcttaatcagtggtggaagaacggtctcagacctgtttgtttcaatcggccgtttaagtttagtagtaaaagactggttaatgatagcaatgcatcgttagtccttcagaaggaaaggagaatgttttgtgggccactttggttttcttttttgcgtgtggcagtcttaagttattagtttttaaaatcagtccgttttaatggaagcaacttgcccaaaaatttgtcacagaattttgagtcccattcaaaaagttagatgagaaaaaaa

SEQ ID NO: 636545 - DNA, 919 bp, Homo sapiens
  misc_feature (13)..(13): n is a, c, g, or t
  misc_feature (45)..(45): n is a, c, g, or t
gctccagtcagcnatggcagtgacggcgttggcggcgcggacgtngcttggcgtgtggggcgtgaggaccatgcaagcccgaggcttcggctcggatcagtccgagaatgtcgaccggggcgcgggctccatccgggaagccggtaggggccttcggaaagagagagcaggctgaagaggaacgatatttccggtgatggctcaccgggtaccctagtccagacctggatctcccaatggccttccagatccttaaactgtcaatcgccccgacccggttcctagctggtgccttgggcggccccatcgccgcaatagaattccctggtgcccaatccagtatacgcctaacccttgatgtgccgaactcgttgccacgtagtagggcactcccagtttacctgcgacaactagtgttcaggccaccgcaaaccgttttccaccgcgcgggtctccgaataacaaaccctacggcttcaactccttcgctttatcagttaccagtctcgccgctgtggcagttcgtgctcagggtcgtgcgaagagcatgccccagatttcttcgtcacagtgtctagatccgacccgcgccaaacgtctgagctccccagcctgaggtctcctcggtccctataccgcgacctgttgaggcccccgtcttacggctcgtcctttccttcgcccagtgacgcccgttaggcttttgcggatgccctgcattgcatttcacgggctttctcagtggggtagtcctaagagcccccgcgaatttccggcaacaggagttgagcgactgattggggacgcttggttccctgggaagctaacattaattaggttgggaacaccattacttcttacacagggctttctaggcactgtagctacaaggcgcagtgcctagtacccttgtagaatc

SEQ ID NO: 636546 - DNA, 719 bp, Homo sapiens
  misc_feature (13)..(13): n is a, c, g, or t
  misc_feature (45)..(45): n is a, c, g, or t
gctccagtcagcnatggcagtgacggcgttggcggcgcggacgtngcttggcgtgtggggcgtgaggaccatgcaagcccgaggcttcggctcggatcagtccgagaatgtcgaccggggcgcgggctccatccgggaagccggtaggggccttcggaaagagagagcaggctgaagaggaacgatatttccgagcacagagctagagaacaactggtcagctttgaaaagaagcagccatgaagaagaaatcgttcatcattaagaaggagattgatgcgtctgcagaaagaaagttgagtcgccataagcagcaagatcaccaatgctaagtcatgatgattaggtgcacaccgtgttgccatagcaatgggcacatgtcattgcccagcttctgtgtagacgatggttctggtttaagtaatatttgtctgtgtgctagctaacagatttatgatagattgtcatccggtggactacaatggatacggattaaacctctagtagagtgatgtattgtccgcgggggtcgggataagaggaggggtcctgacgtgggcaacgtgggacaaaggttgcttcacgggaagcacaagtgtttctgttggtcccagaggggagaaaagactatcgcgaggatcgcatatttggggaaggcgaaatcatttcggactgaggcgtggttcccgggtttataagtgggtgaagaaaaggcgaag

SEQ ID NO: 636547 - DNA, 440 bp, Homo sapiens
atcctgagctggtattctcataggataatgaaggtgttatcacagaactagtgtttctttggaataagcagtttctgaaatgtaagtagtcgaggcttcatatgtctcagaatgagttatatacttttctctgtagcttcatccaatacacttatgtagtggcataatatacctatgttttggcttaaaatatctgtgccagagggtatatctgaaattaagaaatttggccaggcatgatggctcatgcctgtaatcccagcactttgagaggccaaggcaggtggatcacctgaggtcaggagttaaagatcagcctgggcaacatggtgaaacctcacctccaccaaaaatacaaaaattagccgggtgtggtggtacacacctgtaattgcagctacttggggggactgaggcacgagaatcacttgaacctggga

SEQ ID NO: 636548 - DNA, 373 bp, Homo sapiens
tgctgggattacaggcgtgagcaaccacgcccagcccatattttctaatcatggttgtcacttcattctctgctcttccccagccccttaaaaacctggccatgcctcaggcattaagtgatctcaggtgtacagtatataatctatagatagatccatatccctgaacttgttctaactgaccccagatctcacagttgggttcccctctcacacatttcacttatctcatcaaactcaaccaaattgctccccttggttagaccagtggcaccacagttttttataacctttggacttgagagacactttaacttctctgttccctttattctctatatgtgtcagtcaccagagacctattataggctta

SEQ ID NO: 636549 - DNA, 375 bp, Homo sapiens
gaatattctgttgttgggtggcgtgtctatattccgttgttgggtggattgttctatattctgttgttgggtggattgttctgtattccgttgttggtgtagtgttctaaaatacttgtggttggtgtagtgttctatattctgttgttggtgcagtgttctatattctgttgttggtgcagtgttctatattctgttgttgggtggcgtgttctatattccgttgttgggtggattgttctatattccgttgtagggtggattgttctatattctgttgttgggtggattgttctatattctgttgtcggtgtggtgttctatattctgttgttggtggagtgttctacatactgttgttgggtggcatgttct

SEQ ID NO: 636550 - DNA, 198 bp, Homo sapiens
gtcgacagtccattccattcgatgccattccatttgattctattccattagtctccattcaattccattaatctccattccattccattctactccaactgattccattccattctattcctttccattccatttcattccattccattccattccattccattccattccattcgtgtccattccactccagtccat

SEQ ID NO: 636551 - DNA, 495 bp, Homo sapiens
cactggtatttcctggagtgaaatatttagcttttacctacgctagctcttattcttgagtagataatactaaggatgatagtatgtgtgtctagttctgactttctactgactcatacttgcgaaatcaggtctttatttatttttttcttgagacaggtctcgctctgtcaagcccgggctggagtgcagtggcgtgatctcggctcactgcagcctctgcttcctgggttcaagtgattctcgtgcctcagcctctcgagtatctaggattacaggtgcatgccaccacgcctgattaatttttgtatttttagtagattcgtggtttcgccatgttggccaggctggtctcaaactcctggcctcaggtgatccgtccgctttggtctcccaaagtgctgggattataggcatgaaccaacacaaccttgccaaaaaagccaggttcttttaatttatttcacttgttcccaattttatctaacttaaatt

SEQ ID NO: 636552 - DNA, 298 bp, Homo sapiens
  misc_feature (191)..(191): n is a, c, g, or t
aagttcccctcttaccccacaaaaggaagtctaagcttcccgagccctgcctgtagggcaccctttcacatagtgcactggtcccaccttccccagcttccctcttctgctcttcccagcacccaatcctatccaagctcgtgttcacatctgaaatatgaaagtcctggctgccgggtacagtggctcanacctgtaatcccagcactttggcgctgaggcgggcagatcacctgaggtccggagttcgagaccagcctggccaataaggtgaaaccccatttctactaaaaataca

SEQ ID NO: 636553 - DNA, 1218 bp, Homo sapiens
  misc_feature (570)..(570): n is a, c, g, or t
ggtcccgccccggcgcagcgcgcgcaggctgcggagccagcggtggtgacgcgaacaacgattccgggtgatgactgctgacgagcagattcggcatggtgacgcggagctgcggcctgactcccgatgtgcgctctgtgccagccacccgacctgatgcgatccgtcggcagagtcgtttgcctcggaccgggtgtttggtaaggtcccgtgcgtccagcgcgcccaagggcgcatcacgccactggacgacccggtcactcctgctcgaatgttatcgaaagctaactggcatgaatcctttgtcagagtattagccggaaggacattgagtcgaatctcttgttgccatttgccgagcccgaggggtgatcaaaagcaatttgctcgacgggccacccgggggtggcctctttgaggttaaccccttaactggggacataccaagaggactttcgggttaaacggtgccttattatattcctgattgaaaggcgaaaacgaacatctctttattgccggaacagctgtaaatcagaaagggtaaagccccgaccaactggaaccggnggccccagggggacctgaggtggccattccccttaccgaggtcccgtcatcacccccaatgcccctttccggcttcctctcggacccccgccccccctttccaccctgttcctcattgtaacgttaacccgccctattttaccgttccagttggagaaacccttattggaaacattttttcccgtgaaaccaagttaaccgaaaacggggggcgcggggaaaaatgtgggcccaaaggagcaaagttacttttgtggacttcaatttttggcacactttgtcatttgttggcaccggccaggaaggaagagagaatacaacatcaacgaccaacgaggtgtgaaaactcgggcacctttggttggtcaacacacttttcccatgaacacacccagacctgatgaaggacacaccacaagagggcggggggtacacattgaaacggctgaacaacagattggggaaaaagacttggggcgaaaacttctgattaagaacccccttttgaaaaggtttgtgaaacactaaggggggaagagggggaaagggaaccagctttgaaaggccagtttttcccgaaaagcgcacctgaaggcttaggcgcaaaggaggggtgaaaacaccgctttttataaaaacttgggatag

SEQ ID NO: 636554 - DNA, 606 bp, Homo sapiens
accaggattcacgggtccaagaatcaaggggtggaagaggaaggggccccactcactatcaccctaagtgatcccctagcaaaatttctgtttcaggtccccccgacattatgtctgcttgtctaaaaggtctaagtcccaaaagaaggacccctgccaccaggaaacacaaggacaattccattaaactggaagttaagattgccacctggacactttgggcttctcctaactttaagtcaagaggctaagagaggagttacagtgttggctggggcgattgacctggagtatcaagatgaaatcagtctactactccacaacagaggtggttttgtaagtttttcgaggggtgcttgactgtgatacgttggagactctggggttccaaagaaaaacaagacagaatctccctgccatcaccgagctcgcatcccagaaaaatgctggacttgtggttctcacacatttccaggttcaactggctgccgccttcctatcagcacccgccagaatccgaacagctaaaagttggagagagagggaacgttacaatgtaaacaattaataaaagctaatttggccatgctcttcccaggaaaaaaa

SEQ ID NO: 636555 - DNA, 906 bp, Homo sapiens
  misc_feature (54)..(54): n is a, c, g, or t
  misc_feature (62)..(62): n is a, c, g, or t
  misc_feature (89)..(89): n is a, c, g, or t
  misc_feature (123)..(129): n is a, c, g, or t
  misc_feature (132)..(133): n is a, c, g, or t
  misc_feature (150)..(150): n is a, c, g, or t
  misc_feature (168)..(168): n is a, c, g, or t
  misc_feature (174)..(174): n is a, c, g, or t
  misc_feature (183)..(183): n is a, c, g, or t
  misc_feature (192)..(192): n is a, c, g, or t
  misc_feature (235)..(235): n is a, c, g, or t
  misc_feature (251)..(251): n is a, c, g, or t
  misc_feature (258)..(258): n is a, c, g, or t
  misc_feature (316)..(316): n is a, c, g, or t
  misc_feature (322)..(322): n is a, c, g, or t
  misc_feature (382)..(382): n is a, c, g, or t
  misc_feature (385)..(385): n is a, c, g, or t
  misc_feature (389)..(389): n is a, c, g, or t
  misc_feature (419)..(419): n is a, c, g, or t
  misc_feature (433)..(433): n is a, c, g, or t
  misc_feature (524)..(524): n is a, c, g, or t
  misc_feature (820)..(820): n is a, c, g, or t
  misc_feature (832)..(832): n is a, c, g, or t
  misc_feature (898)..(898): n is a, c, g, or t
gacccgcacccccccccccgggccgccccccgccattttttcccgcgtctcttnccccaccncgacaggccccgcagaggcatggaagnggcgggaaaaacacaactttgtctttgaaagggnnnnnnnacnncacaccaaacactgccnctgcagcaggcgggagangcggangggcggccnggggggcancctggcctgggaccccccgaaccttgaagactccccccccccngccccccccggaaacnggggggngggcgttagtgggggtcccttgtagggaatttgcagagggggaatcctgaaaggcttncccacncccccctgacccgttgtcaggccgggatgcccggggccccgggaggagacgccgcccatncgnccancttgagggggactaatcatggagattctcncagggccggctgcnatcccagattttctaatcggagaaggagagaaatcaacttccatcgactccagtttgaaactgaactttttattgtgctgaaagctgtttnttgtgatgatctcatactaaatagatggagaaaaggtattgaattaaatcaaaaaaactgacttccccccaggccatcccaactgaaagtgtaagaaggctctgaatcagtgaaatgttcttactgggtttgcaaacggcatttcacatgaattcagcagttcccatagcgtcctgtgagtcgcacggccctgctcctccctagcgctgaagccaagtgaactcaacaccccactgccatttacatcactggctcttacaactgcaactgtcactcagcacatggccactgcgggngttaaaggtgtnaaattaagacctgacaacaggagccactaacgcaccagctttgaaaatccggggattccggacggnacagcctg

SEQ ID NO: 636556 - DNA, 697 bp, Homo sapiens
ggccatcacagttgactctgaggcaggagccaggctatgtacaccctctctcacaaagacctacaagggaggactgtcccaaatttacagatccagagatccagagaaaggaaatggcactttaagatcacacagctaaactaagaaacagacaaacctggaagtcagggctttaggccccacccttctttctatagtttttttttttttctaaatccaaggatgttcctttctctccccactccccaataatgggctgcatatgatttccaaggtttaaaacttgtaaacatgaggtggacagaaggttggggaacagggcaatgccaagctgtgggcagtaaagaattttaaatagcaagagtgtcctgacaagctcttttaagatgatggggtgaggaaaaggctgtgtacgtcacaggtcgccctgccagtagggcaaacgcaggagagccaggtctaccaggaccagagggtgcccgaggcccaccgggcttcaagggacacacaggcgattctggtgcacccggtccccggggaaagtctggtgccagggggctccgtggtcaggaagggtaccaggaaacgatggtgacactgggacccactggggccacagggtccccaaggaccagggggcccaccgggcaagaatggatcaccgggatctccaggaaagcctggccctcaggaaccc

SEQ ID NO: 636557 - DNA, 299 bp, Homo sapiens
tcttatttttattatagtaaaatatacataaaataaaatgtattattttaactgctttaaaagggtaaggcagtggcattaagtacatttacaaggttgggcaagattgtgaaccactgtctgttgcagaacgtttgttactacatccagtggaaattgtgtagtgcggggtagctcttattcctccgtgtaccctctgctcctgggaactacagatctgttttctgggcgcggggaacatgccgctttaaataatatttcatataaatgaaatcagacaataaaaaggtattttgtga

SEQ ID NO: 636558 - DNA, 1459 bp, Homo sapiens
  misc_feature (518)..(518): n is a, c, g, or t
  misc_feature (1426)..(1426): n is a, c, g, or t
gggccagcgtgggaatcctcacccgcgactgaaggcggctggtatctgtgcgagcctgtgtgctcttttcgagaccgcatgtgagtcgggaggagatccagcttggctggcagccgcctcggttctggtgcctgggattcgatgctcgagacgaacggagggatgctgtctggcatgactggtgtggccgaagcggagtaacctgcagtaaccctgactcgtacggctggctcggaacagccattcgagcctacgattgacgccagcttgcggccgctgcgggactcggtggtaccagcgcgggtgtagaaggccgaactccgacctacgatacttgctgctcgctgcacgtcccgggcccatgggcgcggggctttctggatgccttggcggccccacggtgcccacccctggagtgggaccccgagcaagggtttccttgttgccacttttccgcgcattgcgagactaccgaagtcacgtcgcaagttctcgcgaaagggaagcagaggtatgcntaccaaagcaaattgcgactgttgacgcgcccagggaatccataccgacgtacctatcctttaaggcacataggttccccgaggaaggaaaagtagttcttgtgaacgccattcggccacttgtgaagaagtcccttccttctaagttgggtacgttcccaaccgccactacaggactatttcctcctttatcccgttgtccttccttgatttgttgccaaacctattcccgaacggggcccattcgcgttcgcacagacgttcgcgtatttacttgtcgtttaggctcttctcgcgggtatgtacgtactgtcccccctgggttcccgcttcttcccccgggtgtgtatccctttatatcacagtccaggagtcccttggtgcctaggtgtttgtgcccggtggccggggcacttaaggcgacgaaaccgttttcccgcaagagcgttcgagagagcgcgtatacctattgcattgtggcttgttttaacacagcggccataggggcaattggtttttgggccattccacaaaagttgcgcgcaagagaagcggcttgtctgtgttccctttggaggcgcaaaagagcgcctattagttttggagaccgcttggagatgtggcccctccctttgtttgaccttgcttttaagttaatattgtgagccgtcgcgttctcaagctaacacgtacaaggacagggttccctttcccagttacggagggcgcaaagtgggcgccacatttctagaacgacgcgacaccgtttgtcctcttttggcgtttggggcccacaggcaaggaaaagaggccacatcccttaaggtttccaaagagaggaagaggcttttgtcgttacagagcccctagggctacaacatatacaccaattgttgttggtcgtgggnttatatatccaagggggggctctagaggacacg

SEQ ID NO: 636559 - DNA, 304 bp, Homo sapiens
  misc_feature (301)..(302): n is a, c, g, or t
ctctagcaggatcccgtgatgttatcgcccaacactttgggaggcgaggtgggcagatcacgaggtcaggagatcgacaccatcctggctaacacggtgaaaccccgtctccactaaaaatacaaaataattagccaggtgtggtggcagacgcctgtggtcccagctactcgggaggctgaggcagaagtgcttgagcccgggaagcagaggttgcagtgagccaagattgtgttcctccctttcctgatctcttgtctttgccgtctagtctttggttatttggtgttggaggataacnnat

SEQ ID NO: 636560 - DNA, 1725 bp, Homo sapiens
  misc_feature (1232)..(1232): n is a, c, g, or t
  misc_feature (1471)..(1471): n is a, c, g, or t
cgtgctagtcgtgacttgtcgttgtatgattgagtacgtcggcaccatatcaatgcataccgcgtcatctgcttagttgtgcgggtggattgaatattttccgctcagattgtgttgccttcgttctttgtggagcaacataagtgagctttgtgtaccaaaacggcgggttggtccgcgtctgattttcccgcgtgattatgttttacaccaacatgcgtctctgaacatatgtggcgcgggtaaataattgttggagaccgcaccagcttttctatcaagaggtgtagtttccccgctatgtcctccaaaaagggtgttaattcagtgggggacacacaagggtatgaaaaggggcgtaaccccttcaaagcgtttaatagttcctcatcagaatagggggggagaactccatcacttgttgaagaccggacaacacccgtggtgccctgtgtgccaagagggaatatttcgcccaaggttatttttcccccggaagttctgtcccacaaagtgtagtttcgcagagaaagggccgccacattgttactctaacgaacggggataatgttatcttcccatagctgccgtcgtttataatattccaccacaacaggtgtttgtgcatacaataggctatacataacaagagataatgggaaggacaaaggggttttcctttctgctcaacaaccctgtggttgttacccgcaagaaggcccacaagattttgggtgtgggcggtgaacacacaaagtgaccgcggcccgggtttatcccccccggggggttgggtttataaaaacttttgctcgcccaaaaatatggcccctcatgagtaagtgttatttcccctaaggctgtggagagagaaattggtgggccccttcccgagaaaaaaccgtcggtttgaagagaccccccccgggccgctcatatataaccccttttcacgtgtctacgacaacacgcttgtatgggaaaaatacctcggcggagtgccaaccgccactttaatccccccctcccgggggagacccacatttctttggagttctagatcgcgtctacacttgtgagacgctccaacacaacaggggcgccaacacagaaagggctggggttttgttcctccctggagaagcacagacttgtggccctaataaatgcgccgcttatatttaacctgtgtgtgagaccttggagaccctcttggggtctcctcacacatncgagaggtttctcctcttatcggagaagagatacaccaccccaccggagaaattttggtgtcacagtgtgcccacacactgtcacatacgccacatatagtctgagatatatcacggcacacatgggtataagaaatcctccacacagaacacattttatactgagatggccttatacttctaaagagaagaaaagagaagcttgtcggagaagccccacgagacacccacggagaagngtgaagagatctttctgagcacacacgaataataagaagaaaattaatgaggagattatcggaggcacgcgcaaagagttgagtcagagaaagctgtggagactcacacaattttacccaaaaatcacaagctaattcctcaggtcacaggggtaacctgcgaatctgtgtttgctctgacgaaatggaaatttaatcctcaccaaattggtgttttaaaagttttaagaacctaattaaatagctgactacca

SEQ ID NO: 636561 - DNA, 110 bp, Homo sapiens
atggctcgaaaaggggggtcatcgtccacatcctcagtctcacctttcgcttccagcagaggagtgcccactcctataagcactctcacatttggatcagtcaaggttgc

SEQ ID NO: 636562 - DNA, 513 bp, Homo sapiens
gccaagatcatgtagaagctgacgatcccgagttccgaagacctgtatggccgacctcattggcggatccgaaggtcctacgcgtcgtcgccctgtctggtgggtacccccgtgatggggccaacaagaagctggcacgcaacaagggactcattggcgagcttctctcgtgcttttggcgagggactgaacgtcgcacagtcgcagcaggagttcgatcagactctgcgctccttccatcgactcgatttacgccgcctcggtgtcctgacccttcgacagacgggcccgctgggaaacttgcgggcccgttgtcatgcgtgagctttcgtcggccttgtacagttcgagggtgattcctgaacttgtcgcgtttgatctagacgacccgttggccccttcgaaaactcggtcttccccaggagatggcccgcatcgttgctcgcttgcttgatcggacgagtgtgtgtgtcatctctggtggccagttcggtcagttccggacttcggtcg

SEQ ID NO: 636563 - DNA, 292 bp, Homo sapiens
atgtcgaggatcccctaggctgcggaagacgggaacacccagagggactcatgccaggacgactccgtagagcccctggggtgcaagttgaacggcacctggctgcaggcggacgagctcagctgccgcgagggctgtgcccagcccaaccggcctggcatctacacccgtatcacctactacttgaactgaatccaccactatgtccccaaaaagccgtgagtcaggcctggcttgaccacctgcatcactggaggaccaacccgtgctgtccaaaacaccactgcttcct

SEQ ID NO: 636564 - DNA, 217 bp, Homo sapiens
gttcagtttggttgccatatggtgtgtgcctcccaatccctggctcctggtatgtaggcggatacatgggagttgggcccacatccctatccagcatggtgccgggattggaaggggggaaaggcgttgccgttcgggggctccttcggcgaataacagcttgaatgactttgaggaacaaccaggacaggcacagcccactgacatcttcacatcg

SEQ ID NO: 636565 - DNA, 449 bp, Homo sapiens
  misc_feature (3)..(3): n is a, c, g, or t
ccnctagcacttccttaccattcctattttcctctctgagatacagtttttattctaatcctggctcacagactaatgtatgcatctggtttcctcattgacatctggctaacttaagtctgccaggttcataaggcatgaaccctaattcccagactttctccatctgccacttcctgtgtggccctttgtttacttgatataaaatgaattaaagtagttcatttctacctttgagtattgattagacattgattaagcattgtcctctgatttgaaattaaatactttaggaaatcaaatctgctttgtgaaagtataaacattttcatttacttattcatggttgattgcatgtgcctgacattgtaaaaattaagtgtatactaacccattctttggtttctgggtgtattaaagtgtgaaggaatggtgagatactagtggca

SEQ ID NO: 636566 - DNA, 483 bp, Homo sapiens
  misc_feature (290)..(290): n is a, c, g, or t
  misc_feature (296)..(296): n is a, c, g, or t
  misc_feature (312)..(312): n is a, c, g, or t
  misc_feature (346)..(346): n is a, c, g, or t
  misc_feature (354)..(354): n is a, c, g, or t
  misc_feature (374)..(374): n is a, c, g, or t
  misc_feature (384)..(384): n is a, c, g, or t
agccagagagtggggctcgtttgccggttgctccagcccggcgcccagccatcttccctgagccagccggcgggtggtgggcatgcctgcctcaccttcatcagagggtggccaggaggggcccagactgtgaatcctgtgctctgcccgtgaccgccccccgccccatcaatcccattgcataggtttagagagagcacgtgtgaccactggcattcatttggggggtgggagattttggctgaagccgccccagccttagtccccagggccaagcgctggggggcaanacgggnatcagggaaggggggnaattttggcaaaaggcagaatatgggaatggggnaggtaggncccacccgttaataaacgtnatagacatgncgtcaaaaaccggaagtattttctgtacatgtttggttaattttttttgtacatgatttttgtatgtttccttttcaataaaatcagataaaaacagtg

SEQ ID NO: 636567 - DNA, 117 bp, Homo sapiens
ataaaaactcctcagtatatagaaagagggagagagagaaaaaaaggaaaagatgagaagagaaaggaaaccccccaaagaaacggaggaagggaggaaattgtgtcctatttatct

SEQ ID NO: 636568 - DNA, 657 bp, Homo sapiens
ggaggctgttgcaggagaaacgctcgaacctgcgaggcagaggttgcagtgagctgagattgagccactgcacttcagcctgggtaacagagcgagaccccgttgtaagaaaaaagaagatgtcaatggtcatgggggaagcagggaaggaattctcaagcaatatgaatgtgtgtgcaattcaaaacatgtatttatcccagccctgcccactagctccctcactagaaacaatcatttcaagagttgtttggactattttttgtcatcctctcagaaagaatatgctaggcattttcatttgtaaaatggaactgttactttcctcataagataatgtttagaataaattgagtcagtaaatgtaaaatacaaggtgagataaagtacttaataaaagttattcactttcccaactcagaataggtagcctaagagtgtggttacacttgagctattgaaagctggctttcagagcccctcacatacgtgggaaggggcaagcaatgtgttcaatgcgcatgtgttttggtaaatctgcgtaaggcctggtgtttgatgtctgtgtcccttcccaattcatgttgaaacttaatctcactgcatagtatttagaggtggggccttttagaaagtttgtcgcggctctgctcttgg

SEQ ID NO: 636569 - DNA, 240 bp, Homo sapiens
acggaatataggtaataaaggtctggggagatggtgaccaatacgtgtacggcggctgcatgctctggaagcctggactctaagctggagcacatggaagagctcttcggtatctgagcataatgctccccatctcctgctatctctgcaacagaaacaacaagagcgaatgcagggaaattgctattttatttgtcttccatgaccttggctgtaatccagttatgccgtatcggatgt

SEQ ID NO: 636570 - DNA, 496 bp, Homo sapiens
ctataatgcgttcacatatgagagaccatgtggtcctggcttacggttcctgcatagggggctctaggataatgacctgcagtgccatccaggtggatgcgagcacagtgatcttgtacctttatatggctgtgtagtatgctatggtgtatatgtgtcagattgtctttatccagtctaccatcgcatgggcattacaggtagagtgcaagttatgctatagtgaatagtactgcagtgaacatatatgtgcatgtctttatggtagcaacaatttatattcctttggacatatacccagtcatgagattgctggcttgaatggtcgcatgtttcaagttcttttagaaatcacccaactgctttccacaatggctgaactaatttattttcccactagcagtgtatacgcattcccctttctctgcaacctcgccagcatctgtaatttatgggcatttaaataacagccattctgattagtgtgatggcataa

SEQ ID NO: 636571 - DNA, 215 bp, Homo sapiens
gcatagacaagtggtcaccacggccagtcgggacaagctcaatcacttagtcttgtttgacgaaagctacctatataaactctgtaaggaagttcccaactattaacttataccccagctgtggtctctgagagactgaagattcgaggctcccttgcctgggcagcccttcaggagctccttagtaaaggacttatcgaactgggtttcgaggg

SEQ ID NO: 636572 - DNA, 132 bp, Homo sapiens
ctagaggatcccctctttgctcccagattccaggagctttaccagtctctactgtcatggcccctggcttggccaatcgtcttcagagtcgtccagatgaggaaagtaacagttagagctcctctgatgaag

SEQ ID NO: 636573 - DNA, 1049 bp, Homo sapiens
gatatgccaaattgatgcgctgccagcagtccggattcggttaatggaatggctcgagtaggaactgatgatgtgtggaaagctgagagctttgggggttattctgccaagaaacagtatgttggttagcaacacagtaccctggcttcacttagtatctcgaatgttcgctctgcctctgaatctggatttagatatgcagcatgtagtgtggctgaggctgttagtgtttccagtatggtacttcatacttccaagactagaaaatggacgtgttagacaaagctgagtgaaaggtgtgtgcacgtggaacctcatagggcttgatgtgcgtgggcgtttctagacattgtatgaccatagtgtcgccattataggcatttcctcttttaggtcaacttagtatctgtccttggggtctggactcaaccagtgtggatatcgaggagtctccgaaattctaggcaggtgtagcggaggactatctatcgcagggtctgggttagatgcagtcttggaggacaccgttatctaatcgtcgtaggggatcccggggtacagacatggtgtccgtatagaagcatgacacgttggaaggacaggaacggattggactagtataatccctcgggaactaaaggggccatcgggggagacgaacagatggatcagccaatgcgggggtcagattagcgtgatacatgggtggcgctaacccgctaggatggcgcgaccaagaacagagctcgggtgacactccctgacacggagaggggaaacccgcctacaggatgacctagaggcattaatgaggcaacaacgaggacgcggagaaggtaaagcagaggttagacggcggacacgacttacctagtaggaactgtcatgtgtgagacaagggtggactgccagcggaggcggaagaactgtgatttgcgagacgacgaatcgctgagaaaacataaagaagcgccggaaaaacacacaggaacaaagaacgcaacgagcaacaagacagaatggataggacgcgaacaccacacatccac

SEQ ID NO: 636574 - DNA, 300 bp, Homo sapiens
atctatgcaggagtaagtaaaaccatccagaatcaagcagcaccacatagtcacatcaaagatcaaggtgaatttttggatcactgcctgtggaaatctatcctcatcagtcattgcatttttcccctgcctataccctgtgctcctttttctttactgtgttattcagtcacttccctttctgtgaaaggttgcttagcttttttttttgacatttgttgttctttatataaaaataacagattggatagatgtgtacatttggtgtttgaaattctctgaaaatcccattaggaaacc

SEQ ID NO: 636575 - DNA, 236 bp, Homo sapiens
ccccccccatttggggggtggttttccctcccaggggtagtttttctccccgggataaaggggcccaatttgcccccccaaaaacctcatggctgggggcctccaaaagctggccgtttcccccccctcaggggggttaggccgtaaaatccttttagccgggggggcaaagatttcagtgagcccaaattgcatggctcccctctagcctggggggccgggtgagactgtttcca

SEQ ID NO: 636576 - DNA, 341 bp, Homo sapiens
cagcttgtggaccgcctgggtgttggcaccaatctgcagatagccttcattctgattgtactctggccagtggggcagcccttccccattggggttgacattgcgagcaaagttggcccagaaaaatggggccccaaagacggagaagagctcatccccgtggtctcctatcaccgtattgggtttcatgtatgatgagaagcttggacggtactgaaactcaacatagtaggtgggtgctccagcatatgcgcggtctcggtctataactatagatcgctctctatctctctctctctctctctctctctctctctctctctactctctctctctctctc

SEQ ID NO: 636577 - DNA, 194 bp, Homo sapiens
tgtcacccaaactcgtcgcccttcaaggtaaggtcgactcgttcaagaaaaaccttgagcagaccgggctgggcaagctggatatcagggggctgttcaagggcggcagcctgatcaccccgtttctggacgggatcaaagcctgcgatgcgttcaagggcaaactggccgaggtcggcgattccagcgcgccg

SEQ ID NO: 636578 - DNA, 803 bp, Homo sapiens
ctggcgtgtattcctgagccttggtgtctggcggtttccgaggcgttggtgtctgtgcggtttccgatgcgttggtgtctggtcggtttcacgcaccgttggtttctggcggtttcctgaacggtggttgtttggcacgcgcctgccctacctcgttgactatctggttggcttgcccgatgcccggagtgtaccctagtacgaacgaaagcagaacgtaatagactgattttgatgtgtagcgagcatgtccaactccgacgtgtgtgatagaaagaacacgctaggtggacaacgaagcactgaaagacaaggccggtgggggaattatccaaagaacggggtcccaagcggtcacatcgtcatagccggacacacagtacagagccatcaagccaatgagtcttttcatatgctgctgaaagctgcctaaatagctgaccatgagcgaggcaccgagaagtccgcgtgagagtgcgtgaaggctctgaaagggcgtgtaacggtaaccgggacctgaaccgccatgccgtggagctcttcacttgtggccgcttcaatggactggatggtatccgatgatcatggaacagagagtacagtgtggcattggaggcccgtcagataactgataacttatccttaagaacatggcacagggttgctgataggaccgtggactgtgagagctgtctacccattgtgtaggccctctaatgagagcctggcctctgctgtgagtgaattctgacacggaaactttactaccaagagtgcaaaataggacgatggttggaaaaagc

SEQ ID NO: 636579 - DNA, 316 bp, Homo sapiens
tcccctaaattgcaaggtgaggccgggtgtaaggttttccctgagactagaatatgtgaatgcatgtttgagaattttaaagcacgatggtcagaaccagaagctatattttgcatatgggggctcagccatccatggagagcccatgtgtcctctggacatagttagtcaatagaagtgggtgttaagtagtataaaagaaaacttgtgatctgtgtagtttatgtatcaccgtcatggtaaatttagcaggaagtgcggcgcaggtatgatttgttttttgtgcaccagtgagacagtaaagatgctattaaca

SEQ ID NO: 636580 - DNA, 589 bp, Homo sapiens
gaatatttccaccattatgtaatatttgataggtaaaaaaaaaaaaaaaaaaaaaaaaaaaaaaaaaaaaaaaaaggggggaaaaaaaaaaaaaaacccgccggggggacaaaaaacaaacggagacacggatgtgggaaagggggcccaaaggggggaaaaggcgtggaccgccggaataacacaccgacccccgcacgggggaacaacggggccagggggggaacaacctctggtgaaaagaacccacctcatggggggggagagcacaccatcgtgcgggaaaaacacccccaagaagaagaaattaaaaccaccctgatgggggaaaattatgacacaagtcgtcggaaagagagtctaatacaggggtggtaaaaacagagatgagacaatatatggcaatagccagagcagttgaaaaaagttagtgggcgcctaaggggagtattgtagaattatcggcaacgattctattatcacccgggggagcacctatcgagtatacaaaggagaggacaatagagaaagaaacataaaatataacaacaatagacaactaagaacaacaagacatatagaaaaagaa

SEQ ID NO: 636581 - DNA, 153 bp, Homo sapiens
ttgtgatctacagatgcttaagcatcctaaccagccctagccgggcttatggctcacgcctctaatcccagcactttgggaggctgagacggtactgttgcctggggttgggaattcgagtccctactaaaaatacaaaaattagcggggcgt

SEQ ID NO: 636582 - DNA, 275 bp, Homo sapiens
cacgagggggaagttgaaacaatgaagataaaaattcattttctttcagatgagccacacttgatgcttttattactaacataattgaatcgttgaaccgcacagagaaaaattacctcctttgttgattttatcatatgtgaattagaaactaatgggttctttgcaatcctttggcttacctgcaccggttcctgctctcatgtgccttcctggatcaggtcggccaaatgcacttgactttataactcttgggaatgatgattagaccctac

SEQ ID NO: 636583 - DNA, 1146 bp, Homo sapiens
gaaacgtgaagaaggtgaagatggctggtggccagggccggggtcttgggagtccagtggctgcaaaggggcatcccggaacgtgatgccgctgggcgcacggacagcctcccacatgaccaaggcacatgttcccggggccctcatcctcaggaccccagcaagcaacgggccgccgccgccaaagcaagtcatcaatcatgcgtgtggacagcatcacgcaaccttacccggcatgatggcaatggggtatggcagaatacccgaagctcccatgaccgactcacagcatgagcgagatccatggatatagcatgggaccagccgggcctgaggttgaactggggatgaaccgatgcactggaacctagacactgtacaacaggaaccgtgtggacatacatcccccagactggtatacttgggcatgtcatgtgtatgcaagatcattcgagatttcctgggttgcatgatatcatgtgctgaggtgggcgaaagtgtaccctggttctatcagccatgtgggaccaaaagcagtatccttacaatacttctggtacctggaacgaggcggtgatcactccaaaagaacccaacgcgggtggctcactatgagcactgacggaggattcgtggcggctttggggtcttctaactaagggactccctcaaatcactagaaactttaaccttccattgaacttccttattcacacttcagtggaggaggtaaccacacacacaacaagacaacacctcaacaccactctcgccaacaaaagcgcacaagcgaaagcgctaaacacacccacacgggcaggacccgggggcaccaaaagcagagcaaaaggggcaacgacgcacaccaaaaggaaccccgtgcaacagacacaggcgttggtaccacaacacaacacggcggggagccacagcaggctaacacgacgccgacggagcagtcgcagcaacgggataaacaacgcacacgcgattactacaccagcagcggcgtcacgcccgcagaccgcacgtagagagacgaccgcggcacgcaaggacagagtagcagtacacgaagaggccagcgcccacgagcgacacacacagacgaagaaggaacgaacagactcagcccccacgccgacg

SEQ ID NO: 636584 - DNA, 1011 bp, Homo sapiens
gtccatcgcgctggtctctctcgctggtcgtgtgccattttcgttccccatcagtcatcttgcctgattgcggtactcttgtccttacagcagtgcatacttcttcaagggcccaatgacgtacattgtttcgggggtttggattccacatcatgggtggttgttgttcccccgctgtagctgcaatgtccactgtggaccttgttatccgtgtgtctctggctgctggtgctccggtatgtcgtcgctcataggtttcgttctcactgttgtgtccgtgaccattgtgatacgtaatgctcttagtgtggccttcaactttgtatatttcgcgtatggccttgtgtccttaccccagcggcttgcgttccgcgccatagtcattgttgtagctctgccagtgttccctgatggcgtgtgggtgtgtctgagtcgggctgtcttgcttggccccactgtcgcccggcgtttgtgacattctcacgagtggcatttcgccgtgtgcttgggcctgcgtgtgagtcgtttgtgatcagccccattcttccaacatgatgccttaggtctaagttgcctggtgaatgtgctgtctgcgtgcggagtgggccttcaggctgattcgggcaccaccctcaacccctgttctgctggtaacagttgctgttactgaccgtggctggcgctcccttaaaccctgacttctaagccagtcaatattcagtgtgtatttattacttgctcctatgtggggtggggagggaacctctcgggtctgcacatctggcccttccgctaacaggttcctgttgcgttgactgtgaagagaattgagccacgtgggggactcctccacgtccccctaacccagactttggagcgggtgggagttgtaagacaaatcaaaatacggatgacaaagaggatatagccgtgtataccccagggagaggaggcgcagagttctgatgggagaggtacaggttgggttctctgcctaccatgctgtttaac

SEQ ID NO: 636585 - DNA, 188 bp, Homo sapiens
aggaacggctaccttgtgcaggctgatgggcaccgtgtccagtccccagatggcacgctgctcatttacacttgcgggccagggatgagggctcctacacgtgcagtgcctaccaggggagccaggcagtcagccgcagcacccgaggtgaagggtggtctcaccagctaccccaccgccccagccca

SEQ ID NO: 636586 - DNA, 769 bp, Homo sapiens
cccaccggagaaactctgaggaacatgaatagtcgccaggtcttggcggctctttctctcccaaggcgagaggagatcgttgggtttcaagggcccctgggggctattttctcggccggcccttgcggagagagttcttgcacttaccaacaaccaaggcagggatatgataggcggtcgagtggcatataactccttgagaacaaaggaaattatcttttgatacccatgcatgggttcagtgagttgcgaaacctcatgggatttgacaaaagcgacaagcagaaacaactggtatcagcgtgaaatgctttatcaaattgtcagctcgggatagtatctataaagagatggtcgggtcaatgctcaacatggaagataacagtgacaaacaaggtaatggctcatgtggatgctatcggggaaagaccatgggtgcatcctagagaaaaagtgaatttgcaaatctgagagcagagaagtgagaagatgaaaattgaattagaccaagctggagcaagcaactaatgggatgaatatgcagtcgagatcagagcagataataaactggatatcaacgttagagaagggagggagagtaacagatatgtgttacagatcaggaaacagcaatttatggaaacaactacagaagtttaccaaaaaaaggattctcaacacaaaaagtattatttcagagacccagtataaaattgagctgaaattggttccttaaaacatgtgggatttaaaaatgagacaatcgtac

SEQ ID NO: 636587 - DNA, 468 bp, Homo sapiens
atcgcttgggtgcatgcatgtgtgcaatcgctaccctaccctaccagccacgtgctttggtaaccatgtgacactgggcaagtcatggagccctgtgtgggcctctggaacgaagcagggtgagaaactccggtgcatagagttgttgtaagactgaggtgaggttctgtgtacccagcgcccaccagagcctgtcacagtgggagctgagtcacaagggactctgcttgctggtggtgtggttagtgccacctgctaggcttggccaggcaagaacgtcagtcaaggttaggtattcttgcatgatggtgcctacaccagctggcagcagaaacctgacgcaactccatagctgcaaatggagatccagggaaggctccacggaccatagagggctgtgtcgggagcagtgagtctgacattcctaatgacctaggacaatgacgtgtgtgttcaccacatgcatgc

SEQ ID NO: 636588 - DNA, 152 bp, Homo sapiens
aggaattggcggccgctttttttttaaaagtgccaagctttatttaggctgtaatggttacagatacacacactaccctatatcgtgcttccatgcagtccctagcgcatagtacttcagcgatattgtctctctgcattgactggctgcag

SEQ ID NO: 636589 - DNA, 328 bp, Homo sapiens
tactgaccacccctacatgccccagttacccaccccacgtgcccctggacatgaagtggtcacgtttcatccacggctctttcccacccttcgacagtggctgtgcaatgttttaagttcacaagttcatgctcctccccacactgagttcggatgttcctcccccaccaacctatgcctgggaactggtccgtgtgtaccgggcttctcggaggattcactgtacattcgttttcaggtggtcttgtggttgtcgctcggaaaatggttattttatatgatttgtcatggaatttgttataataaatcattcttctatcccttggca

SEQ ID NO: 636590 - DNA, 376 bp, Homo sapiens
catgataccagaacatagatggaaaaaattgtggttccagacttatatttgtagtagactacagtaccctgaggactctgataataccacttcctaccttatatttatttactagtctagggataatcgtgactgctgctgtctctaatttctatgtaacattacctttatagctcctctatcacttatataaccagtttcttgctaaaatttccttatgatatgaatacctgaaatcatttctattttcctggagggacgttgagtcatacaggtacaatgatcactgaattatattcagtatacttgtatatatagtacatattttacgttacatacaaaaaagttagaattataacttttatatcagctatta

SEQ ID NO: 636591 - DNA, 87 bp, Homo sapiens
  misc_feature (52)..(52): n is a, c, g, or t
ggggtgcaggacagatttgagaagaaggcaaaatgatgctggggagcagagntgtaatgctgctgttgctgctgccctggacagctc

SEQ ID NO: 636592 - DNA, 167 bp, Homo sapiens
ggtcagagtgtgggatacgagtagtgatcaacccggttttcggccggagggacccaagcttgacccgtcctagggtcaagccacaggcttgccccttcggtcaatttggttctccggccttccctctgatggaagtttaaagcaaccaagggcacacatgtgtgtgt

SEQ ID NO: 636593 - DNA, 110 bp, Homo sapiens
gtcttgtcgtcttaataataccaatcgtgcttgaagtaatcaggcacagactcaattgtaacattctcacccaggccttgccaaacgatggtgttgttgtctgacttatc

SEQ ID NO: 636594 - DNA, 158 bp, Homo sapiens
tacacagataaatatactagtccccacgaccaacctcagtacggatacgaactagatcctgtaacagacaagaatctaacaaaagaaggacagagatgaacgataaacggcaccgagacaaaggccaaacatacgtctatggaatttaggatacctct

SEQ ID NO: 636595 - DNA, 129 bp, Homo sapiens
agagaactctatactattgtattacacgacacggctactgctgacaaaacctgattgcaaatggaaacagctatgatcttagcacttgtgctgcctgcaggcgcgcttcagtaccggcgcccaagggta

SEQ ID NO: 636596 - DNA, 476 bp, Homo sapiens
ttcaacaacccttcatgctaaaaactctcaataaattaggtattgatgggacgtatttcaaaataataagagctatctatgagaaacccacagccaatatcatactgaatgggcaaaaactggaagcattccctttgaaaactggcaagaagggcgtgcttggcttgaggaaggatcacgaaagcagaaaggattccgtgagagggaagacacacaaaagctgtgcagaagacagtggtgatggctgcacagcaatggaaacgcacatcacgacatggaattggacgcttagagatggttaaaatggtaaattttacattatgtatatttcacgacaatgaaacaaaaaggctatactgggtcgtattggaatctaaggcaaaaggaaaaactagtaataccaatcctgtctgtagttaaagtcttgatattttattcaaggattttttgcataaatttagatttttaaaacaaaa

SEQ ID NO: 636597 - DNA, 422 bp, Homo sapiens
  misc_feature (22)..(22): n is a, c, g, or t
  misc_feature (65)..(65): n is a, c, g, or t
  misc_feature (83)..(83): n is a, c, g, or t
  misc_feature (100)..(100): n is a, c, g, or t
  misc_feature (125)..(126): n is a, c, g, or t
  misc_feature (129)..(129): n is a, c, g, or t
  misc_feature (133)..(133): n is a, c, g, or t
  misc_feature (150)..(150): n is a, c, g, or t
  misc_feature (153)..(153): n is a, c, g, or t
  misc_feature (181)..(181): n is a, c, g, or t
  misc_feature (189)..(189): n is a, c, g, or t
  misc_feature (197)..(197): n is a, c, g, or t
  misc_feature (208)..(208): n is a, c, g, or t
  misc_feature (224)..(224): n is a, c, g, or t
  misc_feature (238)..(238): n is a, c, g, or t
  misc_feature (254)..(254): n is a, c, g, or t
  misc_feature (267)..(267): n is a, c, g, or t
  misc_feature (271)..(271): n is a, c, g, or t
  misc_feature (278)..(278): n is a, c, g, or t
  misc_feature (297)..(297): n is a, c, g, or t
  misc_feature (299)..(300): n is a, c, g, or t
  misc_feature (306)..(306): n is a, c, g, or t
  misc_feature (310)..(310): n is a, c, g, or t
  misc_feature (314)..(314): n is a, c, g, or t
  misc_feature (327)..(327): n is a, c, g, or t
  misc_feature (340)..(340): n is a, c, g, or t
  misc_feature (378)..(378): n is a, c, g, or t
  misc_feature (395)..(395): n is a, c, g, or t
  misc_feature (399)..(399): n is a, c, g, or t
  misc_feature (407)..(407): n is a, c, g, or t
  misc_feature (409)..(409): n is a, c, g, or t
  misc_feature (412)..(412): n is a, c, g, or t
gggacgggccacgtcccctggncctctcctctattcgcctgtgaactccatccacacgtaaaggncctctgggtctgactgtnccctccacaggcatggngctgggaaaaggaaacaggcatatnnggntttncagattttaaaccgganacnctcacagtcacaaatccaccatgagacncgggagantggctganctgtctcccanaccctaacaccttccnccttctcaaaatgnaggctgccctttcacngggaggctctgantgcnggatggngctgactcaggctgggganannggcganaggngganatggaaaatccgncaattcaaagtanaaatatttcaaacacatgtgaaaaccatttggcaagangaaaagaggtatctggnatgntttcatgncnganatgaaaaaga

SEQ ID NO: 636598 - DNA, 328 bp, Homo sapiens
  misc_feature (328)..(328): n is a, c, g, or t
tagctcattcctgagtatccccgaatattggtgagcctactgaaagcactgctaaggctgcaaccaaagaacgtactggcgttaaatctggtatggaagctttagatccaaacaaagaagttgatggtgtaaccgaagagaccaagtaatgtctaatgttttcgtctttgatcctgctgctttcaaggctgcatttccgcagttttcaaagttcacggatgaacagctaacacagttttttgaagaagttgaaaatactgttttagataatactgaaagctcttgcatcggtttaaaagatcgaaagaaattcttttatcttttggtn

SEQ ID NO: 636599 - DNA, 114 bp, Homo sapiens
agggttttgcccccccccccttttttttttgggtttattttgattgatttttttttttggttttgggaaaaccccccctttgggggggggaaaaaaaaacaggtaattttttta

SEQ ID NO: 636600 - DNA, 902 bp, Homo sapiens
  misc_feature (678)..(678): n is a, c, g, or t
  misc_feature (682)..(682): n is a, c, g, or t
  misc_feature (689)..(689): n is a, c, g, or t
  misc_feature (705)..(705): n is a, c, g, or t
cgctgaatttacggtcagcatcctgtcagcctggccctagctttccttgcgtgcatcgtgttcctggtggtttacaaagccttcacctatgatcacagctgcccagagggattcgtctataagcacaaacgctgtatcccagcctccctggatgcttactactcctcccaggaccccaattccagaagccgcttctacacagtcatcagccactacagcgtggccaagcagagcactgcccgggccatcgggccgtggctgtcagcagccgctgtcatccatgagcccaagccgcccaagacccagggccactagaggcctgccccagccagaatggggggcggggtggagaggaggacccccattggctaagttgtctgaaccgatatttctttttgttccttggtattgttgattcgtcgccgagtcaggctcatgtacaaaggcatgtttcgtgttgattgttcccatgtaagatatttttaaagccactgcttattctttgttaggaaaatgtaacagcagaaaaggaaagaaacaaagaacatgaacaaaaagcattaaactggctccatcggaagacgttgaagggcagtgaagagcacagactctgtgggcttcttagataagaaaacgtagcttcagtgggggctccaggttgcagagtatgagtgaccngacnggctatncaatagcctgtggtcnggcacggtaggccgccgcaagggggacaggccagctggcgagaaaaccgcgtcgggaacaaaggccggaggcataacccacggaagggcgccgggggctgcgcgcaaccacacttctgggcccctcagagcggaacccgcggcgctcccaacacgcggcgcccggcggccgtcaacacgggcggcgaccacagcgga

SEQ ID NO: 636601 - DNA, 547 bp, Homo sapiens
  misc_feature (497)..(497): n is a, c, g, or t
  misc_feature (502)..(502): n is a, c, g, or t
ggctccatgcagtgacactgatgacaattcagacgcaggctcaggggtgccgaggtaggaatggctgggaacaaaggacatttctcaaagttcccctgaagacatgccatctctaaaaaccttttttctccccgactctacccccacctctgttcctagagccctcggcgggcgagtccagaaacattatggcccagacggatgatgtgtctatggattatttggccccgcctcaggagcgcaggaagtcactaccatttatattctaaaacagacctatctatgtccataggacttctgatgtgtccagataggaatcctcatgagagatcatcatgcttggtgccctgaaccagtgtggctcggggttctcaggaggaacaggcaagagcagcttcattctaagcctttccagtgacctcagccttgcttctcttctacaacagtaaggctcctctgtcagaggaggtcgtcttgtgtgggcttcatggcatganataanccttcccctcagggtgttcctatatataggtgggcacacaaaata

SEQ ID NO: 636602 - DNA, 131 bp, Homo sapiens
cacaatcctaggcctacccgccgcagtactgatcattctatttccccctcttattgatcccaaccatcccaactattctataaacctagccatgggccatgccccttatggagcggtgtcgaagtgatgta

SEQ ID NO: 636603 - DNA, 1009 bp, Homo sapiens
  misc_feature (785)..(785): n is a, c, g, or t
  misc_feature (789)..(789): n is a, c, g, or t
  misc_feature (796)..(796): n is a, c, g, or t
  misc_feature (812)..(812): n is a, c, g, or t
cgctgaatttacggtcagcatcctgtcagcctggccctagctttccttgcgtgcatcgtgttcctggtggtttacaaagccttcacctatgatcacagctgcccagagggattcgtctataagcacaaacgctgtatcccagcctccctggatgcttactactcctcccaggaccccaattccagaagccgcttctacacagtcatcagccactacagcgtggccaagcagagcactgcccgggccatcgggccgtggctgtcagcagccgctgtcatccatgagcccaagccgcccaagacccagggccactagaggcctgccccagccagaatggggggcggggtggagaggaggacccccattggctaagccaagctccagttacaagacaacactgtactcctgggatatgggggcgggggcggggcagggcagggtggggggaagaacgcaccaaaaacgtggtgtgtgctggagttgtctgaaccgatatttctttttgttccttggtattgttgattcgtcgccgagtcaggctcatgtacaaaggcatgtttcgtgttgattgttcccatgtaagatatttttaaagccactgcttattctttgttaggaaaatgtaacagcagaaaaggaaagaaacaaagaacatgaacaaaaagcattaaactggctccatcggaagacgttgaagggcagtgaagagcacagactctgtgggcttcttagataagaaaacgtagcttcagtgggggctccaggttgcagagtatgagtgaccngacnggctatncaatagcctgtggtcnggcacggtaggccgccgcaagggggacaggccagctggcgagaaaaccgcgtcgggaacaaaggccggaggcataacccacggaagggcgccgggggctgcgcgcaaccacacttctgggcccctcagagcggaacccgcggcgctcccaacacgcggcgcccggcggccgtcaacacgggcggcgaccacagcgga

SEQ ID NO: 636604 - DNA, 550 bp, Homo sapiens
ctagaggatcccgtctgagcaagcgtggaaagtacacgagggttggcaggaggcaatgtgtcaactgcaaaattcttagtagaaggcagagatgttcgcatcctgaagtataaaaaaggaggttcaggtcatagaaaaacagcgtgctgttgttgaatttgaggtcaatgaagacgatgtcgatgcccattgatatagagatggcattgaaatcaatttccaagttcaagaacgacacaattatgtagtggaaagaagaatccaccgaagtgtttatctctgagaccagacagagcgaggcaggagaataccccttgggggcaggaaggaacaggagtcctgtcactctctatgtcaatgctcctgacccgccccaagttctgcaggagctccagccgtgtcactgtgcagtctggcaagcctgcccgtttctgtgccatgatatcggaaaaaccacagcccaaattttcctgggtacaaggaagagcagttgctttccactgggcctcaagtgcaaatttctgcgtgaggggcaagagtccgcgctttt

SEQ ID NO: 636605 - DNA, 508 bp, Homo sapiens
  misc_feature (508)..(508): n is a, c, g, or t
taaagttcaaatatgattcataaaaaatcgagcgtataactttctctgaaaaaatatgttgactctgtataaaccacagttattgggggagaaaggcttgtatgttaaatcaccctatttttgattctgaaaatgatcttaatagaatgtcccggccacagtctgattataaagatacatctgcccaaaatggctgagaatacaatacaacatgaaatgcaaaacctgtacagttgagggcatgcacaagaaaatctccaaatacccaaagcgggaacaaggaacgtttggctggaattcgaagttatttaagcgtctttgtctctgcctacatgtggcaagatgcgtgtgaactcaatgtaattgaaattcccctttttatcaatatgtgcttgtctgtacagctcatgcactttctcatctgtaaacccgagccccatggttgttagtagttatctcaagccaacttgctgtatggtgccagttgcttcttcatgaaagcaagaan

SEQ ID NO: 636606 - DNA, 124 bp, Homo sapiens
  misc_feature (14)..(14): n is a, c, g, or t
aatcgggctcggtncaatcttagctattaaatacgttaaaaacttaacgctagcatatcttagtaacctatagactatattttttaagtagttgtattaatctctatcttagcggtgagggcgt

SEQ ID NO: 636607 - DNA, 2464 bp, Homo sapiens
  misc_feature (1372)..(1372): n is a, c, g, or t
aattagtacaatgttatgttttttagagaacactactaaatgctaaataagcctattttttacactacactatcaaaataatttttgccttcgaatttttttaagtcaagttgaggttatttttgtaagaaacccaacctattttttttgcagcctaaaatcccatttaaggttaggggttggtccttatgccagcaagatttaaccaactgtaaagatagtagtctttgcatacatttaagtaattaaggcatttattgctgggagaataggagtagcaaaaatatggttttaaattggtgctttattaggtgacttccttttaggcgatggcaggtcatgaaataggtacactaataattttctatcaaccttaaaaagtgtcaaagcatctttgtagggtgactctaaactgctaattaagggttaataagtaattatcattggttgcttttcaatataattgcaaacaaattaaaaacacagttaaactaatatgtttataagcttgagttttcttcctaccatatcactctcatatatcagtgatgaaatgtcagattttgagcagtagctctttgacagtgtccttttatacccagtcttttctgcattgaatgctttgtgccttttcgatgtgttgtagttgcttagagttgattctgctggctagattgtactgattaatagatttttatttttatttttttttggttatgggtgttatgattgtgttgcctgctggttgggcaactttttttttttaggttgctttatgtttatataggcaaattggcactaagtgttagtgtgaatatttgtttttatgatttatatatcattttaaaaatctctgttgtggcctttatagttactgtgaagccactcttgggcctgtctctatatgcttattagaggaatctgacaagtaaaataaaatgagtagtgtgtctgcatctgtgtctctgtttctctgtcttttaaataaccagtaaccataactacacagccctgcactgaatgaccttatttcagtttgcctaaaactgaacaagaggtgatggtttgagatgagtttctcattaggagcagcaacatcccaaccaatatataatgagttgatcaactcaggaaaaattaggactttaaagaaggttgtatttggatattctaagattcagtgccaaatttaaaatgcctagaaatgtattctacaagtagcatttctaaaactttaagtagtgttatagtaaatgctacttgctgttagagtgaataatggataatgtgagaataattttctaaacgacttctagaaactagacagttcttccttatatcctacccttttccacatttctctaatgtgggnttttttgtttgtttgtttgttttgagggtagagggaatcccctccttatttcctctaaaattgtttttacttaagataccttttccctataatcttagcatgctttctgctctttctctttggaagtagcattaataagatagatgtaataggattaagatgtgtggaagatgagaaaaagaaggtttttgtagagagagtgcttatgttttgtttactcatgtttcaacttgctgtgtatgatcataaatctatgatcttgagaaaaatcctaaaacaatttaaatttagcctatgcagccaattacataaagagaaattaaggattatattcagaggagaaattaaggattatatttagagcacagaggttatacaaagaatataaccttgtttggtcaaattcttaggtaaagaaaagtaatcaatgcttgcattgctgttggagattctaaaagatgtattgaatgaagaggatgtacacatctcattgttactgcgtatttttttgcttggtattcctgcttgcattaaagctggacaatgtactgtgatgtaattacaaaatttttattccttctaacgattgaactcttcttatccctattgataaaactgtattacaattgatgagtgtggctgccagaaaataatacaaaactgggcatttagctgttccacattgtgtagtaaatgttttgattatggggatttacagtgtatattaaagtagaaatgcttttgcacttgttttcagtctcaaataataatttttgtttttaattaaggatactttaaaagcaatgacagaaaaatctaaaatatcagaattaattattgtgaactgtgtgtaaaatatcttgtgagttttatacatactttggttgtctgatgtttcctaagtataaatgtctttatagaaaatttcagttctctgtgaagagtaggaagtgtactgtatattgaactagttctttgtgttactttgatatttaaaataaatataaagttctttggtcctaatacagcatatctaggttttattgaaccacattttcacaggatgggaatgcagtactctgaaaccaagta

SEQ ID NO: 636608 - DNA, 1663 bp, Homo sapiens
  misc_feature (1)..(1): n is a, c, g, or t
  misc_feature (3)..(3): n is a, c, g, or t
ntnggatgtcataagtgcttcgctgaagggggtgggtcgtgtctgtattgtgtcatgtctgtgtgcgctattatttattgctcggtcgttttgctcgtagccagctttagtgaagtgcccccttcggtgttttacagattttagaggggcaccctcctttgccggtttttctggtgtgcccccctcctttacggccatgtttcgtggtgtagcccaatgttgtctcctttcaccctgaacttgtttctcccgtgggaggccgtgttccccatcctgagtgggtggccccccaaatataacaccaaacctggccatatcgtgttccccacctctgtagaaaaacttttttactaattgggtagtctcccccttctatatttttaactgtaaatagcccttcttgcaccatgggtctccacgtcctcccacaaaaaaattttcgtcttttctaattacaaggacagcctttttaaccccttcctccgcgaacaatttctttaacatactcccatattcaattacttgttgcacccttgtctaacaaatcttctgtggacgtttacacacacccttgggtgtctgcaagtgttctcccaaggattaaaaattggctttttactaaagaacttctcccctttttccccttaacagggtcataggaaaggttccctcgtacaatctggaccataatatctctcttgtgttacctcgttgaatatatttaaaatcaaatattataaattcctctttgctcccctacaacgaaaaataaaaaaaaaaaaaaaaaaaaaaggcggccgctcgcgatctagaacggattatattcagaggagaaattaaggattatatttagagcacagaggttatgcagccaattacataaagagaaattaaggattatattcagaggagaaattaaggattatatttagagcacagaggttatacaaagaatataaccttgtttggtcaaattcttaggtaaagaaaagtaatcaatgcttgcattgctgttggagattctaaaagatgtattgaatgaagaggatgtacacatctcattgttactgcgtatttttttgcttggtattcctgcttgcattaaagctggacaatgtactgtgatgtaattacaaaatttttattccttctaacgattgaactcttcttatccctattgataaaactgtattacaattgatgagtgtggctgccagaaaataatacaaaactgggcatttagctgttccacattgtgtagtaaatgttttgattatggggatttacagtgtatattaaagtagaaatgcttttgcacttgttttcagtctcaaataataatttttgtttttaattaaggatactttaaaagcaatgacagaaaaatctaaaatatcagaattaattattgtgaactgtgtgtaaaatatcttgtgagttttatacatactttggttgtctgatgtttcctaagtataaatgtctttatagaaaatttcagttctctgtgaagagtaggaagtgtactgtatattgaactagttctttgtgttactttgatatttaaaataaatataaagttctttggtcctaatacagcatatctaggttttattgaaccacattttcacaggatgggaatgcagtactctgaaaccaagta

SEQ ID NO: 636609 - DNA, 379 bp, Homo sapiens
agcccagcaggctggtccatactggcttgggctggacagagctgaagcccacgtggtgcctggccttgcttaaccgagagaacaaagtggaagagacgctgtggtagtcagtttctaggcatggatcttaagaaactgacaacttctatgtcctatctcttgggctgctcatgctcccagccactctgctgtgaggaagaccacgtggtcacacatagaggccgtatgccagggtcctgctcacagcccagccttgcacatgagtgggccgtcttgggctggcccaacagccaccacgcacgcagagcaggcggttcttctcaccgggccctgcccaacctgtagattccgcatcaaacaataattggctttaaacaaa

SEQ ID NO: 636610 - DNA, 266 bp, Homo sapiens
gccccaattgtctgtatcgcgtatatgcaaccgactaaccaaaacacaccaacgaccctgcgttgtaggccattgcaccactttctttatctggcaaagagaacgttctgttctcacagtggagctgtcagaaactacaacagtagatgtaagttcacgctgccccggtggacctagctgccacaccagtcagattgttcacttctgtggtaaaaaaagatgatatgttagactgggattgacttcatcatcatctttatccagtc

SEQ ID NO: 636611 - DNA, 253 bp, Homo sapiens
gcaggtgctatatgctgggggtgggagaactggaaaatattgggggcagagtcccaggtgggacaggaaagtttgaagctggcactactggcaggaagacagagttgcactgtatgcacagtggatgagcagctgccggtactccaggtgcaggtgccgctccactagcacgtgcagtgagacttggtcagtgaccaggccctgcctgcgcatcagcagctccaggtcctctggcttcacagtcttgcggcca

SEQ ID NO: 636612 - DNA, 905 bp, Homo sapiens
  misc_feature (472)..(472): n is a, c, g, or t
gtgtgaacgggctgtctccgtcctcctccccagccatggggttcacgtccgcggcttttgctacatgctgtggctgctgatcagtgcgagtcatcattcttcgccatttgctgcacttataggcactctgaatgagctgaaggactgcttacaaggaactcctatagaccaggtgtaataccctgaattcccttgtaactacccatgagtacctcatccacgccttgtctctctggtgtcattgtagcttctgtggcatgcagagtggcttacagcttgggtctcaattattgcccctcttggcgtaatcaataattttgggcaggttattatgagtagcaccccagtgatggagctgggcctcatagacttcgtaattaacccctgtaataagccagttcgatgaagttgcaggactagtttcgtaggcagtaataggtccaggcacagggacagcgcactgcggtggcanataatttacgctatataaatcctttcgtagcattttgtatattaaattaccgaaaatatattgggcaatgaactcttattgttaagggttggacgctcctctaggagagcacatcgactatcaggaacgaaaatttgggtccccatgtgcaaaggttgcattgtcccagaaaagctcaaccaaaattgcaagcgggatctctaattccagacgaagaatcgctggtcacaaggaagtatgcccttgtgggcaaattcttgattcaacattgcttttagaaagactgaactcctttaatttcttcacatcttgtttccaccatttttgcgctctggcgggacaggacctgtttgcctatttgtatactccccataccggcattcacaatcggaatacggatttcccttatctttacaaatggttcgcccgcgaa

SEQ ID NO: 636613 - DNA, 246 bp, Homo sapiens
  misc_feature (55)..(55): n is a, c, g, or t
  misc_feature (104)..(104): n is a, c, g, or t
  misc_feature (146)..(146): n is a, c, g, or t
  misc_feature (149)..(149): n is a, c, g, or t
  misc_feature (172)..(172): n is a, c, g, or t
  misc_feature (230)..(230): n is a, c, g, or t
agactattcagggcctgggtgctgcctcagcccagtttgtgtctcggctgctccntgtgctgttgagcaccgcccaagaggcagaccccgaggtgcgaaaatgncatcttcgggatgggcgtgttggcagagcatgggggccactnttnccaggaacacttccccaagctgntggggctcctttttcccctttatagcgcgggagcacaatgatcgtgtccgtgacaaanatcttttggggcaatt

SEQ ID NO: 636614 - DNA, 910 bp, Homo sapiens
gggctccgctcctcccgcctgggcgcccgaccgagtgacagccagccggcccggtggcggagaggaagtgcggtccggccaagcccgtccccgccgacgcggtccccgggtcgggtgacagcgtgcggcccgcgaacgcagcggcgggggacaggcggccgggcagagccgaggcgacagggaaggccccgaggaaggccgcgggggaaaaaattgctggatgaccttggggtaactactgcgtcgtcggaaacggcggcgcccgagagccgggcggaagggaggcacccggggggccggcctttccggggcccacagagggaaagcggacaatgggcaggccatagaaagaaccagcaccgagggtcttccgggaggccaaccttggggcgggggaaagcatatttggtgggccccacggggataagcgggtgggccccaaatagtgtggggcgcttggactcttagagggacccttgggggacccacagtgcacacatgcagcacgattggcgtgtcaaggcgagcggcaccagcggcgacatgggatggagtgaggataacggagccagccattgtgcgccatctgggtatgaacagtgggttgcccccaggggagccctgtgaaggagccaatccgcgaaaatgtgcggcgacacgagagcacgcagaaggaacacgggctgtggacagaaagctgggaatgctggacacacacaaggtgcacggacaccgggtaaagggcgcgcaaaaagggccaaggacaggaactcgggaggaagttgcaaccagggccggaggtgcacaagttgagcaccaccgagtacaacccgcggggaatcgggaggggctgcgggaaggcaccaggggagggcccaggacgagggggaaaaggtggccccatggttac

SEQ ID NO: 636615 - DNA, 252 bp, Homo sapiens
tgcctcctctcctgaaaagctctcataattggcctactcatcccgcccactcttggtcactctcacttggtctttccttccaagtcatcaagtgatttccagagccactgcatggaccttcctgagatggtggcaagctgcgtcagtacacacattaagccagcatttaaaaaggcactgccagccgagcgtggtacctcatacctgtaatcccagcactttgggaggccaaggcgggcggatcactcgagg

SEQ ID NO: 636616 - DNA, 497 bp, Homo sapiens
aaagagctacaacacttccctccggaacgactctcaagccaagatgagagtaaaatttgatacattactcgtatcggcattgatcatagcataatgacagtgcaagcgatacaagggcgataagtacaatgttatgacttcgctccggtcgtgacacatgtaacacttactctgttacctaggttgtatagtaagatcatagccagtctactgggggaactgtgttctatttaccagtggagtttttctgcagtggttgcgtttcactgtaaggataatggagttcctctcctctgctttcctcagaggatggtcctttaacatagccagaaacaagccctgtggtttgaaggtgagctgtgatgatgggactaattgatatcgcaccagtttacaaagacagtcttatcatccgagaatacaccatctttttctctggataattatttcttacatcatgcttgattcctacattttgttgggtctcaacattggct

SEQ ID NO: 636617 - DNA, 1028 bp, Homo sapiens
  misc_feature (418)..(418): n is a, c, g, or t
tactttaaaagccaaattattttttaaaagatcatgcttataataggtaaattacacattaaggaaacatcaaaataaagttagatgaataaaaaggcacacctcgaaaaattgtgagcgcagaaaggacagtctcttttgggtttgtgttcctaagtggtcggaagaaaaaagaagagagatatattaaaactcatgtgtttctcaagtgtgaaaggttctcgtggtcagtgtgaagttagttagccaagtgggcttcttttctccgcggtgttccaagagccagggctcttccgtggcggcgtgacttcgtgaaggagggtgttcagactcctcttgccagtgtttatagggcgaatacattcagaggcgcgaagcgtgccacgtggcgagagagaattggccagaggaactcacnccagtgtgtggtctccacccaaatgtggagaacctagagaactcacaatagataggtgcataagaagtttctcccgagaagcgctctgtgtgttataactcttgtgcggctctgtgagtcatctctgtgggatgtggaaagctcttctcacacagagtgtatgtgaatgtgttcttgtgggacacatctctctcccctgtgtggcattctgtggtaacagtgtgtcgcctgagacaatattctctctcatagaagagtgtctccctgcagagattaaaggagtgtggttctaacactcatccccgaggagcctgtgtgatgtgtcccacccgtctgttaaagcagcactttgttattatgtcccccccaccaaccccagaggggaaatattgtccactctaattatcccccacaggagaacaactgttgttgtgggggctacaaaaaaaaatcgtgcgggattaacacacccccttttagtgttgtggagtgtttgccaaacgggaggatcttctacacgggccccccagcaggggtggtcggccactcctttgatggaacagtagaggtaggagaattatagagtaggccgatttctggttggaagaag

SEQ ID NO: 636618 - DNA, 203 bp, Homo sapiens
actagcgatcgttattgaccaggctgagatggaccaggctgtatgggcacggtggagacataaagtggcatggcctgcgccatatttcttgtaggatgctagtggctgtgccgtgttgcgcggctgggtgttgtctagagggcacagcgtcaaggcagggcagtcccctgtggaatcatggagtggcccagtgtcaggtggga

SEQ ID NO: 636619 - DNA, 123 bp, Homo sapiens
ggactatcactggactcctgcgtgtgaaaaacacactacagcataccgaccatgatatccaccgttgatttgaggccataacgacgcagccaatattgccgacgaatgacggggccgagttcg

SEQ ID NO: 636620 - DNA, 281 bp, Homo sapiens
tccttgaggatacccgtctggatgcaagtgtcagaaactaaggaatgttccaccaaaaatgaataacgaggtcaggcgtgtagctcatgcatgtaatcccatgcactttgggaggccaaggagggcggatcacctgaggtcgggggttaaagaccaggctgccaacgtgatgaaaccccgtctctactgaaaatacaaaaattagccgggtgtggtggcgtgtgcctatagtcccagctactcgggaggctgaggcaggagaatggcgtgaacctgggagt

SEQ ID NO: 636621 - DNA, 892 bp, Homo sapiens
  misc_feature (9)..(9): n is a, c, g, or t
  misc_feature (11)..(12): n is a, c, g, or t
  misc_feature (53)..(53): n is a, c, g, or t
  misc_feature (178)..(178): n is a, c, g, or t
ttttttttntnnaatttatcatcacacccccaccccccctctttatgaaaatngctatcacacgcgggacgggctacgcgttgggaggccggcgcgctcgcggcggtgtattctgtttaaatacactgtactatttacatacaggctgcggtggtgacagaacctagaccccccgcgngggagagagagaggaggcgccgacaaaaggaggtccgagaggaaataaacaccacaacacacaaacgaaggcagaaacaagacaccaagaacagacgcaagaaggggagaggagaaagagaagaagaatgaggagagagactaacaatcaccttcctgacagggggaagagggggatgtaggacggtggacgtcgcgctatttgatacaagagtaagtgaaagcgaaaagcaaaaagaagtaaaacgaagtccaccccgcaccacgtgacaaaaagagcaatatacataagaccacaccaacgtgtcgtgctaccgggcgtaaagaaacagacagagtagtgtattaaccgcgacagatcaggcgaatagacagaggagtagcaaagcaccatatagagtaatggcagcgacggtcgggctgcagcggaggagcgggaccgggtggcgcacgaggacgacggtgagaggacgcggggggtaggagaggttgtgtgtggtagtacggcggggctgtaaacgcaggaagggaagtagagggcagaagagctaaggactaacaatcctcggacgctgaagactcgtcagcggagccgcaagacgacgacgcggcagaggcactaagacaccactggacactatgcacaaatacaaccgccggtgccaggcgctccgagtcgtccgtagatctacggcgtttctaggtagggttcaat

SEQ ID NO: 636622 - DNA, 106 bp, Homo sapiens
tgagtgaaaacaaacgacagagacagcagctccaagccctcagtgagcctcagcccaggctgcaggcagcaggcctgccacacacagaggtgccgatgaatagcga

SEQ ID NO: 636623 - DNA, 271 bp, Homo sapiens
aatggaacgaacaaacaagcagaaatggaacgaacatggcatccaagtaatccatgacctatttgtatacggtcgatctggagataaaaccattcgcatctgggatgtgagagactacaacatgcattgccactagtgaacactaaagggagagaacatataataatcagctgcgagtcctgactgggcagaccatctgctgtaagcaacaaggaatgatgtggctgaccctttatctgactgccaacgacacaccgcttccatattcgga

SEQ ID NO: 636624 - DNA, 109 bp, Homo sapiens
ttaggactccccttctttaatgcatcgacattacagtataagtgacctggttatgacatcattcctttaaagtgaaaagattgccgggaaatgtgttcgggataccgag

SEQ ID NO: 636625 - DNA, 524 bp, Homo sapiens
  misc_feature (421)..(421): n is a, c, g, or t
ctcccccccgagggttaataaaaattcccttccccaaagccatcaaaaatgggccaaagggccttttcctttcccctgggaccaaaatttaggggcctcagtccctccccgccaagcccgggccaattttgtttttcctttttcccccgggcctgttttgtttttgaggtttgggtcccccgttcattccaagggtgggggtcactaaagctgcctttcccttttaaaggtgggcgggccctggttttacaaggaagcttttcccccagctgggggggcaggaacttaatttaaaggggggggcctggggcaggtgttgccccacccccaaatgccctgattggggtccccccacatttgggggagccttccctggcaggggcccttgggggttttcattttccattcccctccctggggntaaagggtggggttaggggatgaaaagggagggctgccccccctggtttgggggttgaggaaaaagagtttgttgatttaaaaaaaaaatttgtcctttttta

SEQ ID NO: 636626 - DNA, 310 bp, Homo sapiens
  misc_feature (286)..(286): n is a, c, g, or t
ctgggatgcgcttgggctccctgagtctcgccctgtcgcccaggctagagtgcagtgacgcgatcttggctcactgcaacctccacctcctgggttcaagcgattctcctgccttagccttctgagtagctgggattacaggcgtgcaccaccacgcctggctgatttttgtataaaataaaattatttaagtaggtaatacatgtctatgctaatcccaccattctccctacagtctattctcatagagacaagggacataatatgcataaacaagcttatggtntgtctttcttccactcctactttt

SEQ ID NO: 636627 - DNA, 269 bp, Homo sapiens
gtactgttagaccagctaaatccctaacttggatctgaagtgcattagtcatgaccttgtacccattcccggaatttcagccgcacgtgggtttggtctagtgagtgaaaacacaagaacagagagatccagctgaaaaagagtgatcctcaatatcctaactaactggtcctcaactcaagcagagtttcttcactctggcactgtgatcatgaaacttagtagaggggattgtgtgtattgtatacaaatttaatacaaagtcttac

SEQ ID NO: 636628 - DNA, 143 bp, Homo sapiens
cgagatctccgtgtctctgcgctcagaatgttgatgactatatgaattgtggctttgtcgcacagagatgccggactactctggcgttaaaccacacggttctcattactgtatttattagctgtgcattctctgtctcctct

SEQ ID NO: 636629 - DNA, 489 bp, Homo sapiens
  misc_feature (489)..(489): n is a, c, g, or t
taaggtttgagggggaatgctggaaatggtaatgggtatggaaacttttcatataagtaatgctagggtgagtggtaggaagtttttccataggaggtgtttgattgggccgtaccggaatcgggggtatgctgtcaaattcataaaaacgggaggttaaaattgggtctgtgcgtgaacaaaatatgtggtgtaagagtccagggcgaggagttgcgctcattatgttgtccctaggaagattgtatgtgggtacgaaggggttgttgatcataataacggtttggggtatatcgcggcttctagaaaaaatcgggcgaagcgggccttgacggcgtcatcacgatagttcgacacgcctggcaaaactacgtttcgataattccccttccggcaagagccccaacggggtgtacggggagggtctccgctagtatgtggagacaacctacccatcttcggcccaggtcattaagccacgagtactcn

SEQ ID NO: 636630 - DNA, 301 bp, Homo sapiens
ggtgaacctagaggttccaggagatatcgtggatcgacgtcttcacaagtactcctgatacaggggaatttccatgccgtctacagggatgcactgaagaaattgctagagaccgcagtgtactcagtatatcaggaaaaagggtgcagacgtctggttcacagagttggatatcaacactgatggtgcagttaacttccaggagttcctcattctggtgataaagatgggcgtggcagcccacaaaaaaagccatgaagaaagccacaaagagtagctgagttactgggcccagatgatc

SEQ ID NO: 636631 - DNA, 1070 bp, Homo sapiens
  misc_feature (261)..(261): n is a, c, g, or t
  misc_feature (361)..(361): n is a, c, g, or t
  misc_feature (401)..(401): n is a, c, g, or t
  misc_feature (618)..(618): n is a, c, g, or t
  misc_feature (643)..(643): n is a, c, g, or t
  misc_feature (669)..(669): n is a, c, g, or t
  misc_feature (710)..(710): n is a, c, g, or t
tgagcggcgcctctcccggggacaatgtgggactgagcggcccagccgccgtgccgccgccgccgccgccgcaggacagccccagcgagagccggccaggttgcagcgcggacacactcgcaggtcgctgtggccccagcctcgcctgacagaatgagcggctcggacgggggactggaggaggagccagagctcagcatcaccctcacgctgcggatgctgatgcacgggaaggaagtgggcagcatcatcgggaagaangggcgagactgtaaagcgaatccgggagcagagcagtgcccggatcaccatctccgagggctcctgccctgaacgcatcaccaccatcaccgggtctacnagcagctgtcttccatgcagtctccatgattgctttcaanctggatgaggacctttgtgctgctcctgcaaatggtggaaatgtctccaggcctccagtgaccctgcgccttgtcatccctgccagtcgagttgtggctcactgattgggaaggctggcaccaagatcaaggagatccgagagactacgggtgcccaggtacaggtggcaggggacctgctccccaactccacagagcgagctgttacggtatctgngggtgcctgatgccatcatcctgtntgtgcgccagatctgcgctgttatcntggagtcccacccaaaggagcactatcccctaccatcgagnctctcctaggtactgtccttctctctttcaaccaggactactctgtccaggtctcagtatagtggctgtgaccccaatagaggtcaccaagctccagcagctctcaatgccatgaggtcccctttgccacacccagcgtggtgcccaggactggatcccgtgacacagaccagctcacaggagttcttggttcccaacgatttgcttggctgtgtgatcgggcgccagaggacatccacagatacagcgagatccggcagatgtcaaggggcacatatcaagatcgggaaaccaagcagagggcgccggagagcggcctgtcaccatcactggctctccggtctccatcggcctgcccca

SEQ ID NO: 636632 - DNA, 362 bp, Homo sapiens
  misc_feature (362)..(362): n is a, c, g, or t
tgtcatcgcttgaagtctgaagaggcctgggttgcgggaggagtggtctgttgaggctgccgttgcgtgccggccctcctcagatccgccttttggagcacacctgctttgctttgttgcctgtgcaaatgttggacaagcagacacactcacactcgtccccgagcttagcacagagctggagcgcccatttcgggaattttccgttggggaatctccacttctggggttaacctgtacggcctccgtgtctatcagtgaggcatctctgacggtttcttctacggcttttcagttcccttccctgctgttctattccctttgagtgtaaagactcacaggtgacctgctatcgagatagn

SEQ ID NO: 636633 - DNA, 274 bp, Homo sapiens
aggcatatttgcctgcataagtgaggggatggctgaccctgctcctgcaacccagcctcagccacggaaacaatgaggagaccccagtcctggagtagcagctctgcttccctgcctgcctaacattttttccaagttcaccttggataccagtaaggggcgggggacactgcaggacagggtggctacaactgtgagtttgtaatatcttttcttttctttttttttttctaaaaaaaaatactatgaaaatgcaagagagactatggaaaca

SEQ ID NO: 636634 - DNA, 344 bp, Homo sapiens
  misc_feature (79)..(79): n is a, c, g, or t
  misc_feature (81)..(81): n is a, c, g, or t
  misc_feature (91)..(91): n is a, c, g, or t
  misc_feature (153)..(153): n is a, c, g, or t
  misc_feature (157)..(157): n is a, c, g, or t
  misc_feature (263)..(263): n is a, c, g, or t
tcacattaacacggaacaccttctcgccttcaaagtgctcaccaccatgatgagcactttgaagggagaaggtgttccntntaaaccgctncgaacgatcgaaaatcacattaacataatcccgccgagttggccagcacgacccagattganttcncccccgccagattctgtcacacaaatcaaacctcacagtacagttgacttccgtgttaaagcagaagatactgtcactgtggagaatgttctaaagcagaatgaantacaatacaaggtactgataagcaacctcgagaaatgtggtggagggtcagtttgataagccgggttcgtggaacaggaca

SEQ ID NO: 636635 - DNA, 1155 bp, Homo sapiens
  misc_feature (346)..(346): n is a, c, g, or t
  misc_feature (446)..(446): n is a, c, g, or t
  misc_feature (486)..(486): n is a, c, g, or t
  misc_feature (703)..(703): n is a, c, g, or t
  misc_feature (728)..(728): n is a, c, g, or t
  misc_feature (754)..(754): n is a, c, g, or t
  misc_feature (795)..(795): n is a, c, g, or t
tgagcggcgcctctcccggggacaatgtgggactgagcggcccagccgccgtgccgccgccgccgccgccgcaggacagccccagcgagcctctggagtccctgtggcagaactcaaatggaaggaggagcagctgcagcccaggggagcatgggtgtcacctccgttggatagagccggccaggttgcagcgcggacacactcgcaggtcgctgtggccccagcctcgcctgacagaatgagcggctcggacgggggactggaggaggagccagagctcagcatcaccctcacgctgcggatgctgatgcacgggaaggaagtgggcagcatcatcgggaagaangggcgagactgtaaagcgaatccgggagcagagcagtgcccggatcaccatctccgagggctcctgccctgaacgcatcaccaccatcaccgggtctacnagcagctgtcttccatgcagtctccatgattgctttcaanctggatgaggacctttgtgctgctcctgcaaatggtggaaatgtctccaggcctccagtgaccctgcgccttgtcatccctgccagtcgagttgtggctcactgattgggaaggctggcaccaagatcaaggagatccgagagactacgggtgcccaggtacaggtggcaggggacctgctccccaactccacagagcgagctgttacggtatctgngggtgcctgatgccatcatcctgtntgtgcgccagatctgcgctgttatcntggagtcccacccaaaggagcactatcccctaccatcgagnctctcctaggtactgtccttctctctttcaaccaggactactctgtccaggtctcagtatagtggctgtgaccccaatagaggtcaccaagctccagcagctctcaatgccatgaggtcccctttgccacacccagcgtggtgcccaggactggatcccgtgacacagaccagctcacaggagttcttggttcccaacgatttgcttggctgtgtgatcgggcgccagaggacatccacagatacagcgagatccggcagatgtcaaggggcacatatcaagatcgggaaaccaagcagagggcgccggagagcggcctgtcaccatcactggctctccggtctccatcggcctgcccca

SEQ ID NO: 636636 - DNA, 1189 bp, Homo sapiens
  misc_feature (261)..(261): n is a, c, g, or t
  misc_feature (361)..(361): n is a, c, g, or t
  misc_feature (737)..(737): n is a, c, g, or t
  misc_feature (762)..(762): n is a, c, g, or t
  misc_feature (788)..(788): n is a, c, g, or t
  misc_feature (829)..(829): n is a, c, g, or t
tgagcggcgcctctcccggggacaatgtgggactgagcggcccagccgccgtgccgccgccgccgccgccgcaggacagccccagcgagagccggccaggttgcagcgcggacacactcgcaggtcgctgtggccccagcctcgcctgacagaatgagcggctcggacgggggactggaggaggagccagagctcagcatcaccctcacgctgcggatgctgatgcacgggaaggaagtgggcagcatcatcgggaagaangggcgagactgtaaagcgaatccgggagcagagcagtgcccggatcaccatctccgagggctcctgccctgaacgcatcaccaccatcaccgggtctacnagcagctgtcttccatgcagtctccaatgagtttgccgtttttccaaaaacctttgggaaattgaaggggaaccccctttttttgcttggcccgttgggccctttccccccttttggggtccctaaagcgaaaaaaagttttgtggggggggcattgtgggcgggggacaacacaaaaatacaaacttttgtggggttttctttcccaggcctccagtgaccctgcgccttgtcatccctgccagtcgagttgtggctcactgattgggaaggctggcaccaagatcaaggagatccgagagactacgggtgcccaggtacaggtggcaggggacctgctccccaactccacagagcgagctgttacggtatctgngggtgcctgatgccatcatcctgtntgtgcgccagatctgcgctgttatcntggagtcccacccaaaggagcactatcccctaccatcgagnctctcctaggtactgtccttctctctttcaaccaggactactctgtccaggtctcagtatagtggctgtgaccccaatagaggtcaccaagctccagcagctctcaatgccatgaggtcccctttgccacacccagcgtggtgcccaggactggatcccgtgacacagaccagctcacaggagttcttggttcccaacgatttgcttggctgtgtgatcgggcgccagaggacatccacagatacagcgagatccggcagatgtcaaggggcacatatcaagatcgggaaaccaagcagagggcgccggagagcggcctgtcaccatcactggctctccggtctccatcggcctgcccca

SEQ ID NO: 636637 - DNA, 360 bp, Homo sapiens
  misc_feature (360)..(360): n is a, c, g, or t
agctggccacggagcatgcctgtggcgcagtcaggtgacaggtcatcaccctgaacctccacgggctgtatttacagtcagacaggtattcagaaagtggtgtctcagaacatctggacttgggctaaaaatcatataaaaagacacaaggccccttccccaataacttctaattaggtagcacagaatccagtctacagcttacgtcaccaggtttagcacacatgcgtgtttttttccccccggtattttccacacccgttgagcaacttttctccaagggcacactgaggagcaactagaatgcacagaactggcagttctttatttcccacatggtcacgatgaaggaaacgatan

SEQ ID NO: 636638 - DNA, 121 bp, Homo sapiens
gagggtagtcagctgaggcccggtcatctgccgcgcggagttattgcgccagcgggcaagtgttcgtcggcgtaacgccgttatacagcgcagtacagaactctcgtgccgcaccatggtt

SEQ ID NO: 636639 - DNA, 598 bp, Homo sapiens
gtcagcctcagatcacctcctgcaagaatccctctggtggaagagatgaacctctaaaaggagtcagaaagaatggcctcatcttcaacaacctatcctttaacagttaatcagatttctccctctgcttacacataggtttaacatgaccactgagtacgaagtaatttgtagctctgctggttaccagaaaaacaagtcccagcaactttaatcagcaacacagtcttcagaagggataattgaaattctcgaaactaaaactcagtttatttcctagtgaaagaaaggatgagccaaaagatgagtcacagcttagaaaatattttaactccaggacaatggtttgaatctatctatgctttatgaaacacaagttgttaacacctggcagctaaggaagagctggagtccaaacagctctggtcttcctttgggataaggtctgaattgatatatggagaaactaacattaccacttacaaccctccttaaccagtttttcaggtaagggtaagatttgtatagtatttgcttttttgagacaggttgttgctttgtcaccgaggatggagtggagcaatcatggttcactgca

SEQ ID NO: 636640 - DNA, 159 bp, Homo sapiens
  misc_feature (51)..(51): n is a, c, g, or t
  misc_feature (122)..(122): n is a, c, g, or t
gtactcgccactttccatgtggcatctcttgtatgcaaactagattgtgcnctcctagagggcagagtccactctgatcacgttgtggtgtcttccttacccttctggcgccttaatacagnccttgcacacagacacaataaatggcagttgaataac

SEQ ID NO: 636641 - DNA, 104 bp, Homo sapiens
ggcgtctagaggatccgatcagagcatacccctacgggaacagcagtgataacctttagcaataaacgaaagtgaccaaccctggggttagtatagcttagtta

SEQ ID NO: 636642 - DNA, 346 bp, Homo sapiens
tcgttgaacacacggggtgatgtactcgagtgtccatagcgcaggtgaaatgagggtagcgagagtgactgcccatctcctacgtggtagcgctgatcctctagtaaaacatctcgaatgaagtacttggcccgggtcacgcgtgggtcctctccgggctcgggagtagcatcctcaggagtagtgtagcgagcaaattctggaaagtagtcctcaatcttcgatttcccagcaaggactttctcagcgagcagatcttgcctgttgaggaacaggatcacagagatgtgcgcagccatctgttgttccagatgctcttgaagaggttcagagcctcctgcaggcg

SEQ ID NO: 636643 - DNA, 991 bp, Homo sapiens
gctccatcatgaagtgtgacgtgcacagtccgagatacgacactggtatctgccaagcatcggtgactgtcggtgtggaacacaccatgtatccgaggacattgctgacaggatgcataaggagatcaccgtcctggtgcccagcaacatgaagatcaaggatcatacgaacaccccagatcgcaagtactcgcgatgttggcatctggctggcatcccatccgtgggctcgacttgtcgcaaccattccgagccagaatgtggcatctagccaaagccagggagctacgacgagttcgggctcccgtcctatcggtcgcaccgcacaatgcatttcataaacaggtaacttctagcagcatgcgtagccatcttgctgccattggagttaagtatgcagacatagaaacatttgccccgtggcaaatgcgatgatcaccttcatgcctagcctcaccgaaaactggaatataggccttcgatagccgaaattgtgcctctgcaatgcttttgtatctggatatcagcactggattgtagaagcttgttggctgattcccgaccttgtatagagagtcaactgtgccccttggtatgttgtttttataccctggtcactatatgttggagtcaagctttagtaacgtgtggcttggccacttcgtgctgcttgggtgaatgaactgtgctgtgttggaaaggaagaagctctgagcacctgtggaaggagatcttgtcgttgggacaatgctgatctgcatacggtcgtagggcattaacgctgtcatggtctgcagtgtaccggggctcgacacataacacgggtggcaagcacgcagatgggttcggaatgcgcaggctgccagggttggaaactccccgacgcggatcgacacctgttcactcaaaggcctggccaaaagagcgagaggggcccccatcgaaaagaaccctcttgtttggcccgggcagggtccaccaaaaagaggcc

SEQ ID NO: 636644 - DNA, 238 bp, Homo sapiens
caaaaaaaaaaccccccacataaaaacccctgcaccccctgttccattggggaattttaatgtttttcctttatccttgtaaaccccaggcccattttataacttttttggacggagctgttccctgtagggccatctgtctttaagtagggataaattcctcttaacccaaaaagaaccccagatagttttcccccccagcccagcgtcttgttgtttaaataaacttcttgtttta

SEQ ID NO: 636645 - DNA, 100 bp, Homo sapiens
gagaacgagagcgggaaagagagagagagagagaacgagagcgagaacaaaaaacgggaccgagaagaagatgaagaagatgcatacgaacgaaaaaaaa

SEQ ID NO: 636646 - DNA, 365 bp, Homo sapiens
tgaaagtacactattctggtctgagcatgtcaagatcccacaaagagaacagcacgaaccaagcagatggtcagatgttgcagtttctgtatgaatcgcggaaagatgctcttgaagcaagcccgaagaggaggggcatggggagggtctaatgaccatgtagcagatagtcgtttgtcccttttagccagtcagggagcacaatcatattgggatgaccgctcccaactgtccctcccagaccttgtacacaacactcttccaattcttcttccatgggcgtggtgggcttgcaggggaagtgtcagtacccgcacctcctcctcttctttcctgggggcactggggcatgttttgcttccttc

SEQ ID NO: 636647 - DNA, 102 bp, Homo sapiens
ggaacttcatcgctgctcgtggactccatggtctggcaacacggcctccctgtaccatctctgggggtccgagattgatgacaaatggtgatcactactggc

SEQ ID NO: 636648 - DNA, 188 bp, Homo sapiens
ctctcgggccactggcccaagtgcgcaaaccgggggcagagaagcctcaccacagcagcggcagtctgagttggggcgcccagctgccaccaccagcttggccccgcgcctccacacgtccgtgtgcgggcagtcccagcattccctgccctgcggttggccgtggggcattcttctcggctccgagt

SEQ ID NO: 636649 - DNA, 503 bp, Homo sapiens
tatctgcactccagcacgaggtttaagcgctggtatcaagtcgtcaccatgccacgtgttgccctgcgttagacccgtcgtctacgctgcggacttcaggcgttgtccaggcgcgtgttgctgagccgtgtccgcccaggctttccttactgcagccaaccgaacaaactcacagctagataccgcaatgtcacggctgctttgcaggcgattgggcctgccgcatggattcacgcaggatgcgccgagtccaggtagtacaggctgacggggtcgacccggttggaatacggcaggttctcgccgggtttgcaaatagtgctgctgcatgccccgtttgctggataacgtgatacgcctcctcataggcggcgccatccagcgtttcgaatgacctccttggccaccagtttgagcacgcgcctccaaggtgtttattggtgtgaatgccatttggcagtgccaacaggcgggaacaaaggggtcccgcagctccgaaatcg

SEQ ID NO: 636650 - DNA, 186 bp, Homo sapiens
atacccccgatacagcgacagtccaaggccacctttgatgccatttctaatgacctacagctacctgacccccgatacagcgaccacccccgatacagcgaacagccaaggccacctttgatgccatttctaatacctacagctacctgacccccgatacagcgaccacccccgatacagcgaggt

SEQ ID NO: 636651 - DNA, 106 bp, Homo sapiens
tctcccctccccccctttcaccatttcccctcggaggcgcttccccgggcaggggcagagccggtctcaccccgggtctacggccgcgggcgcaatggacaggatg

SEQ ID NO: 636652 - DNA, 196 bp, Homo sapiens
  misc_feature (67)..(67): n is a, c, g, or t
  misc_feature (114)..(114): n is a, c, g, or t
  misc_feature (144)..(144): n is a, c, g, or t
  misc_feature (151)..(151): n is a, c, g, or t
agaaaatggtctattaggatcttttattggatttcaactgatatttataagcccatactcctaagancaggattactcctggacttaaggctctgccagtgttttgtatttggnccttggccttaaccagctgtgtataacccngccagtncttaggatcctcaaatagcagcaaggacacagaagtctttccacc

SEQ ID NO: 636653 - DNA, 917 bp, Homo sapiens
cgtgtcgccgcttttgtctcctcttcctctcttctccttttctcacttgtccttttcctttctcttctacgcctgtgtttcttttcttctcctctcctctcttttctcatgtcttttgtcgctttcttttttaattctcttaactttgtctctgttatatccctctctgtcgtcctctctcttctgtgctcgcctccttgtctctccctcttggttcttctctctctcctgggtcacgttcggtgtactgccgtcttccctcttcgttcgcgttttacccttgttcgtccttgtcgtcttctcctttctctcttttgcttctttcatcttcttcgctcctctcctttttttgtttttcccttttgtctttctgtttttctgggtgctttcttctcatctagtgactcttctgatcctttgtatctccttctggttcctttttctgtccttttgtctttttctctccttctcttgtaacctttgtctttttttctttttgctgttctgtcctcttctgttcgctcgtctttatctctttttccatcgctcttcgatactctgcttccgtacgtcctctttagttacttaccgtagctcagttactctcgacgtgcaggctgctctgcggggatctccgatccgagcagtggactagtaagacttcactgcagtcgattctgcggatcttgctaagtagtgtttacagagctaagatctgtgtgcatgtgtgtgtttgtgtatatatacatatctagggctagtaccttagtttcacacccgggagctgggagcacataacctgtaacagtggtctttctcttattttttcataaagatagaaaaatcgcgcacgtcgcgcgtcccccccccacccccgtttttaaaatacgccttactggtgccagggtaaaaatttt

SEQ ID NO: 636654 - DNA, 247 bp, Homo sapiens
agaacaaaggtgtcgtgaaaactacccctaaaagccaaatgggaaaggaaaggctatattcaacattgtcgtcattggcacgtagattcgggcaagtcccccctactggccatctgatctataaatgcggtggctcgccaaaagaacccttgtaaaatttgagaaggaggctcctgagatgggaaagggtcctcaaggatgcctcgggcttggttaaactctaaggtcgaaggctgaacgccggatt

SEQ ID NO: 636655 - DNA, 621 bp, Homo sapiens
ctaatctcgaggacatgtacactgaataagtgtactgatacaatattgatatgcatatctgcatcaatgtgaaactctcatttgtataagtaactcaacattattagtgtatacatttcatcaaagactgcactgacagatataatcacatgctctacgctatctatcgagctcagcttccccttgcctatttagcctctatagagaatcgattttcaatggtctggatgggatcatctatactctcgctggcctctggcgctattgaacttgactttctggatcgacgacatgctgtatgaacacaagtgctagtacatcctggctgcctactgtcattcattcaaacgaatgcttagcttaacagtatgatggcaaagtgtactcactagtaatgcatgaccttcaacgttcatttccaggaatctgaacatgtgaaccatgaaacttgacgaactgattgctactcttatttgatcgcagtatgagaccatgctaggtttaaggctgatggcagtcagaagctttcaaggatatgacccataacgaacccatgatgcatataacgttttgtggggatcaggtgccctcatgcgctcagtgacctttggagcccctgtt

SEQ ID NO: 636656 - DNA, 698 bp, Homo sapiens
  misc_feature (293)..(293): n is a, c, g, or t
ggaagagttcagtcccgcttaccatgagccgggtgatccccaaccctacggagcagttgtccgcctctacctgaagctacgaccaccgtggactgacctgtccatgctgggtgatggccggggacgaacaggcccgtctgggcgaccaacttgtctatcgactgcaggctggttgcggacactgacctgtctgaccggagcgcatctctgcatctgtcgatggtctgctgagcagactcagaggtcgttggcttctcgactggtgccctggtcccgggtcacttcccgtcgtntatcaccgcacgcgcctcagggtgccttctcggacgctttggatgaatgaacgacggtcagccggtggagttttgtcctggttggtgactaatgacaaacgtggccgggttggagagtagtcctccaccagttggcatgattgctatgagaccgagatgtcgcaacaaggacgtgcagttgccgggcattaggcatgcccgtgattcgtggggaccagcactccctggcaagtggagaattgaaactagctcgaacatcgcttcgctccggagggaggcattgatagcaagagttggggaccaaggggacgcttggggggatcgattccgcaaaaccattcagtccctggggaatgagggaaagctggaatgaatgaagaaggaattttgggagtgaaattgtag

SEQ ID NO: 636657 - DNA, 1367 bp, Homo sapiens
atgtggtggtctgtagtgtatcgcatgattgttggtggttgcactctgttatactctgtgacgggtcatccttgatggtcattggatcggtctcctgtaaggtcggtattactacaacagtcttgtgcttgttatactgctttgctttgttcctacaggttgtacctaatttgcggggtgtatggtgctggttccttgtggcccacgagtggggattctgggtgttttacaaacccgcgtgattttggggtgtgcaacccctttggtggcgccgggtcaaccgtgtctctgcgggagggaaaattctggctgcggaaaggccgcccgtgacctgttgggagtggagaggctctgtcccgggggacccaatgggtgcttctcaaaagctccaagagaggatggttctgttgcaacggagtgttttcgtcggggggcaaacgggtggctggggcgacagccacgagatggggcccgccccgcatggggagagcacactggggtgttctaacgtgggctacacgggtgtaattatcccctggggaccactgcccaggggcccatatttagcgtctcgggcttatggcccccctggtatttgggagtgtgccaacaccgcggctcagcacattggcactggcaaaattcttgtctgagcctcgatagggaaaaaggatttgattctccccttttctgcgtatataaaggctgggaaagattggcccctagaaatttcttgataagtctctcggtgaatgcgtgcccactctggttgaataatggttctcttggcaaaggccccactgggtcgtcgcttgacgacacttttctcaagactatttctcacaccctttggggtctggcattatgccgtgttgtctggtgaatattgaggaccactgagcacgtgtgtcggtgtggtgtcactatcacagtagccacaggtggagccacacagagaagagcctgtctggagagctggccacaagggtcacccacagttctggcccacgaaaggctcacgaagggtataatggatagttagtccctaaaatcctgccacaccccacctctcttatatccacgtggtggaaagaaccggtttcacgagacctgtcttgtttcacattggccactcttaagtttagttagtgaaaagaatgggtggtaatgatgaacacatggcatcgtgaacaaccttcaagaaggaaaggagaatagttttgtggaaccacactttggtgttttcttattttgcgtgtgggcagttttaagttattagctttttgaaatcagtactttttaatgggaacaacttgacccaaaatttgtcacagaattttgagacccccccaaaaagttaaaagaga

SEQ ID NO: 636658 - DNA, 447 bp, Homo sapiens
tccttggagagcacacttgttattatgcctgccccagctttgccttccaccatgagtaaaagcttcccaagtcctccccagaagcagatgctggcgctatgcttctggtacagcctgaaaaaccttgagccaattaaacctcagtgagctcaagatgtctttgttgaaacagaacctcccgaagttacagtattggttttggggctccacacagagaacacatcacggaagctataattgagggagacaaagctgtcaggacgacaccaagagagttagaaagcccaagagtggagcattcttcaccatgattccacctgacacttggctgaaagcattttgcactaatttgctttgtgcccgttcagacaatctaaaaagaaaggatggggggacaacaagtgtctattacacagaataaatcagtctggcaaatgaatacatttt

SEQ ID NO: 636659 - DNA, 231 bp, Homo sapiens
aggcattcataactttcagacatctgacattgattcacaaatgagaaaaaaaatctgaggcataagatgtgaggtgaggtgaggtgaggcatttcagtttttggaaatatggttactgttattgagggagttaatgtcattgagggagctcaagtcattgagggaggactgggtcggatgctgggaaaaggctaggggcatatttaggaagtccaattgaagttatgggca

SEQ ID NO: 636660 - DNA, 1020 bp, Homo sapiens
catgagccctaataggggcccttctgaggcctcctaatgacctccggactagccctgtgattctcactctccactgccataaggctcctcatactaggcctactagccagcacactaaccatatgccaatgatggcgcggtgtaatacagataaagctgataccaagggacaccacacacactaacctgtccaaaaaacggctcgtatcgaatagcgggagtaattcctgattgtatgtaaccttcaagaatgttattgattactgtcgtcatgggataggatatctggaggccatattattaccacattcgcacgatctagacccacatattccggcccaattgtaggcaagggacagcttggagcgcctcatatcagagaccatctacccgcgacgtgaaagtccgcctagaatagtcgcacactcctagaagcactgtccgttattagctcgtcgatcattggagttactcaaatcgacctccgtgagactcactcaataagatcatagacctagaaaatgaatgcgtagaatgcatgatactttcaggcgacgtgtttagtgtacaatgttctttactggggtctctaattttacccctcctagcaaggccctcagagtacttcgtagtctcccttcaccaatttccgaacgggcatctacggctcagccatgtctggtatgccatcatggctttcactggtggttccacgtcattatttggtcaagtttcctcatgatctgcttcatccgcaaagtaaatatttcactttacattccaaaggatcactgttggttcgaaagccggcggctgatactgggatttgtagatgggggttgagtaattctgtatgtgtccactctattggtgggggtttaaaaaaagaaaaaaaaagagaaataagaaaaaaaaaccggggggcttttgggggggggaaagaagaaaaggggagtgtaatgttccaccttggtagagagagggaaagggggcccaaggggggataaaacgcagttcaga

SEQ ID NO: 636661 - DNA, 308 bp, Homo sapiens
  misc_feature (211)..(211): n is a, c, g, or t
  misc_feature (253)..(253): n is a, c, g, or t
  misc_feature (285)..(285): n is a, c, g, or t
attcgtctaaagattgacagtagttagcggtaacaaagcattttaaaaattgaatatgaagagttttcaaaatgcaaacgtttagccttttcagaggcagatcactggcttcctgttgccaaatagaaacagaaataattacccaagaatctaaaagagcttcctatacttaggatttattttccttttaagatgggtaaaagaagtattnaaaatgtgaagagtagctgtaggtatctagaatttacagttngttaaattttttttaactctaagcatacacangatagatgtacattaattatttt

SEQ ID NO: 636662 - DNA, 291 bp, Homo sapiens
atggcccgggagccacgacacgggccggccctcggcgctagaggtccccgcggacccggaaggcggcggacgggctccggcagatgtacgccgccgggccgaagcaggagccggccgggaggggcgccgggagagcgacgggcttctgcatttggcagtgctattctttttgagggggagcgagggggtgcaaggaagcgggaaagccgcgccgagtcgcccggggaccctccggggtgaaccatgttgaagtcctgtccaacggggaagcagctcccacctggtgaacta

SEQ ID NO: 636663 - DNA, 385 bp, Homo sapiens
  misc_feature (123)..(123): n is a, c, g, or t
gctattatgtaacattttttgtggaaatttccagcctgtgcaataaaaataagaaacagaaaggaagcagtataactttggaggaaagagtaaattgtcggcagggcgcagtggctcacaccntgtaatcccagcactttgggaagccaaggcaggtggatcacctgaggtcaggagttcgagaccagcctggccaacatggtgaaaccccatctctactaaaaatacaaaaaattacccgagcatggtgacaggcttctgtaatcccagctactcgggaggctgaggcaggagaatcacttgaacccaggaggtggaggttgcagtgaaccaagatggcacccttgcactccatcctaggcaacaagagtgaaactccatttca

SEQ ID NO: 636664 - DNA, 556 bp, Homo sapiens
  misc_feature (552)..(552): n is a, c, g, or t
atcacgtggtctgactccgagctcaggtgatccacctgccgcggctcccaaagtgctgggattacaggtgtgagccacctcaccgggcctctttttttagttagtatttaatttaaacgtatggtgattttaattctgaagagcaagttgtaggttggctagtcctaatcacctatctgatggctacttggattcccgttactacacgtactacacatacaaaacctttggatcatccggtgtacgtactactggtcccgtacgctttaaaaactctggctgtcaggaggggctccttactgttctttctttctatgtaaaatatttacacaacctattcggtaatacgtgacgtaacaggggaccattacacctggtttctgataaatgccttatgataaattacgacataccttttttcttaacctagaatacattagagaacgaaaaagacaaagatgacaaatactctcccaaaaaatggtaaacttcggcgcttgtccacagcaccatttcagacaaatccatctcctgaaatggtatccaaactgnatct

SEQ ID NO: 636665 - DNA, 389 bp, Homo sapiens
cttcccctttttttttgaaaaaaaataatttaaatttgccttttttttttttaactgaggtgaaatgagaatgaaggggtttccccgggtttttatctctctccacttcccgcccttaaccatatgaaaaaaaaacttttgttttttctgagatgaggatatgttttagatgccccgttggataatgtggggaaaagacctttaagcttttcctggtccccctgtgatgtggtcaaaagcttgaaatttaacccctttcccttgggttttaaactgaaagccggctttgctttgggttaaaaatatgaaaaggggtttgatactgttttagaccttatggagagattttattttttgtaataaaaaatttgctgccgttttaaaactga

SEQ ID NO: 636666 - DNA, 103 bp, Homo sapiens
catgagcttcaccgactcgctccaccattctccaccaacgaccggtccctggtgctctgtccagtgctgcccatggctacggctgcccgtgcctggtcagcac

SEQ ID NO: 636667 - DNA, 87 bp, Homo sapiens
aggagctccgccccaccctctacagccttcctcaggcccctgtctctggtccccagcctcagtgcctcttggcccagggcagcgcag

SEQ ID NO: 636668 - DNA, 490 bp, Homo sapiens
ccgcccgagggtaagtctttacctaaaccttacccactggaaaggtttcccgggaaccggaatttaaagggaaccctttggaaattcccggcatttccgcgaacctgtagttaccccaaaatttttacccgcacatgcccactgtctgaattccccagttggaaaggttggctaaaatgttacaagccaggagcctgccttttccggaaggccgaatctttcgcgaaatagggcaaatggcctgaccggatggttttttggaaggatggtatggctgcccggatgcttcggaatcccggtttttttccggaccgttttgaagtttttaaagccattgttaacagtttttttaattaaatctttttaaagaaatgcaaacgcaaaacctcggctacccgcgaattggtaaccaaagacaactgaaaaaagcctgcgaacaatattgggcagggaaaattgatctggctgaacttaacctggttgcccgaaa

SEQ ID NO: 636669 - DNA, 205 bp, Homo sapiens
cttacgaagaggaaagacagaaagtaaacataataagttttgtggaagaagaaaaataaaacaggaaaagagggagaaagggcccaggtgccacggcccacgccagtcatccacaattttgggaggaggccgcggcaggcagttcacttaggtcaggatttcgaaaccagcttgcccaccggtgaacaatgtgttttcttaaaaa

SEQ ID NO: 636670 - DNA, 327 bp, Homo sapiens
gaaagcctggcccacatagtgagacccatcccttaagaaaaaagcgtctaggccgggcgcagtggctcacgcctgtaatcccagcactttgggaggccaaggcgggcagatcacgaggtcaggatatcgagaccatcctggctaacacggtgaaacgccgtctctattaaaaatacaattagctgggcgtggtggccggtgcctgtagtcccagctacgcaggaggctgaggcaggagaatggcatgaacccgggaagcggagcttgcagtgagccgagatcgcgccgttgcactccagcctgggcgacagagcaagactccgtgtc

SEQ ID NO: 636671 - DNA, 262 bp, Homo sapiens
  misc_feature (14)..(14): n is a, c, g, or t
  misc_feature (25)..(25): n is a, c, g, or t
  misc_feature (54)..(54): n is a, c, g, or t
  misc_feature (62)..(62): n is a, c, g, or t
gttttcacaacccnttgcagtaganactaattctcattttacagatgagaaaantgtggagnttcagagagatcttgtgactggttatataagtgttaaaacttaggttgatgtgatttataattccccatgcttaactcctatgctataaaattatgaatgttgtttttcaaattttatagcatggagctgtgtttagtttattttgtgctcaaaactggcccagagactataaatatagaatgaatgaataaatgaacga

SEQ ID NO: 636672 - DNA, 448 bp, Homo sapiens
gactgactgattccagatgtccggactgattcgggtgtcagtggtagacctggggaaaggtgacaggtgctctggatggagccttctgattttacctcagcgtcctgtcaggttaggtatgtgtaagtaaatctagcttatggggtaattgttttttctttatttgtgtgagtatgtgtgtgtggaggtcagagaacaactcatttctacagtgttgatcctagcgatcaaaatcaggttgtcaggctggaccacaggtgccttttactactgaggtatcttgccagccccactggttttaagtgacgtataattacatatgttatgtagtacaatataatgtgttgtgatacgtgtatactatgaaatgatctgatagttcacctcaaatattttattactttgttgaacttttctagctgtttctaaaatacccagtatattatca

SEQ ID NO: 636673 - DNA, 115 bp, Homo sapiens
tcgagctcgtaccctcaggagaggctctgttgcccttttagcaaggctggaaatgggatatgggcagtggacgtcttctctgacttcaccctagactttctggctccaaatgggg

SEQ ID NO: 636674 - DNA, 115 bp, Homo sapiens
tgtgtgtgtgcgtgagtctgggcgtgtgatgtgtgcagtgtgtgtgatgtttgcagagtgtgtgtgtgtctgggcatgtgtgggtatgagtgtatgtgtatggggcatttctcct

SEQ ID NO: 636675 - DNA, 86 bp, Homo sapiens
tcatcctctctctctttgctctcttgtctcctatccccgtccctttttgtatcatttaataaagaaatggtcgcgcttctgttttt

SEQ ID NO: 636676 - DNA, 149 bp, Homo sapiens
tgccacgaggtgatgatgaagagggggagggggaggaagaatatggaggaaaaccaaaaccccaagcacccattaaacaagtcctggcaggactcacaggaacaaactaggtccctgggggggttctactcgggggggggattttgctg

SEQ ID NO: 636677 - DNA, 1401 bp, Homo sapiens
agcgggtgggtgggcgcgcggggctgtaggatccacccgcctcgggatccacggagctgggtccccgccgcgccccgcggaccccacggcccttccgctccgctcggcctccaccaccctggcctcgagctgcagccgttccaaggacaacggccatccctgtggctgggccgccggctacgcaatgctgtctctcttgctgatcctctcaggcctgggccggctgacctccgcgggcccacgccacttattccatcaaaattgaggggaaaccatacacttcctgcttgaaaaacagtcatttttacacccacatttcctggtgtatttatacaacaaatcaggaacattgtatgcagattcttcattttcaaagggtcattgcttttaccaaggatatgctgcagacattccaaaatcagttgtggcactacgcacctgttctggactcagaggattactgcagttagataatatcagttatggtattgaaccattggaatcttcacctacatataagcatgtagtttatcgaattaaaaatgatgctattggtcattcctcctttcaagaaaattatcctgtggctcaatatatagatcagtcctacaggattcttgtcaaatcagacataaattcaggtgccatgctatcgaaaagaactctgaaaatacaaatcattatggataaagccatgtatgcttatatgggctccacggtggcagttgcagttgagaaagttttccaaatctttggtcttatcaacactatgttttcccagcttaatatgacagttatgctgtcttccttggagatctggtcagatcacaataagatttcaacaagtggtcatgctgatgaaatactacagcgatttttgccttggaaaacaaaatttttgtttcaaaggtctcctgatatgacatacttattaatttataggaaccattctacttatgtgggagcaacatatcacggaatggcatgcgatccaaagtttgcaacaggaattgctctgtatccaaagaaaatcactgcagaggccttttcagttgttatggcacagttgcttggaattaatctgggattgacatatgatgatatctacaattgttactgtccaggaactacatgcataatgaatcctgatgcgatacgatcccatggtcttaaatggaataaaatgaagagattttggagcaaagtgggaacagtaagcagcagatctatctcagaagacagcagtagtaacagcagccagtcacagagttaaagtaaccaagtgataaaatcaaagccatcggatgaagaaaggatattaccaagaaactcacgattaacttaaaactttcaacttcacagaaaaaaataaatcatatgactaaaagcataaaaaaaaaa

SEQ ID NO: 636678 - DNA, 467 bp, Homo sapiens
taattattggagagcaacacaccctgtatcagggttctccgcgagttgtggtgctcttcacttgatttgggatcttgccattgacttggcaaaatttctcaaagtgagaaactctgccttgtcctagaatcagttgaatgaatcattctttaattttgtgctaatagcctgatgtgctaattcagatgaatgaaagctgatcctaaacttaattcttgattgtggttgcttctcttcttcccacctgtggaagcataagaacactgctacaaaagaatggatagggaagaggagttgaaattcaaatctatttggcatatctatttaaaggttcaatggaaatgatcatgaacctaatggtcaaagtgagtagaagagatgtattggtagtcttgtattagccatgttatagaatgaccatgagttatttagaacaggctttattcattttgcgcaaaatatttgca

SEQ ID NO: 636679 - DNA, 446 bp, Homo sapiens
catttccattgtcaatgtgatcctggttatgctcctccagattgtgagccagcaatgtcatcaccaggaggaagtatcaatgatggattttggcttacagtagaaaaaagtgtacccttgcttccaaaacgacgtgctgctcctaaaaacaatggtcttttgatcagtttctacattttttcacctttgctcattttaattgctattgttagtcttaaatggaataaaatgaagagattttggagcaaagtgggaacagtaagcagcagatctatctcagaagacagcagtagtaacagcagccagtcacagagttaaagtaaccaagtgataaaatcaaagccatcggatgaagaaaggatattaccaagaaactcacgattaacttaaaactttcaacttcacagaaaaaaataaatcatatgactaaaagcataaaaaaaaaa

SEQ ID NO: 636680 - DNA, 233 bp, Homo sapiens
tctctctgtgggcgtactcccaggatgagtgtacagagcaggacagccaggtacagctacctacagcctcagctagtcaccctggacgctggagcaaatgcagactacgagaatacacaaagtctacgcctgctaattcaccgcatcaggccctgagctcgcccgtcacaaagagcttcaacaggggagagtgttagagggagaagtgcccccaccccccacagagagagcgt

SEQ ID NO: 636681 - DNA, 499 bp, Homo sapiens
tgtcgccttaactacagtaagcatttagaataaaagccaaaatagaattattgctgccttctgaaacttgagatgttagctctctattaagctgttctgtgctagccctgagcagctcactggtaaagcagagctgcctacttgtatcaagattttctagtcactgcataaaggaaacgcctaagagttgccgtattgctttctgagaaacaaattgctatatatttcatgtaaaagttgttatactaaatagaataaattttggagtctctttttcactctagtgggtaatatctaatttggcatttgagtcctaacattatgtaactttagctaggttggggtcgttttagaatgtttccctagtcatcttaatttgttccattttctgactctgtcctataaacaaaaatggcaatgacactttatgattttttctttcttagcttgtgcctatcctattattttatgtgatattattaaatgtataaaaatgtga

SEQ ID NO: 636682 - DNA, 634 bp, Homo sapiens
ggcacgaggttcctctctgcgaactctctaacactggaacattgaggaaatcacggaacttccatgaaggaacttccatcagttgtgacagcaactactcacaaaatgtctctgatattagcagtagtacggtctccttagagatgctggatttccagtttcatgggcgtattctcatggatggaatgtttttcagtgggcgacactaactggctgttggagatctgtgtggggacatggccatcacgtatgatccacaggcacttctctggttctctgtggctggttctgattttattccaagtttctgaatgaggtggtttctatcccgatgtgcccttcctatcttttcttcctcttgtctcccctcatttcagcctcttccgaatctcacttctaacccacaccccatctccaaaacactgggaagtctgcattgagatgataaggttatagtattagcacacttttgtatcaagttctcacagtgtctgaaatgtggttatgattccatgatgtctctaatccctactcacccagttcttaagaatcatgggcaaccctgcttgggtccgccttcacgctgtggaagctttgttcttttgctcttcactgtaaaccttgctaccactcg

SEQ ID NO: 636683 - DNA, 197 bp, Homo sapiens
acatcccgattaaagccaacatccacaagcaaattaagttgtgtactcgataacgactctagcagacttgggtttgtccccccaacttcatgaccatgcaagtaggcgtatgcattttcacgaatataacgtaacaatggctgatcatagactgtccctacaaacttgatgcgtttatcctgatcaaatcctgtttt

SEQ ID NO: 636684 - DNA, 868 bp, Homo sapiens
  misc_feature (591)..(591): n is a, c, g, or t
gagctggcactgcggtcgctctcccggcccgcggtggttgctgctgctgcgcgctggtgttgggcctgaacgcaggagctgtcatggacgtggtccacagaggagggcaaggaagtatgggattatgtgagcgggtccgcgaaggatgccgtacagtgttctaggtggctctattgatgccagcaactctctgcaagaacttctcagaactgcccctggtcgtgtggcttcagggcggtccaggcggttctagcactggatattggaaactttgaggaagagttgggccccttgacacgtgatctcaaaacacggaaaaccagctggctccaggctgtcagtctcctatattgtggataatcccgtgggcactgggttgcagttatgtgagtggtatgtgcgagccttatgggtacggcagcttgtgctatagcgagggcattcgtgaccatgattgcgttctctcgtgcacagaccgttgctgtgcagttggcccacacaagagtacccatcaccacgttccgattactacacttgactcgaccagtcctatcgtgccgtgaccaacatgagtacgctcgggcatctggntctagcagcgtttcatagatggccaatccagtcgaaggagaccaatccaaggtagcaactattatgcgggggtgtggtatgccctttagtgtggtgagttccctttgggactcttccccctttgtatgcatttgccggctagcaacgtgtcgtggagcagggaacctttatagcgcttgtgacaagtcaatgctcttacttccttctgaaatgacacagagggtccttgtgcagagggtcgtctaggggtgtgcatgagcagaggttactggcaatg

SEQ ID NO: 636685 - DNA, 233 bp, Homo sapiens
ataacaaatgcagctaggacctgctgcccaagtctccatctgtcatcaggggcgtgaggtcccaggaagcggccaaaagctagacggatccccgtccctgacatcacagcagcctccatcacaaggctcaagacctaggctcatggacgagatgggaaggcaccggcagacgggattaccctacacccagacgccaggcagcgaatgtgctatttaaacttctagacactagg

SEQ ID NO: 636686 - DNA, 254 bp, Homo sapiens
ctgtagcactgggcaatagagcaagactccatctcaaaaaaaaaaaaaaaggaaaaagaaaaaagaaaatagtctcgggttaaattaccctctgaaagactccaccaaaattttcttcttagcttttctccccaaatttcaggtaaattaaaatagagtttgagagaaaaatagaagggcaggggagttccctgtccactattttttatttaacccagttgtcctactttattttttggtgggtcctttttttt

SEQ ID NO: 636687 - DNA, 178 bp, Homo sapiens
aattgctgtcctcccaagaggtgagtccctgcacgctcctcatcatataaacatgatcagagtctcctccatctgatattacgaggggaacatcatatcctggctgacatcttcatttcaatcctgagctgagctgaaggccagcagggccactgacagcagaatcagccgcatcttg

SEQ ID NO: 636688 - DNA, 439 bp, Homo sapiens
agtgtccaaagaactgttcctcgcggctctatcagttaaattgtcaagcggatttagagagttctgtgggcaaatttgaagttgaactaagagtatatcttggacatccagctatcaccaggctcggtaggttagtcgcctatgcctatacctgttcccacgtctttgccacataggcgggtgtgctctgggacctgatcttagctagctcgtctgatttcgagtggtctcagctttggctatccctgcgacgttatctcaagttcattcattatgcagtaggtataggggctagtccctgctatattatgcatggtcataatgctcaatctttcccgtgcggactagtatctagtgcgtcaggtttcgacttctatagcgtataccgtatttgcattaatagtatgactcaggttgtctgatagtaaggtgaagtgag

SEQ ID NO: 636689 - DNA, 957 bp, Homo sapiens
aatcaggcagtggctacgcctatatttaaacactttgggaagccaaggtggtggatcacaaggtcaggagatcgagaccatcctggctaaaacggtgaaaccccgtctctactaaaaatacaaaaaattagccgagcatggtggcaggcgcctgtagtcccagctactcgggaggctgaggcaggagaatggcgttaacttgggaggcggagcttgcagtgagcggagatcagagcgagactccatctcaaaaaaaataataataattaaaaaaaaaaaaagacttcatcaagaggccaggcatggtagctcacatcctgtaataccagtgctttgggaggctgtggaggcaggaggactgctttgagcccaggagttcaagaccagcctaggcaacatggcaagaccccatctctacaaaaaatttaaaatttagccagtcatggtggcatgcacctgtagtcccagctacttgggatgctgaggtggaaggatcacttgagcccaggaggttaagtctgcagtgagccaagattgcaccattgcactccagcctgtgcgacagagcaaaaatccatctgaaaaaagtcacattataaacaataagagagtgaaaagacaatcaatggaatgggaaaaagtttttgcaaatcatagatctgataagggttaatatcccaaaattaagaattcctataatcaacaaggaaagacaaagaagcccaaaaaggcaagggcttgaaccagaacctttctcccaaagaaatctatacgattgcccgatttagataaaggcctaagaggatcttcagatcaatagtcattaggaaatggcattcaaaccacgaatgggttcactttttacctaaatggttattaaagtcccggtcagtgcgtggtcaacctgaattaacattgaagccaggggcaacaataggcagatcagacgctcatgtg

SEQ ID NO: 636690 - DNA, 277 bp, Homo sapiens
ttaataagcagagacaaaaatgacacgcaatatatttacatcaaactgatacaaaagcaaattaaattatgcaaagtatatacataaatagttgcacagagtgtttaatacattacgccatgataagcatagttgcgtgcatagtgactcataataaacgatgataaattgttctctgcttcactatcaacatccaagtagcaaaacactagtcaatgattaacattacaaacagatcgtaccacactgaacgcaaatacatcacactgggtggaga

SEQ ID NO: 636691 - DNA, 187 bp, Homo sapiens
cgcgtacgattcacgctctactgatgccctacggtggtggatgcatcttcatggttattgagggcaagaaggctgcccaagacacagactttaacaagcttgaacttagaaaagacagctcgtctgaaagaggaagcagctatgaaggccataacagagtagcagaggtatccgtgttggctgggga

SEQ ID NO: 636692 - DNA, 662 bp, Homo sapiens
caggcagagctatccatcaggtgtcatgtggtgatgatttcactgtctgtgtgactgatgagtggtcagctctatgccttcggatcagattattatggctgcatggtgggtggacaaagttgctggccctgaagtgctagaacccatgcagctgaacttcttcctcagcaatccagtggagcagtgtctcctgtggagataatcatgtggtggttctgacacgaaacaatggaagtctattcttgggtgctgtggcgaatatggactgactgggttttggattcagaagacgtgattattatacaccacaaaatgtgtgtgatgttcccaatgtgtcttgattatttgtttgcagttcaattgtgtgctgtgatgggacatttctgtatgacccagtcaggcaaatgttgcttggcctgtggactcaatgaattcaagtaagcttgggtctgaatcagttgcatgtctgggaattatcaaccatgaacgcataccatgaatgttccctacacaactgtcctttaccttgtgccaaacagttgtccttttataatgatcctgtaccatttgccccagtgcaatgactcacacagctcgctatttgatgatgctgaggccggcttgctgaccttttggctgcaagcaggtgtgggcatggttgg

SEQ ID NO: 636693 - DNA, 887 bp, Homo sapiens
gcaattaatgcacgcagttgcgataaataaaaacatctcacctaagctctccttttcttcactacacatagactactgacactgactaggaacgctctcagccttaggcgaaagcagaactaaacttcttagcacttatacgaacactggcacttcaacaacgtgacctggacacaacacttgcgctgacacacttactggctaacctgactacttccttcctggctgcttactcctctcagcgcacttgctttccacctcaaaacttctacttctctctcaacacaaactattacctctacacacttatacttcctaatgctaaacgctgactgacctctgctccaggctgacttcccagggtctgctactccttttagccctacacaaactagcacgtacattgcctcctcaaacttttagcaactggcctacttctctgacacgtgctcttacttacccaaatctgggcctactgtcgctctctgaacccccatctaacacggcctctatacaagctcacctacttccgtctcacgccaaattgcgcaccgtgcaccgcaacacggacaaacgtcctggctaaccaatctcatgcctctcgcccattagccagcaaggctccatgataccaacctactctacgcttcccacgcacctctatgataacttactatcgcccaaccgtggtttccacgccgtacgttgggcccatcaatcgtcgaacccttgcaccacacacacatggccttcataacagttacccaacataaaattctggggcacttacttgtcattaacttctcacccccatcttgtgcacactaccggccttctccagcgcgcttctcacttactcccggcggcgcctttggaacaataaatcc

SEQ ID NO: 636694 - DNA, 258 bp, Homo sapiens
  misc_feature (34)..(34): n is a, c, g, or t
  misc_feature (147)..(147): n is a, c, g, or t
  misc_feature (218)..(218): n is a, c, g, or t
attaaagcactcaaaaagaattcctggctgggtncggttggctcatgcctgtaatcctagcactttgggaggccgaggcaggcagattgcctgaactcaggagttcaagaccagcctggacaacacggcgaaaccccgtctctactnaaattcaaaaaattagccaggcatggcaacgtgtacctgtaatcccagctactagggaggctgaggcaggnaaattgcttgaaccgctcagacagagcaagctccgtcttt

SEQ ID NO: 636695 - DNA, 323 bp, Homo sapiens
gggggggggtttcccccctttttccccccccttggggggggcccggttttttttttttggcccccccccctggttttgggttttattggcccccccccccaaaacccttttttttggggggggttgtttttggggccccaaaaagcctccttgggattttggcccccccccccccccgggggttgtggggggggtcttttttccccatttttttttttacccgggggctttttggggggccccttttccaaaggtcccccttcccccggggcccccggtttttggccctgaggggggggggacccaagtttttttgttccgga

SEQ ID NO: 636696 - DNA, 379 bp, Homo sapiens
gcaatatcatgcatcagtatctatcagtaaacgagtgtgtgccaattcaaggatcgcacaaaaatctgtgatattcacaggtatgtagtgccatgcttgaataggctcacaattgaaactgatgatgtcgcatcttgatatttagggtatgcacttagacttgagggagtaaactggagccattttcagagtccatggcctccgctgataagaaaggtgtagtacaggcttattagtaggggaatatttctactagcctaaactattctgtgtaaggaagggtctgttgcttctgcagcttacgcttcctctatcactcttcacatacctatttaaagagactagttctctctgactaaccttttatgatacccgcgaa

SEQ ID NO: 636697 - DNA, 962 bp, Homo sapiens
  misc_feature (784)..(784): n is a, c, g, or t
gagtcagtcccaatcatgagactgcatggcagatggtagggtcccttgattccatgtcctggggctcctggtgctctggcactcaggtgcacagatgtgacattgagaatagagccaaatgtctccatttctcactgtggtgtatctctggatcaggacactgcagttggcctattcatgtgtgcaaggtgccttgcagaagaaagactagttgagaacgaatctacgtggtcaggagaatccggtgatgctacgacatgtatgaattgccacggggataaggttacccgaaggctctatgatcatacggagtggagcagttcaatgttgggacccaggggtcccgatcaaggtgtcctaggtggctcgatgcgaggagtaaaggctactcgtgctcgttcatcctagtcaaggaagtctctggcccaaaccgtcgtatgactactttggcgaaagcgactcttgagcgtgttcgaaaatcgaggtaatttaactgggcctgtcactctagacattttacggcccatgtggagatcacccgtggtgtaatcacgaagtcgataacccggaaaccaggttggggctgggaccccaaccccatgggattcactcctgccgcggcgaacccgtgagttgacgccaggtggagacaactcgtggaaagcctggggcgtccttggtctgattgtgccctgtccttgattgaccatttctttagtcaccagtgagggaatgcgccccaaccaagtgatcgactgcagagaaaaatggtcggatgagactnggctgcctaaccaaagttcgaaggaggttagagcttaacctaaggggagggaagtcgttcctcgaagaaaagcactggaacaacggtagaccgggacaaagacaagattaacaaaaggcttctaagcaaagaaaaggcccctagaatgccttaggccactatgtggtggacctcatcg

SEQ ID NO: 636698 - DNA, 170 bp, Homo sapiens
gttacattgggatctgcagatggggtgttttcggtatttgctgttcaaagtcttcactgtaatctgaataactttgcagtgcaataatctctctggagataaattcattagtgtgttactaaatgttaatcttctcttgcggaaatacagtaccgtgtctgacttaatta

SEQ ID NO: 636699 - DNA, 195 bp, Homo sapiens
gactctagacgatcccttatagcctaggtcaggcacggcggcttattatcgtaatcccagcactttggaaggctgaggcaggtggaccacctgcaggcaggattttgagaccagagtggccaacacggtgaaaccctttctctactaaaaatacaaaattagccagacgtggtggtgggcgcctgtagtcccagc

SEQ ID NO: 636700 - DNA, 101 bp, Homo sapiens
agttgttggctccaggcatttgcatcagttcttgggccagtgcagcagtgcagtagtcagaatgtttagtgagcctagggtgttgtgagtgtaaattagtg

SEQ ID NO: 636701 - DNA, 649 bp, Homo sapiens
tgtcgctgtgtcgctaggctggagtgcagtggctcgatctcggctcactgcaacctccacctcctgggttcaagcaattctgcctcagcctcccaagtagctgggactataggcatgcgccaacacgcccagctaatttttgtgtttttagtggagatcgtttcaccatgttgaccaggctggtctcgatctcttgaccttgtgatccaccctgcctcggcctcccaaagtgtttggattacaggtatgaaccactgcacccagccatattttttgatatttatagacgtcttttttcctttggtttttttgaggcggagtcttgctctgtcaccaggttggagttgcagtggcgcgatctcggctcactgcaacctccgcctcctgggtttaggcgattctcctgcctaagcctcccgagtagctgggattacaggcacgtgccaccacgcccaactaatttcggtattttaagtaacaggtggcattctaccatgtgcggccacggatggtcttggatttcctgaccttgtgatccccccgcctcagcctgccaaatgtgctgggattacaggcgtgacccactgaccccagcctatcgatgtcttaccctcatggtttcctgctcctttggtcccgggtacctctc

SEQ ID NO: 636702 - DNA, 368 bp, Homo sapiens
caccaagtgattttatattatatatatataaattttcttcctttcctttgtggtttttcgccccggtgcttggaaagatggaggcaggggttctggtcctgcagtctgagggcaggctctcctggcaaggccgtgtctaagagcagattgtaggacatgcgatggactcccgaggttcctctgtccgccagcagcgacgcttcttcagtccacattagccacctcaatcaactccttgatcttaacttggcatctttctcaaccggcgacaacccagcaagggcatggtccatctgctgccttttctgggctcccttttctgctgaccaatttacgtgcacggtaaaaatgcatgtttttccaaaccc

SEQ ID NO: 636703 - DNA, 109 bp, Homo sapiens
cgaccggtgtgctcatcccacctgtgtgctcataccccatctgtgtgctcataccccaccgggtgcgcatacccacatgtgtagctacataccccaccagtagtagctc

SEQ ID NO: 636704 - DNA, 290 bp, Homo sapiens
  misc_feature (262)..(262): n is a, c, g, or t
ggcaataggcctttcatctccggggaaagtctcaccttggccctcagacacccgccaagaggggtcggaaggacaaaattagcataaagaagggtggctagagcaattttcaaggtcttggcccaagaattcttgaaaagaagcgctcgggtttctgcccaaaccttccacgcgagtgtaatatatttgaagggccggcccccttttaggggtttcgcgctttctttgggcccgaggggaaaaagggtaaaaagttaatttnacataaatcgttataacagggtaaaatg

SEQ ID NO: 636705 - DNA, 236 bp, Homo sapiens
cccagcactttgggagtccaaggtgggtgaatcatttgaggtcaaaagttttagccccaccctgcccaacaaaaattagccgggcgtggtggtgggcgcctgtaattccagctactcgggtggctgaggcaggagaatcgcttgaacctgggaggcggaggttgtagtgagccgagatagcccccctcccctccagcctgggcgacaaagactccgtgctccgtttcaaacaaaga

SEQ ID NO: 636706 - DNA, 683 bp, Homo sapiens
  misc_feature (442)..(442): n is a, c, g, or t
gctctcggccttagcgccatttttttggaaacctctgcgccatgagagccaagtggaggaagaaagcgaatgcgcaggtctggaagcgcaaaagacacgacacacgactgacggcagaggtccaagtaaacccgctagccttgttggcaccctgctgtgaaaggcccacatggatgcaggaaacatggtgaatggcccagacgcttgggggaatgcctggggtacaaggtttgttaggggcgaacctggcatgttgtcttaaaccttggggtttcccttaagcaagggccttttgggttcccttttccaaaacttgggggaacttcctgagagcagagacctgtttacactttcctgtgccacccctcccgtgggaactttccgggccccgggaattttcacaaacgcgcctgtttttccttttggggcaaaccgggaaaangtcgcccctgacagaaggcgctcctttttgttggcgctcttcccaatttaagaacgatcgccacgatgaaagatgttgggacgccacccacatgtttgggcttatcagggagggatttccccccactttccccatttgtggaccccccctccccttttggggggggcaaaaaccccccccccttttggggtgctttggggaacgcccaaatttttcttcccgttgggggggagaaccctta

SEQ ID NO: 636707 - DNA, 379 bp, Homo sapiens
  misc_feature (29)..(29): n is a, c, g, or t
  misc_feature (62)..(62): n is a, c, g, or t
  misc_feature (114)..(114): n is a, c, g, or t
  misc_feature (179)..(179): n is a, c, g, or t
  misc_feature (370)..(370): n is a, c, g, or t
acaccagaacacaatgcgtacaaaccatnacccaccatcgagtcctgtcgcatatccaggantgacgtccgaaataaccgtccacttcctgggccaaacgtcgcgatcaatacnaaactccctctcgatcgagcagcgtcgcgagatcgacaactgtctctggttgatagcgtccgatnacatgcgggaggccgtcggtcatcggagcgcgcgcgatgaaggccgcggcatggccgttcccccatttgcccagcttgtcgttgtgaacatcctgataaaacacaggatcgacttgtgcggtcagttcggcgttgatgatggcgtacagaccgccatcgatcgtcacgtagctgcgggaaccaccagaatntgccgttca

SEQ ID NO: 636708 - DNA, 785 bp, Homo sapiens
catgacgttcgaatatcgagccttttggcataatgattatacgataaagtatccgttatttgggactcattcattggaatcttcctgtagcagagttgtgcatttagaggtttgagtcccatactggtttcttgccgtgctgactggtagccttcaccctgacttgaatgaaggtcttctggttggcatatggtgaggagacccctgaggtgttcaggaggtgctgcctggaggtcggtttcttcctgggtgttacgggcaagctggtcacacccattggttctctgtgaacaggttcccgtgtttaatcccaaatggaagacccccccaagcttttgctaaacttcacgggccttttataaagtcattttttaaatttcctgaaacttgctttttgaggaatataccacgggatattaaggtagacgcacggattgtttttgtttgtaaaaattctgaaatgaaactttgttttaaaaaaaggcttctttctttcatatgaccagagataggtcaggaatcattgggatcaagatttaaatgttaaaaatcgattttgttacacacgggtgtgttcatttgttttgtagccagaccagatctagatccccgaccaggaaccacacatgctatttttaaaaccgcattttaaaaggcaccttggttttccaaaggaatcagaatatggatatttgtagtgatgatctgttttctctaaaatcttaccatattgtctgtatatggttgtaaattcaatatgggaagtaaaacgttttgggccctga

SEQ ID NO: 636709 - DNA, 1562 bp, Homo sapiens
  misc_feature (413)..(413): n is a, c, g, or t
ggtgggggtggctgctgcaaaccgtgagggaacctggaaccggctggtgttccctggttgctgctgcccttctgtgccatggcctggtgacgcctgctgccagttctggagcccccctggcccatgctgtggtcctgacatcccctcttcaggggtccaccttgccctgagagttacttgccattactggcgcttgactcgacccacctatgggtgcggccctgcctgccgggtctgcctcagctaagtgccagcgcgcgatctgaaacgaccagcaacaaacaccctggtgagccctgcatatgacccccggtgcatccgcagggtgagtctttgacccccgggatcgcgcaggaaggttgtgcacaccgtgtagtatcgcatgcgtaaatgacgacaaccctctgtgtacnttagctaaacagcggcggaaccacccagtaaagttgtgaagggcagtggtcgcaaccctcatggggcggttaacaacacgtatcgaacactctgttgtagctcccccagctgcaggaattgcaacacggcgagcgaacatgctcaaaggatagcgttctctgccccgcggcgaaatagcgagacagtgaacgcgtttcgaaccccctgttggtctcaagcgcacaatttgtgtcagtgctaatcacttcttgtgtcgcattatcccccggttgtgtaaccatttggtctcacagcccgccgccaagtagactgaccaaccgatgcgcagccacaatgctcaaccgatgaccgcgctttctcacaactagagttatgaaacgtcgtcacccactcaaaaagagacgtggtgccatgcagctccagggttattaaacagacaaccacgttttgtagctttcgaccacgagaaacacctcactgtgtcgatccccacaccacgcagatcaagtgatcacgacaaacgaaaaggtgtctacatctaactgatccggtgtctcccacacacacaagacatccacatattatcactcacgccaccaaacaaaccctacatcatcactatttctaccagccatcctccggcaacccatccaacctacgttctcctatgaccaccaccagctcacaaaacttcctgtcatcacacaaccaccacactcccgtatctcttctctatccaagcccaactcatcttcgctcgaactcatatcacaccccaccatacttatcagcttactactcaccgactccccccccctacgtcgcctctcaccgtctggcggggcgcgacaactaccaaccacgaccaccgacgaccaccacgacctgtacgaaatactcacggcgattcacggcaccccactattacaaatggacgaggttcgcgacacaccaccctacattatctagctgagcagataaagattcctctctctgtgtgtgccacgacaagtagaaaaaatggtcgcgtgtcatcaccctcagctccttatcgtacaatagataccacatctgtctgatccccaatcccgcgccgcacggctagcacgctattgtgaacaatttctcgaccacgacgatcgctgttg

SEQ ID NO: 636710 - DNA, 111 bp, Homo sapiens
  misc_feature (70)..(70): n is a, c, g, or t
gtcgccccacatctccttagggctggtcatccagcatggtgttcgacaagtggctgcatctacaaccctngaaggttgttggtccctgcaagacttgggggatccgtctag

SEQ ID NO: 636711 - DNA, 805 bp, Homo sapiens
gccggggaggtcgcggcgcgtgtcactgcttgagccgagccgagccgacgccgagccgcgtccgatcgccatccggtctcgtgcactcgcgcgcgatcccggcccggcggcgcggcccggcgggccaggcggcgacacaggccatggagctcgagaacatcggtagcgaacacggtgctactcaaggcgcctgggaaggtggctggtggaaatcgctaaaggcaaagcaagaaatggtggcagatgctccagttccctccacatcagccagtgcggaagagctgcgtgctcagcggctcgagcgtgagtatcacagacctgtgcgagctggcgagccctattgggcgcctggtgtcccgaggagttctgtgccacagaatggacgtgagcatgagaccagcatgcgtctgtcacacttctctgtgatggggtggccgagtatgaagtgaccccggatgacaagcggaaggcatgtggtgcggcagacgtaacggcaagaatttattctgagccgacagcaggagtcctgaccgtctatccctgaggtaccccccggtcaagcatggtgacgaacgtgacccagcggctggagcagggtccctgtcaacacgaccttttccaggaacgtcaacccggtatgaccccagggagtacctgagcgtggccccttgttgccgaactacctcgagagcagtctactttcaacgcggtttcctgcacgggacagttggctggaaatggcagccagtgaccaaaaagagcttaggcaaatagcgggtcctgggcacacgtggtttgggaacgt

SEQ ID NO: 636712 - DNA, 1128 bp, Homo sapiens
aatagagataggtgcgacaagttggtgttaaccggccctgatttatcagtgtcctcaaataccaaattatctcgttttcactgtctaaagggggcacgtggatgcaatcaatggttatcgtgtagttctgcatgtggttactccatgtgatggtttcttattggcttgagagtacgtacaaggaaagggtatcatgtcccatgtactagcaatgcatctatgatgcttcctagcaagtgcaagaaacctgacatggcaccataatcacgtgccacagcacaatcaatccaaagttcaccgcaatcagaagctctcactctagtgctcttgctctcagtccagtataatgatcatctattagcgtagggatctagccgagtccactgcaagcttgggcacacaatcataattatcattaatagagcctgagcccaggtggctatggtgtggcctctacgccactgatagaatttccacgagaacgagcgtgtgtgggtaagggtcctataggatgtgcgctggaggaatacatgttggatccaagtgtagtattcataagaaaacaaatcgctgggagcccaggaacaaatgggtgtgatatgaattcgcgttagtaatacatatccgtaagatagattatttacacagtattgtggaaaaggtgacccaaatgagtgtgcggtggggtcacagccacctgttatgcaaggttcccaccaagaggataacgatatgtgagggaaaggggccctggatcgagcgtacgatgaatgaaaccttatggcagttttgaaaagcacccctaaggggaaagggcgccggagaaggcgcatatgtgcacgggcggggtaagccgggtacagaaatatatggccaacacaaaaacagtgattatcagtaacccaagggaccttggagggatagaaccagaggaagtgttgaattaaaacgttacgttgggttccacaaaataggaattcttttacaaaaatattttatgaatgagtcataaaaagttggagattaactatattataaacatgtagacaaaaaaatcaagtatatggtagataaacattaaattctataatcagttattaagtaaataattacatatgtgtacagaaa

SEQ ID NO: 636713 - DNA, 645 bp, Homo sapiens
caggtcgtattacataggacggctctcagttacactgtaggactgaacagccttgcatcttcacgtccgacatcacctagggccacctatgcaggactcatgcgtgagtgcatgtccatgcacgttctgcactctagtgaccaaatcgttgatgcctgtatgcagctttactgtctggaacaccagatgcatccaagactttcagatgctcagagtcactgacactgccgaagctgatgcaaagcttgacgagatgttcactgggacattcacagacaatgacgtgccgtatcaagagtacctggaccggcatcctgaggctactgctgaagttgcggactgcaatataccgacatgtcttacaccactggcacattagcacaggcatgcaagacactgacagatctatgcccgaggccactgcagcattggcacgggtgtcattggcctcaatcagtgccatgtacgaacgttgggcgacaagtagcacgaacatacacgactacttggacttatcacaagtatgatggacattacgggtacaagcagcagccttccttacgattactacgtgtttgaaatgatgatggctagtaagtacaagcatgttactctgttaaccatcgcgatgcataactgactgta

SEQ ID NO: 636714 - DNA, 427 bp, Homo sapiens
gaagaaagacatttgcaattttaattgcattgtcagaaaaagcattcctgagagacagtggtctgtttctgcctggttacaccaagggaatattttcaggtgagtgccaatgtgatgttcacacgtctttggaatctccctttgcaataaaaataaagcagaagtctgtttcagagcattttgcaattagcagagtctaactcaaacttaatacaactcttttgttgatcttgtcctcattgtatggtcctgttctatttatgcaagtgatacttgtctgccatttgaattcatgacctaaagattcttctagtaagtaaatgtatttcagtaaaaaatacaagtggatttaaagaaaaatagtaagtaaataataatacagatgttgggacacacaggaaaacgctcataaaggtggtatctcaat

SEQ ID NO: 636715 - DNA, 107 bp, Homo sapiens
gaggcatgtgttattgcagtaaaagatagcctcttagaacagacctctgggccgggtgtggtgttgctcacgcctgtaatctcagcactttgggaggccgaggcggg

SEQ ID NO: 636716 - DNA, 943 bp, Homo sapiens
gaaggatcccaaggcccaactcgttatctactctaccatctttgctagcacactcatcatagtgctcaagctcggactgatctctcatctgaagtaggcctaaaattaaaccatgctagccgttttattccagtttctaaccatcaaaataaacccttcgttacctacatgaaagacttgtccatcgacgttatcgtcctcacgcaaacgctaatgcagcatacattgatccgtttcttaatacgctatttcttctttcaaaccacatatcactctccgggacatttgtaacccattaaacagatagtagcaatcgaatcactctatctttcacttctcatcatgggctatagcaatgagaaactgaagagaataaggacctctttcgcttctgagtcccaaagcgttacccaacggaacctcctctgacattcgtgtcttgatacttctcgacgatgagaaaaactaggcccgcatgctcaatcgatgatatcaaatctgcatccgatcactaacaatgtagatgctcttcatctctcattctctcgaatgttatgccatcatagacgaggcagccgaggtggattataaccaaagcacaggctaatgccgagatcgtttgacattactcctcaatttacccagcatacggagtgacagttaaggatgcagttactagccgtatgaatcccgtaaactttgtgcatggcttaactattagatatttgatatatatgcctaaagtaacttaacgcattctctactactcaagctttaaaggtgccagcatcaagaccatatactatctcgtacctgaaataaggtaacatgataaaccttattcatccacctctctccctaggaggcctgcccccgtaaccggtttttgccaatgggcattatcgggagattccccagacataggttatcccaccatttagca

SEQ ID NO: 636717 - DNA, 221 bp, Homo sapiens
gttgggggaaaaatttttttgacaagcccccctggggagccagtaaaaataaaagttaaccctggggtaaatttcccaaaaccggggggggaattcccggggtcccaaagcaagggaaggaatgtgggggttcccttccccttttaaaaaagtggccccaaaacacccccttaagttttttgattggccccatccctcaaaaaaaaaaaattgggccccca

SEQ ID NO: 636718 - DNA, 135 bp, Homo sapiens
cggcttactgtcttacgtcttatatcggaattccgttaaccactgcgccacgacgggaactccgcagctgcatcttagattcagctctcctgcgtcctggtaaatttccacgtgtctgtggcgcgcacgcacact

SEQ ID NO: 636719 - DNA, 789 bp, Homo sapiens
agcgtggcctctgcgtggtgcggctgggaatcctgcggacatcgggtcgggtctagtgctcccgagtcctgcgctcctgtggctgggagcccttgttctgggtctcgctggggggctgccagatgctgtagtgccacactgactatgttccttcttgtctgcttttcccatgcaagatggctgtgatgactgcctgtgtgcatgctggtgggtgtgccctgtgtgggccccttggtgagccccgtgggactgggagaacctgctgtgttggcattcctgcagtgagggtttcggtgcatgtggtgcatcgcggtgaggcccgggtgggtcggcatgtgcctggttgtgaactgtgggtgccctgtgggggcccgtgacgggcctggtggggaggcttcctgcggtgcaggtgccaaatgtgccctggcatgtgggataagctgggaacgttggggatttcgcacccggtcaacccaaaaggatatggaggcgccaccgccgatgtggggggtacagaggggtgacccacttagacgaagatttcaacaggggtttcccccgttggtgccgaggcggcaagggaaaattcacttaaaatccccttccgatattacttccaccgctgtgggccccataactttgaagaggaggcaacatttcgatcgcgaacgacaattccaaatgctggaaaatgtgacgctttaccccgttggtggcgatggaccccccaatcgatccgtcgagagagggggtgaaatcgaccacgggtattaatggggacacacgact

SEQ ID NO: 636720 - DNA, 977 bp, Homo sapiens
ggaagatcgaggaagacagtgaggtgctgatggtgagaaacatttcccccacccaacaaaatatccccaatccctgacccctttagcccttacccctcttctgagaaactgaactcaatcccactccttgattcaaccatgtttatctttgtcccttagatgattaaaacccaaagttccttggtcccagctttgacagattttgttcggtgagaactttgacatggatggcggtgagggtgtgtactgtgtggctgtgacttgctgggcagtctacgggcttgcgtgtaagcggagtgggttctttatgggtaaatctttgcagtgatccccattcccaccacaccactctataatatgctacgttactgctgacactcctctactgacagtggaccgagcgctaatctgcacttgcctgtggaacaggggaactttccgtacctgcagtagggtgcgccaggatcacagagtcagttctgactctatcacagtcctgaccatgatgagccctgttcctgctacatcatgaagatcccccgcgactactctccccgcctcactgactaccacgtgcatgactcgacacacactaataaatccccgtcttctgcactcaaaaacaacacaacaacacacacctccacccaccacaacactacactccaaacacaccacaatagtctatcaaatactctacctcacatcccacccactcaatccaccattttgctctcctactccttcacgcacagacaacagcacacaactatcacacgcatcaaacactaaacccatcacactaccaacaattaaccactacaacaaaccaaacgaagtcatttaacaacacaattatacatatatataaatcaacatacacaactataaacctacaacctacacatacaactacacactaaaaactaccaaagccatataccacaaaaacataaaataatataatcttctatttt

SEQ ID NO: 636721 - DNA, 301 bp, Homo sapiens
tgcgccagtagccactactaccaatcattactcatcattaataactcatgactgtgctatagctaatataacttggaaatagctccctttcacttctgagttcccataggttacccatggcacccctcttacatccggcctgcttcttctcacatgacaaaaactagcccccatctctctcatataccacatctctccctcacgaaacgtaagccttctccgtgcactctctcaatcttatcctagtcatagcacgcagttgatggtggattaataccaaatcgcgcgacaggcccgttgt

SEQ ID NO: 636722 - DNA, 233 bp, Homo sapiens
ccttgtgggcgctccccctgcccccggagccttttgggagtggggccacccgtggacaacttaggttggggtcaatgcctcctgggcacccttgcctcgccccagaccggcccgtccagtccccatcccccctcgggggcctttattttttttgttcccccagctcggccccttttttgaaggagggctgggttttgggcctgtttcgaataaacccaaacctggatggcgca

SEQ ID NO: 636723 - DNA, 206 bp, Homo sapiens
ctctgctggagactaaagccaacttctctttgcctgaaaaatgcgactatatgataggtgacactatggggagctggagaaggaggcagctcagtccattgtcactaagtacaaggaggaggtcaggaagcttctgcccccctccgataagcggacatatcgccgaaacaaccgggtccctcggccatctggacgggctaccgagc

SEQ ID NO: 636724 - DNA, 1065 bp, Homo sapiens
gacgtcagtgccggccactacgtcgaaattgaaccgcctagatagtgttcaattgacacatctcggtctagtcgacccgtcctgcatccactagtttcgatacctagtcatcacgaccatgactagaagagctgacgtattccatcttgcgtatggctgctcgctgcctgaatcctcctagattagccacgatggaaggtatacgcgtatgccatgctaccactcagccagtaatcctgtcagacgctctgtttgatcgattcgcccaataattcattggcgaaaccacgataataaatatgcgtcgtgaagatcagtcgcgcgtagcattgaccgtccatattaggcgggcctgcaagtagtggcttcatctgtcgctcttcctaacagcattcggggcggagtgtgctactaattacgggagtcaattattttcctactcagattacctgcaatacaattgggtgataactccgtcacatgcttgagaacatatagactaagaggccttcattatggctatggtccttctctcgtgtaggcctagaagtactcgagttcctgaggtggagccacgaggctttgttactagaagcgttagcttagtccgccatgctcgatacattggggatgagatgcttaggtacaagtgacaatctgatggcatggctaatcaggatagaatccatgtcccatcgcttcatgacgagttacctttagcctttgcactttcagtctttgcccttcattattgctagtccgctacctagtgactgcgaatcgtgcctattttctttgcacgaaaacgggatcaaaacaacccccctaggaatcaccctcccattccgataaatcacttcagccttactacaccaatcaaagacgcccttcgggtttaacttctctttcttctttcgttaatgacaattagcactattttcaaccagagctcttagggaaccaagaaaattatacctaatccaaaccttaaaacccttcccaattaagccggatatatttcctaatggcttaaaaatttcgatcggcccaaaaaaagagggtctg

SEQ ID NO: 636725 - DNA, 324 bp, Homo sapiens
tcgtggcctcaggtgatccgcccaactcggcctcccagtgctgggattacaggcgggagccaccgcgcccagccctagtttgaagcttatgctaatcatctattgctagcagattatttcaatccttagtcacagtccttgagtagaatgttcctgtgtaacacaactcctcctcctttctccagatccaggattcattcgttatttattcagcaaattgactgccttccatactcaaggcactgtttagggaagtatagtgttgaactgcagtcctcaccctcaaccatagaccttacattctagaagtggtgagcatgtgca

SEQ ID NO: 636726 - DNA, 483 bp, Homo sapiens
  misc_feature (25)..(25): n is a, c, g, or t
agttcgacggagactctccaccctncacaaagctcagtgtctactgttcccttctttgtgtccatgtgtactcaatgtttaggtcccacctctaagtgagaacatgcagtatttggtttcctgttcctgcattagttcacttaagataatggcccccagctccttccatgttgctgcaaagaacatgatcttgttcttttttatggatgcacagtattccacgatgtatatgtgccaccttttctttatctggtgtattgatgatgggcatttaggttgattccgtgtctttgctattgtgagtagtgctgcaatgaacatatgagtgcgtgtgtctttatggtagaacaatttattttcctttgggtattggtatggtttggctgtgtctccacccaaatctcatcttgaattgtagctctcataatccccatgtatcatgggaggaacccagtgaaaggtaattgaatcatggggattatg

SEQ ID NO: 636727 - DNA, 700 bp, Homo sapiens
agcgggcggatgacgtcaggggggagccgcgccgcgcggcggcggcggcgggcggagcagcggccgcggccgcccggcagcagcagcagcagcagcagcagcagcagccgccgcctccgcagccccagcggcagcagcacccgccaccgccgtccacggcgcagcacggccggaggacggtcgggcccggcgccgacctccacctcgtgccgccgctaatggcgaacggtcgggagagcgcaggtcctctgctccattcctgaaggtgatgcctgggacacgtcgtggaatctgtgtggttgaggcttccaaagcttcctgggacaggacgacactgccaagtactttggtttgctgtccatgcccagtgatgattactacgttgtgtggtgtgtaacgagctgtacatcacggttgtcaaatccgcaggacatttcagatcacattatgaagagaagacatagctcatccatgcaagccgcctttggccgttcctcccacttgcagtattatccttgcttgcccttctctgtccaaaagcaaaggaggcagtgcaagtggaagcaaccgttcgttccagtggaggtgttcttgagcgcatcctcgatcaagttccaagtcgtgtgaaatcacccaaagagagactgcagctcagggggaacaccaggccaatgcatcccattcagcaaagtagagttcc

SEQ ID NO: 636728 - DNA, 248 bp, Homo sapiens
gtattatctgcttctagtgagttcaactcttcatagaagttggcgattccacgtgtgagatcacgtgatcgtctttctgttcctggcttattttacttttcgtaatgtccttcagtacatcccatttctcgcaaatgacaggaattccttctttttttttttggagatggagttccacttctgggtggcccaggcgtgaagtgtcaacacgtttgaccctttcagcaatgactgagttggtttggatt

SEQ ID NO: 636729 - DNA, 1100 bp, Homo sapiens
  misc_feature (1023)..(1023): n is a, c, g, or t
ggtccaggaactctagtgctttgcatagcccagggtcccaggaagacatgtcatagcaggctgtcttgatatagagcaaactagaagaaccagcacagtcattccactgtcctggcttaggttacttcctccactgactccccttgcccaactgaatggtggtatgaggtctagctctttgcctagatagcatgcccatgtttctggtttctgatgttgactcaagaatataggaaaccagatgctcacgtatcgatgactaagcctgctgcaaaatctggagagaagcgtttcgtcgagagtagggttatgttcataggcagttcttcttaatgtgcgcaatcgatgagacataacaaagccggtgcctgtagtgctggctcgccggccgtgtaaagcccaagatagctatttgggtgatggtcgaaggctgagcgcatgcgagtgactaacgcgtcgggtgacgtttcggtggagcctagacgcgtgcgtacaaacattgcttgacgaaacgcattaagccgtctaactgagaaatacacaaaaattatgcatgggtcattggtgggcacattgacctgatggtcccagatgctatggggaggctgaggcatgagaatcgctttgtgagccccgaggaaggatggaccgttgcaagttgttgcccgagactagtgcctagttggcacttcgatccacttcgagtagacctgcagcaagggttccctgccttctaataagttgaacgcatgttataaccatcgtaaattacagagagggctggggcaatacggagacaaccggacgtttttaattgcaccctcggtaactttgtggctgtcttggagggggaaggcatcaataccacgggtatgggttgacgtaaaatttgaccaattagcttagggccttgtgttaacgactgagttttaatacccgccgtcttgcttgacataaggaacctggaaaagccgggctacgggacatgggattgtcacttgcgccccaggaaacacccgcgtntagacgaggcgaagaggctgagagctactgggacagatccctctggaacacggtgcgaagtgcaggacactcatggg

SEQ ID NO: 636730 - DNA, 902 bp, Homo sapiens
tgaggtaggaggttgatccccatgtgtataagttaatatgtgataactatgaatctgtacaaaaacaaaaatgaaaaaaaaaaaagaaaagcaaaaatacagtttttatttggaaatacattggttctctggagaaggtactttatctttttttcctccagtcttttacagatatttaaaagcatttaaatggatgacaagcatttacttaaatctttcaggtggctactgggatttggcattagtggtggtatggttggtgaaatcctaactttggacataaaaggttttataagtattcccctgcctgggaaaattagtttttggtgctcctctctctctctttctcttttccactttctttctggcagactaaaacatgctcacgaagtggcatctctccttgtctctatagaagatctccagcaccatcatagattgatgtctcgcgtgtcaatggaactgtgggaagcagttagaggaaaagctcactttttttttcaggtggcaaataaagggacccctcaaaattagccaaaccaccactacctttaaaaactagtttatgtgcctgttaaaattaatgtgttctttaacatgtgggctacagctccagtgtgtttatttaactggagcatatacactgcggcattaatctccttggggcctgaattgtggcagactgaatgggaggaggtcgggaaagtctgtgagtgcgacggatcttacttgggggttaacactgctttttgatcacgttttggactctgaatccggggtaagcaaatgattaacgaattggccaaagtagaggggaaattcacattcaactgcgaaaagggagcgcgaaacctcaaaaagcagagggtgcccggagggtctctgagcaatcgaaagagaaa

SEQ ID NO: 636731 - DNA, 198 bp, Homo sapiens
tattaccggcgggggtataggaggacactgcgtcccggacgtacgtaggagcgcatactgactgggcgagtatggtcgtccgttctcatctcgcagccgccctaacacctcctggctacatgctctggaccttctgcttcatctgtcagcagagtagcgcacggaactccacatttctcccgacaccagccgggtctt

SEQ ID NO: 636732 - DNA, 920 bp, Homo sapiens
  misc_feature (920)..(920): n is a, c, g, or t
gcagcatttcccagcacacatacacacacaccaccacacccacttaatttttgtatttttagtagagacggggttcaccatgtggccaggctggtctgaactcctaacttcaggtgatctgcctgcctggctcccaaaagtgctgggattacaggcgtgggccattgcccaggtcccaaagttcttttattagatcaaataacacggatttgctaggagtagtggctcataccatttgaggactgggagtttgagaccaacttggctaaacgtggtgaaaccccttcggtgctaaaagtgcagaaaagttagctgggtgtggtggcacggcacctgtggttcccaagcacctcaggaagctgaggcacaaggattggcttgaaccccgaagaggtggaaggtatgtcagttgagcttgagatgcaccatgcagtccatgcacaccactctgtcgctgggcgaacaggcaaaggattctcacaacaataatataataaatgaagaataaaagcctgtgctacatacaaatatgacagggttagagaaaccctgtgtctttcctaaagtgcagtctcactttacctcaatataggtagttacgccggaatggggcccggcgtgggccaccaggccggtatcccagcactagggaaggcgaagggggcgggacacaggcacagaggtcgaagacagccaggccacatgggaaacccggtcgacaaacaaaactcagaaagaaaccatctggggcgccagccacagcgacaaacagcacgcacgcgcaagagacgagacaaaacgcgaagacgcgagagcgaccacaacaacgcggaggcgcacccgaagggatactgcgacagaaaaccccagaaagaagcaagtaaaacgaaaagggcacacgacgacctcgacggtgcctn

SEQ ID NO: 636733 - DNA, 167 bp, Homo sapiens
cagtgcgttctagccgagccaggagctatgctcgagctcgaccaaaggaactgcgaagcttcctccgaagttgccacactccatctcgatggcacggtcaaagctggcaccgccaccgacagccatggccaggcccatgcgctcaatgccagcgcccagtggccggg

SEQ ID NO: 636734 - DNA, 268 bp, Homo sapiens
  misc_feature (121)..(121): n is a, c, g, or t
agaccatgcaccgtatgattcctttcacgtgaaatttccagaacagggaaatgcagagcgacagaaagcaggttagaggttccaggggctgggggttgggggaatggggagagactacttnacaggcagagacttgtttttggggtggtgaaaatgttctaaactgactatggctgcacaactctgtgaacacactaaaaacactggcttggacaacctaaatggtcggatgctgacttaggtctcaataaagctaaaaaataaggtg

SEQ ID NO: 636735 - DNA, 306 bp, Homo sapiens
  misc_feature (5)..(5): n is a, c, g, or t
  misc_feature (50)..(50): n is a, c, g, or t
  misc_feature (92)..(92): n is a, c, g, or t
  misc_feature (119)..(119): n is a, c, g, or t
  misc_feature (184)..(184): n is a, c, g, or t
  misc_feature (296)..(296): n is a, c, g, or t
tagtntgccagtgcccatggatctcgtcctcactgccagccctcccaccntccccagattcaagtgattccttgtgcccttagccctccctnagtagttgggacctaccaggtgtgcgnccacccacacccggcctaagttctgtacttttagtaaagatggggttttgcccatgttaggcagnctggtctggaacttctgaccctcaagtgcttcacccacctcagcctcttaaagtgctgggattacaggtgtgagccactgctcctggcctacgaatgactgttttaatgctnctgtcaataa

SEQ ID NO: 636736 - DNA, 947 bp, Homo sapiens
tgaaactttaaaatccctcaaaaactgtttattatacaagtgatgttttggagtcacgatggggcttatcggtaaggatttctgggtaagcgagcgcgggcaccagggcctaccaaatctttttgggactcgcagcgacaaggtgtcagctaccagcagggtcccggtcataactgggatagaggatggtacttggatactccttactgggaacgcctcatccactattattacctgggtaataggcccaccagggcttcgggaaaatgggactgacggatagctataaatctggggccactgtgaccaccaccctttacacgggacccggtattgtctacaccagcaatatcgctctcttgccagaaaagcaaaattgggctcaccagacagtcttgtaactgtcgtaagccgtgagcagcggactacaaatactattctcacacaggggagcccgccccgtataacaccctttgtattagagagacccaatatggccggcagtatatggcatgtgtgggccccaaaaagatagtgtacggcatttgatcatcaactattagcgagatcacgaggaaaaaactcttgcaccaaagaatctgtgcacacgcggagggcccccttttgagaacagggaaattatgggcttccccagaagccttgttggccactataaaaaaagaacccttacaaccggggatacccaaaggggccagtagagacgttgggatccataccgcccagaaaagtagagcaaggaagaagcgccataccagggacaaggggataccaccaacgggaaagtgaacccgaaggtgggagaacaacaaggagggcacccagagggggtgtgacaaagaaaaccccgcaaaaaacataaaagcgccatgtggggacacgttggagaccacccagataaatgtggccagatcaagggaaccattccc

SEQ ID NO: 636737 - DNA, 170 bp, Homo sapiens
accaagacctggttggcagaagcaggaagcaggctgaggcaggagaatcacttgaacctggcagaagcaggaagcaggtctgggaggggcagaagcaggaagcagaagaaggggaagaaaagaaggggaagaagatcaaaacccaccatgccccaggcagaagcaggaag

SEQ ID NO: 636738 - DNA, 1085 bp, Homo sapiens
ggtgccgggcttccggccggagccggcactgcacaacccgctccgactttcaatgttccaactccccgggcagagcctcctcggcttctttttttccctcactgaaattaaccaatagaattgaaaaaagggaatatgatcagatacaagcggacacgaccattaataagaactcttacgatcgacagcactgaccagaaaagaatgtaaagatgagatacagacaatgaaaaccaatcaagaacatcatcagaagcgcaaaaacagcaaaacagccatcagcataaagcaacagagagaacaacggagacaaaaggactcagacaatgtatagaaagcacaaagagactgcaacgcaaaagatagactacagaaaaagcactatggagtgaccaaatatacagaaatgacgatacatataaccaacaacaaacatcgtagcgcaacaatctacagcaaagcagtactcatacacgaacataaataaggccccagcacgggcgaactaaagtagccataacacacagatacgagagcgcacaagttacagagagaacacaacatcatcagtagagaacataacagcaaactaacaccagcgagcgacaacacaccagcagagaaaatcacgcaaaactgtcaacacagttaacgccgatgcatgcagtagtagacctaacacactcaagagcaacacgcaacgtcacactaccacagatcacacagcacatgtaacaatgtgtagtgggagcaacgatagtccacaagtctactaaggagaaacagccgaccgactacacactcaggaaatgcaagatgataccacagtcagtatgaggctatgacagtggtattacagcagtcgacagatacacacaagacatcaagacttacgaccatctcaccatagaacaacaaataatagtcacatactcgtaggtacttacatgtactacactgattggagaaacataagcagactgaaaagacggcacaaaaattacacgctgaaggagtaacaacaaagacaccaaagggatgaacgatcaaggcacacagcacacagcctgtggatcataacagga

SEQ ID NO: 636739 - DNA, 226 bp, Homo sapiens
tctgagaagtaatgacgatgattgaactgcacaatcagaaatacagggaagggaaacacagacttcacaatggccatgaacgcctttggagacatggtaggtgtgctgtggactgccgagctctgtgcttcctactcttcggttctttactaaaggtaatctacttgctatttcatcattttactttcctttatccttgaatgaccatgtgaatgaattcatggca

SEQ ID NO: 636740 - DNA, 1500 bp, Homo sapiens
acgcgttaatcagatgtagtggtctcaagattgagtcctggacactattaaccaggggttggatatatgttattatacactattgaaagtagtcgaggggtccagtgcatgctggggctatcgagggaacgcaccaattcgtctgcgaaaacagttttaacatacatatttacgtcgcaggacagtggctggtgcaccgtgtcggatcgtcagacgcgtccctgagctggtcagtgggattgcacgagggcctgctcgatccaggacgcgcgacctgtaatcatgccgtatattattcagttgagagaacggggagagtcctttcgtcgcgatagttatcgagcgcaggaccctagttcttctaggaaatctcacttgaagcatacgaagtgtggctctcgaccatagtcgtctgagacatttaccctgaaaaggtagctaggggaatgacggctgagttggagccggactagcgaccctgtggtttggcactgcgcgcagataagctctgttccagagggtaggactggcacgagcgtcgaatacacccggtggcaacctgtggggggctcctcaacgttatgcaaaatcaagggcgaaataccatatggattcgcacttcggcctagcctcgcgtacaaaagcccgtggccaagagggtaccctcctatgccatggaattgttgtacccctagggcttgtcgacattgcccaagtgggctttggtgcacacatcttaagggtggcactacgcaaattgtcttatgatggcacaattctttcacgaaagtgtgaggtggttccccgtgtatggcctatgaggcacgccaagggctggtatggagccgcgatatttaccaaggcctacgtggagccggagacggcgccaatgtgccccatggataccagcgctttctggacggcacgggggcgcaggcaaacaatgagggactcctaaggttgacgcaaagggcgagtgtaccaacctcccccgtatccaaagctaaggttgcccaagggttaactattacaaccttcgtgtggcgcaaaccgcgggctatccagaggctagcaatcctcacaccgaatagctgcggacgacaacgcgcgcgtcgaaggccatggcacagtagaatgcgcgtcgcgccaatgaggagtacacccaccaacgtatggtggcggcgcacgtgggaaaccccccatgggggagctagccgacgctcaacgaagctactcccaatacggcagagagagaacacacccggtgtgggaacgctaaaacgagacgcccgggggttacgcaagatagatccaaacccgccacaataggtagagggcgtgcatcggcacaaacgcggagagccatagtgggtagaggagcatggaagtgacggctaccacaagtaagacgtgcgggagcgacaacaccacaacgtggagggggacaccacgggagtcaaccgcgactacacaagcggatgtgggagtatataagcggag

SEQ ID NO: 636741 - DNA, 1059 bp, Homo sapiens
  misc_feature (140)..(140): n is a, c, g, or t
  misc_feature (476)..(476): n is a, c, g, or t
agcggagctgagcttgctggtagtgcccgctggtgcttgggctcactgatgggtgtgctcgttgatggtggactccggcggagattcatctcccagagtgtgtacccgtccttatcagtctgcctcgccgtctgcagtcnaggatgtcattggccgtggcccggcctatctggctatccgaccctggagcgaccagaactattcggtgcggtcgaggggtcgtttccattgcgattggtcaaggttgcgagatcgatcagccgaacggaccaaggagctagtcagggaccgagcaccgccgagtcgtacgtggtcccttcgacggagcgagccagatgcgcgcatcactcggggcgaacgcgcgggcaaggaagccgatggtgggcaactgaacgcgcggatccaaacagcaattcatatcgatcggccaaagtaggcgtgagttggacgggaaatttcgaggtaatgccaacagntgctggtctcgtgagtgatgataaacatatggagcggtggcggtggatggatgagctgaggggatgggcaaggccactaaaggtgtgagaagtaagcaagtaactggaggggtgagatcgctagagtaggcatattttggccatgaagaagaatatgggtcccatgtgttacctcaggaaagtatgaatggagatcgtcggaaaggccgtaaccatgcggggggggtcgaacgtgttcgccacacggagcccgtgtcaatgaaaccgggttccccggacactatttgtgaaactcgatttcgggagtcgccagagggtccactcaaagggaatagcagggggtagaaacaatcgattgggggagacttcggattgatggtggttgatggcaatttattcaaaagaggggcacaattggcgtggcgtgacaatcggcctaaagggccgtggaacaaagaaatgggggtagttgccggggcagtgcgaagaacaaaaaggtgtatcaattcgtttatggaccttggtggggtgttggaaacctctggagagctggtccaagttctgtaaagcagttgagagaatt

SEQ ID NO: 636742 - DNA, 188 bp, Homo sapiens
cacgcgcctttagtaccacgtacttaggaggctgaggtgtgaggattgcttgagctggggaggtcgaggctgcagtgagccgtgattgcatcactgcactccagcctgggcgacagagtatgaccctgtctcataagaagagattgcaacctaaatttcccaccacttgaggggcctctacttgtata

SEQ ID NO: 636743 - DNA, 425 bp, Homo sapiens
  misc_feature (86)..(86): n is a, c, g, or t
tacggttgggaaatttaattcctttcagattgtgcctcattttagcccaacctatatttccatatttaaaacctaattatagcatncctgtggtgtatcagttacccttttgcctgccttaagaactgtcctgaggcccagtgtggtggttcacgcctctaatccccagcattttgggaggtcgaggcaggcagatcacctgaggcccaggaattcaagaccagcctgaccaacatggagaaaccttgtctctactaaaaatacaaaaaattagccaggcgtagtggcacatgcctataatctcaggtgtttgggaggctgaggcaggagaatcacttgaacccaggaggcagaggttgcggtgagccaagatcgcaccattacactccaacctgggcaacaagagcaaaactccgcgcccaccc

SEQ ID NO: 636744 - DNA, 191 bp, Homo sapiens
cacctaaaaaaggcacacaccaagacacatgctcgtgacttttataatcccagtgaaactgctacttggataaaacttcccatgcactgatagtagggatgctcttgcaagttaaatatatgcaaagatttaactccttttactttttctctttttttttttatggaaacgaacccttattctgtgttcaa

SEQ ID NO: 636745 - DNA, 802 bp, Homo sapiens
acagagcctcgcctttgccgatccgccgccgtccacaccgcgccgtcagctcaccactggatgatgatatcgccgcgctcgtcgtcgagacggctccggcatgtgccaggcccggttcgcgggcgacgatgccccccgggcgtcttcccctccatcggtggggcgccccaggcgaccacggcgtgagtgtgtgggcatggcgtcagaaggattccgtatgtgggcgacgaggcccagagcaagagaggcatcctcaccctgaagtaccccatcgagcacggatcgtcaccaactgggacgacatggcagaaaatctggaccaaccttctacaatgagctgcgtgtggctccgaggagcaccccgtgctgttgaccgaggccccctgaaccccagggcaacgcgagaagatgacccagatcatgtttggaccttcaacaccccagcatgtacgttgctaatccaggctgtgctatccctgtacgcctcttggccgtaccactggcatcgtgatggaactccggtgacggggtcccccacgatgtgccatctacgaggggtatgccctccccccaatgccatccgtgcggtcgggggacccgggcttggccgggaccttgactagactacttcattgaagaatcctcacggagcgcgggttcacaggtttcagcaccaaaggccgagcggaaatccgtgcgtgcctacaggggacacttgggctaaggttgcctggcttcgagcaagaatgggcccggggcgtccggcccccctgggaagaaaccaacaggcctaggcggctcc

SEQ ID NO: 636746 - DNA, 142 bp, Homo sapiens
taggcagatcacctgagctcaggactttgagaccagtccgggcaacgtggtgaaaactcatctctaacaaaaatatcaaacttagctgggtatagtggtatgtgcctgtagtcccagctacacaagaagtggaggcaggaga

SEQ ID NO: 636747 - DNA, 333 bp, Homo sapiens
  misc_feature (52)..(52): n is a, c, g, or t
tggatgagtctagggtgggggtgatggctgcttgctgtagtcttgcaggcancagatggatgtttctcgcctgagagctgtgggtaggtgtactttattcttcttcttttttatttttttttgagacggagtctcgctctgtcgcccaggctggagtgcagtggcgtgacctctgttcactgcaacctccgcctcctgggttcacgccattctcctgcttcagcctcccgaggagcggggactgcgggtgcccgccaccacgcccggctaatttttgtatttttagtggagacgggatttcgccacgttggccaggatggtctcgatctcctg

SEQ ID NO: 636748 - DNA, 343 bp, Homo sapiens
tgtgattacaatgagaaataatggcttgaaaatggagtcttggggaataacctttatagggttatactggggaagtggagcccacaaagacaaatgaaaaagaatggtcagaaaagtatgggtggaaggtagaggggagaccagaactttgtatcacagaagctgagtaagtagaaagtatcagatacaaacaagtctaggaaaagaatcacttatgatatctatatgtgacttgacattggggaagttatactgatgaccttatcagggatagtatagtgaactagtaaaaaatgaaaactagatgcagtggtttgagaaatgagatgtgagatagtggcaa

SEQ ID NO: 636749 - DNA, 691 bp, Homo sapiens
  misc_feature (235)..(235): n is a, c, g, or t
  misc_feature (241)..(241): n is a, c, g, or t
caccagggtgtgttttcccccccacattgcccacccgtccacgtggggggggaaataccagcgccccccccccccctctcgtttaatagggacccaccggcgtgcagtagatgatttcgccgggcggagagaatatatgtccgagagaccacccacgtcatggtataccattgttcgcccacacacacacagatgagacattcttctagcaggggcgcgacaccttgttataaanagaggnggtgtcttctaccctccctcgcacagcagacataccttcccacaaatggggggggcttccatatgatgttagtgaccccccgcacatgtgcaacataagagaagaaaggacacacgcgcgagtgtgtgtgataaatatgaacgcacatatccgggcagtagaatatatatgttgcctgtgtaaagaaaatatgtgtgcgaacatattcgtggtaaatatacggcgcagcaccatcggtcgtataacaccaccaccttcttatatgtgttccccatgaacgtttttatatagaggaacggttccagcacccggcgtatttgaatttttttttcaaaaggcgcgtgttcagagagagatagagaggatgatgtctgctctcatctataaagatatgatgtgtcatgatggaccggctcgtgctgtgatgactgtgtgctactaacaaatacc

SEQ ID NO: 636750 - DNA, 378 bp, Homo sapiens
acagtcactttcaaacacactgtgacactgtgaatttgttaacactgaggtgattaaacctaaagtgcacgaagacttagttaactatgtctactattaaaaatactcgggaaaattctgatgaaaaaggacattcagcaattagttctcacgataaaattactttttggccgggcgcggttgctcacgcctgtaatcccagtactttgggaggccaatgtgagcggatcacctgaggtcgggagtttgagaccagcctgaccgacatggagataccctgtctctactaaaaatataaaattggccaggcatggtggtacatacttgtaatcccagctactcgggaggctgagacaggataatcgcttgaacccggga

SEQ ID NO: 636751 - DNA, 215 bp, Homo sapiens
ctcagctggtaactctgctgttgtccggaggttcaggcttgggtgtgccttcctcctggtttgtctgacttttgggctccaatgggtcaatctcctgccctgcccaccacaaggaaaagggatgctgctgaccaagtgctccaaatgacccaagcatgaaggccagcgcggacgcttttaaatgtgttagtggcttaggtaactgtgtgttaact

SEQ ID NO: 636752 - DNA, 362 bp, Homo sapiens
catctgcgctggctcgggtgggtcaggtcgggcgcggaggagacggggaggctggataggtggcaggcctgatcatggaactcttctaatgcaagtggtacttttgccagtaacgggcctttttaaaagactaactgtgtcaagataaccccttcgcacaacgggttctgttctcctgtgagcatctcctctgcctggcagttctcctaggggcaagggacaccgaaccagatggccaggacgttaacaagggaagaatctcggttccgcgttctcactgaggaacagtgcaaagactgtggaaggcacggtctgggaaactgtcgtccttccgtaggatctgttcatctacagctgacgag

SEQ ID NO: 636753 - DNA, 1457 bp, Homo sapiens
ggagagaactagtctcgagtttttttgttggtttttttttttggcaaaccccaccgccgaggaaaaccggtgttactatttagccatgtggttcaaccccaccggtgtttcttcgactttgccgctcgacggcaacgccctttgggccgcgttctcctttgtgagccgtgttgtgcaaacaggtgtcctcaaggacgcgccacgaaacaattttccggtgcctcgtgagccccgtgggagaagaacagaggtattgggctctcataggggcgtctccgtgcttctctcacgagacaatttatctcccagggtttaagtgtgtgtctcaggggtgggtgactttcacaacgcccatataacgtggccctgtggcgtggcaaggtctccactctctatgtgggagaagaaatttgtgaacaatcgtgaacacactttcatctcctataaagccatatacggggctcccgtggcatctcttgtgctccatgtggccacaatgtgcgtggcccccaaacccaccaaagtgtgggtctctcccccaccctctcttcacccctcgtgcccacctgtgccccacagaaaccgtgggagtgtgccgctccgcccatgtgtgcccacccgccccgtgtttgccgcgtgtcttgcggccccacaccgtctcgcaacacgacgcggcgcctctgcaccctatctgcgggtggcggacccgcccatgcttgcaccagccgccctctgcgcgggcctccccacggacaactgtcgcgcccacaacacccgcacgcccacgacaccacacccatcttccccccaagctgcgcccggcgcatcctggcgtcgcgcaccacaccctccgcaacaaaaacgctttcgggaaccctgtggcggtaccaccaactctcataaaccccacccccacgaccttgccttccccctctcgtgtagtagcccctccagcggcagcaacgacacccgccgctgctcgcgacccccccaactttatcgtactctcgccacggcactcctcccgtcccggacacttctttgcggcggcccaccctacgcgcctgtgcgaggctttcccccttttggggggatcccacgaggtatgtatccctttgctgcccccctccccccctctgcccatcagcccgcggatttggcccacacctcaaccttccacaccaacttcactccacatctccccacccctaccccctctccccaaccacacccgatccccccacgcagtccaacaacaacaccacgcgcgacacctcattcaatgcggcaccacgcccaaccaaccggctctcaccacaacgccccctccgcacccaacccgtctccccaccccccacctctctgtgtaccaccggcgctcaacttccgcgcggcccccacaagagaccaccaacacatctcacacccgcgatcacgcatctacacgcccccccgcg

SEQ ID NO: 636754 - DNA, 323 bp, Homo sapiens
gtttcctcaccttttttcccctttccaggcgggccatgatcccccccccatgtgttttaaaaaggcagtagcctttgcagggacctgtctgtcccaactgtttgaacagtgtgctccccagattttgtgttcaaaaggatttgctgcattgagccttgaaccctttggataggggaaaaaattatatatatatatatttttttgttcggttggcattttttaatttgggcttggaatgggttgatgggcccagctaatgattcaatgcgagccaagattggggtttgtgttgtgggggtttcaaataaagagccctcttctta

SEQ ID NO: 636755 - DNA, 290 bp, Homo sapiens
agtcgatctgtctatgacccagtacacaggagcaagtgtttcacatcatagacttcacttccaactccttggaaatgtacatttctttggacttacagcgagacgactaggcaggcaaggccaggcacatgctataggcaactacaaatgcaggttgggaggtaatgctaactgtcaccctacacagggcatggccacggggcactgttattccgcaagctggttttccagaacctgttagctgtgaagcatggtgcagcaccatattctgagacgctacaggcgcgtgt

SEQ ID NO: 636756 - DNA, 357 bp, Homo sapiens
cggccgcagagctccaccgctgaggccaacgaggccatgtttttattttaaaaaaatacatataagctgggtgtggtggctcacacctgtaatctcagtgctttgggaggccaaagtgggaggatccctcgaggcaagaagtttgagatcaacctggggtaacataggaagatcttgtcttacaaaaaattagaaaattagctgggcatggtagggtgcacctttagtcccagctcgtcgggaggctgaggtggaatgatcacttttgaccccaggagttcgaggtaacagttagctttgattgtaccactgcactccagcctgggcaacagaacaagaccccatctctggatcgtg

SEQ ID NO: 636757 - DNA, 201 bp, Homo sapiens
atagtcccaaccatacaggaatcatgcaaatacaatgaacttccaggaacgaaacaatataaacccagctgatatagctaccgtcagtctttgcaatctggccatatgaatatgttgggggactctgggaatatacaactctcacagagcaagtagatgagcccagctcacaaaaccacaaacacaccttccatgcttgag

SEQ ID NO: 636758 - DNA, 1332 bp, Homo sapiens
atggtcgaggccatctcctgtgtgcctgtcatggctggccatcgtggctaaacatgtgtactgctgggccggaattgtggtggtctgtacgctgtgaatgtgcatcaacatttcttgtgcaattatctacatgaaacaatgttgaatgtaccttggctttcctcctgcaagctggatgaacaccaacccttccctgaggcccctaccacttcctgggcccccagcctgcatcttcttggctgtgacctgtgcgatggtattgcttgccccacaaaaccaatgctgatgtgccatgtgccgctctgtgacctgtctcaatgtgtgttttgactggcactcccacctgcccctactgatcaagtgaaaacagcggactggttgtgttccatgcctgccctcaatggctctgtgctgctcttgaagcgctacaatgcaaagctttgcctattcttggtgtgctgcctgtgcctcacctgcaggcttggctgcgcaaggtaccagtgcatgctgacaagccacgacccttgggcagcgccgcacatgacggacacacatgacgacacaggccacgagcagtccacctagccgggacacgaacgaccaccaggccatcaatgacgctgcctccgggacacccagggcccgagcacaggacacgatggatgaacgacaattctgacccaataacacagagaggtcctcaaatgacccactgagaactccatgcgtctgagacccagcttatgcaggactaggtacacacttcctccacacactccacatataccccatccataccctcagacgtggctcataccacatcgccctcctcgcgatttgccgcgtcaccacaaccgccctgtcataagttgacaacgtggcgctccacttggggcacgcatccggttgtagtctatactctttggacacccaggcactctatcatctgtatctcccacaccgtcgtgtcatgaaaatattccccgtgttactaccccaataatagcgtgtgtgccggttcatcaactttctgcacaacacaccacgagtaaccccttgccatattctcaccctcaccacgcacgcaatccttatcacagtctctctccctcgctctacagcaccgtccgacaccagcgttcgccctcgtctccttacacttctctctcgctccctccccggctcgcgccccccctcaggcatagcccctgacccctctcaccatactacaggcctcaccaatcaccagctgatctcactactcccaactcctctcatacataacacatatacctccctcgtagacatcacccatcaatcctcactacccca

SEQ ID NO: 636759 - DNA, 378 bp, Homo sapiens
  misc_feature (281)..(281): n is a, c, g, or t
gggagtctggagatcgacgtgtcaaagacatggcacctcgaagaggggcacaggaagaagaaggaagaacaggatcatcagccatcggcagcctcaggtgcggctgaaggagagaatgtagtttggttggtcgtgccatagtctttctgcatcgcgttcaagtgacacttgttgtccatgtcactgatcgttgtctggcaaggaagaccgatctgccagtgtgatctcggtggggatagaaggtagaacggcagagcgcgaagatgaatcctcaccatatngcttgctatgttagtgctagtcccagtgatcgtgtgcccaagtaggtgcaatggagactagtggtatcatccgctctctcacgagcgagtcaatact

SEQ ID NO: 636760 - DNA, 273 bp, Homo sapiens
  misc_feature (199)..(199): n is a, c, g, or t
  misc_feature (239)..(239): n is a, c, g, or t
aacctccgcctcccgggtttaagcaattctccttcctcagcatcccgagtaactgggattacaggtgcctgccaccatacccagctaattttttgtattatgttggccaggctggtctcaaactcctgacctcaggtgatccacctgccttggcctcccaaagtgttgggattacaggcgtgacccactgcacctgggnaatatgagcattttttagatgacttaatgtattccaactnataaaaaaaagtaataattacaaactaattaatt

SEQ ID NO: 636761 - DNA, 902 bp, Homo sapiens
  misc_feature (415)..(415): n is a, c, g, or t
  misc_feature (458)..(458): n is a, c, g, or t
  misc_feature (721)..(721): n is a, c, g, or t
  misc_feature (772)..(772): n is a, c, g, or t
  misc_feature (775)..(775): n is a, c, g, or t
gggcggaacaggctaccaagtccgtgctggtggtgtgtctgggtaacatttgtcgatcacccattgcatgaagcagttttcagagaagagcttgtagagccgatcataaacgatctcagcagaattggacgggtagacgacgcgtcgggcaacctgccggggctagtgagatacgggaacacccgcgctgagcgtacacgatgaggcaggacgcttggcactgaaggacggtcactcggacataatcccaggtggagcgcacgggtatgcccccggtcgagcatatacgcagagacgaatgacttgttaggtccagcagttctggagttaatagtaacgtagtgatagtgggacgtgaaacgtcaagtcctggaacgagaggtttgtaactacgaagaggacggtagatcggaangtatataagacgcgttgcagagagggcgtacacaagtgtgaancgtaatctgtgggaagatggctgattgcactctgatcgaggagacacgcaatgtactatgaagtgggtacacgaattccgcgtgatggcaatggaggaagagtagagcatcatagaccttgtgaagaacgggtggttaccgacgtgagatgctgtgcagtgtagcgtggacagaaggggtcacttggagagaataggccacaacatgcagtgcaagagttcagtagaccacttgcgtaatgggaacgagtagctgtactgagnactcaccaagcactggtagggtccctcgctcaatttcatacaggtacgggntgntggtaaagtcagcgtgtgaccgcaggggccccgaataggccgcagacttgcttaggattccagttatgagcattagctgggtgaacgttacgcgttaccaaagctaattggtagaatggaagaatca

SEQ ID NO: 636762 - DNA, 449 bp, Homo sapiens
cacaattgtagaaaatactgtttaatttacatggatgcatgttgtctactaaagactaaacaaaactatgctaatttttctgaagtaataagtagaaaccaaagcacagctaaaaattccattgctcagtttatacactaacagttctagcttttgcagtgttaaatactttaggctccagatattatcacctttgatataatcgccttggatgattagttttctgttggagaaacttagtatcttttactcttcattactctgtattgctgaattgaatcctatcctttgtgctcaacttttgtgtgatcttaaagtgagctttatcattctaaacaaatctgtgtctattttaaaagactgaaaatggaaaaaaaaaaaactttgccaaatcaaaagcaaaaacaaagtggtggttctcaggtcctagataaagagaatcctgagtc

SEQ ID NO: 636763 - DNA, 597 bp, Homo sapiens
cgcgttgtgtttacagtaaaatcagagaacttattcctttttctttctgtctattcgagaaacggagtcttgctctgttgcccaggctgaaatgcagtggcacaatcatagcttactatatgtcctttaactcctaggctcaagccatcctcccgcctcagcctcctgagtagctaggaaggactacaggcgcgtgcacagagcatggacaattttttttttagagacagggtcgcactgtgttgcccaggctggtctcaaaatcctggcctcgagcaatcctcctgcctcagccacccaaagtggctgagccatcatgcccagccctcccttatttgcttaatcgcatctcattagagctggcatgtgaatttactttgcccatttttcagtttcctttaatttacatattaacgacatgtaacagttctttaccaatgaatccaaaaccattcacttgaattaattttcctccagggcagaggcctcgtctgcttgaggaacaacgaagagttcaggttaccttcatgacagcacccagatgaatagcaaggaatgtgacaagtcccattgaaaacactggaatttccacacaga

SEQ ID NO: 636764 - DNA, 294 bp, Homo sapiens
gcagactgtactagctgcgcctatctgttccagcagcatatactcttccatacttaattcttttcaggaactatcttaaataatttaacattcctttataacatctataacagtgtcaaaactggggtagaagggattttattttagcccggaagggttccatctttgctatctgtagatcagcgcttaggaagatctaagtagtgatcaataaattttactggttgatggcatcctgtgtccgctggagtagtgagttgtgaagtcttgaaaacctagtactatttgacccta

SEQ ID NO: 636765 - DNA, 605 bp, Homo sapiens
gcaggttgttttgcctttctggctctcacaaaaaaggttagtgattgatactgtatctgcatattttctattcctttctctgtactttagttaatagcattttgtgattaaaaaaaatacgcccttgacttacttttcttgttgttattgaaagcagtttttcctgtgtctgagcatgtataacattagtgatctatatagagagtttgtttattgcaaccagaggcacattcctagggaagaatggtttttgaatgttccgttatcttatttccagtaggacatctttagaaatgagcaaattccattaaactaataaccctgattttggtggataagcacttatactaattctgctttgagaaaagagattgttcactctgctttaggagctgctggctaagtctggtgcttcttaacctttaactaagaaaaatgaggcttgctgacaataggtagtttttactggcctgtgaaacccaacagcatgttcagcaatgtaaaccacagcagctatcttttgctggcttcactgttgtttgaagtataatgaaatgcttcttggccggtctcggtggctcacgcctataatcccagcactttgg

SEQ ID NO: 636766 - DNA, 82 bp, Homo sapiens
ggccccgggggggtttcccccgggacccccctgggggggggggggggccccccccccttttttttccccccggggggtttta

SEQ ID NO: 636767 - DNA, 223 bp, Homo sapiens
  misc_feature (3)..(3): n is a, c, g, or t
  misc_feature (27)..(27): n is a, c, g, or t
  misc_feature (146)..(147): n is a, c, g, or t
  misc_feature (193)..(193): n is a, c, g, or t
ctnctctccccgcttctgtgctgcctntcctgcccttcgcttgctcgcttcttcccgggtgcttgccccccttctgctgcctggtctccccctctggggtcgctccttggtttgccccttccctctcttcctccccccttcccttnntctttctttcctggccgttggggcctgggtgcgggcggcgcggggngggccgtctgggctgccgggttctgtctcc

SEQ ID NO: 636768 - DNA, 929 bp, Homo sapiens
ggtggctgctacagctcccagacaagttggccacccggaggccacaggatccagtcttttagataaacaggccactgggcgtcgaatggccgcaaagttgagtaggacactctgggaagacaaagtttgggccttcttggtgagacccgatacccaagctcctaaaggagtcctgtaccggccgtattcattgttccgggtttctgaccagcaaaaatggagtattccaggtgactgacacggtatacgatccctctcttcagaggtgaaacggattaaacaggagttgctgacaatcatcccagaacagtcctaaattccattaggcatgaaacaatgaagtaggcattctgtggactaccaggtgagtttctgaaactgaggtaagagaggagtctccctctgtcaaccattgaatccagtctgggcaacagagtgagattcgtctcagaaaagaaaaggaaagggaaaaaagtaggtttatattcttcgtggtttaaaggggcaatagaaattttgtggagagagtccaattccaggtgtggattattccaaacagaaacattttataacgtttacgattacttgagcgttcttagtaggcaagataggtatcacttaaaaacaggcttcagggtatatactctttgtaaagaggctacaaattacagtgcaggttaccagtgtaaccacggtatgttcttttaggttggaagaagaattaagggctattttcagttgggggtgttcggcttagggggcctaacagtggggtgcaaataaatttcggagaatacccggaggtggaaaaagcgcattaggtttgttacaatgggagaatttccaaagggcggggttatttgaagtcgaaacgatcttgaagagaagagaaggattggaggaggaggattagaataggagctgttagc

SEQ ID NO: 636769 - DNA, 93 bp, Homo sapiens
ctggccagatttcttaggacttcatgacaagtgtttgtgtaatttgtccaaagccttgatatacttggcggttctagatcgcgagcggccgct

SEQ ID NO: 636770 - DNA, 2682 bp, Homo sapiens
ggcacgaggggttccgtttccggagtggagggcacgccaggtgtctgaagctgagaccccgggctcgcagtcgccccatgaatttcgagttccgcaactgacgctactgggcggggcttcatggccagggcctcgctcaggcctaagtttccccacctgtgctcaatgcacaggtgcggtgccgcctccagggccggccgagaagagaggccgcacccgcacggggactgcatctcccagagcgccccgcgagcggccgagcggcgggactccatgccctagagtgccccgcgggcggccgggcggcgggactccatgtcctagagtgccccgcgggcggccgggcggcgggactccatgtcctagagtgccccgcgggcggccgggcggcgggactccatgtcctagagtgccccgcgggcggccgggcggcggccgccgcaaccgacaggtccgggactgggcgctgcggcctcgtccgcgcgccggggcgggggcctagctcgacagcttcccggcggctgcgcgatggacagccccgaggtgaccttcactctcgcctatctggtgttcgccgtgtgcttcgtgttcacgcccaacgagttccacgcggcggggctcacggtgcagaacctgctgtcgggctggctgggcagcgaggacgccgccttcgtgcccttccacttgcgccgcacggccgccacgctgttgtgccactcgctgtgccgctcggtactacgtgggcatgtgccttgcggcttcagaaaagcggctccacgccctcagccagggcccctgaggcctggcggctcttcctgctgctggccgtgacctcccctccatcgcctgcatcctgatctactactggtcccgtgaccggtgggcctgccacccactggcgcgcaccctggccctctacgcctcccacagtctggctggcaggcttgttgcctcctctgtcaacactgagttccggcggattgacaagtttgccaccggtgcaccaggtgcccgtgtgattgtgacagacacgtgggtgatgaaggtaaccacctaccgagtgcacgtggcccagcagcaggacgtgcacctgactgtgacggagtctcggcagcatgagctctcgccagactcgaacttgcccgtgcagctcctcaccatccgtgtggccagcaccaaccctgctgtgcaggcctttgacatctggagctggaggcctgcataggctgcatgcagacacgtgccagcgtgaagctggtgaagacctgccaggaggcagccacaggcgagtgccagcagtgttactgccgccccatgtggtgcctcacctgcatgggcaagtggttcgccagccgccaggaccccctgcgccctgacacctggctggccagccgcgtgccctgccccacctgccgcgcacgcttctgcatcctggatgtgtgcaccgtgcgctgagtgggctggggccttgaggtgactctgtgtctccccgcaaagccacagggcagggaagggggtggctgggcctcctggctggcaaagggctctacttaaagcacatgatgtagagcaactcgcctctgccctgggtctgcagaaggctgaggacttttggttaaaagcaatcctcatgaaaacaccccaccctgcttggcagccagggtacaagtcctgggcacctcctctttgcctccctcctgcccctttcctgctggtgggggcagatcctgcacacacagacacagcgtctgcccccgagccattccctggagaccctgggtctaccccaggtggtcgtcatctgggccatttgccttacttctctggagcatacccaccctcagttacgtgccagacctggaccgcattctcctgccctgtcctggagctggcccctggctgcctggaggaccctgggtaggtcctgagggtgggatggagaagagggcactgctgtggtgtgggagcagtcctggggcttcctggtggctgtgaccagttgaggggctgttcctgggtggggtggcaatgggaggacaggtcagagcgccctcatttgtggggctgcccctccgggtttctcatcctgtccttggtgcctttttctgcccaacaagtccagggaaggccgaggtctcagactcctgggtaggggtgggggtttgagttgaggaccaaagtgccatagcgacatccagaacacaagcccaccaggggtccagcccaggctacccactcccctagggtctcccaggctcagaaggggatgcacgccccctgtggtcaagcctctggtgggcgtcttgcccagttcctgatggttcaaggggaggggggatgttggccaggccccagggcacagccctgacacaggtgtggctactggaggggccttcatacctgcggccccaaagcccctgggcttggctgtttgaggcagaggtgatggactccgggggcctgacacttgggatttgggaggcttcctagagcgctcagcaggtgaaggcagcaggggccatggccgggagccaggcctagctttgaactgagtttcaagggctgccaaagaggggcagtgggttggggttgtttttactacaaaataagttacttagttttataaagacaaaccgattgtagccaaatgacaccatatttaataaaatttagtctgaagtg

SEQ ID NO: 636771 - DNA, 534 bp, Homo sapiens
aacgagggtcctcagcgcaacgggggataataatatggtcacctcagggtggtgtggtgaaaattaaataaattaataaatgaatatggcagggagcagtgttgggcacagaatacatagtaatagtcattatggtcattagaacataagttggatcaaggtagaaatttttattggattattcccggcggtattcctagcacctagaacagttctaggcacatagcaggcactcagtatcggttaaatgaatgactaaatgaataactagaatataaagagaacaatttcccaagaagttggtgattaaggactactacatgactcctctcccactctcagcccttcaaccaaacaaagcagtaactaatgctaaatccaaagaactggggtttatgtccactacatgctaatttccagattaattcagcccggaaaaaaagggatctggaaaggtagctgagattagatgttttatgagaacagcctaacatccatttcctgcttcttctttagaatctatctttagtgagc

SEQ ID NO: 636772 - DNA, 106 bp, Homo sapiens
gagataaggtctcacgctgtcgcccaagctggagtgcagtggcgggatcatggcttaactctagcctcaacttccggggctctagcaacccttctgtcgtcttctc

SEQ ID NO: 636773 - DNA, 346 bp, Homo sapiens
ttgtcatctgacatcccatttggctggctgcacattcatcaggattttttttttaatacaaagttaacaagcgttagaatatggggaaattgaagccttcataccttgcttggtaggaatgtaaaatggtacagctgctgtgtaaacagttgggcaagtccttaaaatgttaaacatagaattaccatatgatccagcaattccacttataggttcatacccaaaagaattgaaaaactgggatgcaaacaaatgcttgtacaccattgttcacagcagtactagtcacaatagccaaaaagtggaagcaacccaaatgtccatcaacagaaaactggataaacac

SEQ ID NO: 636774 - DNA, 251 bp, Homo sapiens
  misc_feature (87)..(87): n is a, c, g, or t
  misc_feature (101)..(101): n is a, c, g, or t
  misc_feature (161)..(161): n is a, c, g, or t
ccccccccccggggggcccttttgagaggtggggttttctttgtgacccccccggcccggacaaattctgtaaatagagagaagganttggggcctcttcncccccccccccacccggggggccgggggggggggggccgggccagcccaaaggggggtcnaaaaaaaaaattttttttttttttttttccccggggcttttttttgcctttaaaaaatgggaaaaaaaatttttcccgaaagctttggga

SEQ ID NO: 636775 - DNA, 278 bp, Homo sapiens
  misc_feature (8)..(8): n is a, c, g, or t
  misc_feature (23)..(23): n is a, c, g, or t
  misc_feature (42)..(42): n is a, c, g, or t
  misc_feature (74)..(74): n is a, c, g, or t
  misc_feature (78)..(78): n is a, c, g, or t
  misc_feature (82)..(82): n is a, c, g, or t
  misc_feature (106)..(106): n is a, c, g, or t
  misc_feature (108)..(108): n is a, c, g, or t
  misc_feature (162)..(162): n is a, c, g, or t
  misc_feature (175)..(175): n is a, c, g, or t
  misc_feature (195)..(195): n is a, c, g, or t
  misc_feature (203)..(203): n is a, c, g, or t
  misc_feature (216)..(216): n is a, c, g, or t
  misc_feature (229)..(230): n is a, c, g, or t
  misc_feature (243)..(243): n is a, c, g, or t
  misc_feature (268)..(269): n is a, c, g, or t
ctcgtgcncgggacattgtcagntgcgtttccgcggtcgcgnttgaggagctcaagcttgggaaaatggtgtgnattncttntatcgtcattccagttctgctctngntctcacaaaaaattcctggagccatatatataccctctggtttccccttgcgtnagtcgtatatggnctaagacagcaatacaagantccaatgnatacaaacaaagngcaaagtaaactnntaagggtgacagnacatgcaatggtattaccaacaaanngccccaaca

SEQ ID NO: 636776 - DNA, 544 bp, Homo sapiens
  misc_feature (12)..(12): n is a, c, g, or t
  misc_feature (36)..(36): n is a, c, g, or t
  misc_feature (222)..(222): n is a, c, g, or t
  misc_feature (460)..(460): n is a, c, g, or t
ggcccatataancacacagttaaggacagcctcggncatttatatatgaatcctcagaattttaggtacacccatttcttttcccgtaaataaaatttctttcctgccttttaagtgtcttttccctgattcctacatagaaaatttgatgaatatttaccagcccattaaaaagaatgaaatccatgtccctttgcagtaaccatggatgcaccctggagnccattattttaagcgaactaatacaggaacagaaaaccaaaaagcacacgttctcacttatacgtggtagctaaacattgactacataaagatgggaacgatagacagtggggaatgcttgagagagagggtgggggaggcatggattggaagactaactgttgggtactgtgcttactaccttggtgatgggatccttcgtacaccaagcctcagcaacacacaacctacccgtgtnacaaacctgcacatatatctcctgaacctaagattaaagtagaaaagaagaaaaatgttaaaaacatttgcttaagtaagaaca

SEQ ID NO: 636777 - DNA, 112 bp, Homo sapiens
acggtcttaccatagaaagatctttatattttttaggaatcatgacttaacagaactcaactgtataaatagttttggtccccttaaaatgccaatcttccatatatagttt

SEQ ID NO: 636778 - DNA, 86 bp, Homo sapiens
cgtcccccgccggggcgaccgagccgagccgggccggagcggcgggcgcggcgggccgccatggaccacaagccgctgctgcagga

SEQ ID NO: 636779 - DNA, 262 bp, Homo sapiens
ccgggatgcacgatataaaaatccagatcagaagctgtcagccagttgatgcgcatgacagcatgccctgctaagattccagatgaagaggcacaaaacccgaaggcgggttagatgatgagcctgagtactgtacctgcatccagaggcagagaaacctgaggcttaggctgaaagccatggatggagaatgggaggctcctcagcattgcgaacccatagatgtgagtcaggtcttttatgtggatgtcaggcagcgacg

SEQ ID NO: 636780 - DNA, 864 bp, Homo sapiens
atatttttaatagatatggggttttaccatgtggccaggctgtctcaaactcctgacttcaggtgatctgcccacctctgcctcccgaagtgctgggattacaggcggggaccgtgtgcccggcaccgttttagtttttacactgaaattattcatgctgcttctgtcttatactgttgtgggtctctgtgatcttatggtgtcgggcttcattttcacacaactgtgggaatgtgcgggttttctctgttccctggtttcactgaagatgtagttctaatgagaagctgtgtatacgtctgtgtgcacgtgcaatgtatgtgtatgcagttggcattcattcctgtgtgctctgtatgtggtttaagagtgggaagatgtggggctgggccatcattatgctctttctagaatgaacctactagatattaattttttatttacacaaatgtgtacttgtgatgctttaaatgtgagagggaatcgggtaattattcggctaaattattaaattgtgacacatcactttttttggcagtagtacgtttgttaaatgagcgaatttgtcatcacatctcagttcaggaaggtgagctgggacaaagcaatgttagcaatttttctgaacctgtgatgcgtcaggacagagagagtgttgtgccagttatcactctggcagtccaatgttgggggtgtggggggctaaagatgatggtggcattctgttggggacagggttagggaatgggggccaggacaatctgccaattggggtgagggggttggaagaatataggggcaaggctgttgaaaaattggggaacttgtgggggggacacgggggtgctacggggaaaatacggt

SEQ ID NO: 636781 - DNA, 116 bp, Homo sapiens
gagcagccgctgggctgacctggccagtggtgttgatctggggtatgacgctgagaagctgatggagttgtgtcaagaacaaaaggccatgtgaggattgagctgaaggagccccc

SEQ ID NO: 636782 - DNA, 719 bp, Homo sapiens
ctgtctgggaaacgaggagcacctctgcccggctgccccatctgggatgtggggagtgcctctgcccagctgcccatcatctgggaagtggggagcgcctctgcccggccaccccatctgggaagtgaggagtgcctctgcccagccgccccgtctgggatgtgaggagcgcctctgcctggccacccatagtctgggaagtggggagtgcctctgcccggctgccccatctgggacgtggggagcgcctttgcccagccgcccatagtctgggaagtggggagcacctctacccagccaccccgtctgggaagtggggagcatctctgcccggacacccatcctctgggatgtgaggagcacctctgccccaccgccctgtctgggaagcgaggagcgcctctacccagccgacccatctgggaggtgtacccaacatctccgacgagacagcaaccatcaagaatgggccatgatgacgatggtggtttgttgcacagcacaccaggggcgaaactgtggggaacacagaaccgagagatcagactggttcctgcgtctgctgctcccacaagaatgtcgaccctcgcgagactccatctcgtctcgtgtacttacacacccttctcctgccctgctctgctgctcactcctctactttcccccccccctcgtctcctgcaccatgcgcgctccatccggtccacgcctaccggtct

SEQ ID NO: 636783 - DNA, 882 bp, Homo sapiens
gccagaacacaggtgtcgtgaaaactacccctaacaagccaccaatgggaaaggaaatagtactcatatcatcattgtcgtcattggacacgttgattcccggcgagtccaccactactggccatctgatctataaatgcggtggattcgactaaatatccattgaaaaatttgagaaggaggctgctgagatggggaatagggctccttcatagtattgcctcggagtcttgtgcataaactgataagctcgagcgtgaacgtggtatctccattgatcatctccttgcttggaaattggataccagccaatgtactatgtgactatcattgatgccccaggacactgagactttatcaaaacaacatgattacagggacgatctcaggctgactggttctgtcctgattgttgctgctggtgttggtgaatttcgaagactggtatctccaagtaatgggcaagcactcccgataagtcatggcccttctggcttacacactgggtgtgaaacagagctaattgtcggtgttcaacaaaatggattccactgagccaccctacagccagaagagatatgaggaaatcgttaaggaagtcagcacttacatttaagaaaattggcttacaacccgacacagtagcaatttgttgccaatttcttggtgtggaatcggtgacaacatgctggagccaagtgctaacatgccttgggtccaggggatggaaagccacccgtcacggatggcatggccgtggaaccacgctgttgaggctctggaatggtccaaccaccaatcgttcaatgtaaagcttggggcggcttccggagttaccactggggtttggacgccgttggcgtgaatggttcaccgtttgcc

SEQ ID NO: 636784 - DNA, 407 bp, Homo sapiens
ggcatgcattatagaaagatacaaaatcagatataatcaaaatatatggtaggcccaggtcaaacatcatattggggggacagagtagaagcaagaaagattcaaggttagccagagagaagaaattcttcctcattagagaaatgaaatgcagttgtctcagatgctagtgagagactccagaaatcttccctgatgttgaccttccataatcgctcagtcctgccccagaaagtgccctgaactcagagttgagaggagccaactcatagacaattacctcattatataaatggggatgccgagactcagaaagggagagagatttgcccaagatcacccagcatgggggtggcagagacagcatcagtgccagctcagagctctctccccaagacaggagtctg

SEQ ID NO: 636785 - DNA, 232 bp, Homo sapiens
tggtactggtcctctataaacttcatatagtggcaataaatcgcacaaccatagcaggcgactgtataaacacccacaggataccggctcgatttcgaatatggatcataggagtcacgcgaatgacttcagttttcacagttggaactagaactctggtctcctaacacacttcatttggttttttactttatcgaacaccattggcttttggtttttataaacacttaca

SEQ ID NO: 636786 - DNA, 163 bp, Homo sapiens
aaaaaaagaaaaaactttttggttgtagtttattaagtctattaatggccctggccccccaaaaggacttttgcatgtcatctttgtggtgtccaaccaaaccttgattttgaaggatataatccttgataataaaaattgttatacctttttttggcctgga

SEQ ID NO: 636787 - DNA, 805 bp, Homo sapiens
gtgagcttgagttgtcaggagccaggactgtccccactgcagtgcccaggccagtattgagcagcagggagggctcagctgtccccagatgcaggtgccgtctgaccaggcgtggtgcactctcgctgaggaataactgctgaagctcacatatgccccatcattgccatttcttctcaattcacagtgccccgtctttgtatctgggggtggaactaggtcctgagggcacagactagctgagtgccaagaactatagtgatgcttagaaagcatacaggaggggccaggcgtggtggcgtcatgcctgtaaatcccagaactttgtggatgccaaggttggtgggattacctgagatcaggtggattacctggttctcgagagcagcctgagccaatatggtgagggcccggctctactaggatatagcaaaaggttaggctgagacaggagaattgcttgaacccagcgaggcagacggttgcactgagctgagattgcatcactgcactccagcatggtgcaacaaaatgcaatgactccgtcacatgagacactaaacaagtattcgcggagtgggcctaaaagaggggttggccggcctttgacgtgtggcgcagcggattgtcttgcagaacctttccggtgcacataagctagtggggtgtcccccttgagccatcggggagaggaacgtggggggccacggtgctatgtggaccacagggctgtggagcccaggggggggcctgggtggcaaccttccggtgtgcttcctccgggtggttaggcccttatgcctcc

SEQ ID NO: 636788 - DNA, 406 bp, Homo sapiens
aagctctttagagtagtcagctaccgacagcccatcatcatttccattgtgctccagtctctctcagcagctctctgggatccatgctgtgtactattactcaacaggaatcttcaaggatgcaggtgttcaagagcccatctataccaccatcggagcgagtatggttcatactatcttcactgtagtatctctatcactggtggagagggcaggcagaaggactctgcatataataggccttggagggataggctttttgttccacgctcatgactgtttctttgttattaaaggataactataatgggatgagctttgtctgtattggggctatcttggtctttgtagccttctttgacattggaccaggccccattccctggtttattgtggccgaactctt

SEQ ID NO: 636789 - DNA, 2609 bp, Homo sapiens
agcgggacggaagctggggagcgggcaggcggcgggggcggggcctggaggagcctacaccgactctggaggaagactggagcctttgcggcggcgctgcccctcccctggtccccgcgagctcggagggcccggctggtgctgcgggggccccgggaggttgaaaactaagcatggggaagagctgcaaggtggtcgtgtgtggccaggcgtctgtgggcaaaacttcaatcctggagcagcttctgtatgggaaccatgtagtgggttcggagatgatcgagacgcaggaggacatctacgtgggctccattgagacagaccggggggtgcgagagcaggtgcgtttctatgacacccgggggctccgagatggggccgaactgccccgacactgcttctcttgcactgatggctacgtcctggtctatagcacagatagcagagagtcttttcagcgtgtggagctgctcaagaaggagattgacaaatccaaggacaagaaggagggtctcgctctgccacccaggctggagtgcagtggcatgatcacggctcactgcagcctcaacctcccgagagcttaggtggtcctcctgcctcagccccctgctgggactacaggtcaccatcgtggtccttggcaacaagtgtgacttacaggagcagcggcgtgtagacccagatgtggctcagcactgggccaagtcagagaaggtgaagctgtgggaggtgtcagtggcggaccggcgctccctcctggagccctttgtctacttggccagcaagatgacgcaaccccagagcaagtctgccttccccctcagccggaagaacaagggcagcggctccttggatggctgaagagctgccgttcctctttcacgatcccagccccatttcagtgtctggggctctggtagatgtgttgagggcaaagtagaggacaagctgtctttcccagtcagccagggagctccccgccaggccacgccccagccactttgctccctctcacctctgggaagtgcaaatactcttggttgacatccccttcctcagccctcccagcctactccccatcccagcttttagaggatctgctccactgtctcctggggcagttgtgggtcactgtcccttccagctgccccagacaggaagcagagtcaccacgcagcagtgtcccttcttgggtctgagttcctattataggtaggggccccaccctctgggcttcccatcagcgacacacacacacttatggcaccagcctggactccagaaaaagggtgtccaggtattgtgtgtatgcatttagttgtgcacacacaaatatgctcctatactggcattaggcgtctcctcatccctcaccctgacctttctcctgtccttttcttggctggaagaagttggcctcctgggagtgtagttttctgttttaaatcccccacccctggctgggctcagtggctcacccctgtaatcccagcactttgggaggccaaggcgggtcgattacttgaggtcaggagttcacgaccagcctggccaacattgtgaaaccccatctctgccaaaaatacaaaagttagccgggcgtagtggcacatgcctgtaatcccagctacccggggaggctgaggcaggagaattgcttgaactcagaaggcggaggctgcagtgagccgagatcgtgccactgcactccagcctggtcaacagagcaagactccatctcgaaaaaaaaaaaaaaaaattccccacccctaccaattgttttacttcctcttcctgctcagggagcagatgggcctcactggttgagatggaatagaataactgggctatgagtcaccagcccactttgtgacccagcaagacctttcccctctctgggcatcagtttctcatctgtaagatgaccagagttgcttagatgatctcctagatcctttccagttctcttgatttcgtaaagccaatggcttctccctctttaaggtgctatgccaaccagccctggaggctgggatctgccgctccctccagccaccagggggcaggagtgcactacctgctgtcagtcaccagagtggccgctcagtgcccagcccgccagcctcgctcttggaggctgctctttatcctgcctgtggttttcagctcagagctggacttctatttataagttacctgtatttatatttatatgcccgctctcatggtgaaggctggacaaggtgctcctctggcccctccttcttacctcagatgcctgaacagaacaaggcaaacccgtagcagcctctcaggagctgacaggtcctctttcggggctcaggagggtgggcacacacccagcggcctgcagagtaagcttattacccacaactgtgcccgctttgtgcttctaaggtgcacacctagcctaggtgagacactgcagccaggcaaccaccgacacacgccccttctcaaagccagaggtgagtggggcaggtgcccggggctgggtgagtggaattaggacacacacaggcttgggcttcaagttcatttattgatgcattggttggacacaataaaaccacaattgttatcaa

SEQ ID NO: 636790 - DNA, 144 bp, Homo sapiens
tcaagttattcaagcaaaaccccaaatggctttggtaaacccaaattctagttgaggtaagcatccatcagccttcaagagggggtgccaggacaaagggaggaggctgcgaaaccagtgcagggcgagcctccagagccgagc

SEQ ID NO: 636791 - DNA, 2326 bp, Homo sapiens
agcgggacggaagctggggagcgggcaggcggcgggggcggggcctggaggagcctacaccgactctggaggaagactggagcctttgcggcggcgctgcccctcccctggtccccgcgagctcggagggcccggctggtgctgcgggggccccgggaggttgaaaactaagcatggggaagagctgcaaggtggtcgtgtgtggccaggcgtctgtgggcaaaacttcaatcctggagcagcttctgtatgggaaccatgtagtgggttcggagatgatcgagacgcaggaggacatctacgtgggctccattgagacagaccggggggtgcgagagcaggtcaccatcgtggtccttggcaacaagtgtgacttacaggagcagcggcgtgtagacccagatgtggctcagcactgggccaagtcagagaaggtgaagctgtgggaggtgtcagtggcggaccggcgctccctcctggagccctttgtctacttggccagcaagatgacgcaaccccagagcaagtctgccttccccctcagccggaagaacaagggcagcggctccttggatggctgaagagctgccgttcctctttcacgatcccagccccatttcagtgtctggggctctggtagatgtgttgagggcaaagtagaggacaagctgtctttcccagtcagccagggagctccccgccaggccacgccccagccactttgctccctctcacctctgggaagtgcaaatactcttggttgacatccccttcctcagccctcccagcctactccccatcccagcttttagaggatctgctccactgtctcctggggcagttgtgggtcactgtcccttccagctgccccagacaggaagcagagtcaccacgcagcagtgtcccttcttgggtctgagttcctattataggtaggggccccaccctctgggcttcccatcagcgacacacacacacttatggcaccagcctggactccagaaaaagggtgtccaggtattgtgtgtatgcatttagttgtgcacacacaaatatgctcctatactggcattaggcgtctcctcatccctcaccctgacctttctcctgtccttttcttggctggaagaagttggcctcctgggagtgtagttttctgttttaaatcccccacccctggctgggctcagtggctcacccctgtaatcccagcactttgggaggccaaggcgggtcgattacttgaggtcaggagttcacgaccagcctggccaacattgtgaaaccccatctctgccaaaaatacaaaagttagccgggcgtagtggcacatgcctgtaatcccagctacccggggaggctgaggcaggagaattgcttgaactcagaaggcggaggctgcagtgagccgagatcgtgccactgcactccagcctggtcaacagagcaagactccatctcgaaaaaaaaaaaaaaaaattccccacccctaccaattgttttacttcctcttcctgctcagggagcagatgggcctcactggttgagatggaatagaataactgggctatgagtcaccagcccactttgtgacccagcaagacctttcccctctctgggcatcagtttctcatctgtaagatgaccagagttgcttagatgatctcctagatcctttccagttctcttgatttcgtaaagccaatggcttctccctctttaaggtgctatgccaaccagccctggaggctgggatctgccgctccctccagccaccagggggcaggagtgcactacctgctgtcagtcaccagagtggccgctcagtgcccagcccgccagcctcgctcttggaggctgctctttatcctgcctgtggttttcagctcagagctggacttctatttataagttacctgtatttatatttatatgcccgctctcatggtgaaggctggacaaggtgctcctctggcccctccttcttacctcagatgcctgaacagaacaaggcaaacccgtagcagcctctcaggagctgacaggtcctctttcggggctcaggagggtgggcacacacccagcggcctgcagagtaagcttattacccacaactgtgcccgctttgtgcttctaaggtgcacacctagcctaggtgagacactgcagccaggcaaccaccgacacacgccccttctcaaagccagaggtgagtggggcaggtgcccggggctgggtgagtggaattaggacacacacaggcttgggcttcaagttcatttattgatgcattggttggacacaataaaaccacaattgttatcaa

SEQ ID NO: 636792 - DNA, 1627 bp, Homo sapiens
agcgggacggaagctggggagcgggcaggcggcgggggcggggcctggaggagcctacaccgactctggaggaagactggagcctttgcggcggcgctgcccctcccctggtccccgcgagctcggagggcccggctggtgctgcgggggccccgggaggttgaaaactaagcatggggaagagctgcaaggtggtcgtgtgtggccaggcgtctgtgggcaaaacttcaatcctggagcagcttctgtatgggaaccatgtagtgggttcggagatgatcgagacgcaggaggacatctacgtgggctccattgagacagaccggggggtgcgagagcaggtgcgtttctatgacacccgggggctccgagatggggccgaactgccccgacactgcttctcttgcactgatggctacgtcctggtctatagcacagatagcagagagtcttttcagcgtgtggagctgctcaagaaggagattgacaaatccaaggacaagaaggaggtcaccatcgtggtccttggcaacaagtgtgacttacaggagcagcggcgtgtagacccagatgtggctcagcactgggccaagtcagagaaggtgaagctgtgggaggtgtcagtggcggaccggcgctccctcctggagccctttgtctacttggccagcaagatgacgcaaccccagagcaagtctgccttccccctcagccggaagaacaagggcagcggctccttggatggctgaagagctgccgttcctctttcacgatcccagccccatttcagtgtctggggctctggtagatgtgttgagggcaaagtagaggacaagctgtctttcccagtcagccagggagctccccgccaggccacgccccagccactttgctccctctcacctctgggaagtgcaaatactcttggttgacatccccttcctcagccctcccagcctactccccatcccagcttttagaggatctgctccactgtctcctggggcagttgtgggtcactgtcccttccagctgccccagacaggaagcagagtcaccacgcagcagtgtcccttcttgggtctgagttcctattataggtaggggccccaccctctgggcttcccatcagcgacacacacacacttatggcaccagcctggactccagaaaaagggtgtccaggtattgtgtgtatgcatttagttgtgcacacacaaatatgctcctatactggcattaggcgtctcctcatccctcaccctgacctttctcctgtccttttcttggctggaagaagttggcctcctgggagtgtagttttctgttttaaatcccccacccctggctgggctcagtggctcacccctgtaatcccagcactttgggaggccaaggcgggtcgattacttgaggtcaggagttcacgaccagcctggccaacattgtgaaaccccatctctgccaaaaatacaaaagttagccgggcgtagtggcacatgcctgtaatcccagctacccggggaggctgtggctggaaaatagcttgccctcagtgtgcggaggctactgtgagccgtgaatcagacacatgcactcaggcctaaaaaacaatgcttgaatccat

SEQ ID NO: 636793 - DNA, 2766 bp, Homo sapiens
  misc_feature (434)..(434): n is a, c, g, or t
  misc_feature (439)..(439): n is a, c, g, or t
  misc_feature (621)..(621): n is a, c, g, or t
  misc_feature (640)..(640): n is a, c, g, or t
  misc_feature (659)..(659): n is a, c, g, or t
  misc_feature (705)..(705): n is a, c, g, or t
agcgggctattccgactggcaatctcgaaccactgcggctgcttcggagtgccaacagcgcccaagcagttgccctcttccttggtgcttaacttaagaaagaacagtgctgggaaggataaagatcacccaggaaggacaggggaggaggagtctgacgtagagaacacgagataagcccctcgctcttcctttttttctctgtcatctttgacttctgggataaccgggggcaaccaggtcaattatggagacacacaatcacttcgaacccagactagtgatcgctggggtataattacaagggaaaacggggtgaggagagcaaaggtctggagacggaaagtgcagacaggcaacaatgcacagaagttaacaacgagaacgcgggggtcgggggcgatgtaaggaagtcgtcatcgacgccgcgccgnttccnccacctcgcaccagacctctgaaatgccctcggagactcggcctctcctataaggacgatcgtcctctcagctggagaacaaggccatgcctcagctcctacgccaggcggaagcgggagaggaaggccgacccccaagagcgcccttcagggggtccatccggccttgatctcagatgggngggtgttgcggagggcggngcatcgcctcacagctggnggctgcatcatggcaggaacgagtttcctgagccacggagctgcangtcgcctcctctactacctgctaccggttacctcttcgcctcttggtcgtcgagcagctccggctcggtcgccgccattaccacatcgcactccgcggcagccgccatcttaccgccgggaccagagagctgggtgggaggccggcggtgaagagcacttccggttggagcatagagcagctccgcggcgcctacgcccagaagggctccctcgggctcgtctaccagagagaggctccgcttggggccagagcggcactcccgacccccggatgtccacggtggtctccgcgccggggcgggagcccagggctgtgccaggttgaaaactaagcatggggaagagctgcaaggtggtcgtgtgtggccaggcgtctgtgggcaaaacttcaatcctggagcagcttctgtatgggaaccatgtagtgggttcggagatgatcgagacgcaggaggacatctacgtgggctccattgagacagaccggggggtgcgagagctccccttcctcagccctcccagcctactccccatcccagcttttagaggatctgctccactgtctcctggggcagttgtgggtcactgtcccttccagctgccccagacaggaagcagagtcaccacgcagcagtgtcccttcttgggtctgagttcctattataggtaggggccccaccctctgggcttcccatcagcgacacacacacacttatggcaccagcctggactccagaaaaagggtgtccaggtattgtgtgtatgcatttagttgtgcacacacaaatatgctcctatactggcattaggcgtctcctcatccctcaccctgacctttctcctgtccttttcttggctggaagaagttggcctcctgggagtgtagttttctgttttaaatcccccacccctggctgggctcagtggctcacccctgtaatcccagcactttgggaggccaaggcgggtcgattacttgaggtcaggagttcacgaccagcctggccaacattgtgaaaccccatctctgccaaaaatacaaaagttagccgggcgtagtggcacatgcctgtaatcccagctacccggggaggctgaggcaggagaattgcttgaactcagaaggcggaggctgcagtgagccgagatcgtgccactgcactccagcctggtcaacagagcaagactccatctcgaaaaaaaaaaaaaaaaattccccacccctaccaattgttttacttcctcttcctgctcagggagcagatgggcctcactggttgagatggaatagaataactgggctatgagtcaccagcccactttgtgacccagcaagacctttcccctctctgggcatcagtttctcatctgtaagatgaccagagttgcttagatgatctcctagatcctttccagttctcttgatttcgtaaagccaatggcttctccctctttaaggtgctatgccaaccagccctggaggctgggatctgccgctccctccagccaccagggggcaggagtgcactacctgctgtcagtcaccagagtggccgctcagtgcccagcccgccagcctcgctcttggaggctgctctttatcctgcctgtggttttcagctcagagctggacttctatttataagttacctgtatttatatttatatgcccgctctcatggtgaaggctggacaaggtgctcctctggcccctccttcttacctcagatgcctgaacagaacaaggcaaacccgtagcagcctctcaggagctgacaggtcctctttcggggctcaggagggtgggcacacacccagcggcctgcagagtaagcttattacccacaactgtgcccgctttgtgcttctaaggtgcacacctagcctaggtgagacactgcagccaggcaaccaccgacacacgccccttctcaaagccagaggtgagtggggcaggtgcccggggctgggtgagtggaattaggacacacacaggcttgggcttcaagttcatttattgatgcattggttggacacaataaaaccacaattgttatcaa

SEQ ID NO: 636794 - DNA, 327 bp, Homo sapiens
agatttgactgcaagattgaaggatacccagaccccgagtttgtctgtttcaaagatgaccagtcaatcagggattccccccacttccagatagactacgatgaggacgggaacttctctttaattattagtaatttttgcggggatgacgatgccaagtacacctgcaaggctttcaacagtcttggagaagccacctgcacaccagagctcattttggaaacgatggaggaagttcaatttaaattttaatttgaagaagagtgaaacaaagccagagaaaagcagtttctaagtcatattaaaaggactatttctctaaaactc

SEQ ID NO: 636795 - DNA, 3396 bp, Homo sapiens
  misc_feature (434)..(434): n is a, c, g, or t
  misc_feature (439)..(439): n is a, c, g, or t
  misc_feature (621)..(621): n is a, c, g, or t
  misc_feature (640)..(640): n is a, c, g, or t
  misc_feature (659)..(659): n is a, c, g, or t
  misc_feature (705)..(705): n is a, c, g, or t
agcgggctattccgactggcaatctcgaaccactgcggctgcttcggagtgccaacagcgcccaagcagttgccctcttccttggtgcttaacttaagaaagaacagtgctgggaaggataaagatcacccaggaaggacaggggaggaggagtctgacgtagagaacacgagataagcccctcgctcttcctttttttctctgtcatctttgacttctgggataaccgggggcaaccaggtcaattatggagacacacaatcacttcgaacccagactagtgatcgctggggtataattacaagggaaaacggggtgaggagagcaaaggtctggagacggaaagtgcagacaggcaacaatgcacagaagttaacaacgagaacgcgggggtcgggggcgatgtaaggaagtcgtcatcgacgccgcgccgnttccnccacctcgcaccagacctctgaaatgccctcggagactcggcctctcctataaggacgatcgtcctctcagctggagaacaaggccatgcctcagctcctacgccaggcggaagcgggagaggaaggccgacccccaagagcgcccttcagggggtccatccggccttgatctcagatgggngggtgttgcggagggcggngcatcgcctcacagctggnggctgcatcatggcaggaacgagtttcctgagccacggagctgcangtcgcctcctctactacctgctaccggttacctcttcgcctcttggtcgtcgagcagctccggctcggtcgccgccattaccacatcgcactccgcggcagccgccatcttaccgccgggaccagagagctgggtgggaggccggcggtgaagagcacttccggttggagcatagagcagctccgcggcgcctacgcccagaagggctccctcgggctcgtctaccagagagaggctccgcttggggccagagcggcactcccgacccccggatgtccacggtggtctccgcgccggggcgggagcccagggctgtgccaggttgaaaactaagcatggggaagagctgcaaggtggtcgtgtgtggccaggcgtctgtgggcaaaacttcaatcctggagcagcttctgtatgggaaccatgtagtgggtgagtgttgttggagggggaggaacagtggaagaagttgaaaaataaggaataggacttgatcacaacacacacaggctaaaagctgctcctggtggttttcccccctggaagaataaaacttacattgtaacagatcaactctacaacactgaacaaatccggagggagaaagccctatgtccaagataggaaagagaagctgtcatgtcacacttgtgcttagcatggaattagcataaaattaatgtccattggccgggtgcggtggatcacgcctgtaatccgagcactttgggaggctgaggcgggtggatcacctcaggtcgggagttcgagaccagcctaacgaacttggagaaaccctgtctctactaaaaatacaaaattagccgggtgtggtggcacatgcctgtaatcccagctattcgggaggccgaggcaggagaatcgcttgaactcgggaggtggaggttgcggtgagccgagattgcgccattgcactccagcctgggcaacgagagcaaaactccgtctcaaaaaaagaaagaaattaatgttcgttcccctaaacccaaatcatttcagtcctgccaggctgtcaattctctggcctcctcagccccctacattcctttctccccatttggtcagccttaagatgctctcatcactcacatttcccatctctctctccacttcagacagttttctcattttataccaggttcggagatgatcgagacgcaggaggacatccactgtctcctggggcagttgtgggtcactgtcccttccagctgccccagacaggaagcagagtcaccacgcagcagtgtcccttcttgggtctgagttcctattataggtaggggccccaccctctgggcttcccatcagcgacacacacacacttatggcaccagcctggactccagaaaaagggtgtccaggtattgtgtgtatgcatttagttgtgcacacacaaatatgctcctatactggcattaggcgtctcctcatccctcaccctgacctttctcctgtccttttcttggctggaagaagttggcctcctgggagtgtagttttctgttttaaatcccccacccctggctgggctcagtggctcacccctgtaatcccagcactttgggaggccaaggcgggtcgattacttgaggtcaggagttcacgaccagcctggccaacattgtgaaaccccatctctgccaaaaatacaaaagttagccgggcgtagtggcacatgcctgtaatcccagctacccggggaggctgaggcaggagaattgcttgaactcagaaggcggaggctgcagtgagccgagatcgtgccactgcactccagcctggtcaacagagcaagactccatctcgaaaaaaaaaaaaaaaaattccccacccctaccaattgttttacttcctcttcctgctcagggagcagatgggcctcactggttgagatggaatagaataactgggctatgagtcaccagcccactttgtgacccagcaagacctttcccctctctgggcatcagtttctcatctgtaagatgaccagagttgcttagatgatctcctagatcctttccagttctcttgatttcgtaaagccaatggcttctccctctttaaggtgctatgccaaccagccctggaggctgggatctgccgctccctccagccaccagggggcaggagtgcactacctgctgtcagtcaccagagtggccgctcagtgcccagcccgccagcctcgctcttggaggctgctctttatcctgcctgtggttttcagctcagagctggacttctatttataagttacctgtatttatatttatatgcccgctctcatggtgaaggctggacaaggtgctcctctggcccctccttcttacctcagatgcctgaacagaacaaggcaaacccgtagcagcctctcaggagctgacaggtcctctttcggggctcaggagggtgggcacacacccagcggcctgcagagtaagcttattacccacaactgtgcccgctttgtgcttctaaggtgcacacctagcctaggtgagacactgcagccaggcaaccaccgacacacgccccttctcaaagccagaggtgagtggggcaggtgcccggggctgggtgagtggaattaggacacacacaggcttgggcttcaagttcatttattgatgcattggttggacacaataaaaccacaattgttatcaa

SEQ ID NO: 636796 - DNA, 414 bp, Homo sapiens
ggtcgaccagagtctcactctgtctcccaggctggagtggcatgatcttggctcactgcaacgtttgccttccaggttcaacagattctcaagcctcggcctcccgagcagctgaaactacaggagtgcaccaccatgcctggctactttttgtatctttagtagagatatggttttgccgtgtgggccaggcttgtctcaaacttctgaccttaggtgatctgcccacttcagcctcccagattgctgggattacatttgtgagccaccacgcccagccagttttaattcttcattaagggcaaacacgatggcatttaattgggaaggaacaaagagaagagttctcagaatttatatttagtcttaccagtgaagagcgtgtcttacactttcagtaaatgttcgtcgacg

SEQ ID NO: 636797 - DNA, 978 bp, Homo sapiens
gagcggagtcgcgcggtgagcgaggtagcgcgcgcgagggcgttgggcgccgccgctgaggcggggaagcgcggggccgcggcggtgcgggttctagggcggcggccgtcgccgtcgcagcagacgccccgagcggggagggccgaggaggcccgacgagctggggatggagagtaccgggcccctcactgcctcagaagcgcgtgtgcggctctgggcgcgcacaggtgacggtgacggcacccctggcccggctaggcgcctgaggccgcttcgctcagacatgtctagcggcccgtgcggcaggccggggcccatgagcggcaggggccgggtccgggcctcgctgacccctgtgctccgctgcggcagcttcccccagttttccggctccggtctctcggcattgagatgtcctgcccgggcccggggctgccggttgccccagacccgccgcactggcttggcgcagctccgggcccgcgggagccgacggtgctgattacctgcggcccgcactgcgcccgcccgctccgtccgctgtgtgcccccggggtgcgcggccactggcaggtggtgggatgactttcgatgtacatgcacagaggggatctcgatgggaccacgggggccttcgcgcgtgcgtcttccggcgggtgcacggccacccgtgccaggaccagaccttgactttgggcacgcgtacgcctacattccaaccacacgtttattatcactttaccaaccacggaaacccctggttcgacagcaaactctcaacaccaattaccttgggatgttgggccaacaaggggaacagtgtgaccacatacttcttttaaaacgggcgaacctttgccaggcaaggtgtacacataatgacattggataggtcccctgccctaatatcacttggtctcacgcgtgcacattctagccgcccaaagcctcctggtctcttttgatatgcgtacgacg

SEQ ID NO: 636798 - DNA, 1218 bp, Homo sapiens
agcgggacggaagctggggagcgggcaggcggcgggggcggggcctggaggagcctacaccgactctggaggaagactggagcctttgcggcggcgctgcccctcccctggtccccgcgagctcggagggcccggctggtgctgcgggggccccgggaggttgaaaactaagcatggggaagagctgcaaggtggtcgtgtgtggccaggcgtctgtgggcaaaacttcaatcctggagcagcttctgtatgggaaccatgtagtgggttcggagatgatcgagacgcaggaggacatctacgtgggctccattgagacagaccggggggtgcgagagcaggtgcgtttctatgacacccgggggctccgagatggggccgaactgccccgacactgcttctcttgcactgatggctacgtcctggtctatagcacagatagcagagagtcttttcagcgtgtggagctgctcaagaaggagattgacaaatccaaggacaagaaggaggtcaccatcgtggtccttggcaacaagtgtgacttacaggagcagcggcgtgtagacccagatgtggctcagcactgggccaagtcagagaaggtgaagctgtgggaggtgtcagtggcggaccggcgctccctcctggagccctttgtctacttggccagcaagatgacgcaaccccagagcaagtctgccttccccctcagccggaagaacaagggcagcggctccttggatggctgaagagctgccgttcctctttcacgatcccagccccatttcagtgtctggggctctggtagatgtgttgagggcaaagtagaggacaagctgtctttcccagtcagccagggagctccccgccaggccacgccccagccactttgctccctctcacctctgggaagtgcaaatactcttggttgacacaggtcctctttcggggctcaggagggtgggcacacacccagcggcctgcagagtaagcttattacccacaactgtgcccgctttgtgcttctaaggtgcacacctagcctaggtgagacactgcagccaggcaaccaccgacacacgccccttctcaaagccagaggtgagtggggcaggtgcccggggctgggtgagtggaattaggacacacacaggcttgggcttcaagttcatttattgatgcattggttggacacaataaaaccacaattgttatcaa

SEQ ID NO: 636799 - DNA, 919 bp, Homo sapiens
agcgggacggaagctggggagcgggcaggcggcgggggcggggcctggaggagcctacaccgactctggaggaagactggagcctttgcggcggcgctgcccctcccctggtccccgcgagctcggagggcccggctggtgctgcgggggccccgggaggttgaaaactaagcatggggaagagctgcaaggtggtcgtgtgtggccaggcgtctgtgggcaaaacttcaatcctggagcagcttctgtatgggaaccatgtagtgggttcggagatgatcgagacgcaggaggacatctacgtgggctccattgagacagaccggggggtgcgagagcaggtgcgtttctatgacacccgggggctccgagatggggccgaactgccccgacactgcttctcttgcactgatggctacgtcctggtctatagcacagatagcagagagtcttttcagcgtgtggagctgctcaagaaggagattgacaaatccaaggacaagaaggaggtcaccatcgtggtccttggcaacaagtgtgacttacaggagcagcggcgtgtagacccagatgtggctcagcactgggccaagtcagagaaggtgaagctgtgggaggtgtcagtggcggaccggcgctccctcctggagccctttgtctacttggccagcaagatgacgcaaccccagagcaagtctgccttccccctcagccggaagaacaagggcagcggctccttggatggctgaagagctgccgttcctctttcacgatcccagccccatttcagtgtctgggcgctgtgctaagatgctagaggaggacagacagtacgaggacaatctttgagtactcagtcactcgcaggggagctaattcatacgacccagcggcatacactttactctcgatgtcacat

SEQ ID NO: 636800 - DNA, 817 bp, Homo sapiens
ggcgacagcgagctgcggcagagtcttgctgcgacacccaggctggagtgcaagggcgctatctcggctcacgtgcaacctccgcttcccgggattcaagcgattctcctgcctcagcctcccgagtaggtgggactacaggaccagaggagcgagagcagcaagaaccacacccagcagcaatgtcagcggcacgtggaacgcctcgagcagggggtagaccgagctcagaacacacaagaacctctggggcccctagaacaaggagaaccacaagtgagaactggctagacctctcggagctcctgaaggcacagggaccacaggaacgcacacgacccgggccagaagaacacccagtttggctcaaggcactctctctgcacacggcaacactctaacgacacggcagcgtcgtcaaaccttggccactcacggccacttacactgtcacactacctcagcccctcgcagcgacgcgccccctggccgcccgcacccaacggcacccatcccacccacttttgcccccctctcgcacctctcccccagtggccgccctgccaccgggcccgcgcagcgcgccttgccccacgggcccccttggcacgctctcccctctcggcctgaccacccggggcgcagtcgacgcacggggtgccagatgtcccccaaaggcgctgcctcaggcaagcctaccgctcgcaacccgccactccacctaccactaagcgcccagaaaccgaagccccgcaagctaccttgggttggcgccccccatttcccacttcaccacccgcggccatacacaatggcg

SEQ ID NO: 636801 - DNA, 403 bp, Homo sapiens
agttcagtcgacaaaccattgaagattattagggtaagaaatactgctttctgtctgaaaactttccaatgacatcttctgaaaagacaaagaaagtatcagcatcaaaatttgcataataggccgggcgcggtggctcacgcctgtaatcccagcactttgggaggccgaggcgggcggatcacgaggtcaggagatcgagaccatcccggctaaaacggtgaaaccccgtctctactaaaaatacaaaaaattagccgggcgtagtggcgggcgcctgtagtcccagctacttgggaggctgaggcaggagaatggcatgaacctgggaggcggagcttgcagtgagccgagatcccgccactgcactccagcctgggcgacagagcaagactccgtctca

SEQ ID NO: 636802 - DNA, 450 bp, Homo sapiens
  misc_feature (34)..(35): n is a, c, g, or t
  misc_feature (39)..(40): n is a, c, g, or t
  misc_feature (42)..(42): n is a, c, g, or t
  misc_feature (170)..(171): n is a, c, g, or t
  misc_feature (185)..(185): n is a, c, g, or t
  misc_feature (189)..(189): n is a, c, g, or t
  misc_feature (207)..(207): n is a, c, g, or t
  misc_feature (213)..(213): n is a, c, g, or t
  misc_feature (215)..(215): n is a, c, g, or t
  misc_feature (218)..(219): n is a, c, g, or t
  misc_feature (222)..(222): n is a, c, g, or t
  misc_feature (225)..(226): n is a, c, g, or t
  misc_feature (253)..(253): n is a, c, g, or t
  misc_feature (260)..(260): n is a, c, g, or t
  misc_feature (267)..(268): n is a, c, g, or t
  misc_feature (272)..(274): n is a, c, g, or t
  misc_feature (279)..(279): n is a, c, g, or t
  misc_feature (284)..(284): n is a, c, g, or t
  misc_feature (289)..(289): n is a, c, g, or t
  misc_feature (296)..(296): n is a, c, g, or t
  misc_feature (299)..(299): n is a, c, g, or t
  misc_feature (302)..(302): n is a, c, g, or t
  misc_feature (304)..(304): n is a, c, g, or t
  misc_feature (306)..(306): n is a, c, g, or t
  misc_feature (308)..(309): n is a, c, g, or t
ggcgctcaatggaattcctttttttttccaacgnnatannancgccaggaggcccaggaccctccagactgaagagtccatgggcccctgtgcatgtgagagctacacagggaatcgctgtcaccttccaaggataagcagacagggccacacatgccatggccactcgnngcacagggaccagnctgngccagagacccaggcatncagctngnatnncangtnncttactgagagccccactgcttgatgncaagctntaggttnnttgnnnttgangactncgctnatgaagnagntgntntngnngtctgtagggacaatgataataaggaagggcctgtcgaaacatacaatgatccttgtttccgctaaagtagccaggcgggtgcttcagcctgctgtgatagtagctgcttctgtgcatttctgaagaggagaaggtgtact

SEQ ID NO: 636803 - DNA, 200 bp, Homo sapiens
gtccggttgtacagacgctcaagctgttccttccgcgtcgttcgcgcccagcatcaaatactggtatctaaggtctgtgcctggcacatcccgcacgttggcgagcttagcacatatgtggtagtaccgctccttcatgtcttacacagaacgcttcttgaactgatggtggtcataccggtcatggataacaacaaaac

SEQ ID NO: 636804 - DNA, 280 bp, Homo sapiens
  misc_feature (149)..(149): n is a, c, g, or t
acccttttttccaaaaaattttttttttttaacccggggggggggccccagaaaaccccctttttcctttggggggcccccctcccccccccccttttttgggtggggcctggggagggggtttttccccttttaaccccccccccccnggggaaagggggtttccccccttccccggggggggggggggggaatttggggcccccgggggggggggcccccttttttttttttttttttgggggttttttttccccaaaaaaaagggggtttcggggga

SEQ ID NO: 636805 - DNA, 315 bp, Homo sapiens
cccgagaatcgatcaaggtctgtcctcataccaggacctctaacttactgccagaccgagacctctcgaaccattctcttcccttccctcctgatcttccttcccccacaggtgctcttttccagcccacagctgcagatgacgagtctgtctaatctacatcccctctgcgggtcctttcccaccaatattagaatcagaacaaacctctctcatatacaaaagcgaatactccctccctatttccctctagaagtgggatcctccgagtcacaacccccatctctccttacatgggtaccgagcatcgaatcg

SEQ ID NO: 636806 - DNA, 151 bp, Homo sapiens
atcatttctagcatgcattcacggctttttaaaaacaccaagtactcgattaagccactgtaatagtgatcagcaactgacagtgtgaggctataaaacaaatcaaagcatattagtacccaattgcgctactattaaggagcagcaggag

SEQ ID NO: 636807 - DNA, 956 bp, Homo sapiens
gtgtgcctgtgcgagaaccgacccgactatgggcgcctattttttcaatgcgtccacggcgggtcacgccggttcttacggccggtctgtttggtgacgccccccgtgtgtgtgtgagcgcccccgggtccacaggactcttttttcgcgagaaacgctttccaatgttctcccgggccccgctgggccagtctccggttccccccgaggtccaccttgctccttctcctgacccactccccgcgaagtctccccgtccgtctttgctgggaaagcccctcatgaagggccacacattgccgagggcacacaaagaacatggggtggacaacgagaacatcgccgggccaaaagaggtaaaaagccagatggttccccaatgggggccaatgtctcagtgaccccctggagcgcatatatgtcacttcccgttggcccagatattcccgcaggaaaaaaatgcgggccgtccgaaaaaaaagtgtgttctattttgaccagctttcttgaaacaaaatcatcaagaccccccattaagttgtaatgcatactcttttttactgcgcgcgtggggcacaacaacatttcttcttgcaaaacaggatcgttgcctcgcagatcatctagatgggtcaagacgtgtttgttttgttttggtctgtgaaacaaccaccactatttgtgaccagctcaggtaaatacccacaccgcaggtctcgcagggtacggtatgaatagagggggaggaggcagtagaaagagtaatctggtaaatgcggggattgttgatagagtagatgatgcacctgggacagcctgacccataacgatggcacccccacaagtcagtaatcccccgccgtattgtgtccatgaacaggcgcgaacgtagcacacattttactggtttgtacgcccaacaatccaaatattttttcaattgccccacaataaca

SEQ ID NO: 636808 - DNA, 257 bp, Homo sapiens
  misc_feature (7)..(7): n is a, c, g, or t
  misc_feature (116)..(116): n is a, c, g, or t
  misc_feature (145)..(145): n is a, c, g, or t
ttatgtntcaaagtatgttagaagttgaagagtgctatagacaaacggacgggacgctagaaaggggactgcaggacgcagggtgagaggacaggcagcagctttaactaggatgnccaggtaatctcactgagaccgtggaatnccagaaaggtaatgaaggaggacaaaccatattgatattttggagaatagtgtagacagagcacccagtgctctcagcaagaaagctggtgtggctagagagaaatgaagaa

SEQ ID NO: 636809 - DNA, 278 bp, Homo sapiens
agatgatggccactgaccacagaaaatgagtgtaattcatggaaatcaggttaaacaaaaatgtcccaaccttgagggttgcagtgatatgagaggaaaacagtaacagttaagaaaaatgagtctaggccgggcacggtggctcgcgcctgtaatcccagcactttgggaggccgaggcaggatgaatgtgatgaacccgggagtgctggatgcttgtagtgagcctagaccacgccactgcactccagcctgggcgacagagctgagactctgtcc

SEQ ID NO: 636810 - DNA, 174 bp, Homo sapiens
gtaaaacgtgggctacctgtatgctgtgagggaccgtgaatgtttggatatatgatattacattcagaggattttctgaagaagataagaaaacatatggtgaaatttttgaaaatttccatccatacgttgaggtcttcaaaatgcttctcagtttcactgatacctgctgtt

SEQ ID NO: 636811 - DNA, 324 bp, Homo sapiens
tattgcacatttcccaaacaacccaaagctcatgagaactcctatgacaagaacagtacccaaagggatggtgccaaagcattcattaaggatccacccccttgatccagtcacctctcacccaggccccatctccaacattggggattacaattgaacataagatttgggtgtggacacagatccaaaccatgtcaggcgtgatggcacactcctgtggtcccagctactcgcaaggctgaggtgggaggaccgcttgtgcctgggaattcgaggctgcagtgagatatagtcatgccaatacactccagcctgggcaaagga

SEQ ID NO: 636812 - DNA, 260 bp, Homo sapiens
ttccgtagatcagcctagaagcccgtataagaggcttgcgcagcaattacacctcctgacaactctaccagcagccttcaacatgcgaaactcctatgctgcgatttttaatttgggaatagggaaagaaaacagataggtgggaatgactgctgtttgaactctagtttcaggatatgaagagtgatgtatagagtgcaaagagccacatgctaactttactagatactaacttgatcctaaagttatttggagtctgt

SEQ ID NO: 636813 - DNA, 600 bp, Homo sapiens
aggatccccctgtatatgtctgggagcagtggtgatatcccctttatcatttgttattgcacctatttgattcttctctcttttcttctttattagtcttgctagcggtctatcagttgtgttgatctttaacaaaaaaccagctcctggattcattgatttttgggaagggttgtttgcgtctctatttccttcagttctgctctgatcttagttatttcttgccttctgctagcttttgaatgtgttggctcttgcttctctagtttttttttttttttttttagtttttatggatcatgctggggtgttcctgggagggggtatggtggcagggtcataggataataggggagagagtggccagcagattaaacacgtgaacaagggtctcgggtattccaaggcagaggtccctatggcctaccgcagggttggtgtcccggggtacttgagatcagggaggggcgatgactcttacggcgcatgcagcctttaggcttcgtgtaaacaaagcacatctggcacggccctaaatccatttaacccggagtggacccagcactggttacagagagccgggggtggggggtagggtta

SEQ ID NO: 636814 - DNA, 719 bp, Homo sapiens
  misc_feature (710)..(710): n is a, c, g, or t
ctttttgtctcatgcctgatttaagagcgatttggtagatcatggctaggctggtctacaagtccgagcgtttgctaatggtctggccgtaccacttgatcgtgatcacttgtatgtaatccatgacattgaccaataacacgctatacgcttgattatcaatgcactctatgcactagtaccgtgttctccattagtccagagaagctgaggtatcgaagctcactgcttgacacgtaccagtcttatctatgcatcagtatcagctacgatagtcggctactagaattactaagtccgtcatgatacagggatttggcacactatagatacattgagtaatggtcatgtgttgacacgattatgattgccaagagaactgagctctcaatgacttaaactgactatcaagcctctacgaatggagtgtgactagctcatcttttacgagttaggctgtactatgactctcaggcgattgtagacataatgaactcccctaggtagtccaaaaaagctcttcgtaccctttcatacagggcgtcatcgaatcactttaaccttgactctactttgttcgcatgtggatcagccctcattctataatgctttcgactccctttactacacttcttaaagtctaccttgattcgaatgccccctgcccagtctcaataatccacgcaatttgtcctcaacgtacctctgtncctccgccc

SEQ ID NO: 636815 - DNA, 192 bp, Homo sapiens
ccatgcagtccatgatccccaccccatgtgttttaaaaagccagtagcctttgcagggacatgtctgtcccatctgtttgcccacgtgtctgcatcagattgtgtgttcacaaggactagctgcattgaccattgaaccctgaggacatcgcccaaaaggagaaagaaaaattttactatagcctcactgat

SEQ ID NO: 636816 - DNA, 154 bp, Homo sapiens
acgacagaaggggtttcactatgtttcccaggctggtctcaaactcctgggctcaagcaatctgcctgcctcaccctctcaacgtgctgggattacaagagtgagccaggtgagccactgtacctggcctgggctgtgtgtactcctacttatt

SEQ ID NO: 636817 - DNA, 273 bp, Homo sapiens
ccccccccgggggggggggggggggggggccccaggggccccttttttttttttcccccccctttttagggggggggttttgggggggccccccccccccaggggccccccccccccctctttttaaaaggggggcccccccctggggggcggggggggggggggccccccttttttttcccccccccccggggggggggggggttttttttttttttgggccccccccccccccgggccccccccccttttacccttttttttgggggggga

SEQ ID NO: 636818 - DNA, 468 bp, Homo sapiens
gcatctctgctgtggcacatcaagctcttggactgggttgtctactgcatgctgacgcctgtacttgggcctctgagagatacatgttctccttccatacagctgaaattatatcctcaagaggttgaatcctcacagctgtcacactgtttgttgcttctacaacttatactcttccttgattaatgaggtcctccagctgtagattactcattgctgacagggctcccagattgaaaggaatataaggagttagagagtggaaactgacagggggtaaataggtcccaagtaggtatgttgaaacacatggtcagtcccttcatactctgcttcatactcagaccaagctgcttttctttcttcttcagtcacctcttcttcttctttgaggtcccaaaagagaatcatgtacatggtatcctacaatgtgttctacattgtatctgaaggagctctgaaagtatg

SEQ ID NO: 636819 - DNA, 317 bp, Homo sapiens
  misc_feature (6)..(6): n is a, c, g, or t
  misc_feature (15)..(15): n is a, c, g, or t
  misc_feature (47)..(47): n is a, c, g, or t
gacctnatcttttanatattaagagagagagagagagtgtgtgtatnctttgtgtgtattacacacatatataaattttatattacacatgaatacatattacatgttatatataaattttaaaaaattaaaaaagaattggaaccccgtctctactaaatatacaagggttagccgggcatggtgatgtgtgcctgtagtccctgctactctagaggctcaggcaggaggactgattgagcctggaagtttgaggctgcagtgagctgattttgccagtgcactccagcctggttgacagaatgagaccccatctc

SEQ ID NO: 636820 - DNA, 93 bp, Homo sapiens
  misc_feature (33)..(33): n is a, c, g, or t
ctcaggttggggacgctttactccccccagaanataataacccaagcctgtgaccccattgtccatcccctgatttcttgggctacgggatgc

SEQ ID NO: 636821 - DNA, 485 bp, Homo sapiens
gaatgagttcgagagaagaagttgagtcataagcatgcaatggagaacatgttagaacaatctaactttgatcatggaaccggggagaagtctccaaaaatagtggcactcgtttacaattggaagtgagggtgtaagatggaaccaaaatacaggagaaactgaatactcacaatcttttcaagaagcaattaggcaaagccatgtgatcatctcaattggtgcagaaaaagcacctcacaaactccaacaccttttaatagataaaacactctacaggccaggactggaagggagaaaagaaaatagtaatacattttggggagctagatagatgaataaacactgacttaggccagaagaggttgagtcataagcatgcaatggagaacatggaagaacaatctatctttgatcatggaacccccagaaggctccaaaaatagtggcactagtttacaattggaagtgagggtgtaagatgg

SEQ ID NO: 636822 - DNA, 903 bp, Homo sapiens
  misc_feature (434)..(434): n is a, c, g, or t
ggctcgtttcccctggctggcagcgcggaggccgcacgatgcctggagttagctgtaaaagacgtgaaccagcaggagttcgtcagagctctggcagccttcctcaataaagtccgggaatgctgtatatgtcccccgaagtgggtggatacctgtcaatgctggcgcaagacacaaagagctatgcatcccttacgatgagaactggttgctacacgcgagcatgtcttccacagtcgcgagacctgtacctccggggttggcagctggtggtttggctccaatgaccagagatctatgggggacgtcgagagaaagcggatgtcatgccccaagactatttcagccggaggctccaaagaagatgtaggcccagccgtggtccgtccgaagccgcttggagtgggcttgaaagatggtggaaggaaggaccnaagattgcgcggccgcatatctggagaagcctcaggggacaaagagagactcgtggaccggaatccgcacgcgacgcaggtgggcaaggcgtgccaagtcgaaagtaaggccacttgagtagaccagaaagcaatgacttggggggtataattacacattgggccctcagattacgggcaaagaagcaagcgggcaatcccttggacacgaaggagcggaaacgaccaaagaaaggacccaagcgatcgcctaccagagggaaacgaggaagcactctccgtcgcctccgctcgcaggaaaacaagtacgcgaaggtcaaggcaacacggaacgaccacagacgcagagggagagggcacaccgccggggacacccgaaataccaccgaggaggaccagcgcgcagaccccacaggggtgcggccagaaacaagacgtggcggcgctccacccaagggaggcaggcgcg

SEQ ID NO: 636823 - DNA, 267 bp, Homo sapiens
tcactggcaatgtcacatttcattcaacaggtaataatagttgttgattatttcaataccttcgtgaacgtactgcgagcaataataagaaatggctgccataacaagaaatgacttaacacaataagatgaagaataaatttcacaataattatgctcagtgaaaaacagaagaaaaaggacacactgtgattccactgctgtaatatctaggatatgcagctaagcaggcccatggtcaccacgatcgggtactacgctttggca

SEQ ID NO: 636824 - DNA, 490 bp, Homo sapiens
gctcctacaggtaagacatttgttgatcagtcccaacagcctagaattccctaaatgaatgtacatattaggtacttatccaaactctttccatctgaataaaataaaacgtggtgtctgaggttcattttttgttttatatctctccttgttgatttatatgtttagaaactagatatgtatatttgtctgtatgaatagctgtatatgctctatattgtattatactaaacatgtgtctccattaagtctaagctttcttttcctcatcacttcgttctcagaactcccgttctgacttatatttagcctggcaataggctgacgcatgtctcagatgcgagtacttacaccttttaacatagttagaattgggaatcccactcatcattcctgtttttatttgctctctcagaatggtcattgtgtatttccttgttgcatatgtggttactggccttgaactctggatgtagtggttatcaagaac

SEQ ID NO: 636825 - DNA, 146 bp, Homo sapiens
atgctgagcttacaggtttgagccactgcccctagcctaagttttgctaagttcctgtttactacattctaaaattttaaattgaatttctgtttttgggtactaagggtatttggtccgtgtgtttgtttatgtttttgttttag

SEQ ID NO: 636826 - DNA, 89 bp, Homo sapiens
ctggggggcgctgtgggcgagtgggcgcctttctcttcccattccttccccctacacccattccagacatcccagagttaacaaaaccc

SEQ ID NO: 636827 - DNA, 256 bp, Homo sapiens
gcgtaagtgggcatccgacttagaggcgtcagctcattagtccgcacggatggtagcttcgccccgttgggtcctcggtcaagcacatcctccagatgtctgaatcctgcggttccgtctcgtacggagcaggataaccatggcgacaacacatcatcagtagggtagaactaacctgtctcacgacggtctgagaccctgctcacgttcgcgctattagtgggtgcagccatccaacgcttggtcgcagtctcta

SEQ ID NO: 636828 - DNA, 181 bp, Homo sapiens
tgagctcggtaccctcatcgatcttgtccgcagcgccgggagcgatcttcttggcgaagtcgcgacaccgtcgagcaccttgtcgctgatgtctccgcctgctcgctcttgacggcctcggcgatcttgtccttgttctggctcgtacaggtctttgcccttgttcacggcgtcttcgatt

SEQ ID NO: 636829 - DNA, 183 bp, Homo sapiens
cgggggccgcgacagccgagtttcctgatgtagacgaggatggctccacaattccaaccttcacaaccccgagaaagggaatgaacttttgcaaggagttttagacaggcctattcttctagctggttgatgagcaccacactgacacggagctggagttcacagttgtgccctgcgatgtac

SEQ ID NO: 636830 - DNA, 1094 bp, Homo sapiens
tgagaagagcaaacaatactgctgctattaacacaaactgacgacagagagaaaagtagcagaaacacgatggcataggaaacactgaccaaagaaaagcctgaacacagagaggcatctagcagaaagcaaagaaaagcacttgatggagaaaaaaaataaacaatcagataacagctgaataccgtaaatcagaccacaggcacaaacactcaccgaaaaagacacggcagctagcatacaaacaggaaaaatctaccacgatacacgacacgtataactataactaactccaaacacatacaggaacgaaaaacaacatcaagtaatagtagacggtacataaagcacaacatgacacaacaccttatcccttaccagaaaaaacaaaagactgaaccttcgacaactccagatggacaccagacacacagactacaacaaacgactacacgattatacactacatacaaacgacaccgacacacacacatacacgcattccccattccacctcacactagcattacctcaccactaaacactctgaacccagcataagccctacaccctcaagtcattccccaagcatcccaagagagtacaccgacgctcaaccgacacagagggtaaggtgcacatgcatgcattcaactcgcaagcaccaaagctcgtgacccgacatgctaacgcccttacaggacctacgcacaccctaggaaaccagttggctacccatcagacacagtttagcgacacgaacactcaactcacaaaccaataaacagtgaaccgggtttgcgtaaacacccgaaaagctggttcagacaaaaaggagcctcaatagcccatacaagcagcaccacaccaatatattttcggcacgctcatctagagcacctcattgaattaatgatgttgtctaaaccaaatcattgataagaggacaccggcgccccccactagatgatgctagaccagcatgtgcgctgtgagcagcgtgatactccacagagaaacatgagctagccataatcaagtggtcttgtgttcgcaccgagcaaatgccccgtgtgcaccgaggtctgttgacc

SEQ ID NO: 636831 - DNA, 347 bp, Homo sapiens
  misc_feature (288)..(288): n is a, c, g, or t
cacgagggcggtgccaactcctcctgagttaacccattctgagcttcctgagtaaatgctatcgatgagcccggccccatgggatcccatgtctcttggggagatgggccccaagttccaataggacgatctggagcctcccacgggaagaaggccggcggggacgggctgctacgtggctccaccgcatccgcgactgccgaatgtggaatctcccacagggaaggggcttcgagggacgggctcctttccccagcaacacactgattccactgggaaaggatcggnggggaagggcttctcctgctgacagtttcctcgacggcaggattttgattttcccactc

SEQ ID NO: 636832 - DNA, 130 bp, Homo sapiens
tgtgtgccccagaactcagccgggagctgctgaggagagcgcactcatcagtgaaactccggtgacgttttacacgcagaggctgatccaaattcttcattgatcagagtaaaaagatgctgagaagtat

SEQ ID NO: 636833 - DNA, 191 bp, Homo sapiens
cctctgctgcgtcctgctgaccttcgggtcggtcagagctgacgataagttgatgtggatggtacagtagaagaggatcttgggtaaaagtagagaaggatcaaggacggatgataagtagtacagagagaggagaagctattcagttgatgattaaatcatcacaaataagagaacttagagagaaggtc

SEQ ID NO: 636834 - DNA, 143 bp, Homo sapiens
  misc_feature (14)..(14): n is a, c, g, or t
gccgccaaatatgnggagcccagacagaggaggcgcccagagcgagcgagggctgtgaggactgcctgcacgctgtcacctctcagtatctttataaaaggtaagatggcagacaggaagcaggactagcttgcagctacagc

SEQ ID NO: 636835 - DNA, 231 bp, Homo sapiens
agggcatgtataacatacattgcttggcaaagccatcaaccatattgctgctacttttgtttacaattcacataatgatgcattgaagacgtgtcttacacgaatttctggcgcttgcttcctccagtctactgaaaattggcccggatacagatttctctacgacaagagatagagaatctgtttatttactgctagatctgattgtgcctgcccgggtgggccgctcga

SEQ ID NO: 636836 - DNA, 375 bp, Homo sapiens
accgggacgtgtttcacgtgggaaggcgctccacgaatggaactgtcagcagccggcgcctgaagagctcctgccgcgggcgggcgcgaggcctatggcttggcatccgcaggacccaatggatcaggcgctcacactcttctcagtacatggtgtcagtgcaatgcctggcacctcctatcctgtaactggccgaatcggggtcccacccaggcttctccagcgcccgggaaggggctctgcttccggaagtgtttaggaagagatgccagcgtaaacccgagtcccttcctccaagcatcgatgaagccttttctcccctggcaaccgatttccttttccatggaaaggacgtcagttcttttagcttgttga

SEQ ID NO: 636837 - DNA, 178 bp, Homo sapiens
  misc_feature (163)..(163): n is a, c, g, or t
gagcgcgtgtaccaagtccaagacagaaacgcacgagttggccgatagattgagtagctcattgaactctaatcgactcggatcattccttctaaagagtctgaagcaattcactctagtccagctcttgtagtcagaatagcttgcgaggcaagcgtgcagngaggtgcggtaatcc

SEQ ID NO: 636838 - DNA, 697 bp, Homo sapiens
  misc_feature (15)..(15): n is a, c, g, or t
  misc_feature (78)..(78): n is a, c, g, or t
  misc_feature (357)..(357): n is a, c, g, or t
tcatgacattctaantcattttgcaattacatatgctacatagcttaaaacacaggtattctttattgcacatttcanagttgtaaggacgctctagcttaaaaggtgatttttatttagggaagaaatgacatttttgaattgtttggctcaaaatggcacactgccaaggcagcttagttctaacaacaaaccttttaaaataaacttttggattttgaagccaatgaaatcctttactgtaatggataatgcacagtacactttctttccaatgaaacctcagaggtcatagttttatgggctctgttttaaagcctgtgaacagtcctggctagtgctctgagaggcaggtgnaggctcatctctagagcctgacgccagtaagtctcttacagcaggtggtggtgggtattcctgggcaccatgggttagcggtggtactcgggttccatcaatgaagtactctcatggcaccagtgagcctataggtctaaatggtgcgtgtccaggtgaaaatctgcgaggatgaacaggcaggttccgtcctcctggtggaccgcatggtgctaattctcttaagcctagtggtgatcgcattccaggaccaaagggtgtagaaagtgcccgaggccctaaaggtccgcagagcttaggtggtggtccatatcgaatgggtggtggtacagggcctccg

SEQ ID NO: 636839 - DNA, 279 bp, Homo sapiens
ttggcgaccaaatggggcaatacagtatatcccatctctttagaaaaaagttagccaggtcaggcatggtggctcacaccggtaatcccagcacttcagtaggctgaggtgggcagaccacaaggtcaggagttcaagaccaaccgggctaattgggtgaaactccgtctctactaaaaatacaaaacttagccgggcatggtggcaggtgcctatagtcctagttactggggaggctgaggcaggagagtcacttgaacctgggaggcagaggtggca

SEQ ID NO: 636840 - DNA, 287 bp, Homo sapiens
catttttggccagctgtgtcggatccgacacccgggccggaggacgccgtgatccgggtggaggcgagcggcatctgtcggagcgactggcatggatggatgggggactggacctggctcgggctttcgccgcagttgcccatcacgcccggtcacgaattcggtggcgagatcgtcgcattggggcgggaggtgcgagactttcaaatcggcgacaaggtgacggtgccgtttcactacgcctgcggacactgtgaacactgccacgcgggcgtgccgaaccggtg

SEQ ID NO: 636841 - DNA, 481 bp, Homo sapiens
  misc_feature (78)..(78): n is a, c, g, or t
  misc_feature (98)..(98): n is a, c, g, or t
  misc_feature (219)..(219): n is a, c, g, or t
  misc_feature (309)..(309): n is a, c, g, or t
  misc_feature (334)..(334): n is a, c, g, or t
  misc_feature (369)..(369): n is a, c, g, or t
  misc_feature (417)..(417): n is a, c, g, or t
  misc_feature (420)..(420): n is a, c, g, or t
  misc_feature (435)..(435): n is a, c, g, or t
  misc_feature (437)..(440): n is a, c, g, or t
  misc_feature (443)..(443): n is a, c, g, or t
  misc_feature (453)..(453): n is a, c, g, or t
  misc_feature (471)..(471): n is a, c, g, or t
  misc_feature (473)..(473): n is a, c, g, or t
gaagatttacagaagccgagacccacagctctttttatcagtttccacctcaaaatatgttcccataaaaaattttgnagcatttgggtacaaagagnctggaaaggtattgggggagttgggggcctcacaccaagtctttactgtgatgtcccctggagatgctgattcccgtgcagagtggggtgttaatcagcagctgcaggggagggagaaggnaaggggcaggtggttgtgtgtgcgcatccatgtgaggtgagtgctgtgtctctcatttcatagcggttggatgattttgacctgccacantagtgtgcgctctccatccctgcancaagcatttcacttgcagaagatgctgtgccttgnaatattccctcctcacctggggctatatgaagtgcttatgcatatgtncantgtttattttagatntnnnncanttccttttanataaaccagtgagaaggntntgagttta

SEQ ID NO: 636842 - DNA, 757 bp, Homo sapiens
cctcctgccgttgtcatctgcacctacttgttcccaccttgggagaggacgatgacttgtggagtggactgcgtgaagggagaaggggtcctacccatgatggcttgagtgatgtgactgaaccttgtgatgcagatgtgaccatgtgctatgactgtgtgcttgaatgttgtgtgtgtcccaaaaatacacaatgtacacatgatgtgtgttgtgtgtgatgcgctgccatccacatatgcataccatgtgccgcacggtgagcccatggggtgtgacatatgagcactcgaaaacgcacaccatcacgaatgtggcatagaccccgtacacgagtatgtgacttggcacaccccaaggacaacaatgattgtcgtggaaccacttggatgaccatgagggtgatatatatgagtgccatattgtagaagggtggtgatatgcaacagcacagtgactgtgactttggggttcaccataaagtcccatcggatttggccgtatgggtggccacgacttaccgcaaattcaacttgggcgtcacaaatataatgggcagcaccaccgacacggtgggtcgactcccaccgagttaaaccgccaccaactgccatgtggaaacacatttggcggaccgattcgactcaatgggcgatggattccacctatatcctgagagccataccatattcgacagccaccagccaattcatatatcccccccatatctatccacccacatggtgggagcgaacgg

SEQ ID NO: 636843 - DNA, 302 bp, Homo sapiens
  misc_feature (78)..(78): n is a, c, g, or t
  misc_feature (98)..(98): n is a, c, g, or t
  misc_feature (130)..(130): n is a, c, g, or t
  misc_feature (155)..(155): n is a, c, g, or t
  misc_feature (190)..(190): n is a, c, g, or t
  misc_feature (238)..(238): n is a, c, g, or t
  misc_feature (241)..(241): n is a, c, g, or t
  misc_feature (256)..(256): n is a, c, g, or t
  misc_feature (258)..(261): n is a, c, g, or t
  misc_feature (264)..(264): n is a, c, g, or t
  misc_feature (274)..(274): n is a, c, g, or t
  misc_feature (292)..(292): n is a, c, g, or t
  misc_feature (294)..(294): n is a, c, g, or t
gaagatttacagaagccgagacccacagctctttttatcagtttccacctcaaaatatgttcccataaaaaattttgnagcatttgggtacaaagagnctgagcggttggatgattttgacctgccacantagtgtgcgctctccatccctgcancaagcatttcacttgcagaagatgctgtgccttgnaatattccctcctcacctggggctatatgaagtgcttatgcatatgtncantgtttattttagatntnnnncanttccttttanataaaccagtgagaaggntntgagttta

SEQ ID NO: 636844 - DNA, 352 bp, Homo sapiens
tccaaacattagccacctgggtgcgcttttcagtatatacaatctagcacaatgtcatgtcccctgcttcacccactttcggtcggacgtagtggccgacatcccagcacgcctgtcctcccagcactttgggaggccgacgcaggcagatcacgagcgcaggagatggcgaccatcctggccaacatggtgaacccctgtctctactcaagcaatcacacacattcagctgggcatggtatttgcgtgcctgtaatccccagctcactatgggaggctgcaggcaggcagcaatcgtatgaaccagggagtcggagctagcagtgagccaagcatagtgcccagccactcc

SEQ ID NO: 636845 - DNA, 186 bp, Homo sapiens
gctctttacggactccacttatgactgcctaaagcccatgtcgaaggccccatcgctgggtcaatagtattttccgcagtactcttgaaactaggcggctattggataatacggctcacactcattctcaaccccctgacaaaacacatagcctaccctttcttgtactatccctattagggataa

SEQ ID NO: 636846 - DNA, 629 bp, Homo sapiens
  misc_feature (3)..(3): n is a, c, g, or t
  misc_feature (18)..(18): n is a, c, g, or t
tgnctccgccgatcctgntgaggacaggctaagaggggagccgggtaccggttacgaacggttcagtcgcaacagtgcgcaagttggagcgcatcccgaaacgggaacgtgccacacgtacaattgcgccacaaaaaacagcagcaccatgaagtagaaattgcccatgaatgcggcaccgccaatggcctcgatcaacgagccctcacggctaacgaaatggtcacattgatctttgcgaacgggtgcaatcggtttgtctgaaagctccgcgtcgacgcaatcagtccaacggtaggtgccagcaacagttcccgcctgcaagctctgaattctttcgtgactggtgaccatgacactttcaatgactttggtcggcgagtagtcatttgccattagcaagccggtgagcagtacccctgcgggaactgcgatcagtcctaaccataaccgattgaatatcaccgtaatggcaacgaaaccgtccagaagccgcccactgaaggactcgtgcttagtggtagttgcagtcatgcttttccccttctaacgattaaacacgacgtgcaacccacgccgtggtgcagcggtgccccgatgatcggtgcggtggtttaaatcacggattc

SEQ ID NO: 636847 - DNA, 101 bp, Homo sapiens
cagtaagatggctcagttggcccctcaggacacagcaagcagggtgaagcatggggaagggaggaagttggattaatctgtggttggggttttgagggtgt

SEQ ID NO: 636848 - DNA, 311 bp, Homo sapiens
  misc_feature (17)..(17): n is a, c, g, or t
  misc_feature (205)..(205): n is a, c, g, or t
  misc_feature (207)..(210): n is a, c, g, or t
  misc_feature (215)..(215): n is a, c, g, or t
gctgccgaccgcggggnctgctcctgcgttcttggagctcctggcgcgtttctcggagctcccggctcctcagcgggtgggaacctcggggcccaggggtggagtgggcccggtggttggcgccggtggtataggtacggggcaggcgccgtggtcaggatccataatcggggtttggtctcagcatttacaaatgtgtttcagncnnnntgaancacattccttctagaaagtgcttgggggtttttgctgccctggaagccaggagcctgctcactccaaccacaagtcgcccttgacgcggcggccgc

SEQ ID NO: 636849 - DNA, 1184 bp, Homo sapiens
  misc_feature (375)..(375): n is a, c, g, or t
  misc_feature (428)..(428): n is a, c, g, or t
  misc_feature (460)..(460): n is a, c, g, or t
  misc_feature (516)..(516): n is a, c, g, or t
  misc_feature (592)..(592): n is a, c, g, or t
  misc_feature (701)..(701): n is a, c, g, or t
  misc_feature (779)..(779): n is a, c, g, or t
  misc_feature (822)..(822): n is a, c, g, or t
tactgtggctcacacctgtaatcccagcactttgggaggctgaggcaggcggatcacgaggtcaggagatcgagaccaacctggccaacatggtgaaacccccatccccaccaaaaaatacaaaaaattagccgggcgtggtggggggcgcctgcagtcccagccacagggaggccgaggcaggagaatggcgtgaacccgggaggtggagcttgcagtgagccgagatcgcaccaccgcactccagcctgggcgacagagggagactctgtctcaaaaaaaaaaaagaaagaaagaaaaaaggatagcgtagttgtcacactcattgtcccagctactcaggaggctgaggcggaaggactgcttgagcccggnagatggaagctgcagtgagctatgattaccactgccactgcactccagagtgngcaacaaagcaagaccttgtctcaaaaaacanaaaacaaacaaacagaaaacagcagtttgagatacccaatacaagtaatacagtantaattaacatattaagaagaaattttcactaaaagattgccacaagacttcttagacacatcatgacgtaaatggntgatataagtgtttattaccaggcgtggtagctcacgcctgtaatcccaggaccttgggaggctgagaccattctggccaacattgtggaaacccatttttaccaaaantccaaaaattacccggcgtggaacggcattttgaagcccagcaatcggaaggctgagccgaaaaacgcgtagacccgnaagccgaagcttcaagagcccggaccatgcaaccgatttcagnctgggagaaggcagactccttcaaaaaaaaaaataaaataaaaaaaactattggccgcttggccaagcgttttagacggcaaggtatttattcgcccaattggctcaattgcaaatggccttaaggggcgtttaaatcagggcccggtttacaagtgggctgggaacctgggttccaataaagctttggaaacccttttgaagtgcaataccgaagccccacatggcttcaaaaagtgccctttgggagggaaaggggcgtattttgaaaccgggaattttacttttttcacaggcctgggctctataactcttagggggccccgggcaccctcaattttttgtgggcgcggcatatcctct

SEQ ID NO: 636850 - DNA, 113 bp, Homo sapiens
ctgattgccacaatcatccctcgggtcgtcgcagccacagcagcgcggacgttgaggttacgcggcggtatgaaggaagccgtggctctggtcatatgttatattgggtcgta

SEQ ID NO: 636851 - DNA, 154 bp, Homo sapiens
ttgtagaacatacttctaggtggagcactgtgctgcgaaacttaaggataaatcagtgagctgcatgcacttaaaaggcgtggcctgtctcctcactatagtgcaaggtccatcgaccaaagccctgttctgatcaatactcatgtacagccag

SEQ ID NO: 636852 - DNA, 119 bp, Homo sapiens
  misc_feature (119)..(119): n is a, c, g, or t
gacagggctgacagactactcacccacttcgtcactgctacccggcttacccttcgttatgtctcctgggacttcccatggctaggaccccgatcctgggacaattctagagacccagn

SEQ ID NO: 636853 - DNA, 1053 bp, Homo sapiens
ttgctaagtcatttgaaaaagtgaccattttgccagtgaaatgaagtggaagttagtaggagaatcataaattaaatatattattttgttaataaaaaggcaaagtagtaggtactttttaaaccctcccaaccagccctttctcaatattcatcaaatctaaaacatttagggggcaaaattctaacatgttcatggtatcttgcaaatagtgaaagctttattctgaaggattataaactagttttcttcattttaactagcactattttgtggaaattagaaacctcttttatttctcttcccaaaagtaatacttattataaggctgtagtatcaggttaaggatacagataaataaagttcacttatatcttcttacaaatgtctgggttttaatatggttaatcacttatatacaaatattacaactttttagtgcaagtttttggaagaaaactttttgataaaacactgtgattgatgtgactttatttttaatttaaacgatgaggtggccagaagaaagatgggtctaaaatttctccccatgaaagatgtaaaactatggctttttttaaaatcaaaatttcatcttttaaaataatggtttgaaatactgtatggatctgaacagaataatcacatttaggattctatataaatctcaactggagtataatctgaaggaaattagcagtgtattttaagaaatatatttcaaaaatataaatactgattatgaacttccttttacatggtggttatttgtgccgattaggtttttggttggctctcttatgtgttgtttgggggagagggtgacctggaaagcacaagtgagtatttgacatattctgtatccttaatccaatcattggaaactaaagggttctggttggtacgaatttgataataaggggtaagaacttgggaaagacttgcctggtgttgattaagacgttatggtttttactgggctagagagtgttgaaactgaatagcttaataggcttgtgcatctttggacacaggctactacagcgggattta

SEQ ID NO: 636854 - DNA, 1058 bp, Homo sapiens
gcgcatgatcatggttggtcctgcggctgatgatgtacggatggttgagagcctcctgcggcacacgtctgtcacgcgtcctgaagcaactggtcacgatgccaattttgactgtgatgggtcacagtcaggatgcctcttcatgtcagtcacgttgtgacgtgacatcgagtgctcgaaatgatggccctgtcgactcgtccgcatgactgtaatgtttcacttggcagatgtcccatccctttgaccctccagtgttgtaatcggacccgaattgacgctgagttgtgtctgtggtataatcttcagcagcaaatacagtctccgggaacacacgaggagtccctgtcgccatgtggatagcagtcttcttcttggggaaggtgtgtttcgctcgccaaaggtgctggcgccgggatgatccactgtagcattcaccgtcatacctgtgggtgaatgcttggctccacacctatcgaagccccctgctctactgtgacctggatgagtgtgaaaggctttagtggccaccatggatgcagcgcctggtgcgcgtgcgtgcagatctgtgctggacacgtgcccggtgtctcacgtctctagataaccttggagtcctctgctgagaagctctgagggcccctcccttggaacggacctgtgagggtggctgggccctggagctgccccttctcatgggcttcgtgctgtattccataaaagattgtctgttgaggatgttcagtccagtggctttgacatgtgcccagtgctcatgaccgcctgtggacttgcgaagggtcacttgtaagttgtcgagtagattcatcattggaaaagcttgggcagaaagtatgccgatgtatgcccagctgggtcagaaatggagacccctacacaagttcccaagtcactctttgtcgaagcctggtgtcttttaggccaggctggggtgtaacatcttccatttaggtttccttttgaacaaaagggcctgtgggtaaaaaaagtttaaatccaaaaaggtaaaactttgaggaatatattgggggggaaag

SEQ ID NO: 636855 - DNA, 861 bp, Homo sapiens
aacattcaggactagtacgaggactggagtgtctaatcggccgaggcttgtatttagcctctggaaaggggtgaagacatcaggaaaggtatggattgatgccgcaactcagatatttatttccttgggggctggatatggagtattgatatgcatttgccagttacaacaaattttgacaacaactgttacagggatgccctgctgaccagcagcatcaacatgtatcaccagcttcagatcatactgtggtacgccatcattctccatcctatgtgttacatggcccatgaacacaaggtcaacattgagcgatgtggccacagaaggagctggcactagtgtacatcctgtatccagaggccatttctaccctgtcttggatctacattctagggctatgtattgtgtaataacagtacatgctcctggcgctggtgccttgacagctcaattgggagtgcatggagagctgtcatcacagtgcctggcagatgacttccagtgtcctgaagcgacacctggaaactcttacacatataggaagtcaaccttacagacacatttccttctcgaccctgttctgcataaccaaagggtaggaatatacgtctttgaccctcctggacaactattgcttgcaatggacaccatccaatactttatttggctgtccatcatgggaaagcccataccggaagatacctgcgattaatagaaagtgacagggtacaaaaacgaacatccagcagaaataatggggtacaaagccagactaatactggagaatgtcttgaaattcagtaaacctgctacccctgttagatatatatgacacatcataaaataagcatcactaca

SEQ ID NO: 636856 - DNA, 252 bp, Homo sapiens
cgccgcatgcttgagcacacatatgcaaattattgtgttatgctatagcaatgaacttacttgttctagtttctaaacgaaaacattgagtacacacacaggcctggaacaaagcttcccacttctgagactatttactgatcttcattattctcataagaatgctagatgaagtgctgtgcatataccataggctatggcaatgtgactgcatcttgagcctggactgagttatgtgtcccatactattaa

SEQ ID NO: 636857 - DNA, 624 bp, Homo sapiens
  misc_feature (71)..(71): n is a, c, g, or t
  misc_feature (218)..(218): n is a, c, g, or t
tgtctgtgtgtgtgtgtctgcatccgcatgtgtgtgcacgtctctggtgtgtggttgcatatgtttctgtnagagtatgtgtgtgtgtctgtgtgggtatatgtgtgcatgtctgtgtgtgtgtctgcatctgtgtgcatgctgtgagccggtgggtgtctgcatatgactgtcgtgcttgtgtgtctgtgtgcatgtgtgtgtgtgtgtgcatgtcnatgtgtctgtatctgtgtgcatggtgtgtgtcttccgtgcatatgtaactgtgtgtgcacgtctgtgtagtatgtccttgtgtgtgtgtctgtgcatgagactgtgtctgtgtccacatgtctgcaagtctctgtggtgtgtggttgcatatgtttctgtgaggggatgtgtgtgcatctatgtggatatatgtgtgcatgtctgtgtatgtgcgtctctgtgtgcccgtctgtgtctgcatttgtgtgtatgctgtgtgctggtaggtgtgtgtgtgtatgtgactgctgtggttgtgtgtccctgtgtgcatgtgtctgtgtgtacgtctgcatctgtgtgcatgctgtgggccggtggttgtgtgcatatgtgactgccgtggttgtgtgactgtgtgcatgt

SEQ ID NO: 636858 - DNA, 614 bp, Homo sapiens
cctttccttccagccaaccagcccctcccatgtgacatttggaccctgtcctgcggctccaactgcaaactgggctcctgttacaccactggaccagacccaccccactgccgccgctgcccagccctttcctcccccacccagactgcccagacgactacatccattttgcccaccagacctgcgctgccaccagccattgccactccactcgcatcccacccgacacgactgctgctcctagtgatctggaactcaccctcggaggtatttttggctggccacccgtccctggaccccgtgatcccgacacgctggccgccccccagggatctgtcaccttcagcgagacctatttcctccccacccccccggaacctcttgtgttcttgcctaggccccggtgttcctggcacgcccaatcgagtctctcacttttctcttgtggacccgttagttttgcccctaaacgccgtattctgagtttgccagctgtctctctgatgtgtgccttttgttccacaccgtaacccctgcattttgctctgctctaatacactacctggagaagtcttttccttattttccataaatgtccgaccttattggaaaga

SEQ ID NO: 636859 - DNA, 265 bp, Homo sapiens
atgtgcattattccccagaggagaccctgtgtgcattattcccccaagaggagatcccatgtgcattattcccccaagaggagatcccatgtgcattattcccccaagaggagaccccatgtgcattattcccccaagaggagatcccatgtgcattattcccccaagaggagaccccatgtgcattattcccccaagaggagaccccattgtgcattattcccccgagaggagagcccatgtgcattattcccccgagaggaga

SEQ ID NO: 636860 - DNA, 1746 bp, Homo sapiens
ggcagaagtcctggtaatctaggtccttgtatcccgtactggataccagcaaaccttcagacagcagcaggcggtggtcccatgaggcccgtggaaggagtcaaacttgcgggcaatttatgcacgaagctcactcggtatttcacaagcacgaactaacgcaacgaaacgaacacgaacggaacggaaagagcagcgatcgaccacgaatacacacgactgacacatccgtgataaaacacacctgcgcacggcacacaccccagaccacatggcaggagatagacaaccaacacgccattgagggaaaagcagccccaaaagcccatgaagcggcaaacacggccacgaacagccaggcacgagcacgccaagaccatcagacaggaggagaagggcccaaaaggacaaaccaggcgacaaaccacaacaacaagaaccaaccaaagagcgaacgtggcaaatgaccaaaaaaccataacatacccacagaggaacgcatactccaaacacccggacaacgcagtacagtacaccccagccaaaagcaaagggcacacaaatgcaaaagggacaacgcggtgacacacagccactcacctgggcaacaaccgacacgcaacgacgacgcacacagatagcacatagcatacagcacagtcgcagagcacactcaacacggcgcacggaaaagcgaccacagaaaaaagacagaaaaaaaaacagcaaacaaaacagagggggacagagccagacactcaggggacaaaaagcgggacataacaactaccgggagaaaaacacccagaagtacagattaaaaccgcacacacataaagtaaaacaaaagcggactacgacatcatcacacccactaatgcacaagcataaccataacgagtccgaatggaacaatacgaatacacaacaccagcagagacaagcaccaaacataaaaatacaacagccaatgcaggaaacaaagaacaaacaactagaagagacaaactaacacaacaatgagtatcataacatccacacccagaatagcgcgatagccacaagtaatatagacaacacagacatacaagttaacaccagcaaggcacagagccacaacaaacacaagaacaggccagcattatacacagaacagcaagccagacactcaccagcccacgtgcaagacgaaccaagtagccacagaataagcacacacaacgaggacacatacgacccggagacagataaagagaggacagcccacaaatacccaaacccgacggagcacgcaccgaaggactgcctaagacaatcgtaaaaccaacacacacatacaactacacaaaccaaatcaagacgtacacagacaacaccgaagagacaccactagaggaccaacgacgactaaatattaatcaacaacgcgagcacaccaaaggtgtggacgcacacgaaacagtagacatgagaacagatcagacacagcgaaatagcaagacagctgcaacaaacgagaggtgaatacatggctacatagacgcaacacgtgaacgacagacaagatggctgagcagagaagtgcaaacgaaagcagacaaccacagcatgcgcgcggaagagacgcacagagagctgcagcaggacaagacaacaactggagaggacgagaagaaaccaacaacactaggacacggcaaaacgacatacccagctacacagcacatccgcacaaaagcagagaag

SEQ ID NO: 636861 - DNA, 122 bp, Homo sapiens
tgtatctgtatatgatctatccacagggccacctgactaccaaagtgaacatcctaggtatacagacccctatgccgccggaggatcctactagtagtcagacctgacaggcatagcaagct

SEQ ID NO: 636862 - DNA, 547 bp, Homo sapiens
atagaataacgggtacgcacagaaagcagagcaagacaagagaaggagaagacacccccatggaaacccattgatggaagcgcctcgaagtgccgcaaccaggcaatacggccataagggccgggggagacatggcgctagcaagcgtgttggagagaccgttaccggagaaccagcgcgggggctacggactggggggtcgtgcagaactgctggatcaaggtccagggagcctcagggatggcctgagcctggccgcgccaggctggggagacccagaagagccaggaatcgaaaggctccatggaacaaccacccgggccttaaagtcccgccatggagacaaagttgcagctgactccagggctacagcgggagctaacatggccacccagaaggtgaagaaggtgatagagatcaacccatacctgctaggcaccatggctgggggcgcagcggaatgcagctactgggaacggatgacggctcggaaaaggcaaatctacgagctacgaaaaaaggaacgcaactatggagcagctggctc

SEQ ID NO: 636863 - DNA, 867 bp, Homo sapiens
gtggatgttctgtggaggaagcatcaaaggagggaaaagttgagagacagagagtcgttaggaggctatttcagtagagaaggagaagaaaagaacggagaaggaacgaagaaccaaaggaggaggaggagaaagaggaaaagaaggaggaacgaaggacgaagaacgaaacgaacgaacaggagaaagaactaagaagaacaccggacgaggaacgaacgaacgaacggaaaagaacgtggggaaccgaacgaacggacggacgtgacgaacgtgaacgaaacgaacacgaacgtgagacaccgaacgaacacgacaacactgacgacagaagtgacgacggacggaacgaacgaacgacgaaaggacacgaacgacacggaaacacaccggacgaacgaacgaacggaaagtgacgacacgcgacacggaaggacggagaaaggacgaaagacagacgaagcgacggacgacaggaccgaaggaacacgtacagaagaacggagaacgacggtgacgaaggaacgaccaacggaagaacggaaacgaaaggagaagaacctaacgaagacagaaccggcaaggacggcagacacgacaagaaactaagggaagacacgaaaagaaacgcaacgcgaggcacagaaggcaaacacggacccaacaggggacaggacacgcaccgaccggcaccggaccggcacagaaacctaacagacagcaagcaacgggacaccggaacgaaagggacgcacacccacaccagcacccgaacagggacggaggagacaggacaggacgaagggcacgcaaccacaacaacgagcgagcacccgcggaacggacgcagcaactcacgccgaacgc

SEQ ID NO: 636864 - DNA, 222 bp, Homo sapiens
gatcccctataagtgcatgatcacttaacctttatgttgtgtgaatagttgattatgatacatttcttcagaacatttaatctgtcacttttatcctttgtcatttgtgagctatatttgtacagttcctcatgaagttgcatctgagatgtgtgtattttaaaagattatacaagggttaaattcagcaatatattaacctatcgattcatgaagatgaga

SEQ ID NO: 636865 - DNA, 472 bp, Homo sapiens
  misc_feature (46)..(47): n is a, c, g, or t
ccggaccacgctttgttcgcatagctttttgatattcgttcacatnntgtgtgtattattggtttgtttttttaaatactaagttgaattattttgtttatccattcagctataggcagacattgggttgttttcagtgtctgacttttatgactaaatgcaccatgggcattttcatacaagttatttttgtagaaatatgttcttattccttttgaggaaatacctaggagtaggattgctacatgctactgtaagtatatgtttaagcttacaagaaattgacaaactattttccaaagtagttgacgactttacaattcaaccaccaaggtaggtatgagagttccagttgttccatgtccttgtcagtgcttggtattgtagctcttttaaatttcagccggtctagtgggtgtatagtgatagcttattgtgatttttatttgcatttctctactgaccaaagctt

SEQ ID NO: 636866 - DNA, 199 bp, Homo sapiens
  misc_feature (9)..(9): n is a, c, g, or t
  misc_feature (43)..(43): n is a, c, g, or t
  misc_feature (51)..(51): n is a, c, g, or t
  misc_feature (72)..(72): n is a, c, g, or t
  misc_feature (94)..(94): n is a, c, g, or t
aatggtggnctgcctaaaagtctttggccccctgccttgaggnattgaggnggtcccttcacaggggtgggncccattcacagccccctcctgnccagtctgcatgctgcccgttcctgttcctgtgttcaccacatccccacaccccattgccacttatttattcatctcaggaaataaagaaaggtcttggaaagtt

SEQ ID NO: 636867 - DNA, 216 bp, Homo sapiens
tgatttaagattcttctcggcatttatttcttttaaaaaatattctacttttttgcaaacatgtacatattttataaaccactgcacacttattatactgtatggtgtcacaagggtgttttttttttttcttacttgtaatgttttgcctatctttagagatagcttgacaagttaattaaaatcaacttatgtcccaacattttgttgcagtag

SEQ ID NO: 636868 - DNA, 170 bp, Homo sapiens
  misc_feature (9)..(9): n is a, c, g, or t
tcgtggtanaaatttttattaatactgggattatagctaataggtttatttcgaatccgtttcagatgagtagtcagtgtgagctgattattactagtatggttccggacattactgttatgataagggtagtgtacgataatgggattaattagtatgggaagggtatg

SEQ ID NO: 636869 - DNA, 119 bp, Homo sapiens
attcggatcccctgaaggcaacgtcttttttatctgttttgatgacatctttcaggaggggaagggcactttcttgcagttccattacgacaccgtccaggacacccatcatgggggtg

SEQ ID NO: 636870 - DNA, 1126 bp, Homo sapiens
ggctaggggcttaagcggagtggagtcgagccagcgtcgccgcgatggtgttagttgtgagagctgagcagttcctgactggagctgaccagacttttccagaagtgcctggacgtctgggcagctgtctatatcaccttgaagaagtatgactggtctgaaccaaacccattccaaagaagggtactgtggagggcttagagcccagcagcacaacaagtgtctgttcaagagctaccgatgggcaagcacagcacagatcagccactgtggtgcagctccaaggaagtgaataagtttcagcatggcttattcaaacctccttagagctaacatggatgggctgaacgaagagagacaaaaagaacaaaactaagacagaccaaagcagcagcagcagcagccagcagcagacacactgccgcagacagcaacagcaccaacagacaagcagcgaacaacagcagacacagcagcacagtaaagggcatacatttcctgctttcagcaattaaccactgacttgctattttttccttcttggaccagcatagctagagttacttggtacccaccaacagaaaagtgtatacaacattaagattcggggtccattatggaaacagaatagtagcagatgtaacaacgggcatagatagtggtaagaatctaaattaagacgggctattgggctacatcagggtactgttgattggatgtgtatatcataaatcataggaataaaatgattaaaatgtatactgtaaaacattcactagtgaagagcaaagcaatagttaaagattgtcaggcaaataatgaaaaaaataacaaaggtagagacagaagaaagacggaagcgcagagaacaaagcagaaataagaaggaacacgccacacagggaacgagaccaacagtatgcggacacggcatacatggcggatacccaaaggaaaagccaaaaagggagacagggacgagttcagacaagagagacaaacaaacgaggcgagagggagaaagggggacccagagagaaagaagaaagcacgcaacactcaaaggacgcacagagcacaaacaagcaaaacagacaacaacgacaaaaacaaacagacagagaaa

SEQ ID NO: 636871 - DNA, 242 bp, Homo sapiens
aatttataaactagccatggcatcccgcttatgagcgggcacgaggattactaggcttatcgcgctaagattcataaatgtccctagcgcactatcttaccacaagagcacaccgtacacccctttatccccatactagatattatcgataatcatcagcctaatcattcacacacaatagcccttggccggacggcctagactgctaagcattacctgcacggccagctcacttcatgcat

SEQ ID NO: 636872 - DNA, 213 bp, Homo sapiens
gtggactccgatcatcgcacccagagggaaagaagtcagttatacggtgaaagatacgtgcacacgcatgtttatagcagcacaattcgcaattgcaaaaacgtggaaccaacccaaatgcccatcactcaatgcgtggatcaagtaactgtgatatatatacatacaatggaatactcctcaggccataaccggagtgaattactggccttc

SEQ ID NO: 636873 - DNA, 455 bp, Homo sapiens
  misc_feature (21)..(21): n is a, c, g, or t
  misc_feature (39)..(39): n is a, c, g, or t
  misc_feature (451)..(451): n is a, c, g, or t
  misc_feature (454)..(454): n is a, c, g, or t
gggaatggggcacgccttccncaaagatgagggccaaanggagcatgtaggacaagtagagagaactttccaaaagtgagaggagagaatttgaaggctgcatcctgatgttccatcatccttattttaaggtcactgtttcctcagtgggcacgatgatatttgatgtagggggcacttctttgggtgagactgtccctcccattgcaggatatttagccacccacatcacaagtggtaccatggtgattgtgatacccaaaatgtctccacatttctcaggtgaggaccctgctggaaaagccaccagttagcccggacacattcgtcctcacttccttcagtacttcccactcgtaagagctttgaaaattcagaagggcaatctttggcagatttgttaaggttttttaatatagccagtaatgttccagaatctgacatgtgaagnttnc

SEQ ID NO: 636874 - DNA, 201 bp, Homo sapiens
ctctcggtgcagcgggacaggcgaagcggctgcgcccacggagcgcgcgacactgcccggaagggaccgcaccttgccccctcagctggcccactcgtgatttccagcggctccgcgcgcgcacgatgccctcggcaccagccacagcgggagcggagcaagtcgtccggaccgccaccgccgtcgggttcctccgggagt

SEQ ID NO: 636875 - DNA, 205 bp, Homo sapiens
ggggccccccccccccccccccccccctttttttgggtggggggatttttttaaaaaaaaaaaatttttcccccccccccggggggggggggtttttccctcttttttttcccaaaatttttggtcctttttttccccccccccccgggggggggggtttgttttttttttttttgcccccccgttttttttttttggggcccca

SEQ ID NO: 636876 - DNA, 208 bp, Homo sapiens
cctttaaaaaaaattttttagccccccctgttaaaaaagggccgggttttaaacccccaatggaaccaattttttccaaatgaaaggggaaaggggaattgggcccctttttttccaccccccccagttgggtgtttttaaaagtgaattaggggggtttttccccccccccccctttccaaccctttaaaaaaaattggatttttta

SEQ ID NO: 636877 - DNA, 135 bp, Homo sapiens
tggatacggcagtgaatcgagctcggtaccgatagtacaaggaagggaagggggagggaaacggggacaacctgcgctgctgcttcggctcctgttcactagtggttgctcagtcataatcgccggtcacgagat

SEQ ID NO: 636878 - DNA, 339 bp, Homo sapiens
  misc_feature (26)..(26): n is a, c, g, or t
  misc_feature (238)..(238): n is a, c, g, or t
  misc_feature (253)..(253): n is a, c, g, or t
  misc_feature (321)..(321): n is a, c, g, or t
gatcctgtctcaaaagaaaataatantaaaaattaaaacctgggtatagggccgggtgcattggctcacacttaaaatcccagcactttgggaggccaaggtggatggatcacgtgaggtcaggagttcgagaccagcccgaccaacatggtgaaaccttgtctctactaaaaacacaaaaattagccgggtgtgatggcacgtgcctgtaatcccagctacttgggaggctgaggcnggagaatcgcgtgancccgggaggcggaggttacagtgaacccacatgggcgccactggcactccgagcttggggtgattagnagtggagactctatctca

SEQ ID NO: 636879 - DNA, 439 bp, Homo sapiens
  misc_feature (81)..(81): n is a, c, g, or t
  misc_feature (119)..(119): n is a, c, g, or t
  misc_feature (142)..(142): n is a, c, g, or t
  misc_feature (189)..(189): n is a, c, g, or t
  misc_feature (192)..(192): n is a, c, g, or t
  misc_feature (215)..(216): n is a, c, g, or t
  misc_feature (317)..(317): n is a, c, g, or t
aatagctaggaaaacacagggaaagaagagttttgagcagggcttagttttagaaaatattaaaacatattatgaagcgtntgatatttaaacaggatggggttggtaagtaaataganaaatgcagttaggtggctctttnaaagagtgtggggaaaaaaagtagtaaaaagttaaatgcaatcaatnagnaattgaaagttaagtgagagagnnagagggcttctttggtggtaaaagagggttgcatttcttgcagccagaaggcagagaaagtgaagaccaagtccagaattgaatcttaagaaatgcaggantgcaaagaaattggtgtgtgtgtgtgtgtgtgtgtgtgtgtgtgtgtgtgtgtgtttaatttttaaaaagtttttattgagatacaagtcaataccataaagctctcacccttttaaagtgt

SEQ ID NO: 636880 - DNA, 320 bp, Homo sapiens
gattttcaatccaatcatctgacactcagtattcaccatcacagatggagtcttgctatgttgcccaggctggtctcaaatccctgtccttaagcaatcctcccctcgtcacgctcccaaagtgctgggattacaggcctgagccactgtacctggcttgttttaatcttttatactgcatttttactgtacttattattattattattattatttttgagacagagtcttgctctgtcccccaggcaggagaatcgcttgaacctgagaggcggaggtggcagtgagccgagatggtaccactgcactccaaccagggt

SEQ ID NO: 636881 - DNA, 842 bp, Homo sapiens
tcaccgcggcacgctgtgcagaagtttctggttcataattgccgccccccaatgtcgtttccacggggaacccggagggggaaaaagcgccgcacaccacttgtcgttgtgccttgaacagcgcccgttccgctttgtacactattaccctccggggttatgtcgataacactgagtagccgcgggttcacacacaagcttaaggccttgtggaagaattgtccacagccgccacgatgaatacacctggacgtcgtttaaaaagtcgttaatttccccaaggtaccccgacttgtgcgacagcgtttgcccccttgtcagtgttgggtaacaggaggcccgccgcccggagcatggctgttaaacagcagctcgcgggtaccactagaaacgtgtcaccaccagaaatgtgtgttaaatttatcatgtagaccgcacacacgatgcggatggacgcacgctacattgaggttaggtgttactcccgcacacaatattgttacccgcgagcaaggatcttatgagaacgccccgcggtttgtcaaataaaatatatagaagacattttgtgtgggcggcgaatttgttcattagactccctgtgctccaaaagccgtgtttttcatatggttcacacacagtcgccgcacggccggcgaaaataattctgttttaccacacgccttatgtgtgtctgacccacgcccccgccctgcttagatgcttttacaggcgaagcccaccaccaacgaggaaacatgtggaggctacgggataagagaggacgtttaggaggggttaaagcatggttcgataaaaaggcgaaaataaatagtcgagaa

SEQ ID NO: 636882 - DNA, 319 bp, Homo sapiens
ctttggggtctttgcttataatcttcctttagtgcacatagacagtgactgctgagaatgatcaagtaaatgggcttttgaacaggtaatgaggaaacaaagaatcaaggtatccctgtggaatagagctagaaaggagtgcccacacccatagggttatctacaatagctactcggccataaggaccccacggagacagaccacaaatgtatgagcagcacacttctatgatcaaactctacctctagcaaggcgtatcaacagtcaagttctattgaaagcattcgctcgtgtctcctgtcagacatgatgaaataa

SEQ ID NO: 636883 - DNA, 190 bp, Homo sapiens
ccccggaaaggtggcccatttaattacactcctttttccggggccaattatttaaaagggtgggacattttcttaagggagaatccttccacttccacttccagggggaaggaaattcaaacttaatggtggttccatgccttttcaacatttttaaccccctggcattattttggatccttagggtttt

SEQ ID NO: 636884 - DNA, 305 bp, Homo sapiens
ggcctctaccgagataacagcaacgagctgagctgctgtgacagaggggaacaagatggcggcgcctgaatggggagcctctgggtgaggacccaagtgaggctcccgctgctgctgctgatgaccatggccttggccggagtttcggggaacgcttcggctgaagcatttgactcgggcttgggtgatacggcgtcttgccaccgggcctgtcagttgacctaaccccttgcaaacctaccctaaggaagaggagttgtacgcatgtcagagaggttgcaggctgctcccactttgtcagttgg

SEQ ID NO: 636885 - DNA, 561 bp, Homo sapiens
ggcgcataggtgtgcaagggatgcacttataggatctgctgttacaaaaaatatgagaatctggctggacgcggtggcttacgtctgtaatcccagcactagggaggctgaggtgtgcggatctcctgaggtcaggagttcaagaccagcctgaccaacatggagaaaccgcgtctgtactaaaaatacaaaattagctgggcatagtggtgcatgcctgtaatcccagctacatgggaggcttaggcaggagaatcgcttgaacccaggaggcggaggttgcagtgagccgaaattgcaccgagctgagattgcgccattgcactccagcctgggcaagtaagagcaaaactccatctcagaacaaataaaagaaagggtgatgactgtcagactatagagatgagaatagagatagagtagacggaaagggcctcaagtcaaagggggatgtccaagatcatcagtcataacggaaaggcccatcaaaaccaccaagagatgccacttcaaacccattaggatagctatagtacttccttttcactggaccccagcacc

SEQ ID NO: 636886 - DNA, 566 bp, Homo sapiens
  misc_feature (557)..(557): n is a, c, g, or t
gagttatgaactgctcctcctctgacctgcagtgactgaatcacagtttaggtccctgtctagcaggggctgaggtgtcaggaggggacttctggcccaccttagcgttcaggcctctgtgagtgggcatgcagcagatattgtggggaggcgatggccagatgggactagtgttccctcctatctggccacggcgttatgcggcgatggggtgggccggggtggtcctggctggcattgcctgagccggcagtgatgaagtggggagctttgccctttgacaggtggtgggctggtctggggccttaatgtgaaaagacgagtggcaggcagctggagtagagcgagcccagcagccctaaaaggctgcttcatggccatctagtccccagttcagggcagcatccaatagcccacaaggccagcgtgggtggggcgggggtggtcccacagctgggttccacctgaagagcctccgtgcctcggagcatggagaggcaggctatgggtggcacctctcccgtcctgccctgtgttcccagttgaagaacctggancttgagtac

SEQ ID NO: 636887 - DNA, 109 bp, Homo sapiens
gacagcccagaggaggggccactgtgagcgcgcaggctggcttcgtgagcagcaggacgaccccagcaccccctgtgtcagctgcccctcttgctgtccacctcctctg

SEQ ID NO: 636888 - DNA, 356 bp, Homo sapiens
tctcaggatctcacgtaatatgtacatatcacggagaataacagtgagatacttttttatatgataggataaaaaataagtgcagtccttaaattgccagtgaaaatttaccacataatccattgtataggcccattaatggttattgaagttgaaatttagcagtacccagttattagtctaaggggtgggtatagagggaagtataggaaagtgctgcaggaaggaaaatgagaaaaagtttccttcttctttttctagattgtacatacaatagacccccatggctaaacaaacttggaaatgtatcagggtttattattggcatcctgctagtctctattttggtttctctt

SEQ ID NO: 636889 - DNA, 212 bp, Homo sapiens
  misc_feature (18)..(18): n is a, c, g, or t
  misc_feature (36)..(36): n is a, c, g, or t
  misc_feature (91)..(91): n is a, c, g, or t
tgttcctggtctacccanggtggggttacaatctcnctccctccatggaaagtgaaccagaaatggtccaagctgtgctgtcccttcgtgnaaatggtctgtattctctgcttgaaataggaaggtgggatttctggggaggctggtgaaggaggcagggtcttttctcacgtgtcatgttaaaattgccaaataaagtacctctgcctgtg

SEQ ID NO: 636890 - DNA, 740 bp, Homo sapiens
  misc_feature (62)..(62): n is a, c, g, or t
  misc_feature (65)..(65): n is a, c, g, or t
  misc_feature (67)..(68): n is a, c, g, or t
  misc_feature (73)..(73): n is a, c, g, or t
  misc_feature (104)..(104): n is a, c, g, or t
  misc_feature (106)..(106): n is a, c, g, or t
  misc_feature (113)..(113): n is a, c, g, or t
  misc_feature (116)..(117): n is a, c, g, or t
  misc_feature (139)..(139): n is a, c, g, or t
agagaacaggagaggagaaaacaaaaggcacccaccccatggaaaacccatggaaaggccgnagngnngaagnagaggaacacgggaacccgcatgagaacgtngnaaaagcnggnncaagccagtaagcccagcaaanagggaggcaggggcaggagaaaagaaagagttcaggagaacaagaccagacagggcaacaaggcaaaacacagaaacaacgggaaaaaaaaaaaaaaaaagggaaaaagacaagaaaaagcaaaggaggacgaaagaaaaagaagaaagaggagcaaagaggccaggaacagaggcaaaggccagaaaaaacaacacaaagggaggcgaaggagggaaaagacagagaagccaggaggaagagaccgcagagagaaaagaaagagacaaagaaatccagacagggagagagagagacacccaacgaaaaacaaagaaaaaaaaaaaaagacaagaaaaaacaaaagaaaaagaaggaaacaaaaaaagaaaaggagagagaaagaaagggcaaaggcaaagaaaaggacgaaaaaggcaaggggaaaaaggaaagggaagaagaaggcgaacgaaaaagaaagggaagaagaaagacagggacaagagaaaaaagagcaaagggggaaaaaaggggaaaggaaaggaaagaacgggaaaaacgggaaaaaaaaaaaaggggaagggcaagacaaaggaaaaaagaggaacaggggagggcg

SEQ ID NO: 636891 - DNA, 326 bp, Homo sapiens
attagccagattcatgtggtattgccaagtaaagccacgtggtgcagggacattcatccaagatggatgtccatcacgacttccccaacgcacaactgagttaacaaagccaacatggtcattttctgtaatgaaatcaaccaagtattttagtgcatcaggttcagcaatggtatcatcatccattaaccaaacataatcatcttgcgtttcttcagcgcataggcgcacggccttattaaaaccaccagcgccgcccagattctcttcagagttatagacggtcactcttggatcagtcaccgttgccaagtattcagcggttt

SEQ ID NO: 636892 - DNA, 139 bp, Homo sapiens
gacatatacgaattgagctggtaccccccgactagcccgacagcgtagttctacctctgaccccagcttctctctggttccacaggccccatgcatctccctgcctcactcccctcagcccctgtcgggctagtcgggg

SEQ ID NO: 636893 - DNA, 382 bp, Homo sapiens
  misc_feature (291)..(291): n is a, c, g, or t
  misc_feature (343)..(343): n is a, c, g, or t
ggggcgggcacctgtaatcccagctactcggaggtggagtttgcagtgagcttagattgtaccactgcactccagcctgggcaacagagtgagactctgtctcaaaaaaaagttacagcaagacttttctttttgagacagggtctggctctgttgcccagtctggagtgtggtggcatgatcatagctccttgcacctttaacctcctgggctcaagagatcctcccacctcagcctccccagtagctgggactaattttttttttgtagtgatggggtctcgctatttntgcccagcctgggtctcgaacttctgagctaaagtcatcctcctgccttggnctcccaaactgctggggattgcaggtatgaggcagcctc

SEQ ID NO: 636894 - DNA, 573 bp, Homo sapiens
  misc_feature (573)..(573): n is a, c, g, or t
gtcgcattggggaggttcctgctataatattgccgcacggtgagccggagaggtccgctccggggtagaggtacgaaggaactaatataagacatctcatctctgtatggactggggatcgagagatgcagtgaaaagagcagagaatgcacttgttggctggcctctacttacttggaatcgactactatacctgcacatgacggaggtgtgtaagtggatgagtggagataggataaaattttcacgtggacaattgtcgcgctagagagttatgtggagtattagtagcgtgctaaagtggcgaatgcttatgttatcacgacagcatgcgtaacacagcacgcgcctcatgtggggcgtcagataatttcgcaaaagatgcattctgtactttccccaacaggcacaccatcccacgtactgcgcgcactgcgctccgcgccccgtctggtccgggctgcgggcatactcaatatgcgctttaatacggaggtccccaccaggtccatggtctgctggattcacccacccacaaaggggcagaggcatccgcagtcgccaccgtggaan

SEQ ID NO: 636895 - DNA, 207 bp, Homo sapiens
catcgctaattgacgttttgaatatttcattgtttctaattgttactacagatacagcggggtgagcaactcgtgtgtacataggtttatctcctactggaatattttctttatataggcgttttttttttttctttttttttttttttttttttttttttttttttttttttttttttttttttttgtggggctttccccccttta

SEQ ID NO: 636896 - DNA, 458 bp, Homo sapiens
tcaacacatcttacctccactaatgtcagtggggcccagtggagaactgagccttcactcccatctggcaagtgatgggtggcagggctagttggcattctgcttccttctctaccctcccctgttgttagctgggtcctttggggagctgagcttttggctttatagtgcagcaacaaagaagtttgagtcagccctctgctttcctcctccctgtcatcagtggggcccagcagggaggtgagcttacacccctactcagaggcagtgaggtgatacaggttggtgccctactttcattgggactaagagtggagctgaacttccgtcccacccatctgcaacaaaacagtgtgagtcattgctccacttttgcctgggtgatgttggtgcggcccagagggaagttgaacatacacactccacctcaacaggaggactgcctgcttcggggaaaa

SEQ ID NO: 636897 - DNA, 861 bp, Homo sapiens
cagtcctcaggtgcaaccccctgcgtggtcctctgtggcagccttctctcattcagaggctaaaaagaaaactcagtagaagataatggcaagtccagactggggatatgatgacaaaaatggtcctgaacaatggagcaagctgtatcccattgccaatggaaataaccagtcccctgttgatattaaaaccagtgaaaccaaacatgacacctctctgaaacctattagtgtctcctacaacccagccacagccaaagaaattatcaatgtggggcattccttccatgtaaattttgaggacaacgataaccgatcagtgctgaaaggtggtcctttctctgacagctacaggctctttcagttccattttcactggggcagtacaaatgagcatggttcagaacatacagtggatggagtcaaatattctgccgagcttcacgtagctcactggaattctgcaaagtactccagccttgctgaagctgcctcaaaggctgatggtttggcagttattggtgtttgatgaaggttggtgaggccaacccaaagctgcagaaagtacttgatgccctccaagcaattaaaaccaagggcaaacgagccccattcacaaattttgacccctctactctccttccttcatccctggatttctggacctaccctggctctctgactcatcctcctctttatgagagtgtaacttgggatccatctgtaagggagaagcatcagtgtcagctcagagcagctggcacaattccgcagccttctatcaaatgttgaagggtgataacgcttgtccccattggcagaacaaaaaccgggccaaccaaacctctgagggcagaacag

SEQ ID NO: 636898 - DNA, 190 bp, Homo sapiens
tggacaagatgcgtgatcatctcattgctaagaacgtggctgcagacattgccgtcagctctgtgaatctgttgccaacaagttggaaggggaggtgaatgggacggtcagcaaggttactttcacagttaagcaagccctacaagagtcccttgtgcagatatcttcagaccacagcgcttgtgttgga

SEQ ID NO: 636899 - DNA, 141 bp, Homo sapiens
tgctcgctccgtgcctggcagcgcgtgcctaccacgtcaaccgcgacatgccccgcgtgagcgcggcggcggtcagcgcgagccgggcgatccggccaattccgctggtggcggctcgctggcgatgcggctgacgcgcat

SEQ ID NO: 636900 - DNA, 291 bp, Homo sapiens
cgaacttttttcatgatccactgatcaaaccccacaccaccatctcactgacaccatgttcaaccatgtcttttacttaacaaattccaggaactggccttaggaaatccaagtatcaaaccaaggttgtggagtattccacctcaggaaggaatgctgaacaactgatttacagacttgttgccccagctagaccaccaggtagcccattactcaaggtaaccattacaaccaaatagtgcttacctgcataccctacccctcacatgctttgccaagccccagctgcgg

SEQ ID NO: 636901 - DNA, 107 bp, Homo sapiens
gatcccctggtttgcgtgtcacttactgctgagtttctctcctccattcaccatgtggtcagtcctagaccaggtgtatgtgaccacaagctgaccacgcaaacgcc

SEQ ID NO: 636902 - DNA, 172 bp, Homo sapiens
cacctccagctagcgggatgtatctgtgtcacaagctgaattctcagtaaagaaagctgagcagacactaaacaaggatgttactaaaagacaatgatttgttaaaattataaagcaatcatcttatggcctgcaagacagtcacacattacgaactctccaccacatgcgg

SEQ ID NO: 636903 - DNA, 571 bp, Homo sapiens
  misc_feature (29)..(29): n is a, c, g, or t
  misc_feature (564)..(564): n is a, c, g, or t
agttcgacggagactctcagagatacatngggacagccgtgcctactttatattaagacagtgggtaggggccgagactcagccagtgataacggattacatatcggagtaacagatatacaatcatatatacacagatacacactcatgccacacacgaaagaaatgagaagagggagaaggaacaaattttggaaaacgatgccacggatgctacactacatgaaactacttgagtttttttagcaagcagtaatttccaggcctttacatgatattacgtggttgatggttcacattattagacagccaggaggtcaatcccgaggccagaacaagggagggttgtaaaggcctcatggtagcacaaggcctgagcttcaacagagaagatacaatgtttatgtgaatgctggtgtgcccaagtgtgatctagtctcttcactgactactctgatgtgtgatgagaatatatatattatcctctgactggcttgaatagttaagacaagtccgaaaggtaagagagtggtttcacatcgtcatgtggttctgaaatgaaancatgggg

SEQ ID NO: 636904 - DNA, 1018 bp, Homo sapiens
tttggggcctgtgcgccggggtgccagacgacgcggggtggccgcgcgatttctcggtcgttgtccgcgcccgccctgccgatgtgttgggggcgcggcggcggctgctctccggggggcgggcgacggtgtgttagtggagaggggttgttgttcacgcgacgggcgccctcttgtgtgatgcggggcccgcgccgcgtggtgtcggccttctgtctgtgtgtgtctcgcacgacggtgacgcccgagctgcgcgccggaccgtccttgtattgtggctgtgtgtgggacacgcgcgccacgggggaggcagccacagcccacgcactgccaccacggcggggtgctgcaacatcccacgtgatgtgttgtggttggggttgcacttaaggttgatccgaccctgggggacggccaccccttcttggtggggggggaccacagacaacaggttgcggttggggggggggtgtgttggttgttttctgtccccccccggcggcctccgccgcgcgggcgatcctctatgttgggctcggtttgttctcgcctctccgcgcggtgtttttagagaattggttctctggctggcgctaccgtcctcccctctctcccctccccctcctttcggtggtgactagcctcgctctttcgccacgacccaggagtagttgggtggcgtgccaaggatggtggaggagcccccggcgcccccttccctggttgcttcttcgcccccacgatgttagcgtgggggcacccaagaaagtacttatgtgaggttgaggaggcgcacgttttccgccgatattgtgccgcccgccgatgctgttggggggggcccccggccccccccgcgccggttgtgggtggtttcttttgggcgggggccgcggggggggttaaccccccccgggcgccccgatttattttttaatatttctcccccccccccgggttttttgggaacgacacgaaaaaagaggttttttttttcccccttttttttaaaatagga

SEQ ID NO: 636905 - DNA, 109 bp, Homo sapiens
ggtcattctagcaggatcccagccttcatacctctctcacgacaacgcagtctatgagaccgagctgtagatccaggggtaccgatgcttacgagattcagtaagtcat

SEQ ID NO: 636906 - DNA, 217 bp, Homo sapiens
ccccctttttggggggccccccgggggggcccgtttttttttggggggccccccccgggtttttttccctttttccccctgccctggggggttttttccccccccttgggggtccccttttggggggttttaaaaaccctttttttttaaccaaattggggtttttttttaaaaacggggaaggggaaaaaaaaaaattttttccccacccctccca

SEQ ID NO: 636907 - DNA, 100 bp, Homo sapiens
tccatcttactatcaattcccatcccaaaaagcactcatactttatgcatccccgcagctacatacacacaacacacagcacacgcatgaacacagcaca

SEQ ID NO: 636908 - DNA, 736 bp, Homo sapiens
tggcaaaaaccccaaaatattaatttaaaaaccccagggtctcagctgggatatgccccgcccatagggggccccctttcaaatttaaaagtccctcaagaggccccttccaacccccagcaacaaggggctgagcagggccccagcgtgggggctctggcaggcctctgtggccccctccacatgtgatctctggagaggaggcccagcctcctcagggtgctagcgtgggcacaggtcctgcgtgccggcgctgcttctctacgaggcctccttctcttgccccagcgtgtgggcctcactccctccaccgctccgtgggagagggttggcccaaaacctttgttcttaagaagtgccaacacctcctgtgggcccctccagtggggcctcaatgtagcggctccccctctctccgagtgggcggaactctcgacactccacctgtgcgaggaccccgtgtaggggtgctgctgtgcgcgtaaacagtgctcatagaagcgtgcctctctgtgaagccctctcagtgaatcctcctctctgtggccgtgagatgttggcaattgctcttgtgggcttttggcccccgggcgcgcccctcctgtgaggggcttgggtgggactcactgacataccggagagtccgggaacccagattgttgggcaccattcgcctggaggttcgcccggcggacaaaaaccccgggacccatgcttggcggcttgcccacgccca

SEQ ID NO: 636909 - DNA, 406 bp, Homo sapiens
ctgtggtgtagttgcagatcagctcagaccccatgtggctgtggtgtaggctggtagctacagctctgattcaacccctaacctggaaacttgtacatgctgcaaggtgcagccctaaaaacaaacaaaacaaaacaaaaccccaagaagagaaacagacacggagttcctgttgtggctcagtggttaacgcatctgactagggaccatgctgttgtgggttcgatccctagcctcgctcagtgggttgaggatcctgaattgctgtggctctggtgtaggcccacagctacagctctgattagacccctagcctgggaacctccacagaacagataaaaagacaaaaaaaaaaagaaagaaagaattagacaagatggcagagtaggaggactcaggctcccct

SEQ ID NO: 636910 - DNA, 309 bp, Homo sapiens
  misc_feature (124)..(124): n is a, c, g, or t
  misc_feature (232)..(232): n is a, c, g, or t
  misc_feature (260)..(260): n is a, c, g, or t
  misc_feature (277)..(277): n is a, c, g, or t
  misc_feature (288)..(288): n is a, c, g, or t
gcgccggatgttcgggtttaggggtttggttgtcaatgggttttctcgtctctgacataaccacgaagttatataaatgctcctgaagtgtgggcatccggtgtgtggtttgaagccttggagntttcctagaatggttaccttttttggaacacacttatatttggaggctaaaagaggggaaccgcttaaattgtgtttcccgtaattcttgtcctgtgcgacttctaanaactgaggtacctaaagttgtcttgaantttacctttcctgcacncatgtcaaaantaaaacaccccagcgaggtga

SEQ ID NO: 636911 - DNA, 290 bp, Homo sapiens
ggctacttttttgtagagacggggttttgccatgttgcgcaggctggtcttgaactcctgggctcgggtgatctgcctgcctcggcctcccaaagtgctgggattacaggcgtgagccactgtgcccagtcatcaaatgatatttaattacttattaagtggcccatgcctatggccccagctactcccggggctgcctcgagaggctcacttgagcagtgcaggctgaggagcggactatcttgccactgcgttcgtagaccttcggatgacagagagaccctgtctcc

SEQ ID NO: 636912 - DNA, 128 bp, Homo sapiens
tcatcttggcttcccgagtagctgggacacaggtacgtgccaccacacttagctaatctttcttttccttttttttttttgggtaaaaacggaatttggcggtgtggcccaggtgactttgattcctg

SEQ ID NO: 636913 - DNA, 892 bp, Homo sapiens
  misc_feature (24)..(24): n is a, c, g, or t
  misc_feature (71)..(71): n is a, c, g, or t
  misc_feature (144)..(144): n is a, c, g, or t
  misc_feature (293)..(293): n is a, c, g, or t
  misc_feature (316)..(316): n is a, c, g, or t
  misc_feature (319)..(319): n is a, c, g, or t
  misc_feature (334)..(334): n is a, c, g, or t
  misc_feature (336)..(336): n is a, c, g, or t
  misc_feature (353)..(353): n is a, c, g, or t
  misc_feature (369)..(369): n is a, c, g, or t
  misc_feature (380)..(380): n is a, c, g, or t
  misc_feature (386)..(386): n is a, c, g, or t
  misc_feature (388)..(388): n is a, c, g, or t
  misc_feature (401)..(401): n is a, c, g, or t
  misc_feature (404)..(404): n is a, c, g, or t
  misc_feature (406)..(406): n is a, c, g, or t
  misc_feature (409)..(409): n is a, c, g, or t
  misc_feature (412)..(413): n is a, c, g, or t
  misc_feature (479)..(479): n is a, c, g, or t
  misc_feature (698)..(698): n is a, c, g, or t
cccagccagccccaacctcggagnacctgacctctgcaaccaacatcgtgaagtggatcacgaagcagcanaatgcccagggcggtttctcctccacccaggacacagtggtggctctccatgctctgtccaaatatggggcanccacatttaccaggactgggaaggctgcacaggtgactatccagtcttcagggacattttccagcaaattccaagtggacaacaacaaccgcctgttactgcagcaggtctcattgccagagctgcctggggaatacaacatgaaaatnacagaagaaggatgtctctcccnccncacatccttcaaatncnatattctcccagaaaangaacagttcccctttnctttaggagtncaactntncctcaaacttgtnatnanccnaannccccccccagcttccaaatttcccttaagtgtcagttcccagggacccgctttgccttccaacatngcgaatcgttgaatgtgaagatggtctctggcttcatttccccctgaagcccaacagtgaaaatgcttgaaaagatctacccatttgacccggacagaagtcagcagcaaccatgtcttgatttcccttgataaggtgtcaaatcagacactgagcttgttcttcacggttctgcaagatgtcccagtaagagatctgaaaccacccatagtgaaagtntatgattactacgagacggatgagtttgcaattgctgagtacaatgctccttgcagcaaagattttggaaatgcttgaagaccccaaggctgaaaagtgctttgctggagtcctgttttcaaagctccccaaaagacacgtgtttttgtatctttaaagacttgatgaataaaccctttttttggtcaatgtca

SEQ ID NO: 636914 - DNA, 450 bp, Homo sapiens
gaagcatctccctactgaatggaatcgaaacaccggctgtgaatgattacgggcggggagttatgggagggaatgcttggaccatcattagcgggggttggagctattgaaacctgaaagacacaaactttaccaaaaggttaaaaacacaatacgccaaaaggaatagcaattaaaagaccacttagggtccgaagaaagggaaaaaccatgacatactttgtaggtatccactgacggagccccagatcggctgagcagtagaggcattacgattatgcagccaggtagcctctcggtgaatctttacttatattttcttttggagacagggactcactctgtcatccaggtaggagtgcagtggagccatcatggcttactgcagcctcaaccttctgggctcaggcaatccttccacctcagcctcctgagtagctgtgaccacag

SEQ ID NO: 636915 - DNA, 172 bp, Homo sapiens
atagaatgaaatatttattgttactcaaatgcccagaaacggcattgagttctttaagaatttgttccttcattttcctctcttcatctgaagcctctacacctccccaaaagacacgtgtttttgtatctttaaagacttgatgaataaaccctttttttggtcaatgtca

SEQ ID NO: 636916 - DNA, 1325 bp, Homo sapiens
  misc_feature (397)..(397): n is a, c, g, or t
  misc_feature (465)..(465): n is a, c, g, or t
  misc_feature (1325)..(1325): n is a, c, g, or t
gcaaggaaggatgtgacccagatcaatggctgggactggggagtgcactcgcgccaggctggtgccagaggtgcaaaggctcctggtggcccaaggtgatggggctcgaagggtcccagacacgaggcgtccacatgcctagcaggggtcctcctggagagtcggctacgcgtatcatccggtcgatgctgttctcggcaatgatacacgttgtttcgtgcacgtacggacggcagtggcgtcgtgtggcgtgcgggagacgcacatgtccatgctcgcctcgacctacccagagtgcgctggtcgcgaggaggtgttggcccgggtggtccatcgtgcgtggcacctggtgatacacaggcgatggtgcgcaggatgatagtcgatgcgtctacanttggttcgttagaaaataggcgcagaaacaacagctagttttcactgcgcgtacggcactcagatagntagaaaaccaagcttagaaggggggcggtattgatgtagcgtgaggagacgtggttggtagagagggattggtggttgcgggaacggaatggggaaaggggaatggtttagagggacacaacgggcacgggcaacatatcacgacgcaggtggagccaccttaatgcctcaccgttacctcgctgggcatgttacatgcattgcgaacaacatcccacgaaagtgaacacaggtgaatgctcgaggaagggtctcggaaggttatgcacaaaacaaggggcggagcaggggcagtgagagggtgcaggtactatgtggccaaatccacattgggtgggcctaccgcgcggtgaaaaggacacctaaaaatggggggagtaactgaaagacacgggctggaacaccagtacttggggggggatggcacaaccccattttgaagaaacgacaacgtactatgggaggttacatactgtggtggtgcttgtgtggggacaatatacagtttatccaagagcggttccctgcgacaatggtcccggaaaaccaatacatggacagagacaacttcgttgtccaccgtatcattataaaaacaaggcacgcgggtaagagcgaatccacacagggaaaaatcgggtatgtaacgggagtgcgaggaccgtggcgatttataattacagtaacagagccatgcggaaagaaacagtcacgtagacacaccaatattggggatcgcggggcaggtgaaagtggacatttactgcgaaccatgaaagagcgtttgcaaacaaagagcagtggtgatgagtcggttcatcccagaatcaattagtgaaaggcaacactagggggaccan

SEQ ID NO: 636917 - DNA, 227 bp, Homo sapiens
  misc_feature (58)..(58): n is a, c, g, or t
  misc_feature (64)..(64): n is a, c, g, or t
  misc_feature (90)..(90): n is a, c, g, or t
  misc_feature (128)..(128): n is a, c, g, or t
  misc_feature (162)..(162): n is a, c, g, or t
  misc_feature (188)..(188): n is a, c, g, or t
cctcccgagtagctgggactacccgtgcatgacaccctatctggcccttgttttttgntgttgntgatgttctttcttttttcacgtggnttcgcacttgtcacccaggctggagtgcggtggtgtgntgtcggctcactgccctgtctctcgggttggagngattctcgtgtctcagtcttccgggnggctgggattgcgggcgtgtgccaccacgcctggctgtt

SEQ ID NO: 636918 - DNA, 461 bp, Homo sapiens
tggcggcgggcgggccgcttccgctcgctgggcgatggccaggtcgacttcaagtcgattttctccaagctggcccagtacgattaccaggcctgggcaacgttggaatgggaatgctgcctgaaggaccaggaggccggtgcacgcgaaggtgccgctttcatccgtgaccacatcattccggtcaccgacaagatcttcgacgatttcgctggtgcaccgatcagcaccgcacagatgcagcagatgctcggcatcgcctgagccccaacggagcagcccccatgaacaccctttcttccgctggcaccgccggcgacgatgccctgcgccatcactacctgcgtatcgacggccagcgcgtgcattgcgttgtcggcaggcagcggccagcccgtgctgctgatccctggctggccgcagacctggtatgcctgggcgccatgtgctgcatgcactgg

SEQ ID NO: 636919 - DNA, 371 bp, Homo sapiens
  misc_feature (57)..(57): n is a, c, g, or t
ctatgagggtttcttcagcctgtggaagggcttcacaccatactatgcccgactggnccccacactgtcctcaccttcatcttcttggaacagatgaacaaggcctacaagcgtctcttcctcagtggctgatctggcatggtcccaggactagtgtgccaggcttccaagccatccactgctattacagtcgctatgccctggaggacctggattctgctacccctgggctattctatttattttccctctccagtgtggttttctcctttgcggtaaagaacttagtctgttctccccctactccagcctgcctgctggtgcttgcctgatgcttagaatcactttgcccctggctcttcctgaggaga

SEQ ID NO: 636920 - DNA, 287 bp, Homo sapiens
aacgatggtcacagatcacctgaggcacttaggggaagaagaggttaccctcctctttggttttttttgagacagagtctcactctgtcgcccaggctggagtgcagtagtgcaatctcaactcactgcaacctctgcctccggggttcaagcgattctcctgcctcagcctcccaagtagctgggattataggcgtgtgccaccacgcctggctaatttttgtattttgggtaaagacagggtttcaccatgtgggtcaggctggtctccaactcctgacctcatg

SEQ ID NO: 636921 - DNA, 137 bp, Homo sapiens
attccagcccgggtgatagagtgagaccagtctcatatgaaaaataccaaaattatccagctgtggtccgagctacaaggaaggctgaggtgggaggattgcttgagcccgggagttcaagaacaggctgatcaata

SEQ ID NO: 636922 - DNA, 424 bp, Homo sapiens
gggccaacgagccgtgcgttttctgcatacaagtggctttactgccaaagccttccaagaagctcgattacagtcatgcgccaccaggctgggctgaatattgtatttttagtagagatgctttttcaccatgttggccaagctggtctcaaactcctgacctcaagtgatctgcccgcctcggcctcccagagagctggaattacaggcgtgagccagtgcacccggcggaatcttggaatttttatagacagcacctcagtttctgactccagccgcacacctcctgcctctaccagcaggggttgccgccagaccagagccagggccaggtccctgcgttcatcccccccggtaggatggacgtgagccatccttctaggggacttttttcagtgtgcgactcgtctctgttaggtggtag

SEQ ID NO: 636923 - DNA, 106 bp, Homo sapiens
agttgtgacgattacatcgcgttatcgaaagaactggatgtcccggtgcggatgagggtcggtactcgcctgtggttgggtgatgccaatgcttaccgtgtcacag

SEQ ID NO: 636924 - DNA, 314 bp, Homo sapiens
  misc_feature (146)..(146): n is a, c, g, or t
  misc_feature (158)..(158): n is a, c, g, or t
  misc_feature (160)..(160): n is a, c, g, or t
  misc_feature (248)..(248): n is a, c, g, or t
gctgctgctctccagtcaagtagcggaagtcccttaccacccagacacccaaacagccgtggccccagaggtcctgggcaaatatgggggcctgcctaggttggtgggacagtgctccttatgtaaactgagcctttgtttaaaanacaattccaatnanctagagtgagagggagagataacatggcatgcagcacacacggctgctccagttcatggcctcccaggggtgctggggatgcatccanagtggttgtctgagacagagttggaaccctcacaactggcctcttcaccttcacattatcccgctg

SEQ ID NO: 636925 - DNA, 200 bp, Homo sapiens
  misc_feature (19)..(19): n is a, c, g, or t
atgagctggcccgagttcnccatacagagtacacacaacatcactgtattgcatttatctacaatcataaaacgcttcagttgtatacttgaggaaaaattcacagtcaaaattaatgcaaacacacatacctttaccttttagtttatccttatcttattaaatgtcctcttaacaggatactctgtactgggggatct

SEQ ID NO: 636926 - DNA, 222 bp, Homo sapiens
  misc_feature (7)..(7): n is a, c, g, or t
  misc_feature (186)..(186): n is a, c, g, or t
  misc_feature (203)..(203): n is a, c, g, or t
tgacagngaaaaagcagtctggcccccgagggccaccccccataccccaaggtccagacggcggccaacgtgggtgaccaacgtagcacagactggcccccacagcacagcaagacgcctggggcaggccgagagaacggcacggagacgccgacgcacgagaacccggagcgggagaaggcccgncaggccccggccagcancagcaaggcaggagccgcc

SEQ ID NO: 636927 - DNA, 328 bp, Homo sapiens
  misc_feature (240)..(240): n is a, c, g, or t
cagtacctacatatatttattcaaaagatttttctcaggtgcaatgagggtaatacataaacactccaggattttccaatgtaatttgtaaggtcttccttccaaagtatcaggttttgacctgggttcttaaaaaactgaatctagaaaaggatacttaaaaagccagactttctagtgatgaatttttatcattttcttgggtgattagtttatgcatcatctctccctttcctgggntattttagcttttgggcgatgtctccctgtaggaacgagaatgtgtggaatttttaggggcatttgctttccaaaaacggtctgggct

SEQ ID NO: 636928 - DNA, 693 bp, Homo sapiens
  misc_feature (174)..(174): n is a, c, g, or t
ttggtgcctggccctgccggcgctgtctgtgacgatggagatcaatgcgggcctacctgccgccaggcgctgctgctaccaccctgtgacaatgaacaatggatgccctgtgcgccgagtgagaatgttcaagtgatgatctgctgcagtgcctactgactgttgctcagctgnaccctgctggcaatgctgctgatgcatcttcatgacctgcattactgtgtgtgatgtgaatgtgccttcaaatgtgtgtgatgttgtgcacccatgtttggcagtgtaagctgtgctgtgttgtgttgcacaagttgtgtacactctattcaagactacaacagtttccagtggatgacccatcatgccagtgttattgcgtgcagtatcttcagtgttgtgcagaagatcccattttgacaccattatatttgtgagcaatgctgggaacctggtggatgtgaatgtgcatgagacattttgatgaacccagtatctcttggacttcccatattggtgcatggggtaggctttcagccaaacatgttgaaactatagtgagcctggctcccctggcgtctttgggcgcccaagatgggaatgcgcgcttggcccagtgacgaatggaaactggccaaaggaatttccccccaccaagggttcagacatcaccaaactggaacccctgtttccagcagg

SEQ ID NO: 636929 - DNA, 949 bp, Homo sapiens
gctctctctctctctctctctctctctctctctctctctctctctctctctctctctctctctcatagagatcctgagagaatgtcttccgtgcacaaaaatgatgagggaggcgcacccgaggctgggaagcctgcctctgtgacacacatatgctagagagcgtgatacaacgcccccgccccactcgggtcgtgaaggaggagatagtcgtggacaagctagcatcgtcttgtgtagtagaccgcgccgacgtgtctcacttcgtcgtcgttaggagaaaacgggacaaggtggaggacctacttctcgtggaggtggtgtgccagctagttggagcgtccgtgattctgccgctgatgacgagcgagacgtgttgctatcataacagcgtgcaatttgtgatgagagtgaacctccggcgtcgttggcgcccaatataacagagaccaccatacaagaaacgcccacgcggctgttgttgtcgcctggaggaggcgccccttcctgaagatgttgcgtatgcgatgttgggcacaaataactctgcttctcacctgatgtcgttggttgtgtttttgcatccacgcagggtgggacagaatagcggagcagttggttgccccaccatattagtgttggtgatgaccacatgaacaaccaacaagaagattcttttggtcagggcccactctgtcgcgtggtctcttcctgtgtgtcgtgctgcaggcgacccagctgcagggggtggtctttgtctgaggtatgtgcctctgctggtggtgaatgttttgccgtgtagttttgggcagcggcccggaggttttctccgagaaggggatactggtggtttttgttgctgcaacctgttgtggcccctctgctctcctggctctcaccagagccgctgtgttgtttttgtgctcctggtcgcgtgtagtggcgcccg

SEQ ID NO: 636930 - DNA, 741 bp, Homo sapiens
ggcgaaaatttttccccccccaagagttttttttttaaaaagacaaaacccaaaaaggctttaatggccggggttaaaggccagttccccacaagtgtgtctcccccaggaactataaggccccctccccccggaggggaaggtcactgtgtggtggacacaggggctccccatcaaaacccctttttttgagcccccatacggcccttttggtaatagactaaaccaggggtttgttcccccaagaacaaaacatgttttccccttccctttaactagaaggaaaactagtaaggcctccacataatttttgtattacccatcaggggcccaagaaatacatagtaaataaggaagctgaaaactccgggcattggttcttaagctagatgattagaatgtgaaaaagattttccaaaggtaaaacttctatttttcgggagaaactttcttccctttgctgggcaaaaagacccggctttgctatatttaaaagggcttttttaaaaaagatttatgtatttgggaaaggtttggagccaccagttccccccaaaaagcggacccgggtttgatcaggtaaacccgtttgggggcccaagggggactttgttcccacccttgagatgacccttttaagaaaaataagttaatcccaattttcccccgaagggggggttttttttcattaaccaataaaaaaaaaagggacctttttatcaaagggggaagccaatgcta

SEQ ID NO: 636931 - DNA, 319 bp, Homo sapiens
tgtagcagcaacctagggatcagttttgcaggtggtaacagccatttaccaagatacttgtatgtaagaagggcagatttattagagaaattgtgaaaatgtgttgcagtgggcagctcagcagagaaggggctacctgcaaagaggcaagggctggaggaaagttttatagggtcctgctgaagggtgctacgtgtggaatgaggtcattgtgcccgcaggttgtttgtgattagctgtctctaacaattgttcttacaataattgttcattattgttctcaacttggggctctccccaacctggggacccttcctta

SEQ ID NO: 636932 - DNA, 1100 bp, Homo sapiens
tgctttctcttcttgtttctttgtttctttgtttttcctttgttttttttttcttctcttttcttttttctttctgctttttctgttgtgtcttttttctattgtctttctttttcttctttttcttttttcttctgtttctctacctgagtcctatgtctcttcgtgtccttctcctagtgatttgccgttttttttttttttttttgttgtttttttttttaggaggaggcgaagtgtggggcggggagggggggagacgagacggaaggatctgtgaagacccgtcttctgtcgttttattccggctcttttcgcgggatgacccacggggtccaagccggcacttcgacacatgttgcctttggtttcccagagcaccctcccgttggatttggggggaccggaccccccgctccccttcgggcccccctctgaatccggcccgatttcccggcccttgtccgctccgggatggggattccactttaggggatttcgggcccaaaaaacctctagtgggacctggcttgtgaaaccctacgggtctcatcatggaacatggcttcccaccccggtcgttttggcgccccaatgggcgctttctctaagggggtcgcccgagaatctcttgtttatcttattgttttgagacggagtctcgcactgttgccccaggctggagtgcaatggcgcgatcttggctcactgcaagctccgcctcccgagttcaagccaattctcctgcctcagcctcccgagtagactgggattacaggtgcctgcccaccacaccccagctaacggtttgtatttttagtagagatggggtttcaccatgttggcccggcagatctccaacttctgacctcgtgatgcactcacctcggcctccccaagtgctgggattaccggcgtgagcccctgcgccctgcctgtttgtagtaatttttaggcacccaatctccctcatcttctagtgcccttttcctctctgttcaggtaaatgtcaccctgtgcccagaatggatgccccggaaccttcaagagtggctgaaaagattgccgagttatcataataaattgctaacctgccgtta

SEQ ID NO: 636933 - DNA, 140 bp, Homo sapiens
gtgttatcctactggtacttgttcctgttggtcacgctattggtgatcacaatgagtatagtagttacgctttgactggtgaagtcttagcatgtactgctaggaggtatgggttcttgctccgcggtcgccccaaccga

SEQ ID NO: 636934 - DNA, 353 bp, Homo sapiens
  misc_feature (1)..(1): n is a, c, g, or t
ngatatgttattagagaaagtgagcgtcaaagacatagaacaattagtagcagatgggacaatttatggtgggatgattccgaaagtaaaggcagcaacaaaagggctgcaaggcatcatacaagaagtaatgatcgtcgatggtacccattcaaaaatgaaaacagagacttctttgatgggaacgacaattacatctacctctgtacaatccaatgtaggaacatagaaaaggagcgaatgattgtggctttatttccgacttatcagcgatttcctctcgctgttcaacaagcagaaggtacaacggttgttgatacaaatggaaaaacatatttagattttggaagtga

SEQ ID NO: 636935 - DNA, 1132 bp, Homo sapiens
  misc_feature (612)..(612): n is a, c, g, or t
cagccccatgcaccccagtgcttggaggtcagcgtggctggctttgtgtagcccagagtggctggcatgtgtgtggcatagagcatgggtgcctggtggcctggatgtggacaactgaactcatctggccagacctgtgctgcatctcccagggtgccctacaaaggctacatctggtgtggtgaaagatgccacagagtccactggcccgtgtggagctgcactccacctgccagaccatctctgtggaccgtcagcggctcaccacggtgggctcacggcgcccgggcggcatgacctcgacctatgggaggacgcccatgtatggctcccagacgcccatgtatggctctggctcccgaacacccatgtacggctcacagacacccctccaggatggtagccgcaccccacactacggctcacagacgcccctgcatgatggcagccgcactcctgcccagagtggggcctgggaccccaacaaccccaacacgccgtcacgggctgaggaagaatatgagtatgctttcgatgatgagcccaccccgtccccgcaggcctatgggggaacccccaatccccaaacacctggctacccatgacccctcngtccccggtcaacccacaatacaacccgcagacgccagggacgccggccatgtacaacacagaccagttctctccctatgcttgccccactccccacaaggtacctacacagccacagacacccagcacacccaagagctaaccaaccatggtggcagacacaaagcaccagcaaaggcgtaccagaaataacccaactacacccaggacacatgctaagccaaacactaacaccagtacgcaccaatagagcacaatacagggctaagacccacagacaccgaagaccaccgtatgaggactaacaagtacactaataagaaaacctggaacgccatcccacagtccccacatgagtagagatacgaaaccacacaaccacccggcccgagagcatacaaggccatcgaaaccaggaaacatcacaacgcggaacagaagtaaacccaccttgcacaatacaggggtggaagggttgcgagaaaaccactaaccatggaatacaacaggatgactgaga

SEQ ID NO: 636936 - DNA, 1159 bp, Homo sapiens
  misc_feature (612)..(612): n is a, c, g, or t
cagccccatgcaccccagtgcttggaggtcagcgtggctggctttgtgtagcccagagtggctggcatgtgtgtggcatagagcatgggtgcctggtggcctggatgtggacaactgaactcatctggccagacctgtgctgcatctcccagggtgccctacaaaggctacatctggtgtggtgaaagatgccacagagtccactggcccgtgtggagctgcactccacctgccagaccatctctgtggaccgtcagcggctcaccacggtgggctcacggcgcccgggcggcatgacctcgacctatgggaggacgcccatgtatggctcccagacgcccatgtatggctctggctcccgaacacccatgtacggctcacagacacccctccaggatggtagccgcaccccacactacggctcacagacgcccctgcatgatggcagccgcactcctgcccagagtggggcctgggaccccaacaaccccaacacgccgtcacgggctgaggaagaatatgagtatgctttcgatgatgagcccaccccgtccccgcaggcctatgggggaacccccaatccccaaacacctggctacccatgacccctcngtcccccccccaaaaccccaaaaggggggggggggtcaacccacaatacaacccgcagacgccagggacgccggccatgtacaacacagaccagttctctccctatgcttgccccactccccacaaggtacctacacagccacagacacccagcacacccaagagctaaccaaccatggtggcagacacaaagcaccagcaaaggcgtaccagaaataacccaactacacccaggacacatgctaagccaaacactaacaccagtacgcaccaatagagcacaatacagggctaagacccacagacaccgaagaccaccgtatgaggactaacaagtacactaataagaaaacctggaacgccatcccacagtccccacatgagtagagatacgaaaccacacaaccacccggcccgagagcatacaaggccatcgaaaccaggaaacatcacaacgcggaacagaagtaaacccaccttgcacaatacaggggtggaagggttgcgagaaaaccactaaccatggaatacaacaggatgactgaga

SEQ ID NO: 636937 - DNA, 595 bp, Homo sapiens
tggtgatttttaaaattataagaaatcgctaataatttatatgtatataaattttaaaaatgagttttattttctagtgaattttttttttcaaatttgtctatacaagaaaaagaaaccaaaaaccattaaagaaattgaagctgtaataaatttccccaagaggaataggtggttttttttttttttaataacaactttatggaaattttcacttaccatattatttacctggttcaaaatgtcacaattcagtaaggttctaagtaattttttacagagtttggccaagaaattactaatagtcatttttaagaaactattttcatctctcctaaaccctctatccttaggcatctactaaatcttcctttaatttctgtagaatggcgcctgttctgggacagttcataaaagggaatttatcacacacatgtgttctcgggaagggatcggattcctttcacttacgcatggtgttaacagggttaatccgctttggtcgcatatggtcagtacacttcattctttttaatagccaaataataatacatcatcggaatgtggatataccacatttggtatatccatttag

SEQ ID NO: 636938 - DNA, 1178 bp, Homo sapiens
tggtaaaaacaccctcagcaaaataaaatcccgggttatggtgggacaactttgttccccccttccttcaaccgggccaaaaaaatataaacgagcaactttcatagcacaaaaagaggaacaaaaagaaaacaccttattatcgtgggcccttttatacccatctcatacaacccaactacttatagctccagctagagttccatacacaaaaagagttaccgtgaaagtgctcgaaattaagaatggtttcactgtggtgtgcgacaatgttgtggccttcttttttacacagaggttttattatactcttccatgtggaagaattctatattgaacactgtggctccaccccccacagagttaagagttcagaaagttgaggacaaagaaaaacacgcctccaaaaaggcgggtattggggccaatccgaagatatcatatatcaacaaggtgcgttgtgcacccttaaaacaatattgtgtttcccaaaaccatcttctaacacacggtgctccactatacaacaaatatcaccaacaaaatatttccccctttttcaacgagttacctttgtacaaaaaaaaaaagagagccagagggcccttggagacaagtttcgaggggaccacatatataatcacctctccccccgtgtgtggcacaaaattctctcacagtggcatcgggagacatggcggcgatgggctgaaaaacaggcgcgcgtgtgcaacacacaccgagcagaggagtgggaccaccgtcgccccaaggagattaggacaggcgagagcacccctcctaaatacctcgaaaagcggcaaacccacgggtaagaagcactcctcgaacaagcggggacaatggccgacgagggcaaacaacacagcggcaccaccgccagcgccccacacacgcagcactgtagcacgccacaagggcaacaccaacaattgcacgaggtgccaggaagcaaaaaacgacgacggcaatcgaacaactgggcgccaaaaggggcaaaaccgcgggataccagcgtgacccccagcgtccacctcgccacccaccaaccgggggccacaccctcgcgggctaccccccacagacggcaagctcgccactaaacaccaccaaataacccacgcgtgcaacccgtcaaaaaacacgcgtacgacacg

SEQ ID NO: 636939 - DNA, 366 bp, Homo sapiens
  misc_feature (105)..(105): n is a, c, g, or t
  misc_feature (273)..(274): n is a, c, g, or t
cgccgttgtactccagcctgggcaacagagcaagacccatctcaaaaaaaaaaattttttttcctgaggagggaggcctgtaggttgaccagctcttggggtttntaaggcaggtctgttttctcctaggccctgagttttctgaaatctctgggttttgctttgttggcaagggggccgaggaatcctgacctcggccaaaccttaagctctatggttaatttgagctggcccttccaggtttaaggcagggtggtgtcctcctgcgcactnnccatatgggggccccaaacacccacatacctggccaaccagatttctcctgtgggcaggcaaaggatattgtcatttcccactgctcctact

SEQ ID NO: 636940 - DNA, 202 bp, Homo sapiens
gtttaaaatcaattagggcaccacaactaggccaagaaaactaagtggagtattataatgtagaatacatttagggaacctttcacattaaaaacttgcctggagatacatgttataacatggataaatcttaaaaacattatgctaagtgagagacgtcattcataaaagactactatgatatcccttatgcaaatgccat

SEQ ID NO: 636941 - DNA, 190 bp, Homo sapiens
agtatagacgggtttcaccgttttagctgggatggtctcgatctcctgacctcgtgatccgcccgcctcggcctcccaaagtgctgggattacaggcgtgagccaccgcgcccggcctgtgagggtctttagtgccccctccttgtccctgactgcccactttagagacgaggaaatggaggttcaggga

SEQ ID NO: 636942 - DNA, 453 bp, Homo sapiens
agatcgagctctgtaccggtagactccaggttgacctaaccaggtagactcaggttgacctaacccaggtagacctccaggtagaactaacgtctttacgtgtgtatttgacgcttagtttgtagccttcatcagggtttgcttgaagatggtggtatataggctgatgcatcaggtggtgaggttgatcggggttgatcgattacagaacaggctcctctagagggatatgaacgcagtggcaggtcctttgcgtctgaagctgtggctcgtattgttctggcgaggcagtctcgttgatttaactgttgaggtatagggctaagcctagtggggtatctaatcccagttgggctcttacgctattgtgtgtgcaaatagttaggtctagctggctacctgggttaggtctacctggaggtctacctgggttaggtctacctggggggatcc

SEQ ID NO: 636943 - DNA, 505 bp, Homo sapiens
ttttgggatcagttaaactgtgtgctggtttccatctttctgcagtaacagcggtcagaaccatttcagttggcatgtgcctgactttaggaaagtcctgattgggaaaaaaaaacctgtcagcgcgaattcatgccttcaacaagcacttatgagtgcctggagcctgccgcccactgtgcacatgtatgacaggctcatactacttagagatctctactttattagaggagggactgcaggttttatttacaaccatggcccctaggatactgaaaataagcgaccagttataaaaaggctctttgcccagcttgtcggcaatactcctattagctaaagtgagggcagcctttttttttgcgcatagagcccgagctttttactctcgacaccaacaaattttaccgtttgagctattgtcacttttgaaggggggttcttaagccatgcccatttacttcccaaaaattaagccccttaaaaaattaacaccctctggccc

SEQ ID NO: 636944 - DNA, 268 bp, Homo sapiens
gtcatgttagctgagtcaccatttggcttcggctggaaatagtgtgattagaacactgatcgtgtgcgaggccaggagatcaagaccatcctgactaacaaacacagtgaaacccgtctctactaaaaatacaaaaaaattagccaggcgtggtggtgggcgcctgtagtcccagctacttgggaggctgaggcaggagaatggtgtgaaccgggagatggcgcttgcagtgagctgagattgcactccagcctgggcgacaggctca

SEQ ID NO: 636945 - DNA, 572 bp, Homo sapiens
  misc_feature (448)..(448): n is a, c, g, or t
  misc_feature (516)..(517): n is a, c, g, or t
  misc_feature (520)..(520): n is a, c, g, or t
  misc_feature (548)..(549): n is a, c, g, or t
  misc_feature (558)..(558): n is a, c, g, or t
caagtggagtatgccaaattttatatgaatttttcagattatctaagcttccaggttttataattagaagataatgagagaattaatggggtttatatttacattatctctcaactatgtagcccatattactcaccctatgagtgaatctggaattgcttttcatgtgaaatcattgtggtctatgagtttacaatactgcaaactgtgttattttatctaatccattgcttaatgagtgtgtttttccatgaatgaatataccgtggttcatatgttagcatggcagcatttccagatagcctttttgttttgttgaaaagttggggttttggggggagggggagtattagtacgttgcatgaaatagcttactttataatgatggaagttgctttttctttgtgtctgtgtgatttttttttattgaaagtgaaattataacttntttgtgcaagtaagtactatatatacccattcttcaagtgtacttacttgtacgtgtatacacattcnncantacccatcattataatttcttaataaannactgttcanccttgttaacaaca

SEQ ID NO: 636946 - DNA, 310 bp, Homo sapiens
gcatggatatccttccaataagcaactcatcgtgctcatgtttatttattttaaagtcacacacaattgcacttattaaaaatgaatttatggagacagaaagcattttggtggctgccaagggctggagagggcgaatggggagtgcgtccttaacggatacggggcttccctttggggcgatgaaaaagttctggcgctcgccagtcctgatggttccacgccactgtcactgtaataagtgtcaccaatggcacctttcatgtttcgcccacttccgcccactcaaaaactatacatttaaagcaaa

SEQ ID NO: 636947 - DNA, 169 bp, Homo sapiens
  misc_feature (4)..(4): n is a, c, g, or t
gtantcttaaaaagtgaattatcatcgtgtccgtcgtgaactctctgtcacgctttttccaccaattctctttcctccagaatgttcttctcttctcatcccaagagctctgggatcagtagcaccaggaagtgttaacgggaggcagcagtctgggaggtgccaggtg

SEQ ID NO: 636948 - DNA, 112 bp, Homo sapiens
  misc_feature (2)..(2): n is a, c, g, or t
gngacacacaggatgcagtggacagtattcattccatctggatgaatatctcagtgggggcctatgtgtgtccccaccagtcctgctgacccctacttatctcatctagagt

SEQ ID NO: 636949 - DNA, 1586 bp, Homo sapiens
  misc_feature (1)..(1): n is a, c, g, or t
  misc_feature (764)..(764): n is a, c, g, or t
nggcgttccatcacatgctgctcccagtcgcggacgaactaaacacactgtctctgttgttggagtgaggtatgtatgtatataaattcagggttagagttgttgcttccacacacgatgagtgatagtactcatatactatgtgtgtttttatcagacacccaccgggggagcaaaataatgttgttggcagcccactcgggcccccccttctgtataccccccctcttgtggtttctagataagggaagtgtggatccccccagggaatgtatatattggcgtggataaataaattagttcagtagagaggggtctagaacgtcgtggcccccaacagaaataattggcctgcgttgtaaatattagtaaagggtggagattgttatcaaagggaacaacccgccgtttgttattccccccccacaccagtggttaaagctttcatacacgaaagccacacctgtttaccaacggctgttttttataaaaaaccttccacccccttgttttccccctaatactttaaggaaccctttttgtcttttcgtggaacacaaagcacacatcttttgtgcaacaccacatagggtccctctcattatatgggtaataatatacatcacgaaccccacacaatgggaaaccaccattcttggaagtgttttttccatcaacagagagcaccacagaagagggggggcgttagagaaaacaaacacacccatctcctcgccgtggaatatattgtcgacacacagctnatgattacgacacagaggtggtgtttcacagagagagagagtgcacattatagataatgtgtgtaattcatagcggcgccccacacactctctctgttgtgtggggggtcccaccctgcgagagagaaattggcgttgagagcgagacacacagcgcacccaacgtaggtcacgcctcaacagcggagatacacatccacacacatgtcacagcccacacacaacttgtgtggcgacgtctcttggagatagcggcgagagaaggagtatagtgtgcggagataaaaagagtgtggtgtgagagagagagatactctcaccacacactgtgttgtctctctgttgtgtctctctggttgtgttataataaaagttctcgcgagagaggagataagagagataatttgtgcgcgccccactctataagaaattataagagagggctcggggtggtcgcgtggggctctcacacgctgctcgggaagagtcccacacacacacctcttggagagaggccccacaggcacggcacagagtagcacacccgagagtgtgtcgcggagagtttcggagagacaccacgcggcgtgagccacacacactgtggaggaaaacccccctttttatctataaaaatatcccaaaaattatagctcgggcactggtggtgcacatgcccgtgaattccacacctgccttgggagagcgttgaggcacggaagaatctacattctgaaactccacggagaggcggaaatttcggtgaacccagattggtcccttgcactcccgcctgggccacgagccgaaactacctttcca

SEQ ID NO: 636950 - DNA, 106 bp, Homo sapiens
cggggtggtcagatgatgacgtcggtgccttcgtgacagctcggggaggcagcgaggtagccaatacgctggaacggtgcaactgggaggcactctatcactatct

SEQ ID NO: 636951 - DNA, 481 bp, Homo sapiens
gtgagtaggaatctcttaggaagaaggagagatcatcagatcggctctaactccaaagttcactgctccagggaatctggaatgcacattgcagggcctagtccctcaggacggaaggagttaattctctcctgctcacctccagttctggtcaacaacattcacatcaaatccaaactgaaagaaaaagcagatcagagacggaaatctgctatcatggtcacacacctggcgtggtagtcaccagcgcactctctaggcagtattcttctaaaaagacgacgcaaaatacaccggagcacaattgttcagagccttatttcctcaatgactggagataagacaagatgcagggcgccaatggtctgaagtgagcactaaaagcctacaagtctctccttctcaattgcccactaacagaaatactttttcccctgtgtctcaactgcatttctacgactgtgtcagtatcccggggctg

SEQ ID NO: 636952 - DNA, 487 bp, Homo sapiens
  misc_feature (275)..(275): n is a, c, g, or t
  misc_feature (291)..(291): n is a, c, g, or t
  misc_feature (297)..(298): n is a, c, g, or t
ggtctgtgctaggtgcagctggagcgatagaggacgtcgcaggcccatgatgatagctgcctctcttacccgcgttaatcgtgacgaggtgctggtgcgtggtgattagtagagactctgagattcaatagcctcatctctcatcatcaggctggtcctggaggataagccaaagtgaagcttggacgttttggatccaggcactggtggcccgataattacactctatacttcatgagtgctggttgcatgggatgtgaccaggagtacaaatncagcaggatgtgaaanacgagnnggacagtgattcagcattgcagtcctgaggcatttactcttgggtaaaggagagttgagcctgaattaggaatgtgtatattgtagggatcctggtggttatggggaccacgtctgtgggcctgaggtctggccagccagggctggtgctgtccctgcccacatccgtactggcccggggtcacgagct

SEQ ID NO: 636953 - DNA, 936 bp, Homo sapiens
  misc_feature (1)..(2): n is a, c, g, or t
  misc_feature (16)..(16): n is a, c, g, or t
  misc_feature (48)..(48): n is a, c, g, or t
  misc_feature (56)..(59): n is a, c, g, or t
  misc_feature (61)..(61): n is a, c, g, or t
  misc_feature (64)..(66): n is a, c, g, or t
  misc_feature (72)..(72): n is a, c, g, or t
  misc_feature (87)..(87): n is a, c, g, or t
  misc_feature (96)..(96): n is a, c, g, or t
  misc_feature (102)..(102): n is a, c, g, or t
  misc_feature (106)..(106): n is a, c, g, or t
  misc_feature (125)..(125): n is a, c, g, or t
  misc_feature (129)..(129): n is a, c, g, or t
  misc_feature (137)..(137): n is a, c, g, or t
  misc_feature (139)..(139): n is a, c, g, or t
  misc_feature (145)..(145): n is a, c, g, or t
  misc_feature (166)..(167): n is a, c, g, or t
  misc_feature (172)..(172): n is a, c, g, or t
  misc_feature (181)..(181): n is a, c, g, or t
  misc_feature (189)..(189): n is a, c, g, or t
  misc_feature (199)..(199): n is a, c, g, or t
  misc_feature (204)..(204): n is a, c, g, or t
  misc_feature (206)..(206): n is a, c, g, or t
  misc_feature (208)..(208): n is a, c, g, or t
  misc_feature (210)..(211): n is a, c, g, or t
  misc_feature (217)..(217): n is a, c, g, or t
  misc_feature (219)..(219): n is a, c, g, or t
  misc_feature (221)..(221): n is a, c, g, or t
  misc_feature (232)..(232): n is a, c, g, or t
  misc_feature (247)..(247): n is a, c, g, or t
  misc_feature (252)..(252): n is a, c, g, or t
  misc_feature (258)..(259): n is a, c, g, or t
  misc_feature (267)..(267): n is a, c, g, or t
  misc_feature (291)..(291): n is a, c, g, or t
  misc_feature (295)..(296): n is a, c, g, or t
  misc_feature (298)..(298): n is a, c, g, or t
  misc_feature (300)..(300): n is a, c, g, or t
  misc_feature (312)..(312): n is a, c, g, or t
  misc_feature (314)..(314): n is a, c, g, or t
  misc_feature (316)..(316): n is a, c, g, or t
  misc_feature (335)..(335): n is a, c, g, or t
  misc_feature (344)..(344): n is a, c, g, or t
  misc_feature (358)..(358): n is a, c, g, or t
  misc_feature (360)..(360): n is a, c, g, or t
  misc_feature (367)..(367): n is a, c, g, or t
  misc_feature (370)..(371): n is a, c, g, or t
  misc_feature (373)..(373): n is a, c, g, or t
  misc_feature (375)..(376): n is a, c, g, or t
  misc_feature (378)..(379): n is a, c, g, or t
  misc_feature (391)..(391): n is a, c, g, or t
  misc_feature (423)..(424): n is a, c, g, or t
  misc_feature (434)..(434): n is a, c, g, or t
  misc_feature (436)..(436): n is a, c, g, or t
  misc_feature (443)..(443): n is a, c, g, or t
  misc_feature (448)..(448): n is a, c, g, or t
  misc_feature (461)..(461): n is a, c, g, or t
  misc_feature (494)..(494): n is a, c, g, or t
  misc_feature (499)..(499): n is a, c, g, or t
  misc_feature (501)..(501): n is a, c, g, or t
  misc_feature (506)..(506): n is a, c, g, or t
  misc_feature (526)..(526): n is a, c, g, or t
  misc_feature (545)..(545): n is a, c, g, or t
  misc_feature (836)..(836): n is a, c, g, or t
  misc_feature (931)..(931): n is a, c, g, or t
nnccccgccgcagagncccaccgccacaggcctcgggccagcggcagngagctgcnnnncnaannncccgtnccgcggcccccagcngcccccaancctgcnccangggcccggcgccatgagtnaacnggagcaantnaaaaangaggccgagcagctccggaannaaaancgggatgcncgaaaaanatgtagggantcaanantnanncaaaanananctgggctgganccagtggggaaaatncaaanaaaganncggaagancctccgtgggcacctggcaaaaanatanncnangcactgggggancnantcaaggctgctggtcaacncctcccaanatgggaaactcatnanctggganaannanannannaaaaaagtccangccatcccgctgcgctcctcctgggtaataanntgtgcctacncnccctcanggaantttgtggcctgtngggggttggacaacatctgctccatctacagcntcaananccgcnaagcaacgtcagggtcagcngggagctgcctggccacantgggtacctgtagtgttgccgcttcctggatgacaaccaaatcatcaacagctctggggataccacctgtgccctgtgggacattgagacaggccagcagacagtgggttttgctggacacagtggggatgtgatgtccctgtccctggcccccgatggccgcacgtttgtgtcaggcgcctgtgatgcctctatcaagctgtgggacgtgcgggattccatgtgccgacagaccttcatcggccatgaatccgacatcaatgcagtggctttcttcccaacggctacgcnttcaccaccggctctgacgacgccacgtgccggcctcttcgacctgcgggccgatcaggagctcctcatgtactcccatgacaacatcatctgtngcata

SEQ ID NO: 636954 - DNA, 115 bp, Homo sapiens
gactctgagcatccccgtacgtgagtctcggacgtggtaactttgttgcttcgcaccatgagccgcccacagtctgggctcggtcaccagttcaccacatgccctcttgcctcct

SEQ ID NO: 636955 - DNA, 971 bp, Homo sapiens
tggtctaagatctgatatgttccatagcctaagatgtacagctaagcctgctgaagaattgtccttatttttccatttcagatattcccaaggttaggtagagggggtggcgttgaagagcaggctctctagagccaatgctgtttattaataagctgtacagacacgcttcttccaggaatgtgcacttctgattctgctgtggtgataaagatactctgccttgcccattaagccatttgttggtggaaaacattacctttaaataaatgtctggttctatgtgagcaaagctagggctcccataatatgtgcattagatactctgaattcagctgaactgtttggcaactttgtcactctggccatcatttcagatagttcccacagtgtgagaaatgacgcttcctatagtactgtcaagagtgtgaaaagagagctctttagcaaacacattatttatccatccttaaaaagcttgtcacctccagggtgcttgttcagaagtaatctcattacttaaatcatatcctagcatgtggaaaagctccctgagttccccgcctgccccacctgctgatttctcaggaccgctgataacagcttttcatgtccaacttgggattaatatcaagcaagccatggattttgtctccactgaacttgggcatcatggacagtttccattccagcagttaagtcaagcaagccatggattttgtctccactgaacttgggcatcatggacagtttccattccagcagttaagggcttcctgactttcaacagtggtgctgatcccagttctgaagagtggaacatcagagagcctcccctcctcagccacttgtaagcataacaaactgaaaatgtaatctgctttcaaatattctgttgagtaaagattccttttaattactttaactgggtttgtagagacaagggaccgtctctggttggcaacttgtcc

SEQ ID NO: 636956 - DNA, 547 bp, Homo sapiens
caccctaaatgtattatgctattatcagaatgccaaagtattatttgtctacccagaattcagtctggacatttactactttttagacttgttgacgttgaactttctgtatagagaaagtggctgggtttggagctttgggtaagaaataaaagccgattaagcactggccgccccgcgacaggtccccaatgcccgagtcactgtggcagcattcgcacgggtgtggggagtcctttcaactcagggaggctgggtttctggggcaccctcgaagctttctgggtatgtcttgttatatcttttctgcgtgtcgacctggcacttacaaagtgagaccagcccgcttcccaagccagccagacacctgggtcttgagccataaactggcgtagtacagcatggcagcttccagtgtatttcatttatactttggtggggttatggtaggtttcttcttgtaaaaatggtacagaaactttttaaaagaaatgggattcgaaactggatgtgtatccgtaacctcataataaatctagggttgatg

SEQ ID NO: 636957 - DNA, 1039 bp, Homo sapiens
  misc_feature (602)..(602): n is a, c, g, or t
  misc_feature (660)..(660): n is a, c, g, or t
  misc_feature (702)..(702): n is a, c, g, or t
  misc_feature (713)..(713): n is a, c, g, or t
  misc_feature (749)..(749): n is a, c, g, or t
  misc_feature (764)..(764): n is a, c, g, or t
  misc_feature (803)..(803): n is a, c, g, or t
  misc_feature (807)..(807): n is a, c, g, or t
  misc_feature (815)..(815): n is a, c, g, or t
  misc_feature (818)..(818): n is a, c, g, or t
  misc_feature (843)..(843): n is a, c, g, or t
  misc_feature (857)..(857): n is a, c, g, or t
  misc_feature (862)..(862): n is a, c, g, or t
  misc_feature (866)..(866): n is a, c, g, or t
  misc_feature (902)..(902): n is a, c, g, or t
  misc_feature (929)..(929): n is a, c, g, or t
  misc_feature (962)..(962): n is a, c, g, or t
  misc_feature (1013)..(1013): n is a, c, g, or t
ggctgatccggcccaactgcggcgtcatcccggctataagcgcacggcctcggcgaccctctccgacccggccgccgccgccatgcagccctccagccttctgccgctcgccctctgcctgctggctgcacccgcctccgcgctcgtcaggatcccgctgcacaagttcacgtccatccgccggaccatgtcggaggttgggggctctgtggaggacctgattgccaaaggccccgtctcaaagtactcccaggcggtgccagccgtgaccgaggggcccattcccgaggtgctcaagaactacatggacgcccagtactacggggagattggcatcgggacgcccccccagtgcttcacaatcgtcttcgacacgggctcctccaacctgtgggtcccctccatccactgcaaactgctggacatcgcttgctggatccaccacaagtacaacagcgacaagtccagcacctacgtgaagaatggtacctcgtttgacatccactatggctcgggcagcctctccgggtacctgagccaggacactgtgtcggtgccctgccagtcagcgtcgtcagcctctgccctgggcggtgtcaaantggagaggcaggtctttggggaggccaccaagcagccaggcatcaccttcatcgcagncaagttcgatggcatcctgggcatggcctacccccgcatctncgtcaacaacntgttgcccgttttcgacaacttgttgcagcagaagntggtggaccagaacnttttttccttttacctgagcagggacccagatgcgcacntggngggtgagntgntgttgggtggcacagattccaagtnttacaagggttttntttcntacntgaatttcacccgcaaggcctactggcaggtccacntggaccaggtggaggtggccagcgggntgaccctgtgcaaggagggctgtgaggccattntggacacaggcacttccctcatggtgggcccggtggatgaggtgcgcgagntgcagaaggccatcggggccgtgccg

SEQ ID NO: 636958 - DNA, 358 bp, Homo sapiens
ctcagcattatttaactcatcaggcaaatgcaaatcttaaccacattgaaatatcatatcagctcacacctcgataggatggctgttatcaaaaagatcagagatcacgagtggtagtgagcatgtgggaacaagggaacccatgtacactgtaggagagaatgtaaattggtatagtagtaaaggaaaacagtatgaaggtttctaaaaaaaataagatagaactcttctatgatctagcaatctcacttctgaatatatattcgaaggaaacaaaattactgtctcacagagatatttgcgctcccttatgctaaatgcagtacgtcagttacagaaagacaaatactgcatgacc

SEQ ID NO: 636959 - DNA, 1123 bp, Homo sapiens
  misc_feature (686)..(686): n is a, c, g, or t
  misc_feature (744)..(744): n is a, c, g, or t
  misc_feature (786)..(786): n is a, c, g, or t
  misc_feature (797)..(797): n is a, c, g, or t
  misc_feature (833)..(833): n is a, c, g, or t
  misc_feature (848)..(848): n is a, c, g, or t
  misc_feature (887)..(887): n is a, c, g, or t
  misc_feature (891)..(891): n is a, c, g, or t
  misc_feature (899)..(899): n is a, c, g, or t
  misc_feature (902)..(902): n is a, c, g, or t
  misc_feature (927)..(927): n is a, c, g, or t
  misc_feature (941)..(941): n is a, c, g, or t
  misc_feature (946)..(946): n is a, c, g, or t
  misc_feature (950)..(950): n is a, c, g, or t
  misc_feature (986)..(986): n is a, c, g, or t
  misc_feature (1013)..(1013): n is a, c, g, or t
  misc_feature (1046)..(1046): n is a, c, g, or t
  misc_feature (1097)..(1097): n is a, c, g, or t
ggctgatccggcccaactgcggcgtcatcccggctataagcgcacggcctcggcgaccctctccgacccggccgccgccgccatgcagccctccagccttctgccgctcgccctctgcctgctggctgcacccgcctccgcgctcgtcaggatcccgctgcacaagttcacgtccatccgccggaccatgtcggaggttgggggctctgtggaggacctgattgccaaaggccccgtctcaaagtactcccaggcggtgccagccgtgaccgaggggcccattcccgaggtgctcaagaactacatggacgcccagtactacggggagattggcatcgggacgcccccccagtgctgggcgcccattcccgaggtgctcaagaactacatggacgcccagtactacggggagattggcatcgggacgcccccccagtgcttcacaatcgtcttcgacacgggctcctccaacctgtgggtcccctccatccactgcaaactgctggacatcgcttgctggatccaccacaagtacaacagcgacaagtccagcacctacgtgaagaatggtacctcgtttgacatccactatggctcgggcagcctctccgggtacctgagccaggacactgtgtcggtgccctgccagtcagcgtcgtcagcctctgccctgggcggtgtcaaantggagaggcaggtctttggggaggccaccaagcagccaggcatcaccttcatcgcagncaagttcgatggcatcctgggcatggcctacccccgcatctncgtcaacaacntgttgcccgttttcgacaacttgttgcagcagaagntggtggaccagaacnttttttccttttacctgagcagggacccagatgcgcacntggngggtgagntgntgttgggtggcacagattccaagtnttacaagggttttntttcntacntgaatttcacccgcaaggcctactggcaggtccacntggaccaggtggaggtggccagcgggntgaccctgtgcaaggagggctgtgaggccattntggacacaggcacttccctcatggtgggcccggtggatgaggtgcgcgagntgcagaaggccatcggggccgtgccg

SEQ ID NO: 636960 - DNA, 278 bp, Homo sapiens
  misc_feature (157)..(157): n is a, c, g, or t
  misc_feature (177)..(177): n is a, c, g, or t
  misc_feature (180)..(180): n is a, c, g, or t
  misc_feature (196)..(196): n is a, c, g, or t
  misc_feature (198)..(198): n is a, c, g, or t
  misc_feature (226)..(226): n is a, c, g, or t
  misc_feature (230)..(230): n is a, c, g, or t
gctggagacgccacggtgtgcggacggtgagccgtctgaccccttctcgacgacggtcccgacccactcgtcggtggcgcgatgaagcgggcgacgtcagcgacgaaggacgctggtacaccgtgccgggcgagtcgtcctgcagcacccgcccctnaccgagcaccagcagacggntgncaggctcatcgcctcntnctgatcgtgcgtgacgtagacagcggtnaagngaccttctcgtcagcgccaggagctcatcgcgcaactggtacggcggg

SEQ ID NO: 636961 - DNA, 374 bp, Homo sapiens
tgatctaccggatctctcggcatggctttggggagcggaccacagatgtagcgaggggactccacaattcacttcaactttgcaggtgttcgaatttttttttttcccgagatgaagtcttgcccctgttgcccaggctgcagtgcaatggtacaatcttggatcactacaacctctgcctaccaggttcaagcgattctcctgcctcagcctcccaagtagcctggattacaggcatgcaccaccaagcccagctaatttttgtattttcagtagagacaaggtttctgcatgttggccaggctggtctcaaactcctgacctcaggtgatgcacctgccttggcctcccaaagttctgggattacatacaga

SEQ ID NO: 636962 - DNA, 268 bp, Homo sapiens
ttgtctgatacatggcttggaaatacttttcccaatctgtaggttgccttttttcacattttattttatttatttattgagatggagtcttgctctgtcgcccatgctggagtgtggtggcacaatcttggctcactgcaacctctgcctcccaggttcaagtgattctactgcctcagcctcccaagtagctgggactacaggcatgggccaccaagctcagctaattttttttttttttttttttggagatagacaaggggaaaca

SEQ ID NO: 636963 - DNA, 207 bp, Homo sapiens
  misc_feature (203)..(204): n is a, c, g, or t
caggcggaccttcaggctgattgaggcacccaccaccacgcacagctagttattgtctttttggtggagacggggtttcgccatgttgaccaggctggtctcaaactcctgactttaggtgatccacccctctcagcctgcgaaagtgttgggattacaatgtgtaatgccaccaatgcccagtcctggcaatcacagcctgnngaa

SEQ ID NO: 636964 - DNA, 746 bp, Homo sapiens
  misc_feature (38)..(40): n is a, c, g, or t
  misc_feature (42)..(43): n is a, c, g, or t
  misc_feature (53)..(53): n is a, c, g, or t
  misc_feature (57)..(61): n is a, c, g, or t
  misc_feature (67)..(67): n is a, c, g, or t
  misc_feature (74)..(75): n is a, c, g, or t
  misc_feature (84)..(86): n is a, c, g, or t
  misc_feature (90)..(90): n is a, c, g, or t
  misc_feature (93)..(93): n is a, c, g, or t
  misc_feature (102)..(102): n is a, c, g, or t
  misc_feature (113)..(113): n is a, c, g, or t
  misc_feature (120)..(120): n is a, c, g, or t
  misc_feature (127)..(127): n is a, c, g, or t
  misc_feature (141)..(141): n is a, c, g, or t
  misc_feature (180)..(180): n is a, c, g, or t
  misc_feature (219)..(220): n is a, c, g, or t
  misc_feature (228)..(228): n is a, c, g, or t
  misc_feature (253)..(253): n is a, c, g, or t
  misc_feature (262)..(262): n is a, c, g, or t
  misc_feature (277)..(277): n is a, c, g, or t
  misc_feature (301)..(301): n is a, c, g, or t
  misc_feature (311)..(311): n is a, c, g, or t
  misc_feature (331)..(331): n is a, c, g, or t
  misc_feature (336)..(336): n is a, c, g, or t
  misc_feature (358)..(358): n is a, c, g, or t
  misc_feature (378)..(378): n is a, c, g, or t
  misc_feature (380)..(380): n is a, c, g, or t
  misc_feature (383)..(383): n is a, c, g, or t
  misc_feature (395)..(395): n is a, c, g, or t
  misc_feature (406)..(406): n is a, c, g, or t
  misc_feature (408)..(408): n is a, c, g, or t
  misc_feature (418)..(418): n is a, c, g, or t
  misc_feature (437)..(437): n is a, c, g, or t
  misc_feature (445)..(445): n is a, c, g, or t
  misc_feature (468)..(468): n is a, c, g, or t
  misc_feature (471)..(472): n is a, c, g, or t
  misc_feature (474)..(474): n is a, c, g, or t
  misc_feature (482)..(482): n is a, c, g, or t
  misc_feature (493)..(493): n is a, c, g, or t
  misc_feature (502)..(502): n is a, c, g, or t
  misc_feature (514)..(514): n is a, c, g, or t
  misc_feature (521)..(523): n is a, c, g, or t
  misc_feature (553)..(553): n is a, c, g, or t
  misc_feature (557)..(557): n is a, c, g, or t
  misc_feature (571)..(571): n is a, c, g, or t
  misc_feature (661)..(661): n is a, c, g, or t
  misc_feature (735)..(735): n is a, c, g, or t
ccctgcacctttctttatcttggagcctctcccatctnnncnnccctcttccncccnnnnncacccncctaccnncccacttcnnncccnccnctcacactnccctccctccnttctctngtctccnccccactgcgcctncctccctcctggccttccttcccttccccgactttgcanatttctcttcccccatggcctccctcctccacttttccnncccctccnggcttggctctcccaggaggctacnactggagcnactggtcccgcaganccccgcgtcctcggtcgctgcgtncacgtccctntcgcgtccccgctcggcgcnacgcngcctcctctgggttcggcctcngcgcggtgcagcgcagtctnangcngcgggaaaagcncgaattaaatntntgaaatgganaaagaagcttatccttgtncgtgtganattggccacagatttgagtatgnagnncnaggcagtnaagttcaagtngagcacatnaaggcttatgtnaccaaannncccgttgatgcaggcaaagctgtgattgtnattnaagatatatttggntggcagttgcccaataccagatatatagctgacatgatctcaggaaatggatacacaaccattgttccagacttctttgtagggcaaganccttgggacccctctggcgactggtctatcttccctgagtggctgaaaacaagaaatgcccagaagatcgatanagagatcagtg

SEQ ID NO: 636965 - DNA, 232 bp, Homo sapiens
tggaccagcctgcctctgtgacgactgcagcaaacctccttgggtgttccaatgcccatcatctcccactttgacacctaaccctgactccttcaccaagaagacgggagtcagcagccaggagtacccgtggcacctctctctcttcgaggctccctgcttcccccttccctctttccaaggaaggggcaacctattctctctcaaagccgacccctatgccaattgcctg

SEQ ID NO: 636966 - DNA, 186 bp, Homo sapiens
  misc_feature (25)..(25): n is a, c, g, or t
  misc_feature (38)..(38): n is a, c, g, or t
  misc_feature (74)..(74): n is a, c, g, or t
  misc_feature (104)..(104): n is a, c, g, or t
  misc_feature (174)..(174): n is a, c, g, or t
aaatcataaaacgggcagaacaggntttggttagtttngaagaaaagaaagctctataaatataaatctatatncctgtatttttatttaataatttataaatnccaagttcatttgacttttatttttgtgtaatatgtaatgatcggtattaaaaacaataaataaagcccnaaagtttaatga

SEQ ID NO: 636967 - DNA, 801 bp, Homo sapiens
gacccacgcgtccgaaacaccaaatggtcggatgacgccggtgcagcgggggggcccgggggccctggtggccctgggatgggtgaaccgcggtgtgcttccgcggcaggtttcggccatgtgtgcatcctggtggtccggggtcgctgggcgtggaccgcgtgggccagagggcctgaaggcacgcaggagcatcgacggaggcaatggaccgaggataataggatgtggatagcccgtcaccaagttgggccgcattggatcaaggacatgaaagatcaagtcccttgtgatagatgaatctattcttcttctctcctgtcccattagacggaaatcatgaagacttcacttcgattttcttccgctagtgcgagggtccttcttctcaaacggaatcgaagggtatatttgatacgatttaatgcctaagtcgcatggagagccaatgacccctgtaagtccagggcgcagcgcaacccgagtgttatcaaggggcattttggttcgctatacgagggaacttacaaataggcacaaacgttccgtgtactcgagggtacgtgtaaacgttggcttaccgaaaggcaaggattggcacaaatcaggccaattccaagttgagtgcggcccattcccatttccatggcgcttcaaaatgcattcttcccaattacaggattcaacaccctgttgggcggccaaggtacaggggctcatcatgggcgggcgaaaccaaaatgaaatcttgggcaaaggaccaccacatcagcttgttccggcatatggtcaaagtgggga

SEQ ID NO: 636968 - DNA, 855 bp, Homo sapiens
  misc_feature (42)..(42): n is a, c, g, or t
  misc_feature (70)..(70): n is a, c, g, or t
  misc_feature (72)..(72): n is a, c, g, or t
  misc_feature (75)..(76): n is a, c, g, or t
  misc_feature (78)..(78): n is a, c, g, or t
  misc_feature (86)..(88): n is a, c, g, or t
  misc_feature (90)..(91): n is a, c, g, or t
  misc_feature (98)..(98): n is a, c, g, or t
  misc_feature (173)..(173): n is a, c, g, or t
  misc_feature (177)..(177): n is a, c, g, or t
  misc_feature (193)..(193): n is a, c, g, or t
  misc_feature (196)..(197): n is a, c, g, or t
  misc_feature (232)..(232): n is a, c, g, or t
  misc_feature (236)..(240): n is a, c, g, or t
  misc_feature (285)..(285): n is a, c, g, or t
  misc_feature (300)..(300): n is a, c, g, or t
  misc_feature (475)..(475): n is a, c, g, or t
ttacattttattataagtaaaatcttatgtatccctcacatncacacatccattcattctggtctatgtncnttnncntacatacnnntnnctttttnttcatacagacatattcatttttactcacaaagtggctgcatgcataggcataaaattgctaggtccaaagcganaatnattttttgttctattnaanngtcctattatcttagaaaaaaaaaccaaaacaatntttnnnnnttttctgaggaaattactacctcaaaaaaatgttctcaagatgantttgagatctaagcntactaaactgcttttgcaaaacagctccctgcagtccaaggtgacttgtgcaaatagaaggaatcaaatgaggctggttcctgtacttccttaaacaaggaggtgggatgctcgcaggtgcccaggggcactcccatcatgccaggtactgctgcagtgccatctttgccttgtnacaaaggtttgaatctggtgactgactcagtttgtgtagaatatctacgatgcccatgtctcgtaatttatcctggcgttcttgtgaaccttcctcttcattccatatgaggtttgatatacaaaacatggctgcaagctgcagtttaacatgtgaatggcccatgtaatacttgattttctgtaggatatcatcattggtcataataagatcttttgctgttgtcccatccgctatgttggctaagatgcacagtgtctgctctttgacctcaatgttatgttccccttctagaataagagtgacggcttgcataatttgctttccatgagtactcattattttatctatatgaggacgagtggagaggagatttctaa

SEQ ID NO: 636969 - DNA, 644 bp, Homo sapiens
  misc_feature (236)..(236): n is a, c, g, or t
ggaacatataaaggctatgtttacctacttaagaaattgcttttagccagtttagaaatgtctgcttactctttgtttttaaatttaaaaaattcttcagagatgggatctcgttctgtcaaccaggccggagtgcagtgccaccgtcacagttcactggctacctcagctacttgggaggctgaggcaggagaatcgcttgaactcctggcctcaggtgatcctcctgccttggnctccaaaagtgctgtgattgcaagtgtgagccactgagcctggttgaaatgtccacttacttttaacaaatgaattgtattttaaggaagagtttgcaatgcttaaataattttcatcagtttacttaaaaagtactaaagccttttttttttttttaagacagagtctcgatctgttcacccaggcaggattgcaggtggggtgatctcagctactcgggaggctgagcgcattgagaagtcgttgtgaacccaggagatggacggttgcagtgagctgagatctgtgccatggcacctccagctctgggcaacagagcgagaactctggctcccaaaaatacaaaattaacaattgattgtcctatgattgacggttaaatgggtcctcaaatggagctattccac

SEQ ID NO: 636970 - DNA, 426 bp, Homo sapiens
tacttagtgatctagtggattatagctatgtgctgctgatggaacacagactgatattttggatagattcgtgactgagacgaggttgcacggtgttggcaggctggtatcaaactcctgacctcaagagatccactcgccttgccctcccagggtgctgggattgcaggcttgagccaccacgcccggctaaaacattgcaaatttaaatgagagttttaaaaattaaactactgactgccctgtctctgttttagtactgtacctcctcagtccttcacctttgcacctgtctgccacttagtttggttatatcgtcattaccttgaatttgctctgtctagacttccactttaacgttttctacacggggagacaagtgttcaaatttctacaatatgttttccaggacacttcacttccaag

SEQ ID NO: 636971 - DNA, 180 bp, Homo sapiens
cgacgtattgctgatatcggtgatgcccaggtagcggccggttgcgaccgacacgacggcgtatttgtaattgccctcgatgatctcggtcagcatgggccgggtcgtgatcggctggttgctgcccgcctggcccaagagcatgctttccttgccgctgggcgccaggttgtcgtcaaa

SEQ ID NO: 636972 - DNA, 236 bp, Homo sapiens
  misc_feature (68)..(68): n is a, c, g, or t
  misc_feature (108)..(108): n is a, c, g, or t
  misc_feature (130)..(131): n is a, c, g, or t
aaaataaaactaaaaaaataaaataaaagagctgaaggtggtctagagttaggtcttgtgcagaggcngcaggctctggagacttgaagaaactcataggggtcgtgnggtgacgtctggctgctccccnnacactcagtgctgagaagggcttcccagtgtggttgctggtccctcttcggaggctgttggacatgggagctgatggttggacgactggtctgagaggccgcctg

SEQ ID NO: 636973 - DNA, 728 bp, Homo sapiens
  misc_feature (118)..(118): n is a, c, g, or t
  misc_feature (162)..(162): n is a, c, g, or t
  misc_feature (298)..(298): n is a, c, g, or t
  misc_feature (317)..(317): n is a, c, g, or t
  misc_feature (358)..(358): n is a, c, g, or t
  misc_feature (361)..(362): n is a, c, g, or t
  misc_feature (396)..(396): n is a, c, g, or t
  misc_feature (431)..(431): n is a, c, g, or t
  misc_feature (480)..(480): n is a, c, g, or t
  misc_feature (504)..(504): n is a, c, g, or t
  misc_feature (513)..(513): n is a, c, g, or t
  misc_feature (542)..(542): n is a, c, g, or t
  misc_feature (544)..(544): n is a, c, g, or t
  misc_feature (625)..(625): n is a, c, g, or t
  misc_feature (632)..(632): n is a, c, g, or t
gtgctaactgattaaatattctaagatgaccttctctggtgtgtgtgatgataattaaaaggcattcagaactgtgtggaccagactgaacctctgcactctagattttttttttttngaagcctctacaaaggataattaaaatttacaccatgactcttngtcctggggtgcactgtctgtaagccggtggagttatttcccaaaatcctggtccttcccagcttgaggaagtctgcaggactgaggggggggacctgtgctttttttttggttttttggagatggagtctctgtngcccaggctggagtgcagnggggcgatctcggctcactgcaccctgacctccgtgggttncanntgattctccgtgcctcaggcctcccaagttagcngggatttacaggcgtgtgccacttgtcaggcctcntgagcccaagccaagccattcgaattcccctggtgtgcctttgcaattnttacacccagatggcctgaagtanctgaagaantcacaaaagaggtgaaagggccctgcccngnctttaactgatgactttccaccattgtgattggtccctgccccactttaactgagtgattaccctgcaaatttcttctccnggctcanaagcaccccattgagcacttggggaccccaatcctgcccgcccttgactgtaatttccattacttccaatatataaaaaaggccaccttattcctt

SEQ ID NO: 636974 - DNA, 553 bp, Homo sapiens
  misc_feature (2)..(2): n is a, c, g, or t
  misc_feature (11)..(11): n is a, c, g, or t
  misc_feature (201)..(201): n is a, c, g, or t
  misc_feature (273)..(273): n is a, c, g, or t
  misc_feature (280)..(280): n is a, c, g, or t
  misc_feature (293)..(293): n is a, c, g, or t
  misc_feature (318)..(318): n is a, c, g, or t
  misc_feature (373)..(373): n is a, c, g, or t
  misc_feature (458)..(458): n is a, c, g, or t
  misc_feature (483)..(483): n is a, c, g, or t
  misc_feature (501)..(501): n is a, c, g, or t
  misc_feature (521)..(521): n is a, c, g, or t
  misc_feature (544)..(544): n is a, c, g, or t
cnggcggcggntcaaaggtcaaggggctgctccaagggcaccgcgtgggaactgcgcaccggggcccctggacgccctcctcttctctgagccactcaatcccctctactaaatcggctttgggagcaaggtccagctgtctgccgaggcgaggagcgccacacacgtaatctccctgcaggagcttgagctggggcagtngcttgtttcctctgtccttgggaattggcagtggccccccgggaaggggttttgttaaagctgtcaggtttngcccctnacttaattcgtancaagggcaagctgccgtcttttggntttgaagggtccgtttgctctacctccaagggtgaattctgtggtcaactcacancatgtcactcggctttttttcgcatggcgggtgaccagtaattgctgtctaacttggctgacaaatgattagctgtgttctctcnaaaggtcagaattggttcttggaanaaactgggccaaaggggnacttacacagaaagcgcgantttggttgaatccgtgcttggangtttttaaa

SEQ ID NO: 636975 - DNA, 212 bp, Homo sapiens
  misc_feature (166)..(166): n is a, c, g, or t
tccggaccttacccgtacgccaaatgatgtgccttctccatatgaagtcataggttttcctaccatatacttctctccagccaacgagaagctaaatccaaagaaatatgaaggtggccgtgaattaagtgattttattagctatctacaaaggagaagctacganaacccccctgtaattcaagaagaaaaacccaagaagaagaagaagg

SEQ ID NO: 636976 - DNA, 1377 bp, Homo sapiens
  misc_feature (108)..(108): n is a, c, g, or t
gctggtccgagctctaactgatagcagcatgatctacgtgtagtgtcttaacgtgtcccatttctttatgtgcggtgtcatgcgcgggtctctgggatttgtttttcnccctgtacgtcatgcgccctgctggtcccgggtatccgcccgttcgtgttccactctccgctggagtcccccgctggtggttgtccccgatttttctttgtggggccacaaaacccattgggggtcccaccacgccagatgcgccgccaaggtgccgcgatgtctccttttcgcgggaagcctttgtgtttatatggcacaaggacaccctgatgtgcacaggcatcttccgaggcactcttgggaccccactcccgctttggaagaacctgtccgtcatgtatatatcccgggggaattttgggcttttgggtttacacccaactgagggccttccctgaggactcacggggacaattgttgcctgcgccacatatagtgggcccagactctgtgcccgtggcttgggaccattggcccccccatggtggaagtcacctgtgggcccagccccaaggaacactgtggttcttcgggctctcgcaggaagagcctcgccattgtgtcccgagcgtcttttagggttattcaccccgcgtgagagtgtgtgcccggggcacaacccaagtggaaaatccctgagtggaattgtcgccgcctgattcacagactcggagacacaaagtgggaagccccgcgaagatccacccctgtctgagacacatgctcaaacagtttcgccccttttgtccctttgggactggtccacataccccccacaggttgttccgacccaatggcagcagcacttttatcacaccccctgagaagtgccttgagatatttcacccagagaggaaacacttctgcaccattttccgctttcctcggagagggttgtcccgccacatgtgtgccacgctgtctcgttctgcacagaattggctaacccacacactgttgcactccacgtatccccactttctaatcactcacacacgggtaccacaacacgagagtcctggccctctgttctgtggagagaccggagttatcacccttcccaccttgctgaaaaaggtcaggcctttttggctgagtccactctgcctttgtggctgctgcccccgtggctgctgccacccaccacagctgcgttcctgcgtgcgtgcgtgcacagccccacgctataggttgaagcccaggaagagtcgcgaggaatcggacgaggatatgggatttggtctctttgactaatcacccaaaagccacccacttagcccgttttatttgccaaaacaaggaaattaaaggcttactttcctttta

SEQ ID NO: 636977 - DNA, 314 bp, Homo sapiens
atgctctgttaacacacacacaacccacacacatacacacacaaacacacacatatatacacacaacatatatatacacacatatctacacatccacaccatatatacacaccccatacacacacatatatacacacaacatatatatacacacatatatacacatccaaaccatatatacacacaccatgcacccacatatatacacacaccatctatatgcccatatatatctacacccacaccgatatacacacacatacactatatataaacgcccaatatatatagagacacagtatacacacccaaag

SEQ ID NO: 636978 - DNA, 380 bp, Homo sapiens
ttctgtaacgcccgaacctagtatcattttgaaatttctgtagtttatgtttttagaagatagcctcccaggtcgaggtatttacagtttactgccactgtcaattatctgtactttgatcggaaccggagctgctgtcgagccacacatgctggaatatcagttcgtcttgcagcaccaagtatctggctcttatcaggcacgagtagacctacttcatgatcggattcttgggcgggctctggctcgtgctccagctagctctctgtctctatctctctctctctctctctctctctctctctctctctctctctctctctctctctctatctctctctctctctctctctctctctctctctatctctctctctctc

SEQ ID NO: 636979 - DNA, 1006 bp, Homo sapiens
cagcagctggtcttatagaccattccagggggccgtttgcaccaatgtataagtgcaatggtgtgtgacccaacagagagtttcagggagttgtcacaggattgcaacctggggctgttacgggaggttggaggtgatctgcaaaactggggcgaaatataaaggagcctgattcaggaggtagcctaggacggtctttcaacctgaaaggagggtgtgcacgaacttctatagaagcgtccttttccaggaaaaaatgttttccctaagcagtattcaaggaaatgaattcagaagatcatcaataaggaggatttcaagaggatgacggtggacagccccggaagaaacgcctcaaaagcattgaagacgccagttgcttaaataatatgcagcaccaatagcttgtgctggtttttagatttttccttgtctttcaaaaaaacattgtgtcagtaatttaacatcaacctagcaaaaagaagagtttgtgactattctcatctctcggcttctttggacgtttacttagactttgaatttccattaagtagcacaaatgtgtagtgttaaacactcttaatcactaagaaagaaaggaaagaaggagatgaatagaagaaagaaaatggaaagaaggaaaaaaggaggatagtttataaaggatggatagtaaagatattgcaattgaaaatatatagacattcttcccacttcttggatttattaaaccatcagttctggagtgatagctactgtagaaaggaaatagactttgtatgaactctttaagttgaaaagtaaaaatatatgtggtttggatgtgtgctttaattcagctttagaaattaataccactacccgtgaattatatggcctgacaatatgaattaggtgtactgtactgaagtacagtacgtccacacaccatgggtggtaacaagagttccatcccaggaggccaaacgtgcaacagaaggtaggttagatatacttctcggagaca

SEQ ID NO: 636980 - DNA, 211 bp, Homo sapiens
tattagacgtatcacggcatgtgtctttgtcccatgaaagtcgcgagacactacattgtagtcgtccacagacaatcggggctgctagtcgcatacccggagtaacagctgccgccatcatcaatctgctgcgattagtgaagaccactcaatgaagactgtcggctataaatgaatcatccaagactgatcaatactcatgtacagccag

SEQ ID NO: 636981 - DNA, 364 bp, Homo sapiens
cattctgaaaatgtagatgatgttccaaagacatcatgtgatatatgaatgttggatgccattgcatctatctctctttccctgttgcctgtgcaagatgctattaaatttacagattatttcctaataattatggtagtctaaattatatattgctttgcttatcttttgtttttatttacagcacaaaaactgggactcactgtcagatgcaccccttttgttaaatttaaaagttcaactgactcatgaaaattttgcccaccttttcttcttctagcatattgagtcttccacatcaagcatctccagtgtcacgcaccccaagcctacctgctgtagacacaagctatattaacacatc

SEQ ID NO: 636982 - DNA, 176 bp, Homo sapiens
ggcatttttacaatactttttattttactttaatcaaaactaacagctttatgaaaatgtttaattagccaaacgtctccaattctttatcagggtttaaaaaatattttatgatttaaacttttcccacattttttgcctaatgattccttactacattgttttatgaataacct

SEQ ID NO: 636983 - DNA, 339 bp, Homo sapiens
gttgtaccctatatgctttggagccctaacagtgctggtgctgcagtggctcacgctgtaatcccagcactttgtggagtgcctgatgtgggtggatcacaaggtcaggtgatcgagaccatcctggctaacacggtgaaaccctgtctctactaaaaatacaaaaaattagccgggtgtggtgtgcgggtgcccgtaatcccagctactctgtgtgatgtgcttgatgtgcagtgatgaatggcgtgaaccctgggaggttggagtgtttgcatgtgatgcctgagatttgctgccactgccactccatgccatgggctgacatgagctgatgacttg

SEQ ID NO: 636984 - DNA, 208 bp, Homo sapiens
aagttcgcatttaaatgctactcatcgtgccaatatcactcggcacaaaaaattgcccattaaaaataaatatgatacgcatgagtataattagagcagtcacgcccagtccatcacgttctagttcacgccaaaatttttcaagattttcgcaaacgctatttatcgttgccaagcgcctccttatttcacacgcatacgcggatca

SEQ ID NO: 636985 - DNA, 466 bp, Homo sapiens
tcctctatactcctgggcactggttgacagtactgaggcttaaggcagctggactctcttgctggtgacctggctggatggagtgtgtgtgcagtccaacatgctgctgggaccaatacacattccgttgtacttgcggatgacagccataggaagcagtcgatccttctcacgcagtctacgcgcagcttggcctcagtgagacgcaggtggcgaatgctgcctattcataccttctttaccatcttacacttccatacagagccaggatagtcaccgcctgctacatattcagctagcgcaggagctacctcctaccgaggtagcctgacgacaaggagtacgaatggtacggagccagtatcagggaagcccacatttcccctagccaccaccaactgggggcccatacgggcacacggcagaccgtccagacctgacggtagacagacctgtaactccgacg

SEQ ID NO: 636986 - DNA, 177 bp, Homo sapiens
agagtagcagcctggaacaaatgtagtcaaaagcctgtactctgtataaacataccacaattagctaggagacatggaagtcacatgcctgtaatcccagtatactcacggaggctagaggcaggagaatctcttgacacccaggcaggcagacggttgcagtagcagtagagactc

SEQ ID NO: 636987 - DNA, 198 bp, Homo sapiens
ggttcaccatgttgcccaggctggtcttgaactccttgggctcaagcagtcctcctgcctcggtctcccgagtagcttggactacagtgctcaataccacaccccactaatgttgcctttttttcctttttttttttttttgtgtgaaaaaatgaaatcatttaattgtggccaaggcccttctacaaacccgtggcc

SEQ ID NO: 636988 - DNA, 206 bp, Homo sapiens
cctgatcgggcttcatcgtcttggtgtggggacgtttcatgccttagcggtttgcactgagaatacagatcgaacccacaggaagcaaaggggatttccagaggcatctcccacagagcgagcctttgctcgattatctctattgccgaaaccatcactgcgaccttgttgtcgatgacactttgtttgcgtgaatcattctcatc

SEQ ID NO: 636989 - DNA, 495 bp, Homo sapiens
ggggaaggccttacctgcaccctgaagtttttcgttttcgccatggcttcgcatccgtgggcgcttaagctgcgcctcggcgctacttctttctttcttggcctgggaggcttatccaacgtacttctatagattcagagtttactccacggcattcccagcagagacatggaaagtcaaatttccttgatctgctatgggcctgggtctcatccatccgacattgaagttgacctaccatgaagaatggagagggaaatgcaaaagtggaccattcagacttgcttttaggaaggactgggccttctatctcttgcactacactggatccacccccactgaaaaagatgaatttggctgccgggtgaaccatgtgactttgtcccaggcccatgaagcttagtggggccgagacatgcaaggcgcattcatgggggttcggaggggccccattgggatgggatgaaaacccaaacctgcttgttttgtttttta

SEQ ID NO: 636990 - DNA, 156 bp, Homo sapiens
  misc_feature (5)..(5): n is a, c, g, or t
ccgcnacccaacaaaccaaggcacatcataatcaaattgctaaattttgtataaaaggaaaactgaagcgacagagagggtttggcacatcatatatagaagcataaagaaaagaatgacagctgggcacagtggctcatgcctgtaattccagtg

SEQ ID NO: 636991 - DNA, 1212 bp, Homo sapiens
tggaggagtgaaaaggggctgggacttaagataggacaatggtggagaaggggggggaaagaatggcaaaaggatatagtatcccttatggatggtacttgtgcaacagggaactcttacttcatatacccttggcagtaatcatccagggagggaagaaaacacctgggactccttgattgaaggcgctggatcttggtgttcggtggcactgggggccctgccaggcatatagtggaaggtcgaatgtcttctccctcagaaaacacatctgggtcccttgctggtcccagtaaaggggcatacgctttctcacaggcccctaaatctttacacaatctccaggtggggcgcacttaagtatgggcgaaaacgaatggcgggtcaacatcaccaacgcggtatcgcgccggcaccacccacatctcacggcggtcgggtggtcacctggtggcgccaaacggggcgatgtggggcggccccctctctgggggcagagaacctccccgtgcatagacaggcggtgtgctccacgccccgtgccctgttgaccaactgtggcacgcgcaccactctaccctgcgcacactggtgggggcgacgccaaggcgggctacagtgcgtgccctctccacttacttgaacacacacacacacgccgtcgatgctggtacaaccaccccccaattctggggaacgaaagggcccacaccctgtgggtcacaccatatacccccttttcaccacattaccggcgcatacggccaatacctcgcggcggcgcttccggccgcggcccaaacatctttgagctgctaccaacgaacctggtgcgctgaaacccatctcgacagaagtatcacgcgcctctacaccacactttcttcaaaaccaccgaacacaccattcgcagggggtttctcaactgttctattacacattactaggggggttgcgtactaacacacatatcatttgctcgccagtggtccaacgacaccataatgtatgatacggaattttcgcccccccccacaccacagtggacagggttttgccttccccaaataattgtgagtgaatagcgagtgggacaccgattaccgccccccaaagacgtctttatagcttcccacgtggagagtattgacagccccctgtaaacattttgtggaagaggctgtcggcatatgcgaagtttttcaaaacccg

SEQ ID NO: 636992 - DNA, 441 bp, Homo sapiens
ctcaacttggccatcagaatggaccaattaaagcaattggcaggaaggacccttgctcgggcccgataaccctggccatgttaggactggattatggaaacccgaaactcttgtgtaaccttgctgggcttcctaggcagaaattcatataaactgtgatactccccttccctgaagctatgagcctttaaaaactgttttcagcccccctaggggttccaaaaaatttggaataaactttgaagttttgggttttacttatttttatcccccaaatggtgctattttttagggtttgaaacaaaatctttttaaaaccttgttttagttgtcaaagccccccccggcccttttgggatgtgaaaaggaatttcttggaatctgtaatttgggcttaatatttccggcttggttttaatataataaataggggtttgttta

SEQ ID NO: 636993 - DNA, 218 bp, Homo sapiens
ctctgtctatctgtctctcctctctgtttggtggggcgtagagctgatccacagcacagatctgtttcgtgccttgcaagaccctcacccaagcttggcagtcgagctcgtgtatcctggggctcccttcatctccaggaagtcccctccccggtccctaccaccgcccgctgtgctgagcccctaccccactatagagccgccctacagatcggccg

SEQ ID NO: 636994 - DNA, 638 bp, Homo sapiens
tctagttagcttaaagaaaattggctggcactcaaatattctttaaggactgaatggtcaaattaaccacatgatcctaatagcaaataaaaagtagaacgtatttgacccttaacattggctgctgttcctttaggttatcaccccagtatgagccccttacctcggttgctagagctggttctgggcttcagtgtctgtttgcactcccccaaccaggcttgcccctgccccgcaggtgccagcagcagcagagggggcaccttttccctcaagtgccaggttctgacagcccaagcttcctctgctggcacctcccaaacccagacgggtggtactgttttgcagcagtatctctctgttctcatattgtgccttcttgatgttttagtccaacatcgattgtatcaacttcctatatagattatctgtgttgcctagtattgggtatcaatccaaaggaaattaaatcagaatctcaaagagatcatctgcaacttccacactcattgcagttatctcacaatagccaatatattggaacaacttacatgtcctagcgaaatattggcatatattaccacaatgaatatattcagccatgaataagaatccgccagtcggagaatgcttgaacc

SEQ ID NO: 636995 - DNA, 740 bp, Homo sapiens
ctccgtcacgcaccatctcccctcccccgtggcgaaggacccatcgagatcaatggaggacttatcaaatacatcaacacggtggtgtcctgcctggtgttcgtgctggggatcatcgggaactccacacgttctgagaattatctagaagaacaagtgcagtgccgaaacggtcccaatatctgtgatcgccagcttggctctgggagaccgtgtgcacatcagtcattgagcatccctatcaagtgtctagcaagcgtgctggtcagaggactggccagttggagctgagatgtgtaagctggtgcctttcatagccagaaagcctccgtgggaatctaactgtgctgagtctatgtgctctgagtattgatcagatatcgaggctgttgcttacttgtgagtaggaatggaaaggaatcggggttccataaatggatagtagtagaaatcgttatgattggatggtctctgtggttctggctgtccctgaaagccataggtttgatataattacgatggagtactaagggaagtcatctgcgaatctgctgtgcattcatccgcgttcagaagacagctttcatgcagttttacaagacaggaaagatggtggtgtgcagtttctatatctgcgttggcaatggcagtcagtggatgtgttatagatgaatgactgggaaatgttgagaaagataagtggctggagatgggtttaaatgatcactagagcagagacg

SEQ ID NO: 636996 - DNA, 228 bp, Homo sapiens
ggtttctggaaagttgtagcctactggaatgaaagactcaccaaatcagtttgtggtcttcctgaggcaagtcagtcagcttcctactctgggtatcttccatggctaccagctgggcacagaaccaagcactgactcaacaacctccaggtctggttccttatcaggctttttgggaaccctacaggccatagtacattatccattctggccatttcagatttcttc

SEQ ID NO: 636997 - DNA, 493 bp, Homo sapiens
gatcgctacagcaggatcgcttctcctgctatacttccacacaactggactataatagccatagatttcacagactgtttctttacgatgcctttagctaagcaagactgtcacaggtcgcatttacaatttctgcagtagacaaaatgcagccagctaagatattctcatagtataacagatgggtctcagtcaatggtccaagcttcttcattctggctatgaaaagtaacagtttatccagcacgcccaatcactttcagctcaaaaagagcttgtagctgtaattgaggtcattgcactgcttttgatcatgcctctcacatgggatttctgcatcttcatcatgtggttccattcacacaccagttaattaaaaatgctcagttattatttcatacagataaacaactgcatgacacaaaacaaaaccagggggagaactcggcattacgggccagcccatacaccactacctctcacattattaact

SEQ ID NO: 636998 - DNA, 856 bp, Homo sapiens
  misc_feature (26)..(26): n is a, c, g, or t
  misc_feature (28)..(28): n is a, c, g, or t
  misc_feature (48)..(48): n is a, c, g, or t
  misc_feature (50)..(50): n is a, c, g, or t
  misc_feature (52)..(52): n is a, c, g, or t
  misc_feature (55)..(55): n is a, c, g, or t
  misc_feature (58)..(58): n is a, c, g, or t
  misc_feature (64)..(64): n is a, c, g, or t
  misc_feature (66)..(67): n is a, c, g, or t
  misc_feature (74)..(74): n is a, c, g, or t
  misc_feature (76)..(76): n is a, c, g, or t
  misc_feature (78)..(78): n is a, c, g, or t
  misc_feature (80)..(80): n is a, c, g, or t
  misc_feature (84)..(84): n is a, c, g, or t
  misc_feature (88)..(88): n is a, c, g, or t
  misc_feature (93)..(93): n is a, c, g, or t
  misc_feature (109)..(109): n is a, c, g, or t
  misc_feature (114)..(114): n is a, c, g, or t
  misc_feature (116)..(116): n is a, c, g, or t
  misc_feature (118)..(118): n is a, c, g, or t
  misc_feature (125)..(125): n is a, c, g, or t
  misc_feature (129)..(129): n is a, c, g, or t
  misc_feature (132)..(132): n is a, c, g, or t
  misc_feature (142)..(143): n is a, c, g, or t
  misc_feature (156)..(156): n is a, c, g, or t
  misc_feature (173)..(173): n is a, c, g, or t
  misc_feature (187)..(187): n is a, c, g, or t
  misc_feature (198)..(198): n is a, c, g, or t
  misc_feature (208)..(208): n is a, c, g, or t
  misc_feature (228)..(228): n is a, c, g, or t
  misc_feature (253)..(253): n is a, c, g, or t
  misc_feature (271)..(271): n is a, c, g, or t
  misc_feature (286)..(286): n is a, c, g, or t
  misc_feature (327)..(327): n is a, c, g, or t
  misc_feature (352)..(352): n is a, c, g, or t
  misc_feature (356)..(356): n is a, c, g, or t
  misc_feature (359)..(359): n is a, c, g, or t
  misc_feature (381)..(381): n is a, c, g, or t
  misc_feature (389)..(389): n is a, c, g, or t
  misc_feature (403)..(403): n is a, c, g, or t
  misc_feature (414)..(414): n is a, c, g, or t
  misc_feature (486)..(486): n is a, c, g, or t
  misc_feature (503)..(503): n is a, c, g, or t
  misc_feature (506)..(507): n is a, c, g, or t
  misc_feature (514)..(514): n is a, c, g, or t
  misc_feature (516)..(516): n is a, c, g, or t
  misc_feature (518)..(518): n is a, c, g, or t
  misc_feature (533)..(533): n is a, c, g, or t
  misc_feature (599)..(599): n is a, c, g, or t
  misc_feature (662)..(662): n is a, c, g, or t
  misc_feature (689)..(689): n is a, c, g, or t
  misc_feature (710)..(710): n is a, c, g, or t
  misc_feature (770)..(770): n is a, c, g, or t
  misc_feature (783)..(783): n is a, c, g, or t
  misc_feature (855)..(855): n is a, c, g, or t
ggtgtcgtgaaaactacccctaaaancnaaaatgggaaaggaaaaaantnanatnaanattgtngnnattgganangnanattngggnaagtncaccactactggccanctgancnanaaatccngtgncancgacaaaacnnccatctgaaaaanttgagaaggaggctgcngacatgggaaaggnccccttccagnatccctccgnccttggctcccctgcccccnccccgcccccgcggtatcccccttnccccccccctgtggccancccccccccgccccncccctgcccccccccttcctcccccccgccccacccccttncccccccccctcctccccggccccncccnccnccccccgtcccgtcccgcttcncccccccngcgccccgccgccncccccccccgncccccccccccctggcccgccccgcccccctcccccccccgcctcccccctccgcgcccccccccccccccntcccggcctcccccccnccnntcccacngnanccacccaacacccanaagcgctctgcggcccttgttccggccgtccgcccttctcttccgccccttggctctccccccgcncccgtcgcctttgtgcccctttctggttggcctggtgcgcccctgctggcgccccgtgctccnctgccttggttcccgggctggcccgtnccccgtccggctggccctgcncgtggccccccgctgcttgcggctctggcgtgcctcctccccccccctcgtccccctgcnccgcccttgcgcntgcctctcccggctgtctccccccttggtggtcttggtcctgttcctgttggtcgcgtggcgcttggtgttnt

SEQ ID NO: 636999 - DNA, 280 bp, Homo sapiens
gcagagaccctgtctcgacttatcgccagcattgtactctatcacacgcggatatctaccttgtctcaagatagacaacgcactgggaacatttcttcgatcccaaggttacccagatcaaaccagagcaggaaagctgatgcaagctacaggacaggccctctgctatttactacccagcaaaggttggactatacacacatcctttgtgtcgatttcaccaagaagtggagacttaacggaatcaggccatctcaaatacttagcttccaaagtatcc

SEQ ID NO: 637000 - DNA, 150 bp, Homo sapiens
cgatactcagcttcttagtagtatgatttaccttttgtgatgcctgcatgtatacagcacctctgctgggccctgtggagtgtgctagtgagcagctggtgccttgtgcccatgctcaataccttctataagatgtccagatgaatgcgt

SEQ ID NO: 637001 - DNA, 1277 bp, Homo sapiens
tgccagacctgacctgccagcatccgggcgtggggtgaaatctcgtatgattcctagtcctctcgatatggcacctccgcatcagatctattgccagaggcttaccgcaggcccagcctgtcctaggctcttctaagctcactgcctgacttcacgggaggatccggacccccgcaacggtcaaccctgcggagctgggcagcaatatcgcacggatgacatgccactcccctggagctcccgccagctagctgccacgaacagctgcgagcagaacgacttgcctacactgaccaaatacgccctaaactcacgcagctatcctcgccaactccttggagcccctgcgcctcgagcttcacggcaccctgctcagccctctcctcgctcctcggccccctcagcgccggcactgcacacgccccacgccaccctcacacggcacccacacccccgcgctaccgcaccgctgctcgcaacaccctcccgcgcccgcgcgaaccacgcgctcgcacctctccacactctcgcgacccctcgcatcccctcacgccacgctcatgcgctaccacaccggcacaccaacacaccaaccacaccaaaccacacccctgaccccactgctcgctcccatccaaccaacccctggcgaacacatccacaactgcctcgtgctatccctcgcctgccctgggccccccccacccgcaccactaccagcgcacccctaactccgccctaacctgccccccagtcgccccgccaccaccccaccccccgacccccgcgccccccctcaccaccgcaccctcccccctgcacacatgactcctgctcccccaactggcctcccatgcaaccacacactcccacccccgcaagcccccacctcacacgccccatggcgccccaacaccacccgccaaccatgcggaatacgaacccccgaacctccccgccaagcccacgccgccgcacgccccgcaactcggcccacacccggccccatcgaacccaccaccccgcgcgactcccaagggactacccccccacaagcccaacaggaccattcacgcccccaaaacacagcagcagcccctctcaccccactctgggcaaccacccaggccagcacgcaagcacctccccgaccacgacccacaccccgacccccacacccaggccgccccccgaaccgccgcccacccaacgcacacccccaggtaaacccaacacctgcgccacgcgaacctccccgccgcacaccacccgagcac

SEQ ID NO: 637002 - DNA, 1181 bp, Homo sapiens
cacatcttctagctggttctctgcgtgcacagctccgtcgaagggagggggtggaagatggaggaactatgactcagagttgagaggagaggcaggtgtgtgcaggtgccatcacctggatcatgaggtcacccctctgctggctcctcccacttctcatcttggcctcagtggcccaaggtcatccaacaagacgagcaagacccgggactgggctcgggcgcagagccaggcccaggccctaggctcgaaactgagactttacctcagcctgatgaactctaagcagagcctagatgatgagcattgcctcctcccctccgcgtcctagtgcctcgtcctatctaatcttcctcgtgacttggtccctcggctggaatgcatacatgagctccgcacatggatttcccaatctgccgctctacatgatgatagccagtggattctgcgtaaatggtccctgtcatcccgtcccagcataccattacagtctatctccagaactaagcttacatcacttgagcatcccggtggacgttcctttccatgtaatgccagcgaggccttgacgagtggtattatatccgtggacaaggtaccgagaatccggctagaattagacctataggggtgcctggacgaaaacgtgaccggcctttggctgattccatcgtacactggcagaaaggaaggcaggtcggaaaagagtgtccccttcggacccttgtccccccgggatacttctggaaaggaggtctggagggacttgaaagccgaagataacagcggtaattacattccaaaggaaactactccgggcagtgggttgtcatttcgcaggcaaaaggccttgggaccgaacatacttggctggcataccgtggggagtctcccgaaggacagcaattgaaaggggctttgaagctaaccgggacggttctttcagaagccaccaggaagacccttttcccaaatgggccctccgatgaaaccgtcaaatggtaagtatgcgaaacttagtgccggctactaataattccttgaacgaaaaagaatttccggggccacagggtttcccacaacagggcgagattaaagccaggtctttagcgtggagacagacacacaagagttcggaagacagccctaaagggtgttatttcaaaaggaggtatccacag

SEQ ID NO: 637003 - DNA, 784 bp, Homo sapiens
agcgggggatccaggagcgaggagccggtgagcggggaacagggagtcggggagccgtgaaccggggcatggcagtaggcacgctcagtgagtcacaggctggactcttgcctcgcgctgggctgccgtgcatccatgaagcattgcggtgaccggggaggccgtggagctgcggagcctgtggcggtgaggcactgcgttgcgtggtgtgccgggatgcggtagcttcgggtgcgtggtgtgctcagttggtatctgtccatggactctctagtctagctctatgcattgggtcatccctgtgaccaatcggccgcgtagtgacgccgatgtgatgggccgtagagtgtcccagatggaacctgaggtctgcaggagttcctggaacggcgactacttcgcgggagagctctacctggatgagagcaagcagctttacaaggaggctaggcttcaagcggtacaacagtgctgagcatcctcgcgcagccagctctggggaagcccgtgcgtgatgtggctgccaaggccaaggccgttggcatccaggggaacttgtctggggacctgctgcagagcggagggctgctggtggtcagcaaaggtggtgataaagtgctcctgcatttcgtccagaagtccccaggcgactacgtccccaaggagcacatcctggaggtcctgggcatctctgcggaggtctgtgccagcggaccggctcaggtgtgaccagagaggtgtgcagggacggcgaaggcgctgggctccgacggatctgggtggc

SEQ ID NO: 637004 - DNA, 850 bp, Homo sapiens
tctggcgttttcatactctttatggccaagggtttaaaagggtcaacataaaaaaaaagacatttggataataactacggctcttggggctgtaataaataaaaaatttattaacaaggaagtgcacttttccagccacaagtatcttcaaaaatcaagtgacaaaaaattatatagtggccatagtgcacagtatacgcagccaaaagcgtgctccaatttacagcctttaaacaccagtgggagcttccatcccgttctcccctcccctttcgaggaagctatatccacagtctccaagagatcctcgtggccctgcaaagtggctctcaacagaagagaattccaacgaatcaaggcccccgttgccggcaacaatgggtcggacaaacacctttaaaacaccagcggtcatctcagggcaacaccggccatccgggctcccacctcctgggattggctccaaagctccaagaaacgggtagtgcctatagccggctcgtggtccacccagtccagcaggcccacgagggggcacatcgtcttccggaaccaccccacagtgtccaaccctcccttccgacaacatagctctcagaagtccatcccttggggctctccccgtgtaagatcctccgcaggggaaccacgacggatgtccccaaccgggtccaatcgaacaacgctcctcccaggaaccatctctggctcaggaggccatgttccgggcaatctccatccgaccacaacttctgcatgacaccgcccgacatcagacgaagttgcacccggaccgtggcgaacccaaccccacgacgacggaacaggcatccaaccggcacccaacgac

SEQ ID NO: 637005 - DNA, 490 bp, Homo sapiens
  misc_feature (109)..(109): n is a, c, g, or t
  misc_feature (113)..(113): n is a, c, g, or t
  misc_feature (120)..(120): n is a, c, g, or t
  misc_feature (136)..(136): n is a, c, g, or t
  misc_feature (156)..(156): n is a, c, g, or t
  misc_feature (172)..(172): n is a, c, g, or t
actcgggacctctataggatccgcaagccattcattgcagtttgtgtgtctatgtaaattctaaccttgaaccatttttctttccacacaaacgtaggtttcccaatgntctngcccatntggaggatttcctctnacctctgcagtgcagctacngtccattttatggctngcaccagtgtcctgatccaacccagtcatgaaccaagctcaagctttttcccactctttcagttggtcataaggcaagcccacgcaaccacaggtgtgagagaagggaaagtacttatgtaacagtgatggtctgatgatgctgacactttgatctcagacttctagcctccagaactgcaatcccagcactttgggagcctaggcaggtggattgcttgagctcaggagatcgagaccagcctgggtaccacggtgaaactctgtctctgaatgccccagcaaagggcacgactacttccggagccgcaccggaccc

SEQ ID NO: 637006 - DNA, 474 bp, Homo sapiens
  misc_feature (331)..(331): n is a, c, g, or t
tttgggaggctgaggcaggtggatcactggaggtcaggagtttgagaccagcctggccaacatggtgaaaccctgtctctactaaaaatacaattagccaggtgtggcggcgtaatcccagctggcctgtaatcccagctacttgggaggctgaggcagaactgcttgaacccaggaggtggaggttgcagtgagccgtcatcgcgccactgagccaagatcgcgccactgcactccagcctgggcgacagagccagactgtctcaaataaataaatatgagataatcgcatcgggagaagggagggagagaattttattaaatgtgacgnaactgcctccgcccggagcagctcagaaggagagctctatattttatgcacatgtctgacggcggggaacgttgcctgccttgattaggagtcatgagtgtgatgtggagacgggaaccctgtggtatcaacttgcgggaggc

SEQ ID NO: 637007 - DNA, 224 bp, Homo sapiens
cgcattcagcactcttctgtgctctggaaaaatttccttccccttccatttagtgtctttgctgaaatactgtcttggcatctgtatctttccctcaattcccttgagcatttatgttcttgttcccctagctgatttctcagcatataataatgcttactccagatatattatctttatgctctgaaaaatggtgccgacttagacccaaagtgacctactat

SEQ ID NO: 637008 - DNA, 104 bp, Homo sapiens
agtgtcttttcccctcaaacagaccccctactatctcttgggactctctctccctgtccctctcccgactgtgctaccgacgtttctctcgctccagctgcgtt

SEQ ID NO: 637009 - DNA, 354 bp, Homo sapiens
ggccctacattcgaaaggcaacattaggagacggctctgtatagcaagaggggcctgatgactgtgggaccgagagctagcagacgcactttagatgcttatagctcttcctgctaggaggaggaggtagtggatgtacataatgtgtggaactgccgactccaacagagctgaggccacccccaatggctactgccactgctggaactgaagccacctccaactgccaagaccactgccataggagtagctgcttcctccacccaggcctaagccactgccgacaccactggcaccgccatagccactggagacggtggactgcaacaaagagatgtagcctttcggagaaga

SEQ ID NO: 637010 - DNA, 134 bp, Homo sapiens
  misc_feature (87)..(87): n is a, c, g, or t
gctcggtccatctcatggcgtgataggtcacaagatcgatggttttatagggtttccgcttggcatcttcctcattttctctgctancaccatgtaagaagtgccattgcctcccgctatgagatgttggaagg

SEQ ID NO: 637011 - DNA, 3459 bp, Homo sapiens
  misc_feature (2441)..(2441): n is a, c, g, or t
gagaccacctacctgaagcccactttttgtgacaactgtgctggatttctctggggagtgatcaaacaaggatatcgatgtaaagatatcaggatactgcttctgatgctgagattcactgataagggctacatcaagagtgtgagctctgggcttcaccaagtgagaagaatgctagcttcattaggaatgttaagtgtcttagctccagaagatagaacagacatgtgtgacaagaaagcactgcatgaatttggttgtgagacacactggggaagagagaaaagtgaaagacttcttgacccaggatgtcttgtccacagactgcgggatgaactgtcacaaacaatgcaaagatctggttgtgtttgagtgtaagaagcgagccaagaacccagtagctcccacagagaacaacacttctgtggggccagtgtccaacctttgctcattgggagccaaagatctgctccatgcacctgaggaaggaccttttacattccctaatggggaggctgtggaacatggtgaggagagtaaggatcggaccatcatgctgatgggagtgtcctcacagaagatttctcttcggctgaagagggctgttgcccacaaggccacccagactgaatcacagccttggattggcagtgagggcccttcaggtccctttgtgctgtcttccccaaggaagacagcccaggatactctatatgtgcttcccagtcccacctctccatgtcctagcccagtcttggtcagaaagcgggcttttgtcaagtgggagaataaagactccctcataaaatcaaaggaggagctccgtcacctcagactgcctacctaccaagaactggaacaggaaataaatactctgaaagcagataatgatgccctaaagatccaactgaaatatgcacagaagaaaatagaatccctccagcttgaaaaaagcaatcatgtcttagctcaaatggagcagggtgactgttcttagcccagaaactaagtagcacaatctgtagatgagtatagtgatctcatttcctaaactgtaatgcacagacctgaggaactttacactgaccagctttaaaacagtactttaaaaggaaaagcctgttactgtttatttacctaaaagattcctaatgtgcagcactgttttctctttcagttagttgactcaaagggggaaaactaaagaatgcaaaacttttgctattcataccactgatgttcatcaaaagtatgcgatctaaaacatgactatcatttcctgacaatggggcatctcggtggcctgcctggctgattcttccttaaaactaaaatctctggaaaatggatttgcttcttaccctgtgttttctgcaaactgacttactttgttccagccaaagcttgctaataatagaaaactacccatattccaaaagtagatttcctctgtatcccagcatactttgtgaacctggctccttcttcactacctcagatctaatcaattagtccatgtaccctccttcctcactacagtcataacacatgagcatatctacctagaagccaatttctactgatgtagccacaactttttagaggcctattaaacatgacgttatccaattgcaggtcaacttatagttgtagccttacaacttacaggcatcagaaaataagtaatcaaattaggtacctggaaacatagctattaccatctcatattactgtctaattaaaataaacataacgcaaacatgtttgtccttatatattctacagtggatagaattaggaattgatggcttaaaaaaaaaaagtctatgaagagtctgtttaactcttcatgttccatctttctcttctgaagtaaactattttgaaagttctctttttgaaatgaatttgtgcttaactgtcttcactattaatactatttagaaataagctaattggatcagtggcttaaataatagctgactgtgtgtacatatgtatataatatgtatatacaatatcaggcatgcatgtggcttggaattttgtttcctccataaaatgtggaagtgaattaaacaagttttagtcatttatacaaagtcacaaatataaagttcagtttgtcacaagattaaattgctcacaaggtaaaattgtattgtttggcaaaatcacaagtaacaatcctgtgagttttctattatgaaggttaataataaatgggctcatttagttgcctgggcacctattcacaaattcatttgtcagcctctttttagttctcttaaaaaaaaaaaaatcatatgatcattttcctttttgggggtacttagcttccatgcctataaagtctggtaccagactgacttgaaattcataaacaagttgtccaattgccaagaatatgttaacaattaaaagttccaaactaaagccantagcaccaagtcttcataagaatacaaagtatacatacagtattgcttacctggaggattcagatcatttaggaattctctttgatgaaagatcagttcccatttgagttcctccttgcactgagttttagtgatatagaactagcttgtagttagtgtttcattacattataaagaatagttttacacacgtatttaccgttttccaaatttaaactcagaaatacccaaagcaggcctgcttaagcccactacctggcatataaacttatagtaacactttgttactttctttttaataggacaagcatgagttaggacaaactctaaaaattcatattcttcactattcttgttttcctttgattgatatagaccaaagatggtgtactctaattttttaaaacagtaatggaacacaatttttttcattcttcctcctctccattcgaagtaaagatccccagttagtttttatataaataatctatagggattcaaaaggtgtcacagtccacttaattagtcaaattagcaatggctaaacagtatcaagtactgcagaatttatcactgaaatggataagaggaaatagtttagtcacaggtttttacagtccagcaagggccaaagaggtatagtatacaagttaatagtatttgtgttgagcaacatggggctagtgggatcacagaaatctggaaaaaaaaaaaaaaggctttggcttatcaagcctagtgtaaatttctgcatctcacacgactttagtttggccaggtatttatctgccaaaacaaggacaaatcttgttgtattaacagcagggtcacttctcattttctttgctgacttacctttttactgaccgttgtgaatttctgtctcaaaatgtataatatagaaatgcaagaaaaaaacaaatgtacagattgtaaagttttttgatacctaatgtaagttttctttgtgtaatatttatatgataaaagacattaggatccctacaacaaaaaaaaa

SEQ ID NO: 637012 - DNA, 959 bp, Homo sapiens
  misc_feature (17)..(17): n is a, c, g, or t
  misc_feature (19)..(19): n is a, c, g, or t
  misc_feature (59)..(59): n is a, c, g, or t
  misc_feature (73)..(73): n is a, c, g, or t
  misc_feature (82)..(82): n is a, c, g, or t
  misc_feature (236)..(236): n is a, c, g, or t
  misc_feature (293)..(293): n is a, c, g, or t
  misc_feature (305)..(305): n is a, c, g, or t
  misc_feature (352)..(352): n is a, c, g, or t
  misc_feature (389)..(389): n is a, c, g, or t
  misc_feature (397)..(397): n is a, c, g, or t
  misc_feature (414)..(414): n is a, c, g, or t
cgccaggcctcgccgcngntctaagctgtccacatccctggcctcagccgccacatcancctgacctgcttangcccagatnttcttcaatcacatctgaataaatcacttgaagaaagcttatagcttcattgcaccatgtgtggcattgggcgctgttggcagtgatgattgcctttctgttcaggtctgagtgctatgaagatgcacacagaggtccagatgcattccgtttngagaatgtcaatggatacaccaactgctgctttggatttcaccggttggcggtagtngacccgctgttnggaatgcagccaattcgagtgaagaaatatccgtattgtggctctgntacaatggtgaaatctacaaccataagaagatgcaanagcatttngaatttgaataccagancaaagtggatggtgagataatccttcatctttatgacaacaggaggaatgagcaaacaatttgtgatgttggatggtgtgtggcattgttttactggatactgccaattaaagaaacgtgttccctgggtaggagatacatatggagtcagaccctttcgttaaagcaatgactagaaagatggatttgtggtgtatgtgtcagaaggctaaaggtcttgttaacgttggaaaggactcgggaatccctttttataatggtggtgcctatttctttccttggacactatgcagtttggacttcaaagccagatgggcaaggttgcatccgtcggaaatggttaatatcatcactggcggcatgaaacccttgagcctctatgaaatgtgggaaactccttccgggtttgagctcaactgggggaacactcaggatcttttcatacgctgcacgaacgtcgcgcggacgacgctggggctaacaggggggacccaaggtgggccctgtaccttgcaaccaacaactccgaagatgggaaacccagg

SEQ ID NO: 637013 - DNA, 3317 bp, Homo sapiens
  misc_feature (1)..(1): n is a, c, g, or t
  misc_feature (18)..(18): n is a, c, g, or t
  misc_feature (2299)..(2299): n is a, c, g, or t
nagtggagagctccaaanccagggtccaaatgaaactctgtggcactgaggcaggggcttcaacttacctcccaaaacagaaaccctctaagcaaccgtgcaaacagaagatgctctttctcagggtggatgtagcttgacaccagtggccatgtctgggccaaagcccctggatttagccctcaccccctaaactgggtgcctgaaaatgggtcctctttgaacatatggaactccagtaccaataagaaaggtctcattgaaactaatgtctcagtcttgagtctctgctttcctgagctagagtactagcatgtcctgtatcttcctacagcacctgaggaaggaccttttacattccctaatggggaggctgtggaacatggtgaggagagtaaggatcggaccatcatgctgatgggagtgtcctcacagaagatttctcttcggctgaagagggctgttgcccacaaggccacccagactgaatcacagccttggattggcagtgagggcccttcaggtccctttgtgctgtcttccccaaggaagacagcccaggatactctatatgtgcttcccagtcccacctctccatgtcctagcccagtcttggtcagaaagcgggcttttgtcaagtgggagaataaagactccctcataaaatcaaaggaggagctccgtcacctcagactgcctacctaccaagaactggaacaggaaataaatactctgaaagcagataatgatgccctaaagatccaactgaaatatgcacagaagaaaatagaatccctccagcttgaaaaaagcaatcatgtcttagctcaaatggagcagggtgactgttcttagcccagaaactaagtagcacaatctgtagatgagtatagtgatctcatttcctaaactgtaatgcacagacctgaggaactttacactgaccagctttaaaacagtactttaaaaggaaaagcctgttactgtttatttacctaaaagattcctaatgtgcagcactgttttctctttcagttagttgactcaaagggggaaaactaaagaatgcaaaacttttgctattcataccactgatgttcatcaaaagtatgcgatctaaaacatgactatcatttcctgacaatggggcatctcggtggcctgcctggctgattcttccttaaaactaaaatctctggaaaatggatttgcttcttaccctgtgttttctgcaaactgacttactttgttccagccaaagcttgctaataatagaaaactacccatattccaaaagtagatttcctctgtatcccagcatactttgtgaacctggctccttcttcactacctcagatctaatcaattagtccatgtaccctccttcctcactacagtcataacacatgagcatatctacctagaagccaatttctactgatgtagccacaactttttagaggcctattaaacatgacgttatccaattgcaggtcaacttatagttgtagccttacaacttacaggcatcagaaaataagtaatcaaattaggtacctggaaacatagctattaccatctcatattactgtctaattaaaataaacataacgcaaacatgtttgtccttatatattctacagtggatagaattaggaattgatggcttaaaaaaaaaaagtctatgaagagtctgtttaactcttcatgttccatctttctcttctgaagtaaactattttgaaagttctctttttgaaatgaatttgtgcttaactgtcttcactattaatactatttagaaataagctaattggatcagtggcttaaataatagctgactgtgtgtacatatgtatataatatgtatatacaatatcaggcatgcatgtggcttggaattttgtttcctccataaaatgtggaagtgaattaaacaagttttagtcatttatacaaagtcacaaatataaagttcagtttgtcacaagattaaattgctcacaaggtaaaattgtattgtttggcaaaatcacaagtaacaatcctgtgagttttctattatgaaggttaataataaatgggctcatttagttgcctgggcacctattcacaaattcatttgtcagcctctttttagttctcttaaaaaaaaaaaaatcatatgatcattttcctttttgggggtacttagcttccatgcctataaagtctggtaccagactgacttgaaattcataaacaagttgtccaattgccaagaatatgttaacaattaaaagttccaaactaaagccantagcaccaagtcttcataagaatacaaagtatacatacagtattgcttacctggaggattcagatcatttaggaattctctttgatgaaagatcagttcccatttgagttcctccttgcactgagttttagtgatatagaactagcttgtagttagtgtttcattacattataaagaatagttttacacacgtatttaccgttttccaaatttaaactcagaaatacccaaagcaggcctgcttaagcccactacctggcatataaacttatagtaacactttgttactttctttttaataggacaagcatgagttaggacaaactctaaaaattcatattcttcactattcttgttttcctttgattgatatagaccaaagatggtgtactctaattttttaaaacagtaatggaacacaatttttttcattcttcctcctctccattcgaagtaaagatccccagttagtttttatataaataatctatagggattcaaaaggtgtcacagtccacttaattagtcaaattagcaatggctaaacagtatcaagtactgcagaatttatcactgaaatggataagaggaaatagtttagtcacaggtttttacagtccagcaagggccaaagaggtatagtatacaagttaatagtatttgtgttgagcaacatggggctagtgggatcacagaaatctggaaaaaaaaaaaaaaggctttggcttatcaagcctagtgtaaatttctgcatctcacacgactttagtttggccaggtatttatctgccaaaacaaggacaaatcttgttgtattaacagcagggtcacttctcattttctttgctgacttacctttttactgaccgttgtgaatttctgtctcaaaatgtataatatagaaatgcaagaaaaaaacaaatgtacagattgtaaagttttttgatacctaatgtaagttttctttgtgtaatatttatatgataaaagacattaggatccctacaacaaaaaaaaa

SEQ ID NO: 637014 - DNA, 120 bp, Homo sapiens
ttctctcgcgaactaatcacgaattcgtgattagttcgcacggagaatccaagcttggattctcaaggaccggcagttgcgcgcagagcaccctgatgtgcccggcaccacgggcactca

SEQ ID NO: 637015 - DNA, 124 bp, Homo sapiens
  misc_feature (78)..(78): n is a, c, g, or t
tgagacccctccaagatgaggaatggtgtatcatactgataattcgtgttgaggaactgccatagtttcccatagtgnctgcccattttacattcccatcaacagtgtacaagtattccagttt

SEQ ID NO: 637016 - DNA, 276 bp, Homo sapiens
gtccgacgtcatcttcggctcggctgcataacgacgtcgtatccgcgaagaggcagtacgaaagagacactgcgataaacgcaatgtcggtcgggcaaaggcatccaagcccgtgcggcgaaaccgaaacgccgctttcagaaaggttaaggacaacgaataaagcaatcgccgaagacgagggcttcgcgcgacgatgcgctcgacaagaaccatatcgataccctcactagacctcggatcgaaataaatcagagcgatcacatcgctcgtgaa

SEQ ID NO: 637017 - DNA, 143 bp, Homo sapiens
catggcgtcgtcttagatgtcgtgactgggagaccctgtgtgacaaatagcagcaattggtgagagacaagagacagcagttggcaatgacagcaatgagacggtgaatgcagtctgtgattgagtgatgttggtgaaacttg

SEQ ID NO: 637018 - DNA, 983 bp, Homo sapiens
  misc_feature (227)..(227): n is a, c, g, or t
  misc_feature (250)..(250): n is a, c, g, or t
  misc_feature (277)..(277): n is a, c, g, or t
  misc_feature (340)..(340): n is a, c, g, or t
  misc_feature (371)..(371): n is a, c, g, or t
  misc_feature (387)..(387): n is a, c, g, or t
  misc_feature (394)..(394): n is a, c, g, or t
  misc_feature (767)..(767): n is a, c, g, or t
gattttctttggaaacgcacctgcgcattaaatccaggcttcgtggcacctgcgggaaaagtcaagatgggaccagtgcccacgagtcctgaccgggcaaccctccgcttggacctgcaagagatcaacaactggttcaaggcagcagatgaaacgggaagctcgccaggtccacaaaggaaattcccgatgagatcagcattctccttctcggtgtggcgcacttncaagggcgcagtgggtaacaaantttgactccagaaagacttccctcganggatttctacttggatgaagagaggaccgtgaggtccccatgatgtcggaccctaaggctgtnttacgctatggcttggattcagatctcagcntgcaagattgcccagnctgcccnttgaccggaagcatgagtatcatcttcttcctgcccctgaaagtgacccagaatttgaccttgatagaggagagcctcacctccgagttcattcatgacatagaccgagaactgaagaccgtgcaggcggtcctcactgtccccaaagctgaagctgaagttacgaagggcgaagtcaccaagtccctgacaggagatgaagctgcaatccttgtttgattcaccagactttagcaagatcacaggcaaacccatcaagctgactcaggtggaacaccgggctggctttgagtggaacgaggatggggcgggaaccacccccagcccagggtctgcagcctgcccacctctaccttcccgctggactatcacncttaaccagcctttcatcttcgtactgagggacacagacaccaggggcccttctcttcattggcaagattctggaccccaggggcccctaatatcccagtttaatattccaataccctagaagaaaacccgagggacagcagattccacaggacacgaaggctgcccctgtcagattttcaatgcatacaataaaagagctttatccctaaaaaaa

SEQ ID NO: 637019 - DNA, 504 bp, Homo sapiens
  misc_feature (71)..(71): n is a, c, g, or t
ataaaccagagtaagtgctccctgctgttcgccttgttcctgttggtgtttaaagatcacttacactgcangaggcagaactgatgcccaggagaggggcagtaactagcagaagggaaacagcccgggtccagtttacttcccctcaatgtgggccaaggacgccaggcaggatcatagtccggctggattgtggctttcctcaaggtgatcttgacttgcccaggtgggatttcacccccacttccttccaggcttcccattttagacttgaaatgtaggcctgttggggcctcctccagtagatgtgtgcccttgagcttggatacccccctgccaagatacgcctttcaaaaacagataaacttatcgcaactgaatagaaggggctcccaaggggtcccaccctgctccggaagtctcagtgaggaatcaatagctgttaattccaatgtgctgcccccctcttaatactcaccaataaattctacttcctgtccacct

SEQ ID NO: 637020 - DNA, 301 bp, Homo sapiens
gtggaatccgctagtggggttcttggaactcatcacccattggggcacctataggacgaactattgtaccgtgattgatttcctattaattcagggttccgtttacagtctacaactaaaatctaatcatttaatcacagttgtacaaacaactgggaatataacagctacataattctttccaatatattagctatccgcatttgtgtttctagaattaatctatagacacataatgtgtccatttttcaagtctagtactacattgacgatgccctttttatttgaaaattaatttctt

SEQ ID NO: 637021 - DNA, 148 bp, Homo sapiens
tgtactcctcccccgcctttattctcactgtggaggaatcctggaccaatgcacaaaaacttaacaaaagtgatgtaaaaatgaaaatgccaaataaaaatctttggaaaagatgcctggatggagtaccaccatgaggcaatgggga

SEQ ID NO: 637022 - DNA, 476 bp, Homo sapiens
  misc_feature (250)..(250): n is a, c, g, or t
tttcagaagttccaatcagccaaaacagcaaaactgggcaacaactgtagtgtcatgctcaatcacaggcagcatggttcaaacatcatgtgccattctcacgcatggcaataatggctcactaaagcagtaaacacccagaccatttccaagataaccgcaatcccaagggcaaacataatcatcaacacatcacaggccggtcatgcatgcccattgtgttcatgtcacgtacagcacgtcccatgcnccatcaaacacattcatgtcacaggcacttcatcagccaacactgctcaatgtttaaccctgggcataccagccagcacatttgaacacaagccagagcacaatcccaagaacagtttccactttcaattcgtgtactggtttgcagctttctatggtagtgcaggatggctttacattcatccctgctatggcaaacttctcaaaactcagggggatcctctcaa

SEQ ID NO: 637023 - DNA, 378 bp, Homo sapiens
  misc_feature (72)..(72): n is a, c, g, or t
  misc_feature (92)..(92): n is a, c, g, or t
  misc_feature (107)..(107): n is a, c, g, or t
  misc_feature (119)..(119): n is a, c, g, or t
  misc_feature (151)..(151): n is a, c, g, or t
  misc_feature (289)..(289): n is a, c, g, or t
  misc_feature (358)..(358): n is a, c, g, or t
tctcgaaactccctgtccctcagggtgatctgccccgccctcgggccctcccccaaagtgcctggggatcanagcccgtgagcacccgtgcnccagcccaagtgtgncatgttttcaanctctcccctgttcctgatgcctcagagttganaactacacaaacactgcaactggctttgctttttgtcctgatggtatctcacaaggcttccctaatgcaggcagtcttgttttctagacaatctaccaaccctagcccacaacacccttctggtgccataataagggnacactttgtaaattaaatgtgagtgaaatcaaaaaggtttcctgcaaggttgttttctgagacttgggnaataataaaattctgtactg

SEQ ID NO: 637024 - DNA, 981 bp, Homo sapiens
cgatcgcacgcgtccgatggcacagtatatacatacaatacaagaaagtactcaattggtaataagtatagctcagctgaatttcttcataaaatgaaatagccatgtaagcaagatgtaaaacaagccacatgtatgagaacaaagaaataaagaggataggggctaccagatgaatgtgtgcgcgtggatcccatcgggatattactaaatgtttgtgaccgaggataagtaaatgagatgaaagaggactgttctgagtggactatgtggaagattcaggatgatctatagtataaatgcgccattgatgagatcttcggatctcatgattctaaggagtgtatcgcctgtctaatggtagtgactagaaggatatttgggatcgttctgaatgtgaaatttgggcgctttaatgtttatcagaattttctcaattgggggctttgtcccctcacctctagggccaaggtaaattctaggactagggacataactatgtcaatggaagttcccaatactagagggttttcctaaaaggtcaggccaacaatgaccttatcagatcaaatgcttttgaacacagctcaatcgtagatgtttgctagaagtacaccggtgcattcttagtcgcgaaagtcttttatttgcagcgtgggcgcagaggtttacacacacctgtatatccccgcagctctggcacaggcctagagggctctagaaatgaagcccgaagttcgaagctagcggctcaagtgtgaaacagcccgggtgctagtagcacctaaggacaaactaacataaaaaacagatccgaaatacacaaaacagaggggggcgcggacagagaggacaccgcacggggagcaatcacgcgccgccaggttcccaagggcacaagagaaacaaaaacaagagggggcaaaacgcaggagaacaccgggcacgggagacacaccgtgggccgagcagagcccaagg

SEQ ID NO: 637025 - DNA, 568 bp, Homo sapiens
gggtgactggtaaggaggctccgcgggcttagtgagagtgattgtgaaagtggccaggctctctggatcagaacgccagctctgtattccactagctgcgcaatggtgagcaggctgttcatcttgatgtcctcagtcccctatccccaaaaggtggctctcagtagtgtgtccccagggcctatggagggatatgagggaacatgatcatgagacacctcatggctctgaggcatctggatcccggctcagcagtaaccatggctgtcaaaagtgctggtggtctctgcccacagagcatggaagatgtccatcgatgtggctcactttatagaactcttacttctcggggaaactcttctccatcctagcccacgttgggcgagtcattattctgccaagtggttgtgatgggcaggggaacactgaagctggtgaggatggcagcagggtccaatggtgggcaattatagaccccatgggagaccagtgaccagagcttctgtgggaaacccctagaggctggacggaaccagcaagaacccaggtgcccctctacgtagaagca

SEQ ID NO: 637026 - DNA, 151 bp, Homo sapiens
agcagctgctgagcaggagctgagctgccaatccatcttgaatattgacatcatcaggtgtcaagtattgacctggagcctgtagggaggagagagtccaaattagtccaatataagtaaataatttaagacttgtcccacaatcagcacc

SEQ ID NO: 637027 - DNA, 300 bp, Homo sapiens
tatctagagatccccgggattgcagagagaggttgtacccatctagttatctacagagtggactgatatggctaggatctgtgtacccacaccaaatctcttctaaaattgtcatccccatgaggtgagtggatcatagtgggcagttcctgcatgactgttctcatgcatagtgcgggagttctaatgagatcttatcatttaaaagtgaccatttcccctgcatgtgctctcgctcgctcgctcactctctcgctcgctcgctcactctctcgctcgctcgctcgttctctctccact

SEQ ID NO: 637028 - DNA, 1044 bp, Homo sapiens
  misc_feature (1044)..(1044): n is a, c, g, or t
agcggattcttgctgatgctggggcaaccacgcggaggtcgagacatgcaggccggctcaccgtggcacagcgcgggatgtgtatgagcgtgtcaggcgctgagagggagctggtgaaaacattcgaggggactatgcgcgttgcgaggccttcatagtcacgacccaaggtccagtcgaccggatcctgtatcgatggtacgtggatgtgcttgtgcggaaacctcctgtaaacttgaaggtcacttgctgggtcctgtatgaaactcgactctatgaaatttttgtcgctcataatagtccccagagggctcgcaacgagactatagtccccctgagcaagattggctagcttcatcgagcaaggtgtaatagaccgtaatcatcccgttgctttcatagacgccgacgtgtgcgagcaagtccgattagatacgaaccttgttattttgaaacgtaagaggaaacagcatgcatgggacagacgctactggggggacaggactcccataggtctttagtctagttgaccttgagaacggaagctatggagggccgggggaagcttctcattgttccccattcagcttagtggaggctcaatctgtttcgcatttgttgcatcggcgatacttttggggcagagatgaaataaataaccttgaacgcaacacattttaaaacttgcctatcaattgatagagcagcgaaggtgattagtccgggcggttggataaagcccaaggccaattgaaaccctgtcggtgccctgaattaaccggggggagaatttcataccaaggattgatgaatcttttcggaacgattatagtcattgggggaaccttttggactcccccgattgtacttccccttgggataggcgagtaaggttgcaccttgaaccaaggattctagttgcttgaccggacgacttccctagaagttttccaccttgtccagacattagggcggaactttcccctaggggtccaaatggataataccgagtcacggaagggcatatccttaaatatggcggcn

SEQ ID NO: 637029 - DNA, 152 bp, Homo sapiens
cttgatcacatcggcttcgagcatgactcctctatctcgatactgaccaggctgatattggcgcctggacggccacaatttccgaactacagcgaactttcggccagctcggccaagcaagataaggtatacggacaggtttctgctgaatc

SEQ ID NO: 637030 - DNA, 606 bp, Homo sapiens
ctactagatagcatacaggccaagagaatcaggaacaaagcttgagtaatcttcagggaagatgcgcaacactggattacctagagtcatcatcatcatcattttcaagttcttcatcactttctttagtaatacactgggcacgtgtattagctgggttcctttgcatcttatgaagtagtatgatgagttatttttctcttagatctagggaggtaagttagtcatcgttacccttaccaaagcatgctgtaggcatgtgtaaaatctctcaattctttctcttgtttacctccattttttgagttcgccacatttaacaggaagtcaatatattcctctgtcaccatcagttttcccttatggcttaatggaacttctaagccatgtgtactccggacagacaacagtagatttttcctctctttcccagcgttatgccagagttcctgaaaccagaatctatgccacggaatgcagcatctgtgcatcctgccattgtcgacactgcacatgaagaacaactggttcaaatttcaaagtggcatcaccatttggtttcttcagagctacaatcacatcatcttttacacaaagtttgcgtgc

SEQ ID NO: 637031 - DNA, 84 bp, Homo sapiens
ggctcctcgccgccgcttcctctcgagaaggcgcggggcgggctgtccggcccgcagggcggtcgagcccgcggcgccatggct

SEQ ID NO: 637032 - DNA, 228 bp, Homo sapiens
  misc_feature (20)..(20): n is a, c, g, or t
  misc_feature (33)..(36): n is a, c, g, or t
  misc_feature (42)..(43): n is a, c, g, or t
  misc_feature (70)..(70): n is a, c, g, or t
  misc_feature (88)..(88): n is a, c, g, or t
tcttatttgaatcactgatntaatctcctgtannnnaggatnnctggaccatctgcatttaatgaaaggngtataactcctccaggancacccgcctaggtgaggacctccaagttatctcttcatgcagtgaggtcagcaaggttgcaaaaactagcaaggtggaaacagtcccggactctgactgctgacatgcagaaggcagatctatatccttcgttctagagt

SEQ ID NO: 637033 - DNA, 131 bp, Homo sapiens
gcggctccaaggctgaattcattgtcggaggggcatataaactgtacggagcatcgggtctggctccttcgggacatctatttggcgctcaacatcaccaacggcgaggcagttgcagtgcagctagatct

SEQ ID NO: 637034 - DNA, 961 bp, Homo sapiens
cagcccttggggctcccggtgcccagcagtgccgggcctgtcactgaccttgctctaggatgattcacagggacgtcgtgggtggccagagggctcgtgggtggccagagggccccttgcctgcagcagcaagagcagaatggctggtgtgccaagcttcggggcaccagtgggcaataggagaattctgtcagtgctggggaagggagtaaggaagcaagaacagccttcaggcgtgggtctcccagccacaggggctgtaggggagaccccggaaggaggatggggcagctgtcttagaataccaatcacccaaaggagcccatattccatgtttaccaggagtaccagggtcctcaatatcgtcttcacttgcatttatttgcattttttgcttataatttgtcatttggtggggtctcatttcatatcacagtctctactttttcctccctatttgggcacagggagaggtggaccttcagctaagtcctccttggggaatttcattttaactctcaatataccttcagactccattagacccaattttaattttaatttttaaccaacctttctttcttctttcctttccttcgttctttctttctttctttctttcttttttttgacggggtctcactctgtctcccaggctggagtgcagtggcacaatctcagctcactgcaacctctgcctcacaggttcaagccatcctcctgcctcagctcccgagtggctgggacaacaggttcgtgccacaacgcctgggctaattttcgtattcaggaattctaaattttagtaccagaaggggggttttgcccatgttgctcaggctgggccttgaactcttgaagctcggatctgctccctcgagctccccaaaggctgggcgtacacgcataagccaaatgcctggttgagttctatttgagcacgtacaagattatacgagca

SEQ ID NO: 637035 - DNA, 348 bp, Homo sapiens
agctgattaggaatgctatttctttcttatctttctttttctatctttctctttcttccttccttccttccttccttccttccttcttccttccttccttttctgttcttttgtctttttttgccttttctagggctgcatatggagattccagactaggggtccaatcggagctgtagccactggcctacgccagagccacagcaacgcgcgatccgagccatgtctgcaacctacaccacagctcacggcaatgccagatccttaacccactgagcaaggccagggaccgaacctgcaacctcatggatcccagttggattcgttaaccactgccgcttttgtgtt

SEQ ID NO: 637036 - DNA, 383 bp, Homo sapiens
  misc_feature (268)..(268): n is a, c, g, or t
ggaggatgcactctgtagagcacaggctaacagagcatggttgagcaggcaggagttgggagctgcacccagcactcacacaatgttatcatggagctggggacagagcaggttccagagctgggtttgagtcctagctcctccgatgatgatatgacaccccagacatgtgcagggatgtcctctaagcctcagcttcctcactgcaatttggggctctgtctctttctggcagggagttattgggaagaccaaatgagatcatgtncccctcccaaaccctgcaaggcctttgcgtcacagttagaatgaagtctacatatagccctgtccactcgcagcctgcctcccttccccattcgcacccttacacacggagcccc

SEQ ID NO: 637037 - DNA, 842 bp, Homo sapiens
  misc_feature (93)..(93): n is a, c, g, or t
  misc_feature (97)..(97): n is a, c, g, or t
  misc_feature (259)..(259): n is a, c, g, or t
ggctgatactcactccgatacgccgcagagtgcgccgtcattggctgccgctgaaaactggtctcatctcatgctggtcttcctctgaggagnaccntgtggctctgtaacgtagatgctgggacttgttcaccacatccaatgaagcgtcatgtgcggacaacggcagctgttcctggaaccaggatcgaggatggagcctccgtgattgactcagtccacgtggggactctacagtctgagcacagaacagactccnagagtctcggaggcgctcggatcagtcacaagactgtaccgcccgcgaaagcctgagcaaggaatggaagccggcgggcagcgcgtgagatacgcagcaggcacggggcccgcgagttattggggacccaggaggacagcggcaatcatgaaaggctccatctctacatagcactgactcagagcgaaaccatgggtgaacccttgcagctggtctacgttactaaccaagaagcgacggaacggcttgctcacaatccagtcgcacgataatcgttagtggctgcaagacgtgcgggcctggactgggacgtcttccatccagcgggttacccggcagcgtacgccatacagaacgtgcaaaggagttaccatctgcccttggaactgaggaaccttgcgcctctttggacccgcgtgcggacagtggcagcctcaagatcaccaaagcgccaagtgggacggcgggtccatgcggcgagagcaagcgagagagtcatacctgggaggggccggtgcgttggaccgggctccgcaaaatacctggagaacgggaaacgagacgctgcagcgcaagggacccc

SEQ ID NO: 637038 - DNA, 899 bp, Homo sapiens
ctggtcgctgttgtgtgttgttcgccagcgtgcctgttgccgaggtccgttgactgtgctggttgtccgctggggccgggttcgcgtgacgcgacagtgtgaccgtggccggtccggtggtttggtttgggttgcccccccctccttggccgtggcctctgaaacccgtccgtgctgatgtccgcccctcggtcgcattacctgtcagggaccttaatcccataggctatccacagtgcagttgatttgttttcgcaccttctctgtcactgggtgggtttaaaaaggagttataattattcaaccgtattctagttttacatcctgatttatgttttttccccaagctaagtagccctcagattcaggctgggccctttgctcatgtgactcccgtatttgagaccaatccaatgtgtatatgtgatctattttatggcgttagaataaagtatgtttttcttcccttatttgctgttcatatgtattatagattttggtatttattagtaataaaattgtagattttattattacttgattaacattggaatttagaatccaccctaccaggagagtaccatagtatttaaagtggtttccatgatataccctgaagtcagaatcacctgatttactcctggctcagttatgtactagtcatgttgcctcaggcatgttacttagcctcatctataaaggaggtaaaggactatgtaacttgccggattattgtaggattaatgagataattttgtacagcctttagccccgtgcccaatgaagccctgtgtccaccaatagtgatcattttcattattaatatttgtgctactatttaaatatctttgatactaaagaaagagataaagtaataaaatggagtttttaaaaaccca

SEQ ID NO: 637039 - DNA, 295 bp, Homo sapiens
  misc_feature (3)..(3): n is a, c, g, or t
  misc_feature (180)..(180): n is a, c, g, or t
agncctgtgggagagacacagagagacgtggagagacacagagagacttttagagagacaaagcatgacaggacgggagagcaaggacaagctcaggtaagcctcagcttcctcactgcaatttggggctctgtctctttctggcagggagttattgggaagaccaaatgagatcatgtncccctcccaaaccctgcaaggcctttgcgtcacagttagaatgaagtctacatatagccctgtccactcgcagcctgcctcccttccccattcgcacccttacacacggagcccc

SEQ ID NO: 637040 - DNA, 314 bp, Homo sapiens
  misc_feature (42)..(42): n is a, c, g, or t
  misc_feature (67)..(67): n is a, c, g, or t
  misc_feature (72)..(72): n is a, c, g, or t
  misc_feature (80)..(80): n is a, c, g, or t
  misc_feature (91)..(91): n is a, c, g, or t
  misc_feature (101)..(101): n is a, c, g, or t
  misc_feature (104)..(104): n is a, c, g, or t
  misc_feature (119)..(119): n is a, c, g, or t
  misc_feature (127)..(127): n is a, c, g, or t
  misc_feature (157)..(158): n is a, c, g, or t
  misc_feature (197)..(197): n is a, c, g, or t
  misc_feature (236)..(236): n is a, c, g, or t
  misc_feature (248)..(248): n is a, c, g, or t
  misc_feature (259)..(259): n is a, c, g, or t
  misc_feature (294)..(294): n is a, c, g, or t
  misc_feature (302)..(302): n is a, c, g, or t
catcttccagtaattcgccaaaatgacgaacacaacgggaangcggagaggcacccgatatatgttntctcngccttttngaaaacacggngttgttcctnccngccacatatatgcgnatctatangaacggtgatattgtagacatcacgggaannggtactgttcaaaacggaatgccccacacgcgttaccanggcaaaaccggaagagtctacaatgttacccagcatgcngtcggcattgtngtaacaaacangttacgggcaagattctcgccaagagaattaacgngcgaacgngcacattaagac

SEQ ID NO: 637041 - DNA, 411 bp, Homo sapiens
tgacacatcgaggagtcacaaataatcctataccactcccctatggtgctttagtccccgaacttcagcactaccccgtatagatttgaccatccatttgcctccgccacaggaatacgtatgtggtttacctgtgtgcgggagggccgctgcgtttccaggctgctcctccagtcagcagcagtggtggagtgagaagaaacagctgataggcccgctaacctcagtttttgcccggagaagttatttctctttaaaccctttttttccctgtgacctgctttagagaagagttcataggaaaagttaaagtctgtctcaaagcctggtagatgtctcacctcattgtgaataaaccggaagttcctgtgtgtaacatccctccaaataagatactaaggatctctttcg

SEQ ID NO: 637042 - DNA, 726 bp, Homo sapiens
  misc_feature (4)..(4): n is a, c, g, or t
  misc_feature (74)..(74): n is a, c, g, or t
  misc_feature (106)..(106): n is a, c, g, or t
  misc_feature (125)..(126): n is a, c, g, or t
  misc_feature (137)..(137): n is a, c, g, or t
  misc_feature (149)..(149): n is a, c, g, or t
  misc_feature (156)..(156): n is a, c, g, or t
  misc_feature (164)..(165): n is a, c, g, or t
  misc_feature (173)..(173): n is a, c, g, or t
  misc_feature (189)..(191): n is a, c, g, or t
  misc_feature (197)..(197): n is a, c, g, or t
  misc_feature (207)..(207): n is a, c, g, or t
  misc_feature (215)..(215): n is a, c, g, or t
  misc_feature (223)..(223): n is a, c, g, or t
  misc_feature (228)..(228): n is a, c, g, or t
  misc_feature (250)..(255): n is a, c, g, or t
  misc_feature (257)..(259): n is a, c, g, or t
  misc_feature (275)..(275): n is a, c, g, or t
  misc_feature (280)..(280): n is a, c, g, or t
  misc_feature (282)..(283): n is a, c, g, or t
  misc_feature (293)..(293): n is a, c, g, or t
  misc_feature (302)..(302): n is a, c, g, or t
  misc_feature (304)..(307): n is a, c, g, or t
  misc_feature (309)..(310): n is a, c, g, or t
  misc_feature (314)..(315): n is a, c, g, or t
  misc_feature (319)..(319): n is a, c, g, or t
  misc_feature (324)..(324): n is a, c, g, or t
  misc_feature (327)..(329): n is a, c, g, or t
  misc_feature (339)..(339): n is a, c, g, or t
  misc_feature (346)..(346): n is a, c, g, or t
  misc_feature (348)..(348): n is a, c, g, or t
  misc_feature (354)..(354): n is a, c, g, or t
  misc_feature (356)..(356): n is a, c, g, or t
  misc_feature (358)..(358): n is a, c, g, or t
  misc_feature (361)..(361): n is a, c, g, or t
  misc_feature (370)..(370): n is a, c, g, or t
  misc_feature (374)..(374): n is a, c, g, or t
  misc_feature (378)..(379): n is a, c, g, or t
  misc_feature (386)..(386): n is a, c, g, or t
  misc_feature (433)..(433): n is a, c, g, or t
  misc_feature (436)..(436): n is a, c, g, or t
  misc_feature (440)..(440): n is a, c, g, or t
  misc_feature (456)..(456): n is a, c, g, or t
  misc_feature (461)..(462): n is a, c, g, or t
  misc_feature (464)..(464): n is a, c, g, or t
  misc_feature (481)..(481): n is a, c, g, or t
  misc_feature (502)..(502): n is a, c, g, or t
  misc_feature (724)..(724): n is a, c, g, or t
tggngtagcaaatgaatatatcaaaacaaagaaaaagcttgcatccaaatatttacattttaaaaagacatttnaaaaataggctacttattaagtgtgcttgaanaaaccatgtgtggaattgnngtccattcatnacggagttagtntctgctnaatacttnntgatgctngagcagacccctggcnnntggggntttaagagtncaactgtnctcaatcnatgcngaaaaaaaaaaaatgacaaagnnnnnntnnngcgtttccggggcgcnaattngnncttcagaggngggggggcngnnnngnngggnnagtnatttnggnnnggggggggcnggcagcngngactcngngnggntttgcaacngccnacgnnagtaccnggtattccataaaactctgtaggggccatttacatttcgtaaattcngtnattncaccttactgtatcgngcccnngnggtttcccaaacttagntattcacaaaaatgttttggnatatattccttgggaatgtgaggggtctcctatattacattaaacaaaaaaccatgcagttacttagagctcatagagctttctcaaaatcaactactgatcataacagccccattaaaaactcaaacactttatattacagatatagagtttataatccagcaatgccaatataggtaatttgatagcccctatttgcaaagtgattaacaattatacaanaa

SEQ ID NO: 637043 - DNA, 293 bp, Homo sapiens
  misc_feature (147)..(147): n is a, c, g, or t
gtgagactatctgggatccatctgggtgggtccaatgtcatcacaatgttccttataagagagaggcaggagagaaagaatcagaaaggcggcagcatgaggaaggctcagcctgacattgctggcttagaagatggaggagtgagnccatgagcgaaggaatgcaggaagcctctagaagctggaacacacccctgctgacacctggacttgtacctagtgaaacccatttcagacttcagacctccaaaactgtgcagtaataaagctgttttgttttaagccaccacaaa

SEQ ID NO: 637044 - DNA, 358 bp, Homo sapiens
gtacgcgcaggtggatctcttatttggcacgttaatacttttcttgtacagaatgattgtatgttcactggtatattgggtctactcttagaaccttccttcgcattgttgtttatgggacccatgaatggttagccttatcttttctatagtagaaggaaataaagtaggagtgtaaagaccattgtagtagagttagttcaaggggaacttgggaccagaaaccactgttatgtacaaaaaaatggcaatttccataaactcatgactaaaataattttttaattaacagttatcataaattttatatttcatacaaatagattgcttagaatggttctcaagaattataagagaa

SEQ ID NO: 637045 - DNA, 152 bp, Homo sapiens
acgatcccctttcatccttgccagcaggaccgacagcgccaggtggtccgggaacacctcgctctccagccttgccgggctctccagcagcacctttaggtccagggaatcctatcacaccagcctgaccacgggcaccaggtgggcctggg

SEQ ID NO: 637046 - DNA, 700 bp, Homo sapiens
  misc_feature (1)..(1): n is a, c, g, or t
ntaaggaaagcaaaatgggaggctcaacatggtgcgagcggtatattacccgtggcccccggggcaacaggtgttgaacattctaggagaaagccgatttttgcccaagtgtttccctctggcagaagcgtgtgcgccaaatgtttcctcctgctaatctccacaccaaaggtctcaaccctgggttataaagtcggccacgtcagcaacgaccactcgtttttctttaggttcccatgaaggttccgggccgcacaatcgtatcacctcacgttctccgcctgttcagcaagtgttctcatttggcgtacgctgacagtgcactgcaataaaagacacgagattagctctcccatgtaatcagtctaggttcttaaggcctgtcaagcatatagtattctgtggtatatgaggtaatgcagtgagtagagagttattttccgctttattttgctgagccaccataggtccacactccaatctgaatgtgtatcccccccgtgtaaggctgacatcaccacaattctagtttcctgcagcccaatatgtcttgtgtctgtgagacaggccggcgtaagcatggtaatcttgcccgggggcggtggctccccctgtaatcccaactctctcatgagttatagggaggtgtatcccctgcgggtgtaatgttaaccctgtcttaccgccgtgcaaaccccgt

SEQ ID NO: 637047 - DNA, 827 bp, Homo sapiens
gagggacccgcagatcaggtacggaacagatcagcatcatgaaagcttgtcacgggcctggttttctgcgtccttggtcctgggtgtcagaagcctgaagcttctcttctctgttccatttggtggaggctttagaatggggatcgggaacaatgtggagagccttacttctgtaaatgaagagaagccaattagattcggctcaagagataatactgccagagtcttcggggaactatgtatgcatgccaaagataggggaccgtgtgggggtgctctgggcggtggagaatgctgatcatgaggagtggcaaagagaggaatatccaggaaggattcttttgggtcgaatgggtgcgggagggactcgctggtttgaatctacggcgatggaaattgatattgagggcaaggaagtgggtaaaacgacctgcataatctatttgttacggtacctgaatgggtcgtgacgatgaaagaattattaaagtattgattcgtttagtctttgattctcaagggggatcatggtattgtgaaggctctgcagggacaagtggtatacaatacgcggtggataagggtaactcgatggggtagtctagaataaagtgtctttcacgaaggtggaagtttggggagacaaggaaaccttggcaaaagaacaacggttgacaaatctcggtgagtagtcaactgggcacagataagcaatgacaatagccaatgagggaggctgagagggagcgggctttaacttaatttaggggctctgagaaggtcacagggaaacttgaggcaatggaggtcggggtctgccaatgatg

SEQ ID NO: 637048 - DNA, 339 bp, Homo sapiens
aaaagagaggagtcactatttgctaatacaaacgctagtacagactgtcacaatttcttttactaaccttgttccaatgaggaaggggagaaaaagctagttcacatgccacttggaactttacaagtatactagggcccttttgattttactcagctatttagcatgctggagccagtttccttgtcttagatccaaaattaatcagttactaatgactccctgaccttttcctcatgcctgctttcaaagtgacctctccaagtttggccttctccagctgctgttgttccttcaaagagctattttctctactttcgtatacacccaaaagaaaaa

SEQ ID NO: 637049 - DNA, 385 bp, Homo sapiens
tgcagtgagctttttgtgtgccagtgcactccagcctgagtgacagactgagaccctgtctctaaaaaaaacagaacacaaacaaacaaaaaaataaaaactgaaacaaacaaaatatgacaggataaatgaagaagttagcattgggaaagtagtaactatcaaatatctagtcctgcagagatgaagataaagaagtagacctgtgggatcatgtagatattgattaatgaagagagttaggacatttgcatgggaggtattttgtgtttttaccaccccttttccccactataccataaactgcttaaagacaggacctgtgccttggctaccgttgcatgatacttctggaattatccttccatagacatgtccaaaaaaa

SEQ ID NO: 637050 - DNA, 126 bp, Homo sapiens
tctccatcctcacctgggctccttcctcggccctggtgaggatggaagacccccaaggcttggtgtaaccttgttccgcacagaagtgtttggaatgtgctgtaagattggaggacgtcgtttcca

SEQ ID NO: 637051 - DNA, 129 bp, Homo sapiens
ctgattaggactaagagagcagaacagaaccttccaccagctgaaactgtatctttggggctatataaaactggaagaatacctgaaaagtattcaccattcactacataacttcagaaacaggtacac

SEQ ID NO: 637052 - DNA, 933 bp, Homo sapiens
  misc_feature (625)..(625): n is a, c, g, or t
gcgcgagccccccagccgctcttcttagaagtgtgcaaccttgcaccagtagtggacttacacataggctccgttaggacctggcttatgtgctcggctgtggcttagacgctgccgtgccccagtggactcactgtgcctccccccacgacggacggaaatgggcccctccaggacaggcggcgcagtgcgcttgtggggcccgcgggcgggggggcgggagccgggagcacggtggagcggtggagggcgtcactgggttcggcgtctgcaagcggttcagctgtctgtccctagcagccggcttcgggtcgggcgtctccgccggttatgcgctttcagttctcccggtgtggccacgagtcgggtggcactgttgtgatccaatcctcaatctcctaaaggatgatcctgattatctccaattgtgcacattgaagaatgaaggtcttggattaatttgcttaaggaatgtcacaaaaatcacaacattctgaaatttttgggttatggtactgatgtgatcgggagtggagaaaatgcctgaagaatgagtacgtagaaaacaggaccaagagcaggagcatgcatgggaaatggaaagaaattttataatcctcagagnaattcggaaaaataaatgtgtattttcactcgatgctttggtgagagaagacctaaagattctggttgatacctgaaagaatctgtttatggggtctcatatcctttgaatggaaggtgcctgtggagaggttgaccttgggatatgaaaccgggttctgaattgtggaagggtaagatgttcctacaggacggttccagtatcttgtacagtgattggatttttctaatttaataaaaaaatgggtttggggagggaagaggaatttgccttgagggggcttgtatatttgacatatattataagag

SEQ ID NO: 637053 - DNA, 583 bp, Homo sapiens
agagagagagagagagagagagagagagacagagagtgacagagactgatgatgactgctatacatgaactcatgacactatttgttgcttttaattcttgcccatcatattactggtaaatctcacattgttatctgaattgatcacatattttttaacaaagcttacaaacaatccttagatccaactatcacgccctactatatcactgctctctcttaatttctccttataatcatactcatcttttttccctaacagtcctactactaccactgcatacaccagttatcttccttccatcaaatcctttctcacatgctgctactacttctatttttaccctatttgaactccttcccattcacatacaacccgtacttgccttctattctaacctgctcgttctttaactatccttattacttactcccttcactgccacgtctcctgtctatctttcaactcatcttaccttctactcatcacctccttttttatccacactctcccccctctttcccttctgtacccttcctcttcccctttctcacccttcatctcctttcctcttcccatcct

SEQ ID NO: 637054 - DNA, 139 bp, Homo sapiens
ccccctgtttaagcgacgagagggacagcgagacagagacgaccagagagacagacgacacagacgagacgacgaaccccgagaaacccgaaaactgttttttactggcaggtttacaacaaacgtcctcaagactttc

SEQ ID NO: 637055 - DNA, 102 bp, Homo sapiens
  misc_feature (7)..(7): n is a, c, g, or t
  misc_feature (9)..(9): n is a, c, g, or t
  misc_feature (19)..(19): n is a, c, g, or t
tgtgccngngccagcagcntagagcagggtcttggaaacaccatatattttggagagggaagttggctcactgttgtagaggacctgaacaaggtgttccca

SEQ ID NO: 637056 - DNA, 165 bp, Homo sapiens
ccataaatactatcatgctgtttgagccatgtcagcacaagtgctgtgatgtatctatgggagagaagctccctcttcgattggctgttgatatcagagtaaacagaatgcttcattttctctaagtcgttacagactttctcagaagctaaacatttgtaagtt

SEQ ID NO: 637057 - DNA, 165 bp, Homo sapiens
aagccgggtgttccagccagtgagcggagcgctacaagctggagcgctaccgaggcagagaagtccaactaattatgcaggcggaggcagaagccgcgtctgtgcggatgcgtgtgggaagctgagtgcctttgccatagggtgcccgagcccgagacctgaggc

SEQ ID NO: 637058 - DNA, 163 bp, Homo sapiens
gggtctctaggagctttaataaccaattccgggggcacttctggctgcccaactcaagggtgcaaatgtctccctgcaccatgccaggtgtgacgcagaatgggaggcagggggatggagcaaagaaaggcctggactgcctgtggcctttgtcgagtcactg

SEQ ID NO: 637059 - DNA, 120 bp, Homo sapiens
tatcagagatcccagtaagcgtcagggatacctagtaggcaggccctgaattggtgaggtgatggctgtcaccattgttgcctgagcaggccatgtcatgggtcaaggacctctgtccac

SEQ ID NO: 637060 - DNA, 271 bp, Homo sapiens
  misc_feature (181)..(181): n is a, c, g, or t
caattcaggtcacactacaattatgatggaagatattttttatacttaattgcagtagggactcattcccaggcaaagcaatagtctcgacctcatggaaccaatcaatggatcgttctttgaagatcgcgcaataacgctgtccactccattccccaccccggctctaaggtataagctntgatattttttcatgtttagaaattccttctgttattattcaagaaaatgtttttaatcatgctaataaacttttttggagatgaaaaaa

SEQ ID NO: 637061 - DNA, 392 bp, Homo sapiens
cagtcgcactgtgttaccaggtagtctttggctatgcttcgatagtcagcataatcccggacatcctcaagatgtagtcaccagagtataatgccctgatcaccgaagccagtgtatagcgcttaccactcacctctcatgttacaggtgaaaattgtgaggcagaaagtctgatgcatgacagaactcactgtcaggcagatagggcctcacaacgtcacgcagtctggaatgcagtggtacagtcttggctcatctgcagcctcaacgtgctgggctcacagtgatcctccagcctcagcctcgtgagtatctggggcctctgcagatgatacaggtttagatggtgctggcaggcagtacctcaaatataataaaagtggtcacttcag

SEQ ID NO: 637062 - DNA, 287 bp, Homo sapiens
tcgtgcggtgatcttgagtatccccaatgtcatggcagccggacaattgggttagcatttgtctatgatcttagcatttcctgccgttttgatcgatgaacgtgcgtgccctttgctccgggaacgtgaacgggtagtgatctttgaggatacttcgagatctactacggctgctcctcgggattcctacactatcgtgagcgtcttctagatcgagcacctggatctgcttccagagtaagcatcgcttggggttgtagcaacagcatttggtttggggggtccgg

SEQ ID NO: 637063 - DNA, 113 bp, Homo sapiens
tatagaaggtagcgatgaaaatcatgtcatctcatctagctgatgcaaagtaggtgaaaggttaggagatgatccaggtcacgtgactgtgatggagggtataaggtgtgaat

SEQ ID NO: 637064 - DNA, 1244 bp, Homo sapiens
agcgggctggtcgaggcctgtcagcctccgcccgttcagcctcggggccggggccgcctgccacctctgcccgcggaggccggggagcccctgcctgggcccgcagcctcccccgcgggggtcgggcccgggctggggtgtcccgagcagctgccctcctcgccggcatcctgagcctcatttcctgctttttcagtttccttggggaggggcgggtgggtctggatgaatttgtctcggggtcccccgatgaggcgaccctgggcgtgcctgccctttttagagggtccctcggggcccggttggggaagggggttgtctttgcatgggtgggggacttcccgaggtctgccggggaccatgactgaaacttgtgcgagcggacgtgtccgaagcccaaagaaccagctcatctgagccgtccccctccccggcagcatggcatctgaagaaagcctctctcagggcattggaacgtctgatgacagaatttttgcacggattgtacaaccaatgaaagaaaaccgtgagaatagaggagcttcttaataacttttgcccagccaaattagggaagcctggagaattcttgcctggttactttctctccagcactagcgaattgactattgtaatgatgtacagtttaaccagttttgagaatcttggatcaatacaactgttggcttgggggtcccatctcaggcatacagatgcgaaactcccgtaagctgttctggaccccaaaacatccttttgggcctccacccataaaagccttacctctaactttaatcccggaaccaaggctctgacaaaaggtacttggtggacaattggaacggtccaggatatgggcccaaggttctaaccagcgaactttttaaccacacgctttttcaccagttgagtaccacgtatcccgtgtgtgaacgagcccccccccatgtggggccgggatcccaagtgttgtcgacaacaaacacactatgcggacaagacagaccggggtgtgggttcaccgcggtgagaggcaacacccaccaagtggttgacttgcgacaggcgcgagcgatgtggcgacgactggtcatcgtcgaccaggggactgagcaacgaggtcgaggccaacggagagcgaacacgtggagaaccaggcagtggcaacaaagacggcgtggatgctggcccaccacggcaggcccgagactcgatacagaggggtcaatgacgaaccacgatcg

SEQ ID NO: 637065 - DNA, 416 bp, Homo sapiens
aatcacatctctatagcttccaaggatctggctgacttaaagggtggcatttactgggacaccatttggtgccaaccactccctatttcttccaattctcataataaccctgacagataaattacagcaaaaccaaacagttgtagaactaagatttagtgaggctaggcatggtggctcacgcctgtaatcccagcacttggggaggccgaggggggtggatcactgggaggtcaggagttcgagaccagccgggccaacatggtgaaaccccatctctataaaaatacaaaaattagctgggtatggtggcgcgtgcctgtaattccaccggctcgggaggctgaggtagaggttgcagggagctgaggtggtgccacggcactccagccggggcaacagagcgagactatctc

SEQ ID NO: 637066 - DNA, 199 bp, Homo sapiens
aggatcccatcgctgtatagcatttataaaatggtgttctgtatactttaacatgccccatactttgtattgtagagtacaataatgttaatcctataagcaccactattttatgcataatattaagaaagtccaatagagtctccatatatagaactactccatcatgacattcgctatctttagattacttgtagct

SEQ ID NO: 637067 - DNA, 596 bp, Homo sapiens
  misc_feature (596)..(596): n is a, c, g, or t
catgttcaagagaaaatgacacatatttttttttctttaaggatacatgttaagaatcggtatgctcgaccatcagtattaaagacgcaacttagatcaaatattgaccaaagtacatgggctgaattttgaatatagtataaatcatacttagtgagaggcttttgaactaacggcttacatttaataggtaattagcatgtgcacagaatatagtttatgacatattagaaaaatgaggttaaatcaatacttgggagacagagtagttatgagtgcagtatgttttctcctaatattgataaataggtggatttatgtaaaagaggtacagaaagaaaccggttactcgttgtgaaaaaaacaagtgcacattgcatcctctggtggcagatttgaacggaaacatcctcattgatgttgaggaaagacagcttatattgccttccagctattgacacatagccaaagaactgaagccatattgtaattataagatgcgcgtgtgtatgatacaggcgtggatctactactaggtccactatggttagattgagtgagctctaacttgaaatgatgagttagcacacaggagn

SEQ ID NO: 637068 - DNA, 527 bp, Homo sapiens
gtcagtggcgagatggacaacacagaaacgcgattacatgtgcagtccggcacaagccgccaccttgtgttatctcgtgtgtcttccctgttgctggccacatcctttacccaccgtgtctctcggaccactgaaggtatcagaaattccaaattttcaaagcagttgcagtattttcagtatatatgttggagattattataactggttcatggccagaaaaggttcagcacctcccacacacagacattggtccagattcctgtacttggcatctctgtactttgtaggtccaactcagacagcaactttaagattgttcagcgcagccatatcatggcaggactccacatccttgccgataccatggctgatcagaggtggctgagaggagcaattgataagagatacaaattcgttcttgtagtttatggggaagtctttgtattcaacctggaatccctggactctggaaagatagtccagttgctcagagggtctcgtgagaggtccatggggtacgtggc

SEQ ID NO: 637069 - DNA, 123 bp, Homo sapiens
tacgaggggaccctgtccacgtatcctgacaattggagggccttcaaggctctcatcgctgttcagtatagtggggctcaggtccgcgtgctctccgcaccaccccacttccatttttggcat

SEQ ID NO: 637070 - DNA, 328 bp, Homo sapiens
agtgaactgacctacataactagcatcaagatcaagataaagggccggacgcagtggctcatgcctgtggtcccagcagtttgggaggccgaggtgggtggatggcttgagccaggagttcgagaccagcctgggcagcatgacaaaaccccgtctctaccaaaatatagaaattagctggatgtggtggtggatgcctgtggaccccgctacttgaggcactgaggtgggaggatcaactgggcccgggaggttgaggctgcagtgagccatgatcatgccactgcactgcagtctgggtgacaaagtgagaccctgtctcaaaaaa

SEQ ID NO: 637071 - DNA, 186 bp, Homo sapiens
ccttacagcgacaaaccgtaggtgccacgttcgcgaaacacgctctgcgcacattcagtgactccttggtcttctcttccacaagggtctacgatttccttcataaggttcccaaactcctgaatggttcccagcgggtggtgataggacggcgtactctctagaccacgcagtgtcagagaagct

SEQ ID NO: 637072 - DNA, 215 bp, Homo sapiens
agtgagaccctggaaatagcctccctgggcagtgtacagcctgggctccctgctgggcagccctgagtaggctctcaggctgggatccaggatgacagtcccaggctccagagttggcccagcaggcgactcttctggcaacctttgcccaccctcatccatgagcaccttcacacacacacacacacacacacacacacacacacaccccaccc

SEQ ID NO: 637073 - DNA, 825 bp, Homo sapiens
  misc_feature (11)..(11): n is a, c, g, or t
  misc_feature (133)..(134): n is a, c, g, or t
  misc_feature (151)..(151): n is a, c, g, or t
  misc_feature (160)..(160): n is a, c, g, or t
  misc_feature (242)..(242): n is a, c, g, or t
  misc_feature (248)..(248): n is a, c, g, or t
  misc_feature (296)..(296): n is a, c, g, or t
  misc_feature (320)..(320): n is a, c, g, or t
  misc_feature (442)..(442): n is a, c, g, or t
  misc_feature (476)..(477): n is a, c, g, or t
  misc_feature (489)..(489): n is a, c, g, or t
  misc_feature (683)..(683): n is a, c, g, or t
  misc_feature (724)..(724): n is a, c, g, or t
ctgtttttcgntataaagaaaaccattatgtggtccatctataatacattctcctttccttctgaaggttttattgtatgtattgttatcattaatcctagtcttttactactaaacttaaatggccaattgnnacaaacagttctgagancgttcttcnaccactgattaagagtggtggtggcaggtattagggataatattcatttagccttctgagctttctgggcagacttggtgancttgcnagctccagcagccttcttgtccactgctttgatgacacccaccgcaantgtttgtttcatatcacgaacagnaaagcgacccaaaggtggatagtctgagaagctctcaacacacatgggcttgccaggaaccatatcaacaatggcagcatcaccagacttcaagaatttagggccatcttccagctttttancagaacggcgattaatcttttccttcagctcagnnaacttgcatgcnatgtgagctgtgtggcaatccaatacaggggcatagccggcgcttatttggcctggatggttcaggataatcacctgagcagtgaagccagctgcttccattggtgggtcatttttgctgttaccagcaacgttgccacgacgaacatccttgacagacacattcttgacattgaagcccatattgtccccatntttttgcttcactcaaagcttcatggtgcatttcgacagantttacttccgttgtaacgttgactggagcaaaggtgaccaccataccgggtttgagaacaccagtttccactcggccaacaggaacagtaccaataccacc

SEQ ID NO: 637074 - DNA, 928 bp, Homo sapiens
aaacaagctccggcgacgtgtccgagtgacccggataatcccgcccttatagcagaggcggaagatggcgggacgaaccggaagagggtgaaaatgctttcgtgtcgggaccaggtaagcgtagctcgctgccgaccggtccaatatggcacagttcgcgataccgcgccggcggagaaaaattcattggaggttgatgcgatacaagatcctcttcagaaataccactatcttcctgacgtcgatgggagaaccctgtgtgaccttgtcttcgacttatcagcctggatagttctgagaaacgcgctgttttgttacaatgggagaatctatgactctcaatggtccgaggaagttcaggcgtgtctggaataacacttaaggaaaaaaggagggcttgtttgggaaatattgaacatgatcaaatagttgttccagatactgcagtgaactctttattatgacagagcttggctggaggatgatatgcatcgattggtctgttagtgagagcaacatggaggctaacggagaagtggaacgtagctgaagacttgtattggtgacaaaatcgaatggatgaaacattgtaaacttggaatgatggtccatacatttttggttgtccatatgggtatttcatcctgcaggggaatcctcgaaagacaattccttggcgttctccttttaccatggacttgtgcagtggacgggtcctttgaatactccacacctgcagaattgccctgagaattttccgcacacgggttgcaacgcgaccggaaggagccagagccggcagaccggcacggaagacccggaaatgcgggcgcccaccggagggtcgcacctcgtaggataaaacgcaggcccgcgggttctcgatacacgcccgtcgagggcagacaaagacacagaggagatgcac

SEQ ID NO: 637075 - DNA, 1107 bp, Homo sapiens
gcttttccccctcagagggcaaaggagacattcagatcacaatggaaagaatctcagaagggaaagaggggaagtagaggggtctgcgtaagtctgaatgtctccttttgccccctcagagggcaagagacggtgaacataaaggatttggtgaaacatttgtaagggtaggagttgaaaactgcagttcgcagtgccacggaagtgtgacttggagccgtgcagataagtgcccagacaatccatcccatactgcactataagccagctgcagggcgggcaaggcaaggaaagctgattccatggaagtgtatcactttctccggcagctgggaagtctagaaccagcgcagactgggcttaagggagtctgctcaatgcaatagtcagcaggttatacacccggcacggatgacagcagaccagttcccagggagcacgggcatgccttgtgaatattgccaagcttccagctgcctcgtttctcctaagagcattcctaggaatatgttccccgccaatgctgggcgtacatcctagccaacggtgcaaatcctagagggtatacaatcatctctggtcacgatcagtcatgacttagtcaagaattaagggcagtaaatcctgttggcttaacgtcactgttccaactggtgttatatctctcatgaacagtgacaccaagggaaagtggactaatgtcacatgtaaatctacgagtgtctaaaagaatgcgctaaatgtgatactgactgggccgaaagctggtatagaaagatcgaaatgcggcatacatacagcaccacaggtaattgcaaagggtacgaaagaagcaaaggacagggcgagaacgacataaggcggcaaagacgcacgagctagggtctagaaggagaagagaataaaaacaaagggaaaatgtttcgcaacagcagagaagacgacataaggttagacaagtgactcagcagacggccacagcggagagtagaagcgagaacacgaacgaagtgccaaacgatcagtagtagtgtggcgccacacaccagtgagaggagtaaacgagcgatggagcgcgcactgtcactgaagaggagaacaaacagt

SEQ ID NO: 637076 - DNA, 115 bp, Homo sapiens
gccagatggtgttacctggagcttaaaaagctgcacgctagttttacacttctgacaatggccaagaccagattaagagggccgcagtccaggctgtatttcacatagccagcca

SEQ ID NO: 637077 - DNA, 349 bp, Homo sapiens
  misc_feature (7)..(7): n is a, c, g, or t
  misc_feature (83)..(83): n is a, c, g, or t
  misc_feature (170)..(170): n is a, c, g, or t
  misc_feature (194)..(194): n is a, c, g, or t
  misc_feature (337)..(337): n is a, c, g, or t
ggctggngcgggctgtttcctgggaactctactgggtctgtggtatggggtgattgattctttggatccaagaaaccacagcnagaaactgccactttttttcagtttggtacagcatcactcctgcgaaattttgttggacaaagaagtaacaaattctgcccaaattnaagaggaagggacaaaggacccanaagcccctgcctttattggttggttttttctcactccatctagacacgctgttataagttctggagcctgagtccactgtaatggcttaaggtggtgagcggcgtttgctcatgccctacactgcagaatgaaaaaggaagcnccaaagcaagca

SEQ ID NO: 637078 - DNA, 338 bp, Homo sapiens
tcagaaactgaaaataagttaacagctctcctgaggacacgaataatcaacagtactaataaagggatagagagatcagatttattctgcatagaccatcaggggatgattattccttattgaattactcagtgcttttcaaaggagctttcctacctaaaagtgcttaataggaagctggctgatgtgtcagaaatgttctacacgggtggagttcagaatatacgatctgaaagtccccccagtttcatttacttcagaaaacatcttagaccacaatcggggactccaagtagatcattctataaacctacctatttcacaatcggggtaccgag

SEQ ID NO: 637079 - DNA, 260 bp, Homo sapiens
  misc_feature (72)..(72): n is a, c, g, or t
ggtcgactctcaggatctcggtccgctcggacatgtgaggtcaggagttgagaccagcctggccaacatggncaaaaccccgtctctaccaaaaacacaaaaattagccaggcatggtggcacacacttgtaatcccagctactcaggagactgaggcacaagattcgcttgaacccagcagacggaggttgcagggaggccgaggctgcagtgagcctaaatcacgccactgcactccagcctggatggtccgagcgga

SEQ ID NO: 637080 - DNA, 904 bp, Homo sapiens
  misc_feature (61)..(62): n is a, c, g, or t
  misc_feature (74)..(74): n is a, c, g, or t
  misc_feature (132)..(132): n is a, c, g, or t
  misc_feature (139)..(139): n is a, c, g, or t
  misc_feature (141)..(141): n is a, c, g, or t
  misc_feature (173)..(173): n is a, c, g, or t
  misc_feature (205)..(205): n is a, c, g, or t
  misc_feature (280)..(280): n is a, c, g, or t
  misc_feature (291)..(291): n is a, c, g, or t
  misc_feature (335)..(335): n is a, c, g, or t
  misc_feature (346)..(346): n is a, c, g, or t
gtggcggctccgcggttcgcaggtcgttcgctgagcgtctctgcttagccgcggtcatganncggcacagggtncagaggcaggttctagcctgtaccgcgatctgctgcgcccggggtgggaagcgggccngaggcgngntgcgggcagagttccggcagcatcgggcctgnccggtccgacgtgctgcgcatcgagtacctgnaccgccgcgggcggccagctgcagctgctacgctcgggccacccaccgccatggggccttcgtacgcccgcgggncccgaccgggnagcctggcggcgtgggtcccagcctgacgacggcgacagtccanggaacccccangacagcacggggggcaccggagacccggcccgaaggacggtgacaggcgaaagaagcgaattcgttcgatggcgtgttgagccaggaggctcgctgattgcatggggggactggggaaccgcgctaaggtgagaaggtctaagagactaggttgaggatttggggatgtcagagactctccttgggggacgcaggggggcttaagagcccgtgatggcacggcaaggggagggcccgccttttccggatgctgggaaacaggtcggtgctcatcccccatgagggctgggggcggcttgggacgcttgagggcttgacagtgtcaggaccaagaagctattggcccgaaggtacgggggagcccaggacgacccccggggtggaacaggggagagccttgaagacggccctttttttttgaccccgtgagaagtattacccagtttgtggctcctcagggagttcccccttctccggtatttaactcttgagaattgcagacttttggctgaaaaagtttgggaagggtcctgattacggtgaaagccgggaatccct

SEQ ID NO: 637081 - DNA, 995 bp, Homo sapiens
cgcgtggcagcaagagtcgcatgagatgatggaggttgacgaggcagggtcgagtctgcacagaatccggcgatgaaccaagggcacagaaacacgagcagtggccatcgtggccgcacctctagtgaacagagcctgcaaggcatggggcaggagcggggggaggaggacccagcaagaagaacatgagctgcctgtggacttggcaaaccatcgaaccgtggacagagatgcagaggatgttgatttgcaatcgactatcggcatagggcaagcattgaaggatttgaggtactgaagacaacgtgaagactctctgcctccggcaaaatttaattaaatgcattgagaatctggaggagctacagagtcttcgagagctggatctttactgagcaaccagagtcacgaagattgagaagtctggaggcgctaacaggagctggagacttctagatatttgcttttaagtctgctgagaaacatcgaaggggttgacaagttgtacacgacttgcagaaaactcttcttggtcaacaattaacatcagtcacaattgagaacttaagcaacttacttcagctaccagatgctagagcttggggatctaagcgcagtccggggcaatcggaaacttattcgaagacctttaatcaaacctggcagacaggtcggatgctgggggaaagaaccagaattacttaaagcttcagaacctggattgcgctcaccgaacccttggaagtccttaaggaattgctactgcgaacccggggttgaccccagtaattgtaagggggcccttgaggagaacctgtgtggtaaaccccttttggtggaaacggaggttcccttttagccccacagggggcgtttgaagggcagtattcagaggggccccgttggaacaccacatgtgttctagaagaacagggcttgacgggatagtacaagcggagagagaaggttttgatcgtagaggggcgcgcgaaagt

SEQ ID NO: 637082 - DNA, 428 bp, Homo sapiens
  misc_feature (23)..(23): n is a, c, g, or t
  misc_feature (64)..(64): n is a, c, g, or t
  misc_feature (415)..(415): n is a, c, g, or t
actggcacccagcttgtgcccanctgacgagaagtccaattgtgtgccttcctccttccccaantctgccatcaaatttgcccaattaaaagacaaatggtaaactcccagagaatcatgttcatagcttgaaatctgcatcatggtccgggcgtggtggctcatgcctgtaatctccagcactttaggaggccgaggcgggtggatcacctgaggtccagaggttgagaccagcctggccaacatggtgaatccctatctccactaaaaatacaaaattagccaggcatggtcgtgggcacctgtaatcccagctacttgggaggctgaggcaggagaatggcttgaacccgggaggtgaagattgcagtgagccaaggtcgcacctttgcactccagtctgggtaacaagagnaaaactccatctc

SEQ ID NO: 637083 - DNA, 382 bp, Homo sapiens
gggatttacagaacccaaaactggctggcccaaaaacccccaaagcttttagctttgcggggtaatcaccaggccccttttttttaaacaaaacgaggggggggcccccctttttttaaaaaaaagtcctccccccgaaaaaaacccccggggggggggctgtttaaaaaaatttttttttggggggttatccccccccccccccccgggagatttttttttttttttgtgccccaccccccctccttctctcacctggagagggggcgcccccccttcctttttttgtgggggggggccccccccccccctcctctgtggaggggggaaaccattcttcttccttggcggttttggggggggggaggggggcgcgccgaag

SEQ ID NO: 637084 - DNA, 290 bp, Homo sapiens
acccatcatgggtctggatcaggtggtatctaaggccaggtatgtggcgtgcattggtagtctcaactacttaggaggctgagcccaggagttccaggctgcagtgagctgtgattgcccctaagaaagccactgcactccagccaggacagcatagtaagaacctatctctaaaataaaaagaaaaaatcctcaatcgaaaatcaagagatacaggtatcatagggggtggacagtacaatcctcttgtattagctaggtttaaaaattggcgggggggggtttacatc

SEQ ID NO: 637085 - DNA, 900 bp, Homo sapiens
  misc_feature (47)..(47): n is a, c, g, or t
  misc_feature (61)..(62): n is a, c, g, or t
  misc_feature (64)..(64): n is a, c, g, or t
  misc_feature (67)..(68): n is a, c, g, or t
  misc_feature (70)..(71): n is a, c, g, or t
  misc_feature (88)..(88): n is a, c, g, or t
  misc_feature (99)..(99): n is a, c, g, or t
  misc_feature (123)..(123): n is a, c, g, or t
  misc_feature (393)..(393): n is a, c, g, or t
  misc_feature (410)..(410): n is a, c, g, or t
  misc_feature (415)..(415): n is a, c, g, or t
  misc_feature (436)..(436): n is a, c, g, or t
  misc_feature (497)..(497): n is a, c, g, or t
  misc_feature (503)..(503): n is a, c, g, or t
  misc_feature (564)..(564): n is a, c, g, or t
  misc_feature (585)..(585): n is a, c, g, or t
  misc_feature (612)..(612): n is a, c, g, or t
  misc_feature (618)..(618): n is a, c, g, or t
  misc_feature (634)..(634): n is a, c, g, or t
  misc_feature (636)..(637): n is a, c, g, or t
  misc_feature (651)..(651): n is a, c, g, or t
  misc_feature (662)..(662): n is a, c, g, or t
  misc_feature (668)..(668): n is a, c, g, or t
  misc_feature (678)..(678): n is a, c, g, or t
  misc_feature (680)..(680): n is a, c, g, or t
  misc_feature (702)..(702): n is a, c, g, or t
  misc_feature (734)..(734): n is a, c, g, or t
  misc_feature (745)..(745): n is a, c, g, or t
  misc_feature (776)..(776): n is a, c, g, or t
  misc_feature (783)..(783): n is a, c, g, or t
  misc_feature (787)..(787): n is a, c, g, or t
  misc_feature (791)..(791): n is a, c, g, or t
  misc_feature (794)..(794): n is a, c, g, or t
  misc_feature (810)..(810): n is a, c, g, or t
  misc_feature (820)..(820): n is a, c, g, or t
  misc_feature (823)..(823): n is a, c, g, or t
  misc_feature (872)..(872): n is a, c, g, or t
tggaatcatgagggcttcactggtaaaatgcttctgaattgactggnaatccattaggggnnanggnngnngttattcccagagaggngcctcagtggnggcgctgtgtctcctacgcaactnctgagggctggagggtgccaagggcagctgctgaccgcctggtgcttcaggagctgggtgctggggaagccacatgcactgcggcgtccagaggcagaagcacaaccaacaagaaccacgaaggaggcgcctttcctcctataatgcctgtttggtgccctctactgacaaagcttatcccctttcaaaaaacagccaactgaaaaagctgaatttggaacataaagtcaataaatccataaccagcaatactatggggcctggggtgcnctggcctttagtgagtngagtngggcgaaggatgctgcatgtnctgcagtgggcacagcggccctgcacgggggagaaccatccctgtaaagtgtcagttgttncccctntttcagttagggtccctgcaagatatggcagttcactcacataaggtcagtttgatatgantctcctgacaaggtgagtttngctctctgcggctactaacagcctgancctttncctccccaggcctgancnngggcatggaaaggnctgcctgatanggtganaggtgctgtnanctttagccaagggcagccaggnataaatactgggaactcacgctctctcctgtnattggccagcnccactcccccaccctgacgttgagtgaaganaaatggnagcnagangtntggtgagctaacaganattccatgcngcncgctgagaagccacgtgagtggggacagggctaaaggctaggcaggganagggctggctgtgtcccgaggcttctcc

SEQ ID NO: 637086 - DNA, 164 bp, Homo sapiens
gcccggctccgggctagaggcaataaataaacccgattcctgcgcggcacagtccgcgtccgtccggcgccgtccccgggctgacgggggagggagcggagaagcgacgccagattctgcgtataaatcagctctggagcagacacagcccggctgtgaaaagc

SEQ ID NO: 637087 - DNA, 112 bp, Homo sapiens
ccacatctccgacttactcagtaacacaagagcaggaggagacaatacccccacgaagtctgcagccgtgtccacccttgacagaaggatgcatggcctgctgataacatca

SEQ ID NO: 637088 - DNA, 433 bp, Homo sapiens
aaagacgaacgaggggcgagggggcacccaaggcaacacagcagccacgagcggcatacgcaccgtggcaagagcaaagaagccaccagaagcactactgcgactacagtgtataatcagccaaatatagctcgcatctcaccctggagcccaccttagagctaacttactttacaccacacacaagatagagaaacaagttaagtaacactaaagggaagcaaacagacaaatccgtaatatagaacagtctacaggacaactgactcagttaacaaaaaaaattcactggcatacccctatgggcttaaacacagcactaaaacaactaataacctaatataaggtgtggatctttttaggatcctgatccacccaagcaatgatcacaagaccttttagaacagtcaaagcacttgactactgcattacg

SEQ ID NO: 637089 - DNA, 639 bp, Homo sapiens
tgatcatagaggacccccctagaaaggtgctgacagtgtaaaagctaactccacctcctatactatagaaatcactattacgatataatataccatattaccactatttatagaccatccttttgctatatatagctagatattttctggtgagggaagggtagtgtctacaggggtctatattgtatttgaaatactacaggatggggagaggtaatttaagaacgaattataattataggtctacactagttgcgagtaaaggagcatttttacaccccttaagggtgcttaattctagttgaaaccaaaaagatttgtctacaaatgctatctatttttagaaactatatagaaatgactccctttcaaagtcaatctttggaaaatatatgaggaggtcactaatatagttggtgcagttaatataatacaagatagatattggatagatgggaagtttgagaccgctgcattttgtttttaaattatagcacctatctagataaacccccaaatacagaaatgttctaacatctctgaatgacctctgactttaaaaaagtttttatttgcataggtgtattaactaaacactgacatattcttctactcttctccttctatctcttggggtgg

SEQ ID NO: 637090 - DNA, 844 bp, Homo sapiens
ccaacgaccggcctgcgctgttactcggccgaggggcactactagtatagagtagaaatagccctagggaaatctaccttgatactcttatttccaacgggaaactatactaaagaaaaagctgatataggatgctttcaaacttcacctaaacttgctattcctcataatcttaaccagtcatacggaaatgacataaagagaatgcaaaacaattggaaaatggttaatttcatccacatcaaatatgtatattagggcttaccatgctgcctaggcacctgtctcttagcaaacagcatcgtgaaggactgtaactgtattcacttatcttttattcctggctactaaccataatgtatagaggttgagctctaacttattctaaacacaatgtgtaaacttaacgtgtttaactttatataggttatacaaggtacattctcacatcatcctgatacattactcaacttctgctgcacggctgaggccacactcgtctcaccacagcgcctgattccctacctaacgcgaggccacgcatgcctaggcacattgaaactgccccgcccccactcccacacggctccaatggctccttctaccactcctaacctgtcgggcatatcaaacgcacataaacacaacgcacacgcagcatcgccacctggcactacgggacccagcaataataagcgtcacgcagaaaatacgaattcgacgagctctaacccgccgaagaccacatacccttccataactccgcccgaatttccgacccgcagctaacaccgctcaaccgccaaaccgatagcttttggcgtgctgcccaccctaacctgct

SEQ ID NO: 637091 - DNA, 152 bp, Homo sapiens
caactgtagactattgtctagtataggatccatctgtatctctgttaagctaaacgtgagtacatagtgatgttggaaacatgatcttagcttctaggaaaaattatactaacattctagaagtcttgaaaaataaaatagcagtctacctc

SEQ ID NO: 637092 - DNA, 382 bp, Homo sapiens
ttacactttttcagaagccacatttgggcaggcctcccgccttggtaaatgctgtactctttgcatcaagtgtgctagtcatccttccccacttggaaaattcctatgcattttgcaggcctgacataagcatttcctctgtggaacctcctttgctccactccaggagagttattcaaattcccactttggggtccccctggaaattccacccacctttaatggaaggcaactaaattggtccggaatggtttatttttccaaagtttttaatagaatgtgagctccttaagggcaggaaaaggaacctttttattttttgcatctccatagcatagtttttggcatatgaatgtttaataaatgtttgttgaataaaaaa

SEQ ID NO: 637093 - DNA, 1188 bp, Homo sapiens
tctcatttaactttttaaatggggtctcaaaatttctgtgacaaattttgggtacaatgtggtttccattaaaaagttacgtgattttaaaacacttaattacactttaacaccgtgcccaccacgcaaaaaacagaaaaaccaagaggtggctccacaacacactttttcctttctcctttcgtgagaggtttatcacgagtgcattgtgttatcattacaccgagctctttttcacttcacttacaactttaatgtgcgcccaatgtgacacacaaacgagtctcgtgaagacaccgatctcttccaccacacgtgcattaagacagtgtgggggtggccgaggctattgaggcgatcaataatctcatattaagcgcttcctgtgaagcacatatcccgtggggcccgcgaacttgtggggtagaccttgtgtcacaagactctcacaggacagcgcctctctcgtgtgagtcaccaactgtgacttgtgtgtatgtgacccacccacaccgcgagcaaacctgtgtgtcgtgctcctccatatatgttcaccagaaaaccaggacgaaacacgagcagaccacccccaagagacgggtagtgcgcactattcagattctgttggcacaccaacaggctcttctctaccacacaaccaaccacacagaatgtagggcagactcgtatgcaccaccgagagagaagcacccgctcttttatttccaccaccacacatgtggggcccgacgtgtcaatctcacaccgcctaagaaagtctctccaacacgcaactattttctagggggggacacgatgtttcttctccaccaggcataatctttaacaccccccgacatcaatacaggcggggcgaggaaagatccgaccacagctgcgttcatcatatcactattcaacaaaggactacttccgagagaccgacaaacgctttgttggccatgtttgccaaactagtgtatttgatgcccccggttggttagggcacaatctccacaaacataaaccaaggggggtaccatatatagactcgggcagccataattactatgggaggccaatggagaattagtggttaccagagagcattatcatctcacctcgtagacgaagcagtattcacaaccgccacagagtcagctatcacaccactatggaaaggcggac

SEQ ID NO: 637094 - DNA, 244 bp, Homo sapiens
ctagaggatcccccttacaatcgacagttaagccattgtttaaagaaacggtgcttctgttctgtgtttgtgctcctgatttccctgagaggttctaggatgaaggctagaacacaggcttgttaactgtcagtctagtgctgatggacctcagaggacttgagtgttgcatttcttgacgcatggggtgcagagagcctttcctggatttggatagtggctatatgattagattattgtggac

SEQ ID NO: 637095 - DNA, 676 bp, Homo sapiens
gtggagagtgcaggagcgcagcggtctatgaagactggcccatttgcagagcactccagaccagctgtggaacatcagcgcctgtcccttcctgtgtccatagatgtgatacctagcgatctcatccggcgatgtatatggccgaggccagtccctctgacacttggggcctcggtaatctcccatcttgtggcatgggcagtcagagtaagcaccagccaccccagccccgaaaagctgcagtccagctctgtcctgactgagcttggacggctgagtgcctggagaagttccctgtgatccagcacttccagttcgggagcctgctgcccatccatcctgtcacgttgggctaggaggggccaagccgaagagccacccaggccacagttcctgtgcctgccttccccatcccggggggtggcccctccgggtcccctccctctgtgcgtcccgtgtgatgaggaggctgtttactggtggtgggggtggcgagagtggtgctatgagggggctcagagcagtagggcttgcagggtcccggcgtggggagaatgtgaccaaggagtatccagtccccggagttcccgtgttgctagactggccagaagagagggtctggggcctggtcactcggacactctctcctgtttctggcctcttctccctttcatcc

SEQ ID NO: 637096 - DNA, 165 bp, Homo sapiens
aggggaagctgggcttggggtactcaagaactctgctggttctacattttttttttgagcctaaaattccttcaaaacaggtaaaacaaaagacagttatgctacccttagctggaatgccttactagtgtaggagaagagaaaattctcttcataagagttagc

SEQ ID NO: 637097 - DNA, 437 bp, Homo sapiens
aactggggctcagcatatggaggatgcttctttacatttccctacacccgtgatccaaaacctatttgctctcacctggactgaccctgacaccctccagtcacaacaactcacatggactgtcctccctcagggcttcagggatagccctcatttctttggacaagctctagcccgaaacctcacttccttaaacctgtctcccagtcatcttcaatatgtggacgaccttcttctttgcagcccctctctaaaagactctcaaactcacacgggcactgctctcttaaactttctcgctatcaaagggtatagggtctccccctccaaggaccaactctccatctccatgatgacttacttaggaattcaactttcccctggggcccaggctatgaatccagccaggtcagcattaatagaaaatctagccccaa

SEQ ID NO: 637098 - DNA, 212 bp, Homo sapiens
ttctttttgaggcatcagaacacatttcatggagatggtattcctttcctgcctgatatgaagaggagctgctaagggagggagaacaaactttactgcttataatttttatctagggccagcctcaataacagaaatgaaaaattttgtgattggataatgaggcaaaataaatttgtttaaaaaggttttatttattcattcatgagaga

SEQ ID NO: 637099 - DNA, 611 bp, Homo sapiens
gcacgagctatgtttcgtgcttttgccgattagacagtcaggacattgatatgtgctagcgttagaccattcaatatccgattctttcaaatatgtaactgcattcttcttaagagacttctgaatacttcggaagttagcatgtccaagcattcgatgtattaacggatatggatatttatttacgcttttgcttttgttgacgttgtttattgttagctttgaaatgtgcgaaggaattaggtattttttagataaccagtaaaagtctccatgtttgactatgggagctagtactgtaccatccgatctttctaaagtgtttctggtaaagcaggcagtaatattttgattagccagctcactcaaacttaatagatcataggctatgtttggtgtgtgtagtgcttttattgatgttttggtgccgttctgaaagttgaagtgaagattaccaatggcatttataggaatgtcttgtttttgagcatcgactatgtttatttcagaattgggtgttgcatggtgtaaataatgggctgatctgacaagcgtttgcgaagctcctgaatcaataagaaggtgatcaggtagttcgtcattcgagtcta

SEQ ID NO: 637100 - DNA, 519 bp, Homo sapiens
cacgagggagcacaggatcaaaccctgtttctgggtcgggcaccacggccacccgcgcaaaatacgatgtcccgaacccgtgcctccgtggttggcggctctcgttgcggtctgtgggctggtactggaaggccggccttccctcccacagcccctcccaggtgacgaagcccacactgtatggcgggatgtagcccccctgcacccgcacccccgcgtcccctcggcaatccgtcggctcgtacgtggtgcggtgtccgttccccggaggactgttgctactcccactaccatccccggatacccacgagggccggaagacggggtcagccggatcatcactgatcacggcataccagtcattcgccgacaagaacccgtcaaccagatgccaaccatccggaatggtcaggacatgcaagaaattcaggaaggaaaattggcgcatctgttcctcataccaggcattgagcgccatctggctgctgtacaccgaatccccataggcggtgtacggcc

SEQ ID NO: 637101 - DNA, 179 bp, Homo sapiens
gttgccaggaggctgactgtctctgtctgggcaaaggtgatgttggcattgtcatgcagtgcaaagatctcaggcatatcatggagtgggaggtcttgatgtagtgagaggtagccgtggagtgtctgtaggtaggcgggatctggtggtcgatgccctgagttgctgtagctagcgca

SEQ ID NO: 637102 - DNA, 428 bp, Homo sapiens
tcttctttttaacagtacactttttataatgccttgaacttgtttctctgtggcagaggaaaacagcctcatgcacctggacaaacaaaggtgttccttcaaaaacagactttcagaatcattaattctggtttagaaataattatgaaggttaagtggactctcatgcgtaagattttagagctggtgagtggctaatctgtgctttacttccccttgttttcatccttcttataccaccggtattaccgtgcctcctcttaacagttttgttccctctgtagcaagtgagccagagacagtgcttcagcttcctatagcctcctggtggtatgcagggacagctggctgagatcatatgcacttctacccaaacatatcccaaggtaaggctacaggtagtaaagctgtgaccagaaggtagattt

SEQ ID NO: 637103 - DNA, 376 bp, Homo sapiens
tggtatactacgtaaggaagcccctacagcagattgagctatcaacggacaagtaggtaggccctcccttactagtcccaacctatctattgcggcggaagtagaagaagctggatagggttgctcacacctattaacccaagtgcttgggaagctgaggctagaggattgcttaaacccaggaagtcgaggctgcggtgtggtattatcacaacactgcactaccagcctgggtagcagaggtagactccatcttcaaaaataattaggtataacaaaaattagaaattgccaataagccaaaataactggaaagtgcccacagtttgccccttgccccagaggcatcgttgctgtttcgccgtcccaagcacag

SEQ ID NO: 637104 - DNA, 411 bp, Homo sapiens
  misc_feature (393)..(393): n is a, c, g, or t
gaaggccgggttgggtggcttgtgcctatgatcctggcactttgggatgccgaggtgggaggattgcttgaggccaggagtttgagaccaacctcagtgacatagccacaccttgtctctacaaaaattaaaaaattcactgggtgtggcagtgtgcacctgtagacctagctactcaggctaatgtgggaggattgcttgagcccaggagttggaagcttcagtgagctgtgattgtgccactgcactccagactggacaacagagtgaaaccctgtttctctaaaagaaaaatgtatggccaggcatggtggctcatgcctgtaaacacagcatttttggaggcaaaggttgggcggatcacttgagatcaggaggtttttgaccagcctnggcaacaatggtgaaccc

SEQ ID NO: 637105 - DNA, 270 bp, Homo sapiens
tctcttaaatcaagatccaaagtgcaagagcagtgctgctggcatatggtcgtcgtatatacacacaactctcccttcacagaagctggcatattgttctaattgttctattttattcttagctatcgttgctaatctcttatggtgcctaatttataaattaaacttcataggtatgcatgcataggaaaaaaacatagtataataggattagatactattgtggtttcaggcatctgctaggggtattgaaatttatccccatgaagg

SEQ ID NO: 637106 - DNA, 484 bp, Homo sapiens
tctgtctcgtattcttgcttcagtagctttgaatgcgtattgtcttgcttctctagttctattgtgatgttagggtgttgattttagatatctgctgcttcctcttgttggcatttagtgctataaatttccctctacacagtgctttaaatgtgtcccagagattttggtacattgtgtctttgttctcattggtttcaaagaacatctttatttctgccttcatttcgttatttacccagtagtcattcaggagcaggttgttcagtttccatgtagttgtgcagttttgagtaagtttcttaatcctgagttctaatttgatttcagtgtggtctgcgagactgtttgttgtgatttctgttcttttacatttgctgaggagtgctttacttccaactatatggtccattttagaataagtgtgatggggtgctgagaagaatgtatattctgttgatttgtggtggagagttctgtagat

SEQ ID NO: 637107 - DNA, 633 bp, Homo sapiens
  misc_feature (458)..(458): n is a, c, g, or t
cgaacatgtcgcggctgcagagatagaaaaacctctggcccatttggataaaaacttgtagaaacctccagctcactcagataaaggaacaagaacgacctagcacagaaatgcctttgtttggccagccacggtggatcatgcctgtaattccaacaatgtcggaggcagctgtgggcggatcatctgaggtcgggagtttgagaccagcatgaccaagatggacaaaccctgtctttactaaaaatacaaaactagccaggcatggtgctgcatgcctataatcccagctacttgggaggctgaggcaggagaatcgctagaacccaggaggtggaggttgctgtgagccgagatcgcgccattgcactccaggctgggcaacaagagcaaaactgcaaaaaaaaaaaaatatatataaaacgaaagtacatctcaaaaaaaagaaagaaagacangataaagaaaaaaaaagaaacacctttgtctttgtacagtcagtgggctcccaggaaaatgttccttctctttttgttggcatgggcactgtgggatctggtgcattccggtcgacactctcgtttatttggactgtaagtctgacctctatgaataattacttcagcccctgat

SEQ ID NO: 637108 - DNA, 292 bp, Homo sapiens
ctggaagcgaaggcagacgactctcacagaggagatcacttcctgagagcttgtatgatgcagagctgtcccagatgcagacccacatctcagacagttctgtggtgctgtccatggacaccaaccgcaaccgggacctggacagcatcatcgctgaggtcacggcccaatatgaggagattggctcaaagaagccaggctcccgggggtcagccgttctggcttcagcagcgtctccgtgtccggcttggccttctggagtgcatcctccagcccttccagtttgtgcttg

SEQ ID NO: 637109 - DNA, 293 bp, Homo sapiens
cctggaagccggccggtggagacagacgattatcttgagcccaaccgaagaggtgttttctaagccgagagccgtcaactacaaactagcctgtgctacaaaccttaaaggtttcacacagaaaatcccaggcctagatggctgcattgttgaaatctgccaaacattaaaatgagcactaattttttgcacactgttcctaagagtaggagagggcacaacacttcccaacttactctagggcagtatgaccctgatactagactaggcatcacaagaaaactataagccaa

SEQ ID NO: 637110 - DNA, 208 bp, Homo sapiens
ggggttttttttccccccccccccccgtttaaaaccgggggtcccgggaatttttggggggggtttttgttttttaaaaaggggcggttccccgggggggggaataaatttttaggggttcccggggcccaaaaaaaagggccccgggccccttttgccccccttggggtttttttttaggccccaaaaaaccccttttttttgggga

SEQ ID NO: 637111 - DNA, 333 bp, Homo sapiens
aagaacttatagattattacataccactgcctggtcatccaagtctttgtgtcagggaggaaaatgtctatacaataatggtgtaactcggaagttcaggtcaaaaaaaaaaaaaattcaaaaaagggtgccattgacccaattgagatttttaaaatttaccttttcaaaggccgggtgcggtggcccacgcctgtaaatcccagcatttgggcagaccaggtcaggcagatcacttgaggccaggagttcgagatcagccgtggcaacattggcgaacccccgtctctataaaaattccaaaaaaattagccaggagtgttggcgaacacc

SEQ ID NO: 637112 - DNA, 696 bp, Homo sapiens
atcttgtggttgtgcaagtggctgaggcactgagcagttggtgggagcagaggtgccgcgtccttctctcagcactaccaccacgggaagagctggctctcctcacttactcatgtctgcctgcatttcagtgcctcaggaatggcccgggcgctgtttttgaagggttccactgagtcaggagagtattgggagggagaggcaggtcagcgctctgcctcttccagttgcagcctcaagtgtaggtgagaacttgctcaccacacaccccatgtgcctacgcaccaggagagtcccacaccatgacatgcagtcatggcaggagctgaagcaaaggtggggagctacctacctcccccagcttcttttagagcaagtcttcagcgaactccactaaacaatgcaaagctggggtgcacgccaaagcaggcccaacactgggataacaggagtcacccaggacagacccagagaatgcagaatgtatggtccctttatccacaggctctagcaggtattccggtttcagatggattgacgacaggttctcagttgggggctccacttttgggtggtgcgagaagttaggcctgcatgagtaggcggcactggttgcaaggccaattgcccaccgctgccttggcgctaaccacgtgttgctggagacggcgctccctgctgttggctaaggtgggg

SEQ ID NO: 637113 - DNA, 111 bp, Homo sapiens
gcgaaagaaagaaggaagctccttcccctcctaaagctgaagacaaagcgaggtttttaaaaaacaatttattttaagtttttaaaaggtgtccaaaaccaaaaaaagaaa

SEQ ID NO: 637114 - DNA, 283 bp, Homo sapiens
cggacctgacagtgtgcatggtgtagctgctcctggaactctgagcaaacagttgtctccctcttccctcaggaagacgcgaatgagggagggtctctgacttagtgggctcagccagcaggggccttttccaaggacaggctttggagagtaaggactcttcagtctggaaagatagaaacaagagagttgggagtcaggcccctcaaataatcgagggagaggttagggccaaccattgccttggtctccggagtctcagaacacagaacttagagcctgc

SEQ ID NO: 637115 - DNA, 511 bp, Homo sapiens
ctagacttttatttacagcattacgatggtaggggagcagcgcgggtgaatgagtacgagccttaatatcactgtgatgtctgagatgcttcggtgacatagccctcttatatctatagatgtctactatgactcattaaattacattcattacaggctattaatcagaattgcaccctgcttgtgtgaaaccgatgttgcttatgcttcaattcgggagctagatccatatacttggaaactgaggtatatagccactcatttccatgtaccttgataacgcacatcatgctaccattgcagcatctgagatggtgatctatttaacatctgcaaaagtgacaatagctatatgtgcgaactaaaggttgaacagctgtatcctagcagctcagattctataaaattgagatagattaagcattcatgccttagatcaagagctgcagctaggattatattcgatatggacaggtctgctgatggtagccggtatgtcattcgatgtcgc

SEQ ID NO: 637116 - DNA, 604 bp, Homo sapiens
cggtggaggaagaggatcttagggtgtgagaatgacagactgtgcgttcgtggagaggagatatgtggaatgtatcgctatggtggttgttgcttggtgtgagcccagtggatgtgaggtggaatatgtggagctcagaagaatggctaatgatgcgatcatgtgaatgatgcgtaagcaattgatgacaggagtgagtaagctcatattcgaatgtttgtcgaagttacatcagatcatgtgtgacaatctcttgtgtgattactaattaaagtggaagtaatgtatttgtatgtgcaccgatccccatcaggttcctctatgactgtgaagtagcggccatagtatctattgcaagatgccatgacatgtgtagttgttcaatggcaagtgcacatcgaaaccaggacgtcaagccatatgggcttgagagctaagagtagaatcaactggaggaaataatagcttagttggagagtgggagtcaatacaaagaggtgaggggatatgaatgttaacaacgggagttggagaaattcatctatgcattggtggagctgaggtcaaattggcagaaataatatgtaaaagagaactttcatgt

SEQ ID NO: 637117 - DNA, 101 bp, Homo sapiens
tgtgtggtcagtgggatctgtaccagccatgtctgggagaatccacaaccacatgtgcgatctctcaaggatgggagaatgcttggtaatcaattaggtcc

SEQ ID NO: 637118 - DNA, 658 bp, Homo sapiens
  misc_feature (208)..(208): n is a, c, g, or t
tggcagatgatcaaagttttatttaacattatagaacacttaaaaataaacaatatgatggcattctgtggtgtaacttggaaaaatgtttcaagcacacataaaagcaacaagtttacccccaacaagtatgctatgcagccagttccctaactgcgggggtcagcacggctctcaacagacagcgggggtaggaggtaggctgctnggtgtccctgcaggcagggggcttttcctactcggaatgacgatgtcttttctggtagggttctcaatggcccttctaagtgcgttcatccgggataagatctgactttcttatatccgtgtggctacacgccaattggagggcaataggcctttttctcccgcttatggccgggactcaatcatgcgaacaagggggtcctcttcataggtgtggccacacacttaattttcacgggcttcttcatttcctccttggtaagggggcaggtgaagtgggtctgacttggggtcacaattatatcttcatccactccttctgtgccgcagttctctgtcagtgtgaagaccacatagttcttagttcttacaggtgtggtttaaactcctttcctacagccccttagctgcgtgaggacggggtgggtcgacccacgcgtccggttagatc

SEQ ID NO: 637119 - DNA, 324 bp, Homo sapiens
aaattttttttttgagggttccccccccaccccgggggcccaaaaaaccttggccttttccccttttttaaaaaggggaaaaaattttttggggtggggggaaaaaaaccttcgccccttttaaaaaattagttttttaggggtcacgccccccccgaaaaaaaattccgggccattccccctttggtttatggtttatttttcggcttttgtttgctaaaaaaaaaggggggaaaaacgggggtttttaaaaaacccccccctttttggaatttttaattttttcccccttttttccttgccattttaaggttttggggttta

SEQ ID NO: 637120 - DNA, 376 bp, Homo sapiens
gagtcagggctggacctatgacttgcttctaataaacagaatatggcaaaaatgatgggatgtcacttccaagatttggtaactgttgtggattgaattgtgtctgcccggaaaagatatgttgacgccctaacctctagtatcttagaatgtgaccttatttgcaaatagcatctttgcagatgtggtcaagagaaagtcattagggtgggccctaatccagcatgactggagtccttacaaaagggacatctggggctcagcatagtggttcatgcctgtattcccagcactttgggaggccaaggtgaaaggatcacttgtggccaggagttcaagaccagcctggggaacatgtcatgatgtggtctctaca

SEQ ID NO: 637121 - DNA, 105 bp, Homo sapiens
gctacctagagttcccgttacagtgagcaagatcatgcattacattccagcttaggggacaggtcaagtctgtctcaaaaaaaaaaaaggcattgggattccctt

SEQ ID NO: 637122 - DNA, 810 bp, Homo sapiens
attctagaggccgaggcgggcagatcacctgaggtcaggagttcaagaccagcttggccaacatggtgaaaccccatctctaccaaaaatacaaaaattagccagacgtggtggtgcacgcctttaatcccagctactcgggaggctgaggcaggagaatcacatgaatccaggaggtggaggttgcagtgagctgagatcttcccactgcactccagcctggcaataagacctgtctccagcaagaccctgtctcaaaaaaaaaaaaaaaaattggcttttggactccggaagaatttcaagccatgtggagatccattcattggatgggccattttctacggtcaccggtgagccgggtggctggccatttcaaagtctcttcttaccacgctcctcaggggctagactttttcacggtgggccagaaagtcccgactctggctggggcgtcccgggacaagtgggcttcctcctctggagctgggggctccccatctggtctcggggagacccttggggccccctcgtgtagggaaagggccgatgcaaagctgcagttaaaaacggccaccattggccttagcctcgtgcagtcaggagggggagaacaggaccggtggacattgtcgacggcaatggttgggattgacgcatcatcggggtggggggcccagagaacagccacaggtccgggcaaggaagccccaggtaaacaggctaaggagggctgacaaaccaggggggaggttgactggcgctcgggcccctacaagatggaccggtgggtccgaacacgcaaggggcagg

SEQ ID NO: 637123 - DNA, 229 bp, Homo sapiens
agagctgaggcacgaggatacttgaacccaggaggaggaggttgcagtgagctgagatcatgccaggcaacagaatgagactttgtttaaaaaaaaaaaaaagtgacttgatttaggggaaaaaatgacgtggcgcctatttttcagtcagattttggcaaaaagtctcaaggtgtaaatgtgaatgattaaggtcttggggggggtgtccccttatcagactacaggt

SEQ ID NO: 637124 - DNA, 1027 bp, Homo sapiens
  misc_feature (1)..(1): n is a, c, g, or t
nccattttaattgatctgtgaaaaaacttaagaaaatcacaatttcagctaacagcaattgtgtcccaaagatgaagatactataacctcaaatggtgcagatccagaactgggctggatgacatccctactgtgccatgtcctggggcatttggaagggactggacctctttcccctcatcaaaggaaacagcagtctttgcctctttctgttggttgtgcccaagggctacagtagctctgaaataacaagagctctgtaataacagtaataaatagctctgaaataacagtcctaagaactcctaaagtcctgagaacttttcttgtaatgcagctttttctcttcctgagaaacagtgtgttctaatgggattcccaggcagttcctacacctacggtgtgtgttccagcagggaggagttatgggctgggctgccttttcccatgggtcttcattcccaatggaaagttcactctgcttagtttggaattatttttctttcagttgttctggaacctttgctttttattgatttatacaatacaattggtgggagggtggacttgggatgggagtgggaaaagcatgtaagagctccttttgtgatggtccatctacccaaaagagatctgctttagtgaacgatactctttcatttttctaaattagatcaagttgttattgattttagatgacttgtatgcaaatttgaaaaacttttttttttaaagctgattgggaactacaaacaatgaatggaatctactgacacagctaattggaaaacagatgtcttcttctgtcctattgatgctggtgtttaaaaaacatcacttaaaaaaaaagaataaatagttctaaaagcaaaaaaaaaaaaaaagggggggggtcaaaatttcctgggggcaagttagggtaccgttttgacaaggcctaaggaggggttaaaacaggcggcgggttaaagtcggagaaaggcgtgattgggagacctctgggggattggaaaacaggaaaggcgaa

SEQ ID NO: 637125 - DNA, 191 bp, Homo sapiens
gaggcctgctgggaacgggacttctaaaaggactatgtctggaggctgtggtccaggccattttgctggctataagcgggtctccggaccaaagggagcacacagctctctaaaatgaggtgtttacgccgagatgaaacagaatctatttggcagagatgcgctatgtatatatagcaagacacacagta

SEQ ID NO: 637126 - DNA, 309 bp, Homo sapiens
  misc_feature (15)..(15): n is a, c, g, or t
  misc_feature (18)..(18): n is a, c, g, or t
  misc_feature (78)..(78): n is a, c, g, or t
  misc_feature (134)..(134): n is a, c, g, or t
  misc_feature (140)..(140): n is a, c, g, or t
  misc_feature (174)..(174): n is a, c, g, or t
  misc_feature (206)..(206): n is a, c, g, or t
  misc_feature (302)..(302): n is a, c, g, or t
gggagagcggcgggngangagcgtgactcgcccgctccggctgcttcccccgcgccgcctccccgcgccgctcgccancatgtccgaggagaagccaaggagggtgtgaagacagagaatgaccacatcaaccntgaaangtggccgggcaagacggcttccgtggttcaagtnaaagataaagaggcacacgccgcttgagcaanctgatgaaggcctactgcgagaggcagggcttgtcaatgaggcagatcagattcaggttcgacgggcagcaatcaatgaaactgacactccagcanagctgag

SEQ ID NO: 637127 - DNA, 1117 bp, Homo sapiens
  misc_feature (501)..(501): n is a, c, g, or t
tcacacataccttagggaaagtggaggttaaagtgtaaacctaaaggtgggttaccatgacagacaacagccagcacatcactaacacgtatgagagctatcctcgtggcacgggttagttgcacgtaggagaagaatataaaacctacaacaatgagaccccgtgcatttgggcctgtgacactatcatgggactacggttccgtgtcttccatgtgtcagtgctgagaggaaaaccttcagcctgtgttgggcactggcttgcttatgccaggttagccctcaaaacgtctggcaagaaatattacccgcccagaaagtacgccagagttggtgtcacatttcacagatgcatacccttaacaccaaagaacacacagttctgagacagggacgcatctagtcctggacaagtccttaccttcttggaacttagctgctaccaacagtaccctcacgttccttaaccccaatactttctggcatcaggcagcccggganaaacctgggcaaacggttagacacaagttatacgcaacggtctcaggggggacgacttacagttgcgcatacgactgtctgacccaattaccctcaagatatcggcccaatcaagtctattggctggaagcttgccttcacatctaagaaactcttacaaccagtacactggggacaaacgctgggtcctggaattccattgacctaccgcacacagacctgggatataaccctgggaaaggtccctaaagccactggttcgcatggacccttttagccagagactaacctaaaatgcaaccaccgcgtggccaaacaaggcaagtacgggagaacacggtccacgcaattcccaccgcaccaccgggggggcccagatacatgaaggcagccccacgaccacgaaacgcgtagtacccctagcccaacagccctggtccccacgggtaactcatcccgtaatgtgtaaacatgcacaatcaagttccaggtaccatctgtctgaaaaaaattctgtccagtcaaaacggcccatcctacagaggccacgacccgtgcactaacggaccaaatacaacagctgctagccatatacccacgaccaaaagaccggaca

SEQ ID NO: 637128 - DNA, 871 bp, Homo sapiens
  misc_feature (1)..(1): n is a, c, g, or t
nccattttaattgatctgtgaaaaaacttaagaaaatcacaatttcagctaacagcaattgtgtcccaaagatgaagatactataacctcaaatggtgcagatccagaactgggctggatgacatccctactgtgccatgtcctggggcatttggaagggactggacctctttcccctcatcaaaggaaacagcagtctttgcctctttctgttggttgtgcccaagggctacagtagctctgaaataacaagagctctgtaataacagtaataaatagctctgaaataacagtcctaagaactcctaaagtcctgagaacttttcttgtaatgcagctttttctcttcctgagaaacagtgtgttctaatgggattcccaggcagttcctacacctacggtgtgtgttccagcagggaggagttatgggctgggctgccttttcccatgggtcttcattcccaatggaaagttcactctgcttagtttggaattatttttctttcagttgttctggaacctttgctttttattgatttatacaatacaattggtgggagggtggacttgggatgggagtgggaaaagcatgtaagagctccttttgtgatggtccatctacccaaaagagatctgctttagtgaacgatactctttcatttttctaaattagatcaagttgttattgattttagatgacttgtatgcaaatttgaaaaacttttttttttaaagctgattgggaactacaaacaatgaatggaatctactgacacagctaattggaaaacagatgtcttcttctgtcctattgatgctggtgtttaaaaaacatcacttaaaaaaaaagaataaatagttctaaaagcaa

SEQ ID NO: 637129 - DNA, 714 bp, Homo sapiens
  misc_feature (59)..(59): n is a, c, g, or t
  misc_feature (79)..(79): n is a, c, g, or t
  misc_feature (125)..(125): n is a, c, g, or t
  misc_feature (194)..(194): n is a, c, g, or t
  misc_feature (201)..(201): n is a, c, g, or t
  misc_feature (235)..(235): n is a, c, g, or t
  misc_feature (250)..(250): n is a, c, g, or t
  misc_feature (367)..(367): n is a, c, g, or t
  misc_feature (381)..(381): n is a, c, g, or t
  misc_feature (419)..(419): n is a, c, g, or t
  misc_feature (424)..(424): n is a, c, g, or t
  misc_feature (440)..(440): n is a, c, g, or t
  misc_feature (442)..(442): n is a, c, g, or t
  misc_feature (450)..(450): n is a, c, g, or t
  misc_feature (492)..(492): n is a, c, g, or t
  misc_feature (511)..(511): n is a, c, g, or t
  misc_feature (533)..(533): n is a, c, g, or t
  misc_feature (554)..(554): n is a, c, g, or t
  misc_feature (558)..(560): n is a, c, g, or t
  misc_feature (565)..(565): n is a, c, g, or t
  misc_feature (568)..(568): n is a, c, g, or t
  misc_feature (611)..(611): n is a, c, g, or t
  misc_feature (710)..(710): n is a, c, g, or t
agagaatccaaaatgtccgtgctctgtgtagcattgagctgacgcacccttggagttgnggttgattttcagatcagtncatgctcattaatctggtagaatgtgacatctaccagatgtaacanctgcgcattcttattcctcattttaagtatttcgtgctttctcacaatttttttttttttttttgaganggagtcncactttgtcacccaggctggagtgcagttccgcnatctcggctcactgnaacctcctcctcctcctcccgggttcatgcaattctcctgcctcaggcactcgagtagctgtgtgtattataggcatgcgccaacatgcgcgtagctaatttgttgtatttttagtngagactgggtttcnccatattggccaggctggtcttgaactcctgacctcanggganccgcctgcctcgaccncnaaggtgcngggattacaggcgtgagccactgtgctcggccctgtttctcncaattaaaacatgatcttnttttagtgttatagaaggctgnaaattacgagctctcagtggncaannnctganaanatcatgaaagcctttagaaggcagttagtgcccaaatggagtntttttgccaagacagcctttaaaatgtagctctctggtggctaagtccagggtctgggagttctagatgtggggctggctcagatggtcttggccctcntttg

SEQ ID NO: 637130 - DNA, 890 bp, Homo sapiens
  misc_feature (887)..(887): n is a, c, g, or t
ttagcaaagcatatgtatttctcaatgagtaaaatggggataataacgtctattgatgtagagggtcaaatgaagaacaaatagtagctgctgctacttgactggaaaggtaaatgtgtttacatcatgctgtggaacactctaaacagtctatgtagaagaggggcatgttctcatgggcttctcatggtaattgtgaatgaagccctttgttaaggtcttgttgaagaaagaacactgtataagttcaggctttagtacattttccttagcaaaatgttggtagtgaatcaaagagttgatttttccaggtttccagtttttactttagtttatgttgtgcctgtcttggactttctgtttagtttggatggaaaatacctgcttgaaattttaaaaatgatttctttagtgcatctatttagctagtttctgataggtggtatgtaatattttccctttttctttccttctgtagacacaataagtcattctccctcttctttttttctttttctattttcttattctttactctaacctgcttcagagaaagagccctcttccttcttgtcttcatcttagtcttttcaaaataaaagatgactgtgagaaccccaagaacttccacttctgggaggcagccacaggacagggaacatatttatttgggtctcttcagttccccctttgagaacaacattaaatacatgttagctggggctccagggcattctccttccacagtagtgcggccaaattcccagtctggccagtctctttgttgagactgaatagaaggactgcaggtttttttggaggatgagataatttttcctcgcaggcattttttcccttggccttccttatgcatgaatggtcccttntga

SEQ ID NO: 637131 - DNA, 223 bp, Homo sapiens
tctacgacggtccgtgaagcggcttgtgtattggtgcggatgatccggacgcctgcggccgccccataccccaccaggtcaccaaccatacacaggcagcggagtaatcggggcatggggggaggttgcttaattgtgggcggtcgtatagtcccccctctcccgggtttgccgtgggtggatacacaagccgctcacgggatacccgacgctcgacagttcg

SEQ ID NO: 637132 - DNA, 778 bp, Homo sapiens
gctgtttcctttgatgaagggaaagagcagtctttgatgaagggaaagaggtccagtcccttcatcaaagactgctgtttcctttgatgaagggaaagagcagtctttgcctctttctgttggttgtgcccaagggctacagtagctctgaaataacaagagctctgtaataacagtaataaatagctctgaaataacagtcctaagaactcctaaagtcctgagaacttttcttgtaatgcagctttttctcttcctgagaaacagtgtgttctaatgggattcccaggcagttcctacacctacggtgtgtgttccagcagggaggagttatgggctgggctgccttttcccatgggtcttcattcccaatggaaagttcactctgcttagtttggaattatttttctttcagttgttctggaacctttgctttttattgatttatacaatacaattggtgggagggtggacttgggatgggagtgggaaaagcatgtaagagctccttttgtgatggtccatctacccaaaagagatctgctttagtgaacgatactctttcatttttctaaattagatcaagttgttattgattttagatgacttgtatgcaaatttgaaaaacttttttttttaaagctgattgggaactacaaacaatgaatggaatctactgacacagctaattggaaaacagatgtcttcttctgtcctattgatgctggtgtttaaaaaacatcacttaaaaaaaaagaataaatagttctaaaagcaa

SEQ ID NO: 637133 - DNA, 1129 bp, Homo sapiens
  misc_feature (1)..(1): n is a, c, g, or t
nccattttaattgatctgtgaaaaaacttaagaaaatcacaatttcagctaacagcaattgtgtcccaaagatgaagatactataacctcaaatggtgcagatccagaactgggctggatgacatccctactgtgccatgtcctggggcatttggaagggactggacctctttcccctcatcaaaggaaacagcagtctttgcctctttctgttggttgtgcccaagggctacagtagctctgaaataacaagagctctgtaataacagtaataaatagctctgaaataacagtcctaagaactcctaaagtcctgagaacttttcttgtaatgcagctttttctcttcctgagaaacagtgtgttctaatgggattcccaggcagttcctacacctacggtgtgtgttccagcagggaggagttatgggctgggctgccttttcccatgggtcttcattcccaatggaaagttcactctgcttagtttggaattatttttctttcagttgttctggaacctttgctttttattgatttatacaatacaattggtgggagggtggacttgggatgggagtgggaaaagcatgtaagagctccttttgtgatggtccatctacccaaaagagatctgctttagtgaacgatactctttcatttttctaaattagatcaagttgttattgattttagatgacttgtatgcaaatttgaaaaacttttttttttaaagctgattgggaactacaaacaatgaatggaatctactgacacagctaattggaaaacagatgtcttcttctgtcctattgatgctggtgtttaaaaaacatcacttaaaaaaaaagaataaatagttctaaaagcaagtttggcaatttctacttttcctacttttctccaaccccccttagaaaaagttcttcgtttactgcctggctgttctatgtaactttccatcccaacctttctcccattagcagcagtgattctgggcattgctggagtgaacaggagggcttgggcagagtatctgaagagcttccccttcctttataccttctcccaccccaaatttggaattactgcttttatgttctcaactccagctgcacataaaatcacta

SEQ ID NO: 637134 - DNA, 647 bp, Homo sapiens
  misc_feature (20)..(20): n is a, c, g, or t
  misc_feature (65)..(66): n is a, c, g, or t
  misc_feature (74)..(75): n is a, c, g, or t
  misc_feature (77)..(78): n is a, c, g, or t
  misc_feature (81)..(81): n is a, c, g, or t
  misc_feature (83)..(83): n is a, c, g, or t
  misc_feature (87)..(87): n is a, c, g, or t
  misc_feature (91)..(95): n is a, c, g, or t
  misc_feature (97)..(98): n is a, c, g, or t
  misc_feature (100)..(101): n is a, c, g, or t
  misc_feature (103)..(107): n is a, c, g, or t
  misc_feature (109)..(109): n is a, c, g, or t
  misc_feature (112)..(112): n is a, c, g, or t
  misc_feature (161)..(161): n is a, c, g, or t
  misc_feature (195)..(195): n is a, c, g, or t
  misc_feature (209)..(209): n is a, c, g, or t
  misc_feature (215)..(215): n is a, c, g, or t
  misc_feature (219)..(219): n is a, c, g, or t
  misc_feature (221)..(221): n is a, c, g, or t
  misc_feature (225)..(226): n is a, c, g, or t
  misc_feature (231)..(232): n is a, c, g, or t
  misc_feature (234)..(235): n is a, c, g, or t
  misc_feature (296)..(296): n is a, c, g, or t
  misc_feature (299)..(299): n is a, c, g, or t
  misc_feature (303)..(303): n is a, c, g, or t
  misc_feature (308)..(308): n is a, c, g, or t
  misc_feature (312)..(312): n is a, c, g, or t
  misc_feature (318)..(318): n is a, c, g, or t
  misc_feature (323)..(323): n is a, c, g, or t
  misc_feature (335)..(335): n is a, c, g, or t
  misc_feature (339)..(339): n is a, c, g, or t
  misc_feature (343)..(344): n is a, c, g, or t
  misc_feature (352)..(352): n is a, c, g, or t
  misc_feature (361)..(362): n is a, c, g, or t
  misc_feature (385)..(385): n is a, c, g, or t
  misc_feature (387)..(387): n is a, c, g, or t
  misc_feature (391)..(391): n is a, c, g, or t
  misc_feature (398)..(398): n is a, c, g, or t
  misc_feature (414)..(414): n is a, c, g, or t
  misc_feature (426)..(426): n is a, c, g, or t
  misc_feature (428)..(428): n is a, c, g, or t
  misc_feature (435)..(435): n is a, c, g, or t
  misc_feature (437)..(438): n is a, c, g, or t
  misc_feature (443)..(443): n is a, c, g, or t
  misc_feature (462)..(462): n is a, c, g, or t
  misc_feature (465)..(465): n is a, c, g, or t
  misc_feature (474)..(474): n is a, c, g, or t
  misc_feature (494)..(494): n is a, c, g, or t
  misc_feature (503)..(503): n is a, c, g, or t
  misc_feature (506)..(506): n is a, c, g, or t
  misc_feature (521)..(521): n is a, c, g, or t
  misc_feature (523)..(523): n is a, c, g, or t
  misc_feature (542)..(542): n is a, c, g, or t
  misc_feature (580)..(580): n is a, c, g, or t
  misc_feature (583)..(583): n is a, c, g, or t
  misc_feature (587)..(587): n is a, c, g, or t
  misc_feature (617)..(617): n is a, c, g, or t
gccgccttgaggagccgctncccccgctccctgaagatgggggaacaatgaaataagcgagaagnnccctcttnncnnctntntctntgtnnnnncnncnncnnnnngnggnggcatctgttccttaaggcggtgggcggaggcgaaaatgttggaggggnctgtttagcgagctcggccttcttttggaagtgntaaagtttgaaatntggggngagngntttnnttaannannttcagcgacaagggcgacgcgccgccaacgccaccgcctactcccatatacacactctccncanccanctctntatnccaaantactntctctctatatncaanacannacatatanacattctcnnatctcaaatactaacactatctntntcanatataancactacaaatatcacnatcaataaatantntcactananntaganctatctgcacaataagtcncantctcaatanagcgcaatatgaccaaagcngcacttgtnagngatctaagccttcgncngcagaacgcgaacgcgcgngcagcacacccgcatgcacgatctggaacgcagctctngancaanctgcgcgaaggtggtggcctgctactccanagacgcagaagctgtctaagatgagacgct

SEQ ID NO: 637135 - DNA, 226 bp, Homo sapiens
tggtcggacgtagccggacgtaaggtttgggatctgtgctcaaactacacatgcaatgaggacaatattctgctgatacaattgacttgctgctgcattatgtctacatgtttgtctaaatattaacaatttataaacacgagcaggtgcaattagctatttgcgaacatatcgcttacagctgttacgttgtcctggccacgaggtagccgagctcgcatattcg

SEQ ID NO: 637136 - DNA, 910 bp, Homo sapiens
  misc_feature (50)..(50): n is a, c, g, or t
  misc_feature (102)..(102): n is a, c, g, or t
  misc_feature (114)..(114): n is a, c, g, or t
  misc_feature (129)..(129): n is a, c, g, or t
  misc_feature (133)..(133): n is a, c, g, or t
  misc_feature (136)..(136): n is a, c, g, or t
  misc_feature (146)..(146): n is a, c, g, or t
  misc_feature (150)..(151): n is a, c, g, or t
  misc_feature (175)..(175): n is a, c, g, or t
  misc_feature (178)..(178): n is a, c, g, or t
  misc_feature (183)..(183): n is a, c, g, or t
  misc_feature (190)..(191): n is a, c, g, or t
  misc_feature (205)..(206): n is a, c, g, or t
  misc_feature (208)..(208): n is a, c, g, or t
  misc_feature (213)..(214): n is a, c, g, or t
  misc_feature (218)..(218): n is a, c, g, or t
  misc_feature (226)..(226): n is a, c, g, or t
  misc_feature (236)..(237): n is a, c, g, or t
  misc_feature (242)..(242): n is a, c, g, or t
  misc_feature (245)..(245): n is a, c, g, or t
  misc_feature (259)..(260): n is a, c, g, or t
  misc_feature (266)..(266): n is a, c, g, or t
  misc_feature (300)..(300): n is a, c, g, or t
  misc_feature (306)..(306): n is a, c, g, or t
  misc_feature (312)..(312): n is a, c, g, or t
  misc_feature (330)..(330): n is a, c, g, or t
  misc_feature (354)..(354): n is a, c, g, or t
  misc_feature (360)..(360): n is a, c, g, or t
  misc_feature (369)..(369): n is a, c, g, or t
  misc_feature (382)..(382): n is a, c, g, or t
  misc_feature (398)..(398): n is a, c, g, or t
  misc_feature (417)..(417): n is a, c, g, or t
  misc_feature (420)..(420): n is a, c, g, or t
  misc_feature (424)..(425): n is a, c, g, or t
  misc_feature (450)..(450): n is a, c, g, or t
  misc_feature (468)..(468): n is a, c, g, or t
  misc_feature (475)..(475): n is a, c, g, or t
  misc_feature (504)..(504): n is a, c, g, or t
  misc_feature (831)..(831): n is a, c, g, or t
  misc_feature (892)..(892): n is a, c, g, or t
atgatcctgaagggatttcttctgatggtagcttttgtattatcaaactnttttcagatacatcttctgagtcataaccagcctggcagtatgatggcctanatgcagagaaancagctccttggtganttgntangtaaggccanaaanntatatgtcatacctccattgggantangcatnaccctanntcttactactgatnnanacatnntctncatatccnaaaaatttanncaatnaanctaccaatttaaanntacggnattccattttaaaattaattgcttgtcaaactanaaccanaaaaanaataaattaataaaaaanacaataaaaaagcaatgtccatcncaaaanactgctttnacaaaaacaaaanaaaaacgaaaaaaaanaaaaatattacactacaanaanccannaataaaagaagccgaaataaataanaaatgagttgggatcaantggattnaggaagctgtgctgtgtgccaatatttcnattgcctcaaacaggtatctcttcgttatcagaagagttgcttcatttcatctgggagcagaaaacagcaggcagctgttaacagataagtttaacttgcatctgcagtattgcatgttagggataagtgcttatttttaagagctgtggagttcttaaatatcaaccatggcactttctcctgaccccttccctaggggatttcaggattgagaaatttttccatcgagcctttttaaaattgtaggacttgttcctgtgggcttcagtgatgggatagtacacttcactcagaggcatttgcatctttaaataatttcttaaaancctctaaagtgatcagtgccttgatgccactaaggaaatttgtttagcattaatctctganggtctatgaaaggatagc

SEQ ID NO: 637137 - DNA, 348 bp, Homo sapiens
  misc_feature (50)..(50): n is a, c, g, or t
  misc_feature (102)..(102): n is a, c, g, or t
  misc_feature (114)..(114): n is a, c, g, or t
  misc_feature (129)..(129): n is a, c, g, or t
  misc_feature (133)..(133): n is a, c, g, or t
  misc_feature (136)..(136): n is a, c, g, or t
  misc_feature (146)..(146): n is a, c, g, or t
  misc_feature (150)..(151): n is a, c, g, or t
  misc_feature (175)..(175): n is a, c, g, or t
  misc_feature (178)..(178): n is a, c, g, or t
  misc_feature (183)..(183): n is a, c, g, or t
  misc_feature (190)..(191): n is a, c, g, or t
  misc_feature (205)..(206): n is a, c, g, or t
  misc_feature (208)..(208): n is a, c, g, or t
  misc_feature (213)..(214): n is a, c, g, or t
  misc_feature (218)..(218): n is a, c, g, or t
  misc_feature (226)..(226): n is a, c, g, or t
  misc_feature (236)..(237): n is a, c, g, or t
  misc_feature (242)..(242): n is a, c, g, or t
  misc_feature (245)..(245): n is a, c, g, or t
  misc_feature (259)..(260): n is a, c, g, or t
  misc_feature (266)..(266): n is a, c, g, or t
atgatcctgaagggatttcttctgatggtagcttttgtattatcaaactnttttcagatacatcttctgagtcataaccagcctggcagtatgatggcctanatgcagagaaancagctccttggtganttgntangtaaggccanaaanntatatgtcatacctccattgggantangcatnaccctanntcttactactgatnnanacatnntctncatatccnaaaaatttanncaatnaanctaccaatttaaanntacggnattccattttaaggtaatcttacagctattacccaatatgattgatgggaatccaatgaggggcatgcatcctcaaatactg

SEQ ID NO: 637138 - DNA, 388 bp, Homo sapiens
aggggcgatgcgcttcctgcagctataccatgaggaccttcttgcgggcctgggagacgtcgctctcttgggcttgtttgggaaggtacgactggctttcggctctgcggaggccaggcttcctgccaggcggctgaggagtttctgcggagcctgctgggcagcagtagcacccatgtgttgtgcctggagcacccgggcagcccccgtcttcatctccgcccagaagggcagcaccttctgcagaggctggaggctcagttccagtgtgtctttgggacagagcgcctgctcacagccacgttggacacaggccttgaagaggtggaccctgccgaggccctcccagtgctccctggcaacgccgacgtctattgtggaccccaga

SEQ ID NO: 637139 - DNA, 157 bp, Homo sapiens
ttacatatctagaatttccttcctttttaaaagatccaaatatattcttattttatatcttttttttatccattcatccattagtggacacttgggtttgctattggctattgtaaatgatggtgctatgtacaaatatctattttattgtatttag

SEQ ID NO: 637140 - DNA, 1357 bp, Homo sapiens
gcccgctcggagtgtaactaactaggccccttgagagagaccaccgcgtggtcatcaaagacgcggggtgattacccgcgtgtttataatgccgcggggcggtatatacgttttccaaggcacatgttgtaccagttggccttttgggggcaacattattaaaccggtgttcggccaaacaacacgtggtgtaatcccgtcgcgagatttccccgggggattttttgggaaacacaggggtgtgttctctaatacaatatggtgaagacgcgtgtcctgggtgcccttaaaaagggggcgcttttttaagggcctctctctatgtggatctctctcgggctttaacacaatagtgggtgtttcgaaccagtgttacacctccataatttacggttctcttaataattagatgggcgctttatattgtggctcgacaaaaccgcctgtgtgccatattgtgcccacataggatgtgggccctgattggttatacacacccggtggtgatagtgcatcacagtgttctcaagaggggctccacccagaaacacacggcacacctgtggtcccccaatagatgggccctttgttgaaatatcggcgcgaataaatctcccctaggtggtgatgttgtactcccctcaaggaaagtgtttttttatgtatttttcacaaagaggatatttttttgggagcccccctttagaacaccttcaacagccttgagcgcccttatcccccccgccacattatgagagagggcacactggcgcccccaaacacgggcgaatttaacccccgcgtataaatcccccctaagaagagagtctcccactctgcttaacacacacacccgcgtatatatattctgcgcctctcacggagggtattacacaatcacccgtgagggtctacccacatatggtttaaatagagaaacacacacccgcagaaccccacaatataattcaagccccgtgggttatattacacaattttaacgtgggtgttttatattttaacccctctctaaacaaagcgcccaagaaggaacttagagagtttctccctttacccactttctcgagcgggcgaatttatcgggtcaaacacatttttgtggaagccacacacgggttccccggagatttacacggcacattatatgtggggcaaactttcctcacactaattgtggttcaatccgcccacacactaaaatatttcacctttaacaatcccacaacacatcacacttgtgggttcgagaacccccgccccgaaatgtggccttttgttaaaaggtgggtgtgtaatatttttgtgtaagtttccattttttgaagaggggttttta

SEQ ID NO: 637141 - DNA, 92 bp, Homo sapiens
  misc_feature (46)..(46): n is a, c, g, or t
tacttttgtgctcttggggaactcgctctacctgggggatacgcangataaactcatctttggaaaaggaacccgtgtgactgtggaaccaa

SEQ ID NO: 637142 - DNA, 259 bp, Homo sapiens
agcacatttttgatttggccgcccaacgtgtttgacactaggcctgcatgcacaccagccatgcacaatggcgaggaatctctatatccatgatgaattgttccagatatctcagctgaaggaagcagacaaccagctgggcagtacttactgaactcaggttccaaaaaattggatgcagtgtccaaacaaggaattagatcttgtttatcctataacagagtatgaggccaaaaatccgggtccagaaacacggatt

SEQ ID NO: 637143 - DNA, 420 bp, Homo sapiens
gaggatcccctcaaggctatacttcacactgtggcatcaccctgaattctttcttgcacaagatccaagaaccctctcttggggtctagattgggacccctttctgtaactatcatgctactgcactccagcctgggccacagtgtgagatctgtctcaaaaaaagaccacaaaaagacacaaaaaaactacttggtattgtcgttgacatcaaaagctctccttcacctcttttcactttaaagagctgtgtgattttaaaaccatttttcttcttaaaaactaacatcgtagctaatgaaatttcttttaacttgtgtctttcagttgatcgtttaccatcctgtgggccagtggccattgataggaatgtccctccatacttaataccggagacaaactgctgagctatgatgttga

SEQ ID NO: 637144 - DNA, 194 bp, Homo sapiens
cttacacagcccgtcgtagtatacctaagcacagaggaaataacagataccactgaacccgtgtactgccaaagaagtcatacaaagatcacactactgcaggcacccaaaatcaaagccaaagcatcctattcaaccaacaacatatatctatcttcaggaaaaaattctgccctgctgtgggtggcagaatt

SEQ ID NO: 637145 - DNA, 817 bp, Homo sapiens
gcctgtcggccgagaaccgtcatcattacagatatgtgtcgtccaaagtgactgaacgacagatagggaaacaaaggagaggacacggcagatgctatgattctcataggtcgttgtagatagacatggaatataatttcgatttgggcacaataatatgctgagtgtcgtataagaaaggtgatatgtagacatcaagggaatgggatactgttcaaaacaggaatgccccacaagtgttaccatggcaaaactggaagagtctacaatgttacccagcatgctgttggcatcgttgtaaacaaacaagttaagggcaagattcttgccaagagaattaatgtgcgtattgaggccacccacgttaagccacgtcttaagacgacccggagaattaagcttccctgcacaacgtgtgacacggaccacactggaaaccacacacccaagaaagaaacaaagacacaaacacccgacaggttggccaccccccaccgctcccgaacaacaagcacgaaagaacaacatcgccaaaaaaagatgccacacaggggcccaacagactgaggacgcaccaaacgagggggaaacagagacggctgtcctgaggcaaacaacccgaggcctacacaagcacagagacctagagaccgacaacgcccaacatagaagaaaacgacccccccgagaggaaacaacgcaggacgaggacgaagaaaacagctacagaaaaggaaaacagagagggcacacaaacgaggggccacggcataacacagcggccccacgcagcaacgccgctgccccacaagtcggc

SEQ ID NO: 637146 - DNA, 692 bp, Homo sapiens
gaaacatcagaatgaatctgcactgtagaccaaatggatccaatagatatttacagaacatctcttccaatggctgcagaatacacattcttttcctcagcacatggatcattctcaaagatagaccccatgttagatcacaaaagaagtcttaaaacattgaaaaaaatgaaataatatcaaacatcttctctgaccacaatagaatgaaactggaaataagaataataattttggaaactacacaaatacatagaaattttaaaatatgctcctgagagaccagtgggtcaatgaagaaattaagaagaaaattgaaaaatttctaaaaacaaatgataatagaaacccagcataccaaaacctatgtgatacaacaaaagcagaactaagagggaaatttatcgctataagtgcctacatcaagaacaaaccaaaggaaaacttcaaatgaataatctaacaatgtatcttaaagaactagaaaagcaagagcaaaccaaactcaaaattagtcgaagaaacacgacactaataaagatcagagcagaaacaaatgaccttgccatcaaaaaaaacttaacataagatcaatgaaacaaaaagttgcaattttaaagttaaacaaaattgaccaaatctttaatcagactaagccaaacatacccacaacacacttacacgaagatccc

SEQ ID NO: 637147 - DNA, 218 bp, Homo sapiens
ctgacagcagaggttgatctttgccgggaaacagtggaagatggtcgtaccctgtctgagctacaagcatccagaaagagtcaccttgcagcctggtgctccgtctcagaggtgggatgcacgatcttcgtgaagaccctgtactggtaaggaccgatcacgtctcgagcgtggagccgcagtgacaccacttgacgaatgtcagaggcaagagatcc

SEQ ID NO: 637148 - DNA, 1266 bp, Homo sapiens
atctttgtcagtggcacaaagatggagccactacagcctactggtgactcggatgcagaaaggctctgggtgatgcggaagtaccagtgtggcctcagtccgtgtgccaacgggcgcaaggatggcagagtgagccactttgatgcccaacgagatacatccatatatgaccatgctagagaagaacattaacattgttcgcaaacgagctgaaccggacgcggctgacactactcggagacagattgtgatatggacacctggactgaccccgaccagccaggaaactggacgcgaagagacaagatcgatacctgcggatgacgagaccggaccgagatggaccatgcaaggatgcgacggcccagatgagcacatgctccaagattcatcagcagcagggcatgatccaaaggatggcatgttgccaatccaaccatccacgtgtgaccatactgatagaagcccagggataggacgaggcagacgaaacgaccatgacgacacggggaacaaaggacatcacaaccacggcaacgatgcataaatcatacctgagcaaacagcaagatgccaaaatatggcagagggctacagaaacgcctgggactctgggacatacaatgccaacaaaaataacaaactaggaaaaaaataattgacgtaacccatgagaggtacatacttgacttcggacacagaactaccacaaaacacccccaaaatggaagggagagacatgagagagcatactgcactaaggacagaaagagaagcaatgacagaaatgaccatgagacacaagagtcagctggacctgagaaatcaacacacagagagcaacaagaaaagaaggccccaaaaggacgacatgagaaagatgaagaaagcacggccaccaacacactcgaaagagacacacaaaccaaaaacagggacatcagaaagagaccagaacaaaacaagggggaacaagaggggaaaagagaggaccaagcatagaaacaacaaggccacagaacgcaacactccaaaatatgacagtacagagacagacccagaacatgaacagaaaaaaggagaaccaaatgggtacatacaacagggaaaaatacgaaaaacacggaggaagaaaaaacaacagcagcaagtaagaaagtgaaatacagaacaagagcgaacaaaaaagcgagaaaagaaaaaatagaacgcaaggaaaagaccacataataaaaaagtaaaaataacacccaaccacagataaaa

SEQ ID NO: 637149 - DNA, 627 bp, Homo sapiens
  misc_feature (15)..(15): n is a, c, g, or t
  misc_feature (17)..(17): n is a, c, g, or t
  misc_feature (67)..(67): n is a, c, g, or t
  misc_feature (264)..(264): n is a, c, g, or t
  misc_feature (565)..(565): n is a, c, g, or t
  misc_feature (590)..(590): n is a, c, g, or t
aacaatgtgctttgnanatgctgctccctggttcactctctgccaacccaccactcccacaatagangcaacaaggagacgcgcctttgccctggtctctcaagcgtatacttcaatcatcgccgatgattttgcagcctttgttggacttcctgtagaagaggctgtgaaaggtaattttggcttactttttacttataaggaaaatggaaaatagaagtgtgaattgtaggttcacagtctcctctgaaacacttggaacanaatatgcttttggagtccaggctgtgttttttgagaggtgatatgaaacaggtgttgtggaacacccagcaggcaccctgcagtcaagcatattaatagttctatagcaagcaaatgtgtgagtatccacacagttggttacaaaaatatgtcttaatttggtctctttactcatatttggaaatccttatttcacccttatttgataaagggcagcatcatccccacgtcccttttcattttccctgccatttctgacccataccctaggcgcttgctttgctcccactcatacctgctnggtctctccaaatgtaactttgcantttcatttctcagccttccaaagtgctgggatacagg

SEQ ID NO: 637150 - DNA, 405 bp, Homo sapiens
  misc_feature (390)..(390): n is a, c, g, or t
ggaggcgttctagaggtccctcacgccatgtccacaacagcatggttcccgaaagccaagaggtagaagcaacacaaatgcctttcaataaatgaatgaataaaataaaatgtggtacagggctgggcgcggtggctcacaacctgcaatcccaacacttggggaggccgaggtgggcagatcacgaggtcaagagaccatcctggccaacatgatgaaaccccgtctctacaaaaatacaaaaattagctaggtgtgatggcgcacgcctgtagtcccagatgctaaggaggccgaggcaggaggatcgcttgaacctgggagatggaggtttcagtgagctgagatcacgccactgcactccagcctgggtgacagagcgagactccntctcacaaaaaaaaa

SEQ ID NO: 637151 - DNA, 159 bp, Homo sapiens
atggctatcgtcaggctgagaacgggaagttgtcatcaatggaaatcccatcaccatcttccaggagcgagatccctccaaaatcaagtggggcgatgctggcgctagagtacgtcgcggagtcctactggcgtcttcaccgccatggagtaaatggca

SEQ ID NO: 637152 - DNA, 123 bp, Homo sapiens
cccatcgtccacctgggggatcccatcacagtcctcctgcatcatcaagcagaacgtgcagccatctggacccggagccacagattctgtgcgcacgactggcgagcagcagcttcacgcccg

SEQ ID NO: 637153 - DNA, 110 bp, Homo sapiens
cgcgccgagcagatacgaaggttgggcatgaggggtctgggacggtggttgctgggagtagggaggctgctgctgctgagcagcatgactcggctgcgtgtgatgagccg

SEQ ID NO: 637154 - DNA, 820 bp, Homo sapiens
gatcacgaggtcgggagttcgagaccagcatgaccaacatggtgaaaccctgtctctgctaaaagtacaaaaattagctgggcatggtggcgcatgtctgtagtcccagctactcaggaggctgaggcaggataatcacttgaacccgggaggcggaagttgcgagtgtgccgagattgtgccatgtgcactccagcttaggcgacagagagagactccgtctcaaaacaaacaaacaaaaagaaatcttgtttacttgtaaaaatatagactacctcctacttggcaccgttaagtgcaatttactggttgtgaaattactgtggctgggtgcagtggtcatgcctgtaatcctagcactttaggaggccaagatgggaggatcacatgagcccaggagttcaaaaccagccaggcaacatggcgagaccctgtctctacaaaaaatttaaaaattagctaggcttggtggctcacacctgtagttccagctactcaggaggctgagcgtgggatgatcagctgagcctaggagattgaggtgccagtgagctgtgatcattgccactggattgtgaacctgaagcaacagagtagagacgtgtgtcaaaaaaatcaaaaaaaaggcaggtatggtagttcacgactgttattcactaaacttgtgggggctagggggcagatcaggagttcgaaacaggtgggcaatggtgaacccgtgttcttaaggcaaaaataccgggtgggggggcgcctggtaaacagcggtgggcgcagggagaacgctggtggaaagaggggggggcgaatcaagacacgg

SEQ ID NO: 637155 - DNA, 190 bp, Homo sapiens
gagtgtgactttctggaaacagctctgtttcacggtgcagtgatgtggaagtttaaggtacatcacacattctggatccataacttgcatcctctgaatactccgcctgcgagggtgtgctgttgcagagggctgcctggatcccaactgcattagggatacatccccccattctctcatcctaagttcc

SEQ ID NO: 637156 - DNA, 1525 bp, Homo sapiens
  misc_feature (116)..(116): n is a, c, g, or t
  misc_feature (283)..(283): n is a, c, g, or t
agcgctgggtacgagctatgtgctagattgaccgatcggtccctcagcgtagtcgtccatgtggagacgatccgtcgagtcaagcttgagttaccttgatggaggatcctcgagcnaattgaatagatcggctctcggagtgcgtcaaccaagatcagatcatagagcacaagagtcgcgaagaatcggaagttcttcgagcgtccaaatatatctcggacttcgactgcaactagaggagcgcaccaaaccgcgagcggccccagattaaaatccaagagangacccggacaccgccggaacgtcttgaggagtaactccacccctcgaaaccagcgcaccggccccccgggagacgacaaacaacaagcacaccacaacaacaacacaaccgccccaccaaaaccacaacgagagaacagacgcaaaacaccaacgccagcacgacaagaaaaacaaagaaggcaccacccatagcgaaaggacgcaaaacgcgagaacagacgagacccacgcgcggacaagaggaccaacaccagaagaccaacagacaccaccaacgcagagacgacaggacacgacaacgaagcgaaagacacagacagcgacagacggacgcacgagagattacacagcaagcacacagacggagcggaccgagagcagaatagcaagacggaaaggggcggcgcgagagcggaacggcggaggccggaggcacgaaggacgacacctaacgccgcgaggccaggagacacggaagcgaggggtgacgagggccgcagccgaggcgcgcacgagagcacgcagcggcaccagcgcagccagagggggatgaagtacgcgagcgcaaccacggagggcgcaagagagcgaagcggcgagacgccaagcacacggctggcaccggccgcgacgacaccgcgagcaccgtgcgccgggggtgccagagcgtgacggcggggaaggtgctgagcagagatcaacaggagagagaaccggagagcgggacgagcaagcgaacacgagagcgatacaagagaacacgatgagagcgaggccgtgagaaacgcggcggggaacgagtgcacgacagacgggagaggcgggccgcgcgacgaggacagcgtagcaggatacagcgcgagcggacgagaacaggacacacgtacaggtgagtgtgaccaagaggccaagatacgaccaagaagacgtgagaaagcgaggcagagaaggaggcacgaacggagaagtgagcgagaggaagatgagagtctagcccagcagagacaggagcagaacagacgagcgagggaagagccgacagacaagtaggcggagcaacacgtgaggcaagtacggaagacaggctgaagaggcagacaggaacgggagacaacaaggggcacaagaacggtacaagcgcgaccaagcgacgagacaggcgcgagtaggagagaagcaggagagcgacgacgcggaggagagagcaggtcagaacacacgccgaacgcagcgagcaagg

SEQ ID NO: 637157 - DNA, 398 bp, Homo sapiens
acatcctttagtttctattatttcactgcttaagttctgcatctgaattacaaaggtaacataagtagtacttaagatcccaaaggcccattacattctatcaataaagacaaaacaaaactacatgtttactgataatagtctttttttctttgctttccagttttacacttttgttgaacacaatagtggactagatcaaataactagatggtaaaacactgattttttaaaaatcacatctttatacccgtgagaatcacaattcatattacgcctattgggtgctacctgtacacttacaaccttctcttaacacttacattatgtgactgattttccttacaacacaacttccattacgcaactacttttcgttgacacctcttccacaaaac

SEQ ID NO: 637158 - DNA, 716 bp, Homo sapiens
aggaggcccaggaatcaagtataggagaaatgtcctcttactctaagtttttattattattattattattattattaattatacttcaagttttagggtacatgtgcacaacgtgcaggttagttacatatgtatatatgtgccatgttggtgtgctgcacccatcaactcgtcatttaacattaggtatatctcctaatgctatccctcctccctccccccatcccataacaggccctggtgtgtgatgttccccttcctgtgtccatgtgttctcattgttcaattcccactatgagtgagaacatgcaggttggtttgtccttgtgatagttgctgagaatgatggtttccagcttcatccatgtccctacaaaggacatgaactcattattttttatggctgtatagtattccatggtgtatatgtgccacattttcttaatccagtctatcatgtggacattgggtggttccaagtcttgctatgtgaatagtgcgcaataacatatgtgtgcatgtgtcttatacacaaacaaaacaaacaacaaaaaaaaaacttgccgcgcccgcgccccgaaagtttaaagacacctgtgggccgcgcccggctatcgcacggcccagcggccagcaacacggggaccaagtgggttccccaaaaagccgggccccggtctgaacaccaggggttgggcacggccacgggcgacgaa

SEQ ID NO: 637159 - DNA, 1098 bp, Homo sapiens
  misc_feature (467)..(467): n is a, c, g, or t
  misc_feature (868)..(868): n is a, c, g, or t
gtggatctttgccaggacagatgtcccaaattagttccactcgaaagccttcgctgtctgctgcgagtaaactatcgatacaacgccagggaaacgaattggcaaacgtatatacagctcgagaaggcaatagagttaatcatcccaaaggggacattaaatctccgctcgtgaatatctcgtgttctagacggtaagactgtagaatctaagaacgtaacgaaccaagtttatatctttggcgtcctaggggtaggaaaatctcacaatgcctttacatgtatcacacccgcgcaaaaactcgaggaaacgagactcacttcttagaagaagatcagacgtgaacaacgcaggacgagcaaccaagcgacttatgcttacgctggaactccaggtgggtgacccaactctgattaaagggtatgacgtccgtagaatagaaacgtagctctgaagcgcatgttgtngatatacgactcgcgatgtcgatcctagatagaataaagagctcgtctacagtctctaagagcgtgctatagcaatgggttgtcgcacaaacatagaaatgcgcgtccatatagacctcaccgcgtctgatttcatttctattatcacctttgggctttagattcgcaaaggggggacgagacatcaccgcgctcctccttgggaacaaacattatgggacatccaaacaccctcgtgaattagtacgaatgcaagctcaaaagatatacttttgggaacaacacttggaataaggatcaagggacccgtgatacatgggcccagcccttattccaaattttaacgcacaaggccgttgtttcaccagtcttaccatagaaaccaactatatgcactactnggaagatcgccgattactgggggatcaaaacttggaggcaaatcaacctaaagggtcttttcaaggcgaactggcgtgggcgtgaccctttcctcccggggggttctacaaggaaggagagggcaatctcccgcgtggaaacggcttcctctccaaaggggcccggttggcatttaacgggctcttggtgcctttgagcccaatttcgaccggaaggaaaaaggtggcag

SEQ ID NO: 637160 - DNA, 104 bp, Homo sapiens
ggatcccaccaaagcacagcatacggtagacacgtcactctcgagcaggagaccagaatacaggagcacaagaagacctgaggacctggagtgcaggaggtccc

SEQ ID NO: 637161 - DNA, 132 bp, Homo sapiens
tgaggctagtggtactacttcacagtattggatcagagctggagagcacagaaggagcattcacttctggagtgaggggtggagaggcatctgagaaggttcttggaggaggtagcattttggccgagttga

SEQ ID NO: 637162 - DNA, 98 bp, Homo sapiens
ttggacatgaaatacaccgtatttggaaaggtaatagatggtctggaaactctagatgagttggagaagttgccagtaaatgagaagacataccgacc

SEQ ID NO: 637163 - DNA, 360 bp, Homo sapiens
  misc_feature (1)..(1): n is a, c, g, or t
  misc_feature (4)..(4): n is a, c, g, or t
  misc_feature (48)..(48): n is a, c, g, or t
nganactcaagatggctgcgttcttgctgaggtgactttagcctgggntaggagtccacgcccgcgaccgttgggggaacctgaattagtccctgagggggtgacagcgacatgtcagccgtcactgcctccgagcccacctgaatgctcagctttgtatcagaaatgctgctcctttgggaaccacagctaaggaggagatggagcggttctggaagaagaacacgaagttcaaaccgtcctctgtctccccatttgactatctacaaatggtctcttcctatggcactgtccgtttgccaccgaggctcttggaatagccttgagttggaggggtctctctttttggcctgtcggcac

SEQ ID NO: 637164 - DNA, 447 bp, Homo sapiens
  misc_feature (8)..(8): n is a, c, g, or t
  misc_feature (116)..(116): n is a, c, g, or t
gagggccnatggtccaggctggtctcaaacttctgggctcaagcagtcctcttgccttgacctcccaaagtgctggtattacaggcgtgagcccaccacacccggccccagagtanacttttttttttgaggcagagtcccactctgttacccaggttggagtgaagtggctcaatcttggctcattgcaaccttcacctcctaggtttaagcaattctcttgcctcagcctcctgagcagctgggattacaggtgcctgccaccacgcctggctaatttttttgtatttttagtagagacgtggttttgccatgttggccaggatggtctcaaactcctgacctcaggtgatctgcccgcctcagcctcccaaaatgctaggattacaggcgtgagccaatgcgcctggccagagtgtacatattaagtgctatacaagtaattgc

SEQ ID NO: 637165 - DNA, 145 bp, Homo sapiens
gaacacccttgtgtgtgtcttcacggtgagaacagctgtcctttcccctaagtcgcacaccctcctcctggcctgagtatagacctcaccctacatcatggcatgtaggtaccaggcgtctctgtgcccgtataccacaaccaga

SEQ ID NO: 637166 - DNA, 644 bp, Homo sapiens
cgctgttatacagcctcatatgatagagctaatgacaggtgacatctgattcatctgttgttggccaacgttgatgagacccgctttcgcataacgagagtttcttagtactactaaagattatcaatctgttgccgatacattcattcaatagtgtccgacattcttttacacaggtccggttgttcaaactacacacattgcggctactgtcaccacctctaaacccaggacagttgtttgaaccaatggtgcctcttcagcttgcctcaccattgttaccacacttgggaccaacacaggtgcaaacagacactgttgggttatctgcctcggaagtgattgaagaccagctgtattcatgcataacgccaatctacacatacctgtgttgttcagcattacactgtatgtctgattctcatggattacattcaacatttcactatgtgtttgggctagatagcattccttaatcacttgcattacacatctacggccatgtgtgcagcatgactgtggaggcgcaactcttatacacacatatatctatatagtactcaggtgctgctgcatgcacccatattgcactcagtgtatcagattctgtgtgaatttgtgaggcgcttatatcgtgaatacct

SEQ ID NO: 637167 - DNA, 131 bp, Homo sapiens
ctaccatgcatcacctctgtcacccttaggccctggaagaccagctgcaccacgttcatccagtgcattccctgaacggccagtgcgcgccccttggctaccggagagctccagaggtcaccagtcatcac

SEQ ID NO: 637168 - DNA, 137 bp, Homo sapiens
attgggccagaaatcaatgattggccaatgtcgttcttttttaattagtcagataccataccctgaacttgtttcaacatcttgctttatttccagaatgtgccttaattgcttcctaatttctgtgcccatttcaa

SEQ ID NO: 637169 - DNA, 616 bp, Homo sapiens
cagacagaaatctagatagaagagtgctaggttggcaagtcagttatctgcatgttgggaggaaagttaggtaggcagaaggattgttaagtaggtggagtttcagtaaaacttggttttctaagtatgtaaagtgtgctttacagttttcctggtgttcataagtttagattataggcactttagaaagttaattcttaggttgggtatggtggttcactcctgtaatgcaagtactttggcaggttcaggtgggtggattatttaaggttaggaattaataagtagggtgataaatatagtgaaatcccatgtgtagtaaaaataaaaaaaattagttgggaatggtggaatatgcttgtaatccaagcattttggcaggtgcaggtgggtggattacttaaggtaaggagtttgagattagtttggttaatatggtgaaattctgtgtgtagtaaaaatataaaaattagttgggaatgatggtgggtacttgtaatgcaagtactcaagggggttgagataggagaatggtttgaacttgagaggtgaaggttgtagtgagttgagatcagatctttgcatgccatcttaggtgatagagctagattgtgtt

SEQ ID NO: 637170 - DNA, 199 bp, Homo sapiens
ttatgctccttcgctgtggctctgccctctccaccgcacatgaagtgtctccttgcagccgcctcatcgcgtgctcgtcttcttcctgctgctgcgggatccttctgcggccgatgagacgaacacggggcccacagtcaccgtcacggtgtcttttgacctacgagttgaagatgaagatataggccgagtaatcttt

SEQ ID NO: 637171 - DNA, 113 bp, Homo sapiens
gacgagttggaagaagacctgtatcaacaacttcagggtgaagggacatattgatagcaagacccagacaggccgaccacctcgtgaaccggaggattccggaaaagccactt

SEQ ID NO: 637172 - DNA, 371 bp, Homo sapiens
caagagatcgcaccatattggaaatgtcgaaaactatagtaaagtagtatgatgaagtagctttagtgtcatacatgtcgaatgacatgaaagtgatgtacatttattctatgtaaatacacactaaaacctagtacacgtaccataagtagaatacatgtgagaatcacctaggcttcactatcttgagtaaatataacatgctcatatgacaattaatgaagactaacactttataaacatctccataatatctacatcctcttgaaggtatttatcatagttgccaatataactataaggatcgactctctctctctgaatagactcataaagtgtggagtgaatgtcgacgactcgggctactaatg

SEQ ID NO: 637173 - DNA, 698 bp, Homo sapiens
tgtaatcccagcttctcggagctatggcagaagatcgcgtgacctgagagcagaggtttgtgaccgagatcaccccttgcactgcagcctaggccataagagccgactccatcccccccccccccctcaaggaaagaaaagaaatctgaagaaaggaaaagagaattgaggataaagctttgggataccaaatcccaaatccaatgttagaaataagttccgatatatcacggttgttcctacccaacatagaaggattaacctcatatatgtgaataccaatatccgttaccaagcagcacttgccaatttaagaaagaaaaaccatggggataaaaattttaagtaaatattcaccggaagccagctgctaccaccaaattaattttagttcaaataaaatttaaggaagaaataatgaccaccggatagacactgcacatggagggaccatagaaccgagtaggtgaagcaacgtcaagtcccacgctggcctcgcctcccaggacataccaagaaactaaccggaagagccaggttctagagagggacgctggaactcatacttctgaatttaaatgggaaatagaccaaaatgttatgtgtttataaaagattttaaatcaccaccaatgctgaatatacatcatttcctagtatatgtatacttactaaatgggactcatattaggttgcca

SEQ ID NO: 637174 - DNA, 360 bp, Homo sapiens
gaagtggagcggtttacagcaagcagctttggtcaccctatgttcaagctgctgcgaaatggcgactatcaggcggtgcagtgcagacggaagggcctgctggtgtgtggacgccagtggacggagatgcatggaacccggcagcaaggggagccgacatcttgtgctgaagtgcaatcttgtgcctccgaaaggcagcagggccgtgtccagactctactttgggaccacaggctacttcaagccagcacgagcttgttctcttccacagaccacaacgatgggcctctccaagagtagcccgaatttgcacaatctgaccacccacgatcaaagagctctttgttggactctgggctt

SEQ ID NO: 637175 - DNA, 808 bp, Homo sapiens
  misc_feature (185)..(185): n is a, c, g, or t
  misc_feature (192)..(192): n is a, c, g, or t
  misc_feature (309)..(309): n is a, c, g, or t
  misc_feature (366)..(366): n is a, c, g, or t
  misc_feature (381)..(381): n is a, c, g, or t
  misc_feature (397)..(398): n is a, c, g, or t
  misc_feature (415)..(415): n is a, c, g, or t
  misc_feature (420)..(420): n is a, c, g, or t
  misc_feature (435)..(435): n is a, c, g, or t
  misc_feature (442)..(442): n is a, c, g, or t
  misc_feature (455)..(455): n is a, c, g, or t
  misc_feature (472)..(472): n is a, c, g, or t
  misc_feature (494)..(494): n is a, c, g, or t
  misc_feature (500)..(500): n is a, c, g, or t
  misc_feature (502)..(502): n is a, c, g, or t
  misc_feature (504)..(504): n is a, c, g, or t
  misc_feature (507)..(507): n is a, c, g, or t
  misc_feature (509)..(509): n is a, c, g, or t
  misc_feature (511)..(511): n is a, c, g, or t
  misc_feature (514)..(514): n is a, c, g, or t
  misc_feature (529)..(529): n is a, c, g, or t
  misc_feature (537)..(537): n is a, c, g, or t
  misc_feature (546)..(546): n is a, c, g, or t
  misc_feature (550)..(550): n is a, c, g, or t
  misc_feature (558)..(558): n is a, c, g, or t
gggcacatgtaaactttgattggtcaaatttatgctgtgtgaatactaactatatgtatttaacttagtttaatatttccattttggggaaaaatctttttcacttctcatgatagcggtaatatatatatgctaaatctttatatacagaaatatcagtacttgaacaaattcaaagcacatgngtttatnaacccttgctccttgcatggtcattaggttcaaattataactgatttacattttcagctatatttacttttaaatgcttgagtttcccattttaaaatctaaatagacatcttaatnggtgaaagtgtttaaactacttattgtggtaggcacatcgtggtcaagtgaagtagnttataggtatgggtnttttctccccctcacnnggtgggtggaataagtngattnggccaatgtgtaatntttaacntgttctgtacaantaagtgtctggccattnggtatgatttctgtgtgtgaanggtccnanantcnananggntactccataatcagncaccattnaacccttcnttgntctaaaanaaaaaccaaagggcgctggtgtggaaagggtgaggtgggggagtattctcatctttcgggcattgggggacgcagacagcttacacttgtgtaaagcgtgggaacagcagcaactatacatggaaatataaaccaaaaacctttcactgttctaaactttcctaagatgggtattcatttgcgcggtcagtggagtattccaaagcaaagtgctacttactcgctccttctcttcctccattacaaattg

SEQ ID NO: 637176 - DNA, 842 bp, Homo sapiens
gagtgcatcgtacagtgtaagtaaaccaagttccgatgaacaaggctgggctccatttcctgtaaatcgctgaaagtgggggaacattagctagcagcccagaatttccgcccattcatttcatcactattgcattcttggttgtcttattcaaggttcttggtccaattcgagtccatcgcaattttactcaatcatcgtcaagtgacaacggagaagccagcggcgtttaggacatcctttaataatcaccggtgagcgaagaacgtccggcaaaggcgggcagagttaactcttctccgcgagaaaaacgccaggagttcatcctgttgtttggcgttgtcgccgtgacatatgaaccacatgctcctgagaaccctatggggcgctggtgctcaacacacggccatcggtgggacgtttccaatggacccttagtaccttttgctcttccaccctcctttgggcacaccttctgggcacggaaaaattcctcgaggtggtccaacaattaagtttaaaccatcaacctgatttactagtaaattatttagcctttggtgcccagacgaagtgtgccccttctaatttataatgcgcgcgacgtaaaacactttaccatggaggtggccccccagggggtgttcctccctttgtttggaacgatctgaaattcccttaaatttgcacgcacataggctggtcgcgccgccattatagtacctttctgcgggaagtacacttgagtgtgttaacaccctgggggaggcattaaggaggacctaacaactttatacacacggcacgttgctttcccccaccgagagaggagcgggggcaaa

SEQ ID NO: 637177 - DNA, 227 bp, Homo sapiens
aaagctgcagagagctatgatgtagccactgcagtccagactgggagacaacgagcacgaccctgtcgcaaaaaatacatatgtattataattcctgggaggcattatcactcatgcaaaaggaaccaaaactagaaacatttcatttttgtatagtttagtaatgagacaaggtctcaactcatgtcatccagagctcggagtgcagatgataggggtcctgagct

SEQ ID NO: 637178 - DNA, 123 bp, Homo sapiens
tgagagtcaaaatgaacacattgccatattatacttgctgcccacgctatgacgttggtgtttacagtgttcccaaggcagtggcttatcttcacagcatgcaacccaaagcgctaattcaca

SEQ ID NO: 637179 - DNA, 200 bp, Homo sapiens
tgggccccttggtttggggggggggggcttaaacccctggaactcttaaatttccccgtttgaaaaaaggccccgggggtggacctttggggggaaggcttttaaaccggcttaacccaaaggccggggggtttaattttttttccaaggaaaaggttttttaaaaaagcctaagggccccaagaacaaaagtttttttt

SEQ ID NO: 637180 - DNA, 701 bp, Homo sapiens
gccgagccggggctatttctggcgctggcgcggctccaggaaggcattcgtgtttgttatcgagaggaggccgtgtgtggatcctggccggtcctctgcgcccagcactcggctgctcccgggaatcccgtgagcgcgcatcgcaggccggcggccgagctcgcgcgatcccagccatcactcttctagctgttccttagagcacagggaagatgagtgagtcgagctcgaattccagccaagcccttgggctcctaagcaggacaacaggacggggactgagaaagcggggcccggggcaaggcgcgcgctaagcgagacctccgggggtagtcccggggacgagcgcatgggtcagggagtctagaaaggagcccaggcgaatgtgctcaaaatccttaagagaccgtcgggggccgaccagttgggaatgcaataaactaggcgtgttgccatagacccgggaaaggcaaccaaaattccatggcacggaaatccaaggggcaagaccccgaaggaaacgtggagaacggaggacagaggagggcatctcgcaaggagttccttcggaaggtaggacgcgagttgaccccatgcggtgccgcctggctcctcactgggaggagcagtttccttctgggggactgggacaggcttttgctcccggtcccatggtgcccacagggcgcttcccggcaggc

SEQ ID NO: 637181 - DNA, 147 bp, Homo sapiens
ttttgggggggacttttttgggaaaacccctttccccaaggtgggctttccctttttggatagcccccccccccccctccccggggtggggggggcccgttcccccctttttttttcccagccctttttttttttcccggccgggga

SEQ ID NO: 637182 - DNA, 220 bp, Homo sapiens
agtaaatctgcttaataaatagaacttccctgtgtgctgtgagccagcggacccacttgtccaatgccagatttgtttatctttgtacagaaggtttgatgaggtgtcttgtatttcctcccctaatttaaggttatttaacctcaaatggtaattttataaaatttggttggctgccctccgatgagggatggaggtcgctgccggctcagaggagcct

SEQ ID NO: 637183 - DNA, 892 bp, Homo sapiens
ttggggggcgctacagggcgggacgaaatgttccggcccgcctttcttggggggggggcctcccgctgttttcccgccccgcctgttttgagccccacgcgggcggggccccctcggttggccccgcctggtcaacgtgaggtgatgctacccaacacccgagccacgggtgttggccgaccacacttggtggtctcccaccctgccgaggggagactcttcccctcgtttttttcggagcgtgggcgcccccctcctctgtcgggttcagtggcacggacgggattcccacaaagggggggcgcctcccgagcagggggttttttaaacacccccccccctgtgacggccccaccccgccacttcttcgcgggcctggcgagtgctgcgggcccccgcgcgccgtccttctttcctctctcgcgggggagaacgagagtgcgtgtgccacccacccgcgggggctccctccttttcgtggttaacaccgcccgcgcggggggcgcagccggactccctttcttcttcccgcgagacgattggttctgtcgccctctattcctctcgcgcggagactagcgagggggggagcaccgcccccccttcttctgtgtcctccccctgggggggccaaccccccccgccgcaggtgttcttcggtcctccccgcggaggaacaagcgtctctccttctcctcgggcggtgctagatatcctcgcgcgtccccccttctctctgttgttggcccccctcctgcgaagagttgtttttttttctcccccaccacttgtgacgggggcgggcccccccccccccggggggggtggggggagtccccccgtgggggggggggctcaaaaaagaagggtgggccttgtttttccccgatga

SEQ ID NO: 637184 - DNA, 662 bp, Homo sapiens
tggatcccacccattgaccctgggacccaaaacagaagaaaaagaaccaaaaaacagaaaaaagaaaaaggcagtgagacagatttcagcccaggactcacgccgtgtagaagttgaccctcttttgccacgcagagaggactccaggaaattacagaaggccattgagctgtccctcagggggctcagggacctgccaaaaccagtggaggaggctagcagagcgaacgcataccagttctgggattacgcagcccgtccccaagctgggcgaagttggtgaacacccatgtggccccgttggagcctgacaaggacaattatccgccaggagccctacaccctgccccagggctttcaccttgggatgcttgtggcctgggcgacccgtggtgtgctaacaagaactgtacaccctcctgattgagacctatgtggaagatgatgacaacttgtcccgattggattaatcccccggagttcctttggggggctctccggccacccggctggctcccccagtggccctgtggggtccgagtggtctcaagtcggaacatgggtggggtccatagcgccatcccagcaaacatccatatctatgaccccgagaagacgatggtcgaaatcaattcctgtgttgtcccccagaagctgcgttc

SEQ ID NO: 637185 - DNA, 170 bp, Homo sapiens
ttagcgctcgcgtactccgcggttccctagtggtgttcttgttgtgcatgctctggtacgcgtcggacgcgtggattttctaccgcgatcaccagttggcctcccgcggtccggtcgtaagctgtgtggcagtgacttgtacggcagggcgatgagatagatggtccctg

SEQ ID NO: 637186 - DNA, 1226 bp, Homo sapiens
tcgccgcctcttgtggtgttgttctgccgccgtagtgatcggtgcccgcccgcgtgactgctggggggtgggcggtcgcccccacgtggggagtagggtgagttttgctgcattgcgccgtggtcctgctctgttcctcttttgggtgttatgtggtccccgttgttttgcgttgtggggtgttgtctgcccctctgtgtggttgttgctgtctgtggcctggtttatggggtcgctggtggcatcgttcttgttgttaatgcttgtgtggggttgtctctactctctctgggtatttccgctctttccgcagttccgtataggggggggcctgcttgggggggcgaaccttgttgttgccgaccgtggtaagtagtccttctcatggtccgcttggtgagtttcgcttctaggagatgtcttcgataagctgttgcgcttgggggttaaagctgtgggtgcatattattttggtgatgggtggtattcgtccgctcgtctcgctgcgttgttcttgtggtgccggcttttcttttgtatgggtgggtcatcaacacaacggtgttatcccacggtattcgcgcacgtatgacgggtgttgtttcctctcttcgggtatttagagccatacaacctctgtcgtggtaaatttgtttgtaagtctctctggggatttagaacataggatatatctttgtggataaatctctgactcgctctctaacagctcgtttggactttttatgggtggttattctgtctgtatctgtgtctgtggacttcgcgcctgcctatgtattgcacacgcgggctcgagtgatctgtgttggatattttttggaataaattgtcgtttgtggttgtctatggtgtagaagaaagcgctgtgggggtgtctaaggaggtgctgagtagcacgtggtgtgttctttgtgctctggaatagaaacactctttggataagaatttgtgttgtgtgtggtttgtgtggtttccgtgtttgctgaagcgtggttccgtccgttgttaaagtagttctggtaagtcacacggtgaataaagtctagtccgttcagccaccctcgtggttgttaccgagtagtgtgatcttttatttttaaagtggttcaagtgtatttgatgtagacaccttatactggattttggatattattaaacttttgtcccatttggcttttataataattaataaatacataaatata

SEQ ID NO: 637187 - DNA, 749 bp, Homo sapiens
  misc_feature (407)..(407): n is a, c, g, or t
  misc_feature (549)..(549): n is a, c, g, or t
tggacagtgcagagggtgaccaagccggggaaggccccaggggtccaacaccaaaattaagggttatatttatacacaaaaggacgtttcgtgctcccctcagaagtgtggctgtggccaccctctccccaacttctgtggccaaggctccgtgcacagaaggttgtgtccttcaagggtgtgaccctttcttgtggccgcccacgagcttagaaccctccggcgaaaaaggcacgcagtccatggctggtctgggcacaagtgtcatcttggagccagtctcctacaagccaccggtcttaggcgcgcattcttggtgccttagaggtgtaggccgccttatctggccattccaagatcttgagatgtatccaggccatctcctataagaatgcgagaagttccantatattcacgtagaagcctgtgacaggcccacttattgttgttccgcgcgggcccagaaaccaagaggcgaccacagacagagctccttgtgacatacgggactgtattaagaacgtctgtggcgagaacttccacaccganaaagaaggcatagaccctcttagaacccgtgtgaagggtggtagactgtggtctctcccaagatgggctgtgggcaaagggtgacggggtgccacaaaagatcccctatacggcgcagaaaacttcgccgatcaacagtgtctccagacagacaccttcagaattccagaacaccaagccatattggcgtgtggccaacc

SEQ ID NO: 637188 - DNA, 840 bp, Homo sapiens
gcaggtgcctgagaattacctggaggggccacagcagggactctccgtgcttccttccctgtgctggaagagtcacttcagctgacctcgttcaatgccctctcacttggctcctggcagccccttgctcctgggatctccgtgcccagggaccactcaccctccacctaggcagagagcacaaagctctgaaatcttttcttttttttttttatttttttggaaacacagtctcacctctgtttgcccaggctgtggagttgcagtgggcaccatcttcggcttcacgtgcaaccttccacctccggggtttcaagcagtcctccataccttcaggcctccgtgagttagcgtgggatcacaggcttgccaccaccagtgcccggtggctaatttgggggatttaaggggaggacggggtttcaccatgtttgcccaggctgatctccaactccgtgacctcaatgtgatccaccgtgcctgaacctcccaaagttcggggataacaggcatgagccattggcccggccaaagctctgaaatcttgactctcctctcctccccttcccgtgggctgctgccctcgtggtgggcctgggacaggggtagcccgggagtgacggggggcaggcagcaaaaccagtgagccccgtgtttataaaccgttgaggggcatctggtccctagcctgtctgcagcctctctttacacggtgcaagtcattgcagggtgtttgaatgcccccttttgttctcagaccctccggggttcttgaatagccacattttattacaaccagaatagagctggcactcaaagaatcctctaaacatgggggtc

SEQ ID NO: 637189 - DNA, 356 bp, Homo sapiens
  misc_feature (318)..(318): n is a, c, g, or t
gaggaaggaaacccaggagtgtgaacggatggccacattaggtaagaagaagttggaaacaaagggcatgggaatcttgcactggaatcttcagaaagttataatctccttttaaaacattggtggtgagtgtaagatgtccttcatgttttcttattaagtcagtgtttagaaatgttaccctttctaagttatatacagattaaatgcttttttctttcacgtacatccatcatttgcaactgctgttcgtacacagaaacaggactgctcaaatgatcctatttgtattttctgatgctatcagactctaatgtntttttccctaaaatattattgccatcatgctgtcgacg

SEQ ID NO: 637190 - DNA, 147 bp, Homo sapiens
tcgcacggcgcccgccaatgttcagttgtttttttgtttttttgcgccaatctctctctgtcacccaggctggagggcagtggcgcgatcctggctcactgcaacctctgccttccggattcaagcacgggggctcctctagaagtc

SEQ ID NO: 637191 - DNA, 258 bp, Homo sapiens
ctaaaggatccccgaacaacagcccttttctgaccattaccagcatgacccgagtcattgaagtctcttactggggtaataatgctggggaagaaaatggggacttaaagcacacaagagctgggcttaaagggcctttcttaccctttgattaccaaagacccccagaaagccggaatttgggtacccagcttgaattcctaattatgggcataactggttcctgggggaaaatggtattccgttaccatttcccac

SEQ ID NO: 637192 - DNA, 109 bp, Homo sapiens
gtcattccgtggcggccacccggcaaccgcacgccgacgccccaggaaacccagatctgcctaccgttcatcgagcgccaggtcgagctggtcgatcccgacatcctgg

SEQ ID NO: 637193 - DNA, 128 bp, Homo sapiens
tagggatgttctcctccaccttgtcagccccctgtgggctgtattcgctggctgatgcaatctggggctccagcttggcgaggatcggctgagccccgctgacagcagccgccgtgatggtcctcagt

SEQ ID NO: 637194 - DNA, 453 bp, Homo sapiens
  misc_feature (8)..(8): n is a, c, g, or t
  misc_feature (11)..(11): n is a, c, g, or t
  misc_feature (16)..(16): n is a, c, g, or t
  misc_feature (28)..(28): n is a, c, g, or t
  misc_feature (51)..(51): n is a, c, g, or t
  misc_feature (59)..(59): n is a, c, g, or t
  misc_feature (61)..(61): n is a, c, g, or t
  misc_feature (64)..(64): n is a, c, g, or t
  misc_feature (84)..(84): n is a, c, g, or t
  misc_feature (122)..(122): n is a, c, g, or t
  misc_feature (127)..(127): n is a, c, g, or t
  misc_feature (140)..(140): n is a, c, g, or t
  misc_feature (152)..(153): n is a, c, g, or t
  misc_feature (157)..(157): n is a, c, g, or t
  misc_feature (161)..(161): n is a, c, g, or t
  misc_feature (165)..(165): n is a, c, g, or t
  misc_feature (172)..(172): n is a, c, g, or t
  misc_feature (176)..(176): n is a, c, g, or t
  misc_feature (184)..(184): n is a, c, g, or t
  misc_feature (191)..(191): n is a, c, g, or t
  misc_feature (199)..(200): n is a, c, g, or t
  misc_feature (211)..(211): n is a, c, g, or t
  misc_feature (220)..(220): n is a, c, g, or t
  misc_feature (223)..(223): n is a, c, g, or t
  misc_feature (240)..(240): n is a, c, g, or t
  misc_feature (244)..(244): n is a, c, g, or t
  misc_feature (250)..(251): n is a, c, g, or t
  misc_feature (267)..(267): n is a, c, g, or t
  misc_feature (298)..(298): n is a, c, g, or t
  misc_feature (303)..(303): n is a, c, g, or t
  misc_feature (310)..(310): n is a, c, g, or t
  misc_feature (313)..(313): n is a, c, g, or t
  misc_feature (328)..(328): n is a, c, g, or t
  misc_feature (333)..(333): n is a, c, g, or t
  misc_feature (351)..(352): n is a, c, g, or t
  misc_feature (356)..(356): n is a, c, g, or t
  misc_feature (365)..(366): n is a, c, g, or t
  misc_feature (369)..(369): n is a, c, g, or t
  misc_feature (373)..(373): n is a, c, g, or t
  misc_feature (385)..(385): n is a, c, g, or t
tccagggnttnatttntttatttacaanagcattctaggggaaaggggaangggccccncnccncagtgcccaaggggacaggnctggggcagccccacctggcccatggctctgcagagcnctgcnccctccccaaggntgttacccacgnngganagangggngttctcncaanaccagggntgatttngggggggnnggggggaaccncgtctaggnccnaccaacactagcccccncccngggggnncccaagttctgaaaanaaaaccaaacgcagtgggcccacgtcagggnctccncgttccngcncgtaacacccacganaccantgcagcctcagcatgggnngcanggggggggnnggnctgngggggggggggnaggactgaagaggggggggggcccgcactccctgccagccgcccaccacctgccttttctattttggc

SEQ ID NO: 637195 - DNA, 129 bp, Homo sapiens
aaagcccccccccccccccctcccccccatttgaagaacccggatacataaaattttgccaaaaaagggagggattggacccccccaagggggtttcaagccaaccccctggcccccatggttttttca

SEQ ID NO: 637196 - DNA, 441 bp, Homo sapiens
caggcgaaacctaattctggactcgtgactgtatgatgcggatagctatgatgtccagaccctggagctgctcagcgaaacagaatggtagagggggcctggactcgccctccgggcatcccgctaggaagtgggtctcattcgggcttggagttccgtcccctggaacaaaactcccctgggcagtaccactggtagggcagggcccctgaaggagggctccccataaccgtacagggtcgaggacctgaggctgtaggtggcagaacttccagttcctgaccgaagagtagactttcacggagccgtcgcaggtcctgcccattttggaccagcagccaacagtgtcaaagcctgaccccgagcgcccgagcccagcggatgtgactgcttctgcacaccaacctccaagaagtcgtggaaaaggtgcggtgtgccatg

SEQ ID NO: 637197 - DNA, 203 bp, Homo sapiens
tgtgcctgtctactgctcagagattctactccctctcctgtgaaatcaggattactcttgtaactgtttctttcttgccatcatttagccatagtgcagagtgcctccatgataaatttggacacatctcaagcccttaatggtttgtcattgccctgaaaaaaaaaaaagccacatttattaacactgcactttcttccaat

SEQ ID NO: 637198 - DNA, 342 bp, Homo sapiens
  misc_feature (33)..(33): n is a, c, g, or t
agctgtttctcatgttgtcaggtgtctcgactnccactcaggtgatctgctgcctcagcctcccaagtgctgggattatagcgtgagcaccggggcccgtggagctgttttagagaaggcttaactgactgctcagcttcagttagatattccttcttcctggggtgctcccccaggcccaatactttgtctgtcacagcacctaacatagtgtctgtaattgcttctgttgcttgcttctcccactaagctatatagggaggtcaaatgatgagaagacagatgaagtgtggagaatagaaaagagctggtttagaaaatgagcagcattgagggcccaac

SEQ ID NO: 637199 - DNA, 136 bp, Homo sapiens
acggtattacagacgtgcacaccatgctgactaattttgttcagtagcagacaagtttgcgcgtatgctggcaggctgacctcgaactcctagcctcctcatatgatccacccaccctcagtctcccacagtgctg

SEQ ID NO: 637200 - DNA, 225 bp, Homo sapiens
cacgaggccagatccctgcaccagctctttgaaatgatgtaaagcttccatacaatgccctgcaatgtctgtcacaaaaaatggatgtcttttgtgaaaatcacctaaaggatgtggatttctcagaaaacgcactcaaagaagatcccctgcaacttttccagcttgatgccctcatgttcttgaggctacaggggaaccatctggtggaacttccacctcatg

SEQ ID NO: 637201 - DNA, 354 bp, Homo sapiens
gcatcctttcaaatggattcagcacaaagctgcaaatgcttgttattattaaactcagtgtacttaactcacaccaggagaactttctcctacaagagattggaaatctcttacaaatgattagaaacaccagacaatatgatggttatagatagaaatacagatacgtagatatctctcccactctttggacactgtaaaacatttatatttatcctccaaccacaagagatggtcttaaacttttaatttatttcctagtaaaaaaaatgtataaacattcttacacaatgctaggcacataatagaattcgatagattctattgaatgagctcagcttttcatcttttttt

SEQ ID NO: 637202 - DNA, 530 bp, Homo sapiens
gcaccattagtacactttttagataaaaaaattcggaattagccacggatttatgactacagttcacgcttatacagctgatcaaagactacaagattcaccacacaaagatttaagaagagctagagctgctgcttataatattgttccttcttcaacaggggcagcaaaagctattggtttagttgttccttcattaactggaaaattagacggaattgctattagagttccagttattacagggtcatttgttgacttatctgttgaattaaaatcaaatccaagcgttgaagaagttaatgccgaaatgaaaagagttcaaaatgaatcattccaatacaacgaagatcaagttgtttcttcagatattgttaacaatacacatggttccatttttgatgcaacattaactaaatttatagatgtaaatggaaaaagattatacaaactctatgcttgatatgacaatgaatcttcatttgttgctcaatatgtaagagttgctttacactttgcaaaaaaaaaaa

SEQ ID NO: 637203 - DNA, 957 bp, Homo sapiens
  misc_feature (957)..(957): n is a, c, g, or t
agcggattccaggtgtaagccaccacgctcggccaataaattatgaatataatattaagatgacctccatgtaatacctttggcatgtcagattcacataagtgacatgtcctgtttatgcctttatgacgccttgccttcaccttccaaacatattacagaatggtagtcgtagcaccattcgtaaggttgccacttaacttgagcacctctgatgattgttcatcatagtacatactatctagctcgctaactggatgcatgaaccaaacagctcaatatgtcctccttgaactcgggtccccagccctagtatggcctgcagtattccatgtcaaggccgtggggggccagcccggcgttgcgcgaagagcaattttcggggtttccggccctttacccatttggtaggcgtggtacccatcttgccaatgcttgtccccgccgttcgatcgtccgctatagcttgccatcattggctgggtcctcgccttgtcggtcgacccattgttgtcaccgtcccgtcgttcaaccacattctcccacgtgcccctttgtatctctccaccttaggaccgggttcgaacccccctttattcccccttggccccccattggttgttcccaccccctttttttccgcccctttgccgggttaattcttaggcgacagcgcggcacttacacaccgggcttttagaactttgcaatgctgggtagttccggggagaggttaaacccctggtgacggcgttcccgcctttgggacactaggggttgggcccctcttgggcaccttggcctttgggtgccaaccacaaatttccggaagcgagaaaaaccccaaaggcaaattggcaccaaaccccccccgggacgtttggaactttcaaactgcgcgcacaatggagacacgacaagaattccccccgagcgagcaaaccttttcccacgagn

SEQ ID NO: 637204 - DNA, 126 bp, Homo sapiens
gacacaagctatcacgtggctgctctgctctcccaggctggtgttgccctcgttcccacatgtgcagccttctactatctactagctcagaactggagctcacggtgggatttgcttggtgattat

SEQ ID NO: 637205 - DNA, 400 bp, Homo sapiens
ccggaaagattggactctccttattagctggttcctcctgtctgtactctgagcccatgctgtgctcgtcagacagcaacaagggagaatacagcagcccagaatgcaggctgcagagtcagatccccagaacaggatctcagccggctccatccttcctcagctgggcgaccgtggccattgacttcctctctgtgcctcagttgctccatctgtgcaatgacgattgtcatagtccctgcttcaaagagtcactgggaggattaactgagaaaatgcagggaaggtgcttggaactaaatgctccaaaaaagtccatctggccaggcacggtgtctcacgcccgtaatcccagcacttcgggagactgaggcaggtggatcacttaggtcaggaattc

SEQ ID NO: 637206 - DNA, 208 bp, Homo sapiens
  misc_feature (172)..(172): n is a, c, g, or t
gtctgggtatctaaggatccctgtgttgggaggtttggttgtaagcagctggccggcgtgtgacagaaatctgattgagaggagcttctagggatctgtgacccctcttctactacctgtcttttaccccagctgaagcactgcgctggctgctcagagaactgagcctggncgggccctctgctgctcccgccgtcccaaagcacat

SEQ ID NO: 637207 - DNA, 170 bp, Homo sapiens
tcgataacaagtatatgtgaatacatatgctctacagaatgaagtacaaggaatatactaatacagaaagttagagacatcaagagatgtacattactagaggtcataccatattcgaacttacaagaatctccagccaggcacagtggctcaggcctgtaatcccagca

SEQ ID NO: 637208 - DNA, 291 bp, Homo sapiens
tcgaaagctattgacctgcgagtaatagtatatacatgagtacaaaagcataacctaaagtaaacttgtaggctattactaacaatgctttaactagagtggtaagatgggcagcttttttttgtttaatagccagatactttttatactccgaatacaaatattgaaaaaaatgaaaggaaaaccccctagatcaaactaggtcaatccatggcctctgggctgcatgtggcccaggatgacttttaatgcagcccaacacaaattcataaactttcttaaaacgttgtg

SEQ ID NO: 637209 - DNA, 292 bp, Homo sapiens
cagaggctgaggggaggattgcttgggcccaggaatttgaatttacagtgagctatgattgtccactgcactccagcctgggccacagagtgagaacctgtctcttaaaaaaaaaaaaaaaaaaaaaaaaaaattcaggtttcctgcttgctcatggtcgcacatgtagctactccaaaggctgaggggaggattgcttgggcccaggaatttgaatttacagtgagctatgattgtccactgcactccagcctgggccccagagtgagaacctgtctcttaaaaaaaaaaa

SEQ ID NO: 637210 - DNA, 190 bp, Homo sapiens
cccgagctcgtgcatccatgaacaacattcagatgcaataaaacaaggaacaacgggaaaagagaatctaaaaataaaaatgatgatacccctcccccaggctttttcttaaaagggttaaaccataagctcaggaaaatctcccagaaagcagaacagaaagacgaatagataagtgataacagagaag

SEQ ID NO: 637211 - DNA, 101 bp, Homo sapiens
atctaagatccccctcggtcgcccttgttcgggttatgagtatacactagtctttttactttaggaatagcgtctattactggccgggtgctgtgactcac

SEQ ID NO: 637212 - DNA, 142 bp, Homo sapiens
actgcaggagcctgttctgtaactcgataaaccccgatcaagcctcaccacctcttgcccagcctatataccgccttcatcagggctttgctgaacgatgcgcggtatataggctgagcaacgaggtggtgaggttcaccgc

SEQ ID NO: 637213 - DNA, 134 bp, Homo sapiens
agtttggaatattaagagaatttccattttacagtgtctccatagctgtggtgcttcttacaaccctttcactttatttcttgtgacgacgagatttcgcatctgttgcccagagctggatgtgcaggtgtgcg

SEQ ID NO: 637214 - DNA, 115 bp, Homo sapiens
gcgcctcctgtgtcctacaggggcgccagacggatttccactcggcttgaggtagattagtgccacgtgccccaaagtcttaaattgggtgaccataagctgtgcaattgataat

SEQ ID NO: 637215 - DNA, 218 bp, Homo sapiens
agacatgacagacatgataatatcccagacattacagacatgataacatcacagacattacagacatgatagtatctcagacattaaagacatgatagtatcccagatattacagacattacaggcatgacagtatctcagatattacaggcattacagacatgttagtatcccagctattacagacattacagacatgatagtatcccagtcgacgc

SEQ ID NO: 637216 - DNA, 382 bp, Homo sapiens
gcagtgcaccttgattctgtagtgctctagaggatccgatgttctcaagagcgcggctattggtaaatctctgaaattgctgcttccctctggcagtcttggaatacactcagatactgcagaccgtgacgattcctatccaaatgcagctattggtattgaggttgaactagataaataaatcccggtgtgaaaatcccattgactcgtgccttttgccagctcattagtactctggtggagagctcatttccttctaatttggtctgacttgagaacctggcgttgacccttatttgcagttccttagagactctgtgtttctacgattccgtacaagagcttaccggagagcagctgaaaaggttatgttcagagaaaa

SEQ ID NO: 637217 - DNA, 1141 bp, Homo sapiens
ctaccagaacaagccttagatcagaagccatttgacccaaataaagtataggcgatagaaattgaaagctgtgtggcaatagatatagtaccgcaagggaaagatgaaaaattatagtccaagtataatatagacaaggactaaccccgtataccttctgtgagtaatgaattaagctagaaatagactttgcaaggagacgccatgagctatagacctccacgaaatctagacgagctaccataagaacagctataaagagcacgaccacgtcttatgtatgcaataatatgtgggaagatttataggtagaggcgacaaacgctaccgagccgtgggtgatagctggttgtgccaagactagaagtcgttcagtctcacatcttgtacacactttgtcgccagcagtaaccctctaaatcccctgtgtagatttaactgttagtccagaagaggaacagctctttggtacactaggacaataccatgcttgtagagagagtaaagaaatttatgcacccatgagtatggcctaaaagctagccaccaattaagaaagcgttcaagctcaagaccacactagtctaatgaaatcccaaaagatataagtgaagtcctcacaggccaattggggccattctatcagcctatagaagaactaatgttagtcactaaggtaacattgggagcattctcctccggataacagcctggcgtcccgagttacagactggagactgggcaattagcatggccaatattcttgtatccaaccgacaagtccttttagcccgcatggtgcacccaaaaaaggcatgctctcaaggacagggcaaccacgcaaagggagctggcagatctttacccgccgtgttcacgaaaactctgccttaaattccccccgtttataaggccctgccccagaaccgtgttaaaggggggggtacaaacaggaggagaggaataaacaaggcgtataaagacgagcagtagatcacccaaagaagttacatataaagagaacacgtacaaggagcataaaaacaaccacgcacatcaagaagacaaaataagtgccggcccacacacaatagagatgtccgtccctctccacctcatacatgtctgtaataaaaaaata

SEQ ID NO: 637218 - DNA, 290 bp, Homo sapiens
ggcccccccgattttttttgtttttagggccagggtgctgttgaaaagcccccccgtgggttttttatttttcccccaagccgccttccaaaattcccccgggggcccctgggaggggaaattcccgtttttttttaataaggggaaatcccctgggtaaaaccccccccgtttgggttgggtgggccccccgtttttttccccgggggaggggtggggttttttggccccttgcctccccccttttttttttttggggggggaattaacccctttttggtcccccctta

SEQ ID NO: 637219 - DNA, 459 bp, Homo sapiens
taggcttcctcagccctctgtcatatggctgttttccaaacctgtggagtctgttactgttctttctgcaaggactcacctccttgagccttggtttttgttgtagggattaaatgagataatatgagtggcagctcttcatgagtcctgcagtgctaagcaaatgtcagaaattggtgcactagcctactcatctttgtttctctgaatggacaactgtcatggtcccggccacggatctttatctggttcatcgtatttatatgtgaggcatggatggctgcggggcttcaagtaagatagggggatgttttttaaagtccaggtgcgctgtccttttttactttattgtctccatagctgtgtgatgtcaatgctatctccatgatacaattcattaagggtgttttggtcctttgaaatgtatcatgtaaagccattttttttcctcaaataaga

SEQ ID NO: 637220 - DNA, 331 bp, Homo sapiens
  misc_feature (44)..(44): n is a, c, g, or t
  misc_feature (64)..(64): n is a, c, g, or t
  misc_feature (67)..(67): n is a, c, g, or t
  misc_feature (87)..(87): n is a, c, g, or t
  misc_feature (91)..(91): n is a, c, g, or t
  misc_feature (147)..(147): n is a, c, g, or t
  misc_feature (150)..(150): n is a, c, g, or t
  misc_feature (153)..(153): n is a, c, g, or t
  misc_feature (164)..(164): n is a, c, g, or t
  misc_feature (204)..(204): n is a, c, g, or t
  misc_feature (293)..(293): n is a, c, g, or t
  misc_feature (303)..(304): n is a, c, g, or t
  misc_feature (309)..(309): n is a, c, g, or t
gctgcttcgacatctatcccaacctgagtcccgtcaaagggggnttacaacaaatgtgcttgtngtntatcatctctagctagtgtntcanaggggggggagtatcatttcctgggtgactttgcatagagcaagctccccaaaggncanggnatactcaatcnagattcttccaatcctccggtacccaccaagtcaaaaganttctggctccctgtagcttcatctaagtgcttttctgttagaggagaaaagtgaggaaagcgatgctctttcaataagttcggcagggnggggcaaggnntggtncaaattgattttttttttttct

SEQ ID NO: 637221 - DNA, 1271 bp, Homo sapiens
gacaagaattatgcgtatgaacgccctgtcttgccgcatttgggagcctgtgatctagtcctgggggcccccctcttggaccgtaatcacttacacggaggccagctccccttcatgtcgtggggtcgctgtccgtgtgtagggccaatcctcgttcgggttccctcaggaataagctgtgtgtgtatagtacgtggtgggttccctctgggtaaagttcgataaggcggcttccattcccgctgttaatggtgtatacaccgtcgcatttctctgttgtgtgagaaacgaggctggtcagcagctatccaattattcacgcatgtgaccgtccatctgaacccgttcttaaatccgttcgatgcaacaactgccgactaaaaccagatgagatattggaagggagcgatccaattatgattcggaagggcgtacgtatcagtgaggttgataaccaatcgtatgcttccggcgagcggaacaaatcgtcccgccttttcaatgacgccaaccacgggccaaataaaggaataagcgtctgcgtgacgtaaccggcgatgatgatcgtccagtttgtactgccgggaagctacttctacggttcaatcgtagaggggtatcactccagtgggtaagaatcttcctcgcttgagttgacgaaccgtagcaccctggtgcgaacggaagctccattattctcctcaggaattgcaccgatagtacggggcaaatcgtaccttcgcggagagcagaactgaagtgttccgataaaggagatcttgcgggcccgttctcggtgcaatggccttcagttctcccacattataggaccctcacaggatggtacaaacccaagggaatgtcacgctcatcatagccgtgatgtctccatcagatggcatccggcttgtcacgtgcatttagaccaacatccggatatggggcctctcttaagaagtcagagtagagtcataacatgcgtgatgtttaaaccttacatgatcggcgagtctgttggtatcataaattaggaatctcgggccgggcagcagatggctcatgcctgtaatcccaacactttgggagaccgaggcgggtggatcacctgaggtcaggagttcaagaccagcctggccaacatggtgaaaccccgtctctactattaaatacaaaaattagccaggcatggtggtatgcgcctgtagtcccagtcttgggaggctgaggcaggagaatcgcttgaacccagaggaagaggttgcagtgagcca

SEQ ID NO: 637222 - DNA, 647 bp, Homo sapiens
accaacatggtgaaattccatctctactaaaaatacaaaaattagccaggcgtggtggtgcatgcctgtaatcccagctaatagagaggctgaggcaggagaatcacttgaatccagaaggcggaggttgccgtgagctgagatcacgtcattgcactccatcctgagccacaagagcaaaactccgtctcaaaaaaaaaaaagaagaaggtggatctccaaccaggccagagaagattctcacagaaggtttggaacctctaagaaataaatgggttgggtaataaatggcttctggtcagataaaaaaaaaaaaaaaaaaaaaaactttgtgtggggcggccctgggcccctatgaaaaaacggattttataaaaccaactttggtttggggcggcgggcggcgaccccaggtaaggtatactaggacacagttgcgcaatacgcggtgttcccaaaagaaaacccggggccatgagcatacgcgctgtgggtcttctccacccaatataaaaaaacccgccgcggggggacacccgcgggcgtttttgaaccaaactccgagatgagggtctcggaggcaccatcacggggcctttatcaaacgggggctccagggagcctgatataaactctcagggcgggag

SEQ ID NO: 637223 - DNA, 250 bp, Homo sapiens
aaggggggggggggaaaagggggtttccccccccttttttgcccccgggttggccgggcctttttggttacccacccccccctggggggtttttttctgggttgggggaaaatggggccccctccccggggggggggggaaaaaccccccccaaagggattgggttttttaaaaggggaaggggggggtcccccccgggttttttcccggggttttttccttccctttaaggttccggggtttgggttta

SEQ ID NO: 637224 - DNA, 659 bp, Homo sapiens
tgggaagccccgtgcacatgggccagaatcggcagggcccggagcagggggccttctgtccacaatccctccagcgggcacagttcaccaaacgcacccccttcctggacacggggcaaagggtgttggctcatttcgagcaagcctggttcggtggaggtggcaggaagaggaggtgtgcacaggtgatgaaactcacagaggaggccagatctccttccaggggcagctgctgaacaccaagggaggccgagacctctgtggggaacagtgagtggggtcattacccatatagttctttcattcccaaaggacgtgcagtcgcgggaagtataccttttcctcccaattccgtgcccaggccaataaatctcccaggggtcttcccatgttcagcatcgtgattcccgagtgaagcttcgttcagcgaatcccacaattggcgcggtcctatcatcgaaagacgcgtcgcgctggggggagatcgtgcacgtggccaggggcactgtggatcgattcccacaagtgtgagctttctggcggccagctggaggtgtgttgcctcatggggggggtggtccataaccaagaatgcccttcctggagtggcgggcctccaaatccactttgtccacaccggggccagccctggccaccat

SEQ ID NO: 637225 - DNA, 247 bp, Homo sapiens
acggcgtatgcggggagccggtgatattgcgataaagttgcccgaagcgggcggaaagggcttcaccataatggcggctgacttcggtgaccttttgcagcacggtttgcccttcgaccagcgtcggcggcactatttttggtaccggttcagcagggggcgtagcggcaacggtgcgcaactggtcgatcaactctttacgcgaggtgtcattatccagcacatccgccagtgcgccatacgccgt

SEQ ID NO: 637226 - DNA, 273 bp, Homo sapiens
  misc_feature (198)..(198): n is a, c, g, or t
ctcacagtggaagcattcccagaacagagtggaagtagggagataatttgaagtataggcactggagaaaatgttattcaaaaaactgttgagaagaaattggaagttgatgaggcagaaagatacaggaaacctattccaagtggcaagaaccccagtggcacactcaccaatttagagatgtcttctccattaagntaaatgagaatagttgctaacagaccactctcatctctttttgatctccaaccccaccctttctagacttcaacc

SEQ ID NO: 637227 - DNA, 211 bp, Homo sapiens
attacacatgccagcatccccgtacaagtgagttcacccactaaatcaccacgatcaaaagggacaagcatcaagcacgcagacaatgcagctcaaaacgcttagcctagccaaacccccacggaaaacagcagtgattaacctttaacaataaacgaaagttaaactaagactatactaaccccagggttggtcaactttcgtgccagga

SEQ ID NO: 637228 - DNA, 349 bp, Homo sapiens
cgcacgacatgagcctgcacccaatgtgctgagcctgcacccaagtgctagcctgcagccatgtcagagcatgccacccaagtgctgagcctgccttcatagtcactccagcacagccagcagaagacagcagaagtatgtgtccaagccatgccttgaggagcggccaccagatgctgaattcccttttccatttcttgtgtttgagtcccattttgcctttgaattaagcatttctgttctccccccaaaaaatgaatgttgcttattgaatgcttttcttttcctaacaacaactctgaggtcttctgaaatagaagcctgaagagggtccttaggtacccaggag

SEQ ID NO: 637229 - DNA, 821 bp, Homo sapiens
aggagcgcgcggcacaatgtcgatatttcgtcccacgaaaggttgttcaagtaggtttccgatatcccgcttctgttgtgcctttcctcggtattgttaatcgcttgcactgatgcgctattggttcaagttcgccaacacggtccccatcgatgccagcggccacttttctgaataaagggctttacaacaggccgaaggaggtgttggccgccactggaaggaaatatgcgccagattaccctggaaaaaattgggggaaaaacaaattaatgcaagcgtgggaaaaaaaaagatacacgtctgttcccccacccaccagcgcacttctttgtgggaaatcatatctccccccattgttgaagaatggtcgtcccacatccccccctgttgatggaccgctcccctaattcatctttggagacacccttccacattctttctcttcacgtagatctccacaaacagcccctcacagccaacaattatctgtgtgataaaaggtatgggacccacgtctggatcctctgaattgaactcccccccccaaggactcctcaagtaggctgttatttaaactacaggcattttttgaaacaaattctagccccaatgcgtcagcagaaacaacaccaagagtgagtttcaatttgaataactttcgatgataatctcattattcatgcggtttcatacaacctctggcgcgtacaaccccacatcaccccaacgaatcttttttgagacaccatgattaattaacggtagtccccggggttcaaaaagaaggtaaaaccccaaaaaaaagaagcgccccacag

SEQ ID NO: 637230 - DNA, 532 bp, Homo sapiens
attcctaggcctcgttgttccgccatttggggcgttctctccggtgtccccaagtgccgggttcccgctgggcccagcttgtccgcgcacccagtttcacgtgcttgctgctggggtgttatggccggtgtttccccgcacagcgtcttgtctcctatcctcgtagtttccgtcgatattcgcgtgttccccggaggctctatctccccccgggatgcgcttccctcatgctgtatgggagcactgactgttttctagaccgccgtggatatttcaatgactgattccccgcaagtgtagaaacctgtctgttcatcacggcaaagactgcgagatgtcaaagagagacgccctactctcacctcgagtggcgacaataatggcagccggccccccccttccccaccactgtgagagaccccctattagactcatgatgtattttgcgacaaatcatagtaaggagtatggatacccccccaaggggggtctagcccgccccctggccccccaaagtttgtcaaaaaaagaa

SEQ ID NO: 637231 - DNA, 987 bp, Homo sapiens
tatacccagcccccaaggggagtgttcaattgtggaaagggggcccccaaattaaccaagggtgaaacagcgtgggacctgtggggcgtggaaaaaccccctctcccctctccccatataacatgtgcccaccgtgccccaaattaaaaaaaaaaccaaccttaggtggagaagaaccccgccagagaaacgcgcacacaagggggcgagggagagaaaaagcagacgtgtgagaactcccagaggcgcgcccggggtgagaaagagactcacacgcgcggtgtgcggccggcgaggggcgccacaagagggatcagacgaggggagccacaacaaagacacgcgcgcgccacgggtaataacaaagaatcactacagagagtgactctataccccacgcggaggggatataagtagaaatataaacatatattaccaaagaacacagtaaaggagaacaaaaataatcttaatctcccacatgggtagaaaacaaacaactcaatctacgcgccaacctcacagggtagtagagtatgctaatacgcccagcagaaggcaacacacaacgaggggcaacaaaatctataaatgacaagcgcgggtgatgcgcggagaataaatacatataggaggtatcaactgtgaaaaatatgtgtagcaaaccaaatgtggggtctacactaagaagcgcgatgtagtaatatccactgagaaacaacccaaacgaggagataaacacaacagtggctagcacacaaccaacaagaagtggcggtgcagctaccaacacaccactcgcgaccgcgaaggaaacacacccccacaaacttatgagcaggagagagaccgacgctatcatatgataaaaataatgacccgaaaaagaagggaaccacagaggaggtataaacaaactcgcgtggagaacaaataaaaagagagaaaagacacccgggagcaaacaacagacaccaaagacaacac

SEQ ID NO: 637232 - DNA, 138 bp, Homo sapiens
gcggccgcctactactactactgctcgaattcaagcttctaacgatgtacggggacatggagggatgtctgggggatgctgtgcgctgccgctacgatgtttggttagagattaaagccatttcagaagtggaaaaaa

SEQ ID NO: 637233 - DNA, 694 bp, Homo sapiens
cgcactaatcgaggtttgcctaggctggcatagattcggttgtatccgctcatagctgctttggtcccgaaagatgccgactctggctgtctcaaaccttgccctgactgaatctaaccagaagaaccctgttaagccctgctgcgctcgaccagagaccacgaaggctcgcgaagcgtgaatcatcaagaacggtgaagaccactgaggacatctaattgaggccgacagggaacgcttgaaagccctaggatttaaaatatgaaacggtgggaagatgtgagaatagataattgctgaagaatgaagaagattaattttggaagagctttgacaagctttgatatgtggaaaaagtaattataagatattggtagaagaaagctaatggttactcgtggaagatcaaaaaaaaaaaataatgatacaggccgaaacaagagctcacttggtcaattaaaaaaaaaatgagaacccttttggcccacttggcccaagcctactttagccttacgcaagcttacgcatgcggccgcaattggaccaaattggcccatatggccctatagagagttgatttacaatcattggccaccgtttaacagggataaccttggaaaccctgctgtatcccatttgatcccttggccgtaaatcactctttcgcaactggactaatcccgttatgttttaa

SEQ ID NO: 637234 - DNA, 133 bp, Homo sapiens
gctgatgctgaaggcgactctagaggtatcccctccaggatgctttcatgctgagctgggactgcagctctatctccaagcttgcagtcccagctcagtcatgaaagcatccctggaaggcaaactggcggag

SEQ ID NO: 637235 - DNA, 289 bp, Homo sapiens
acccacacaattaaactatctgagaaacactgaccaatgttaacgacactcgttcccctgccttggctacttagttgctgaggatgtaatgagcactgttctcacagcctgttcccctgtccttccctttaggagacgagtgataaacctaaaatgaagacaatgcaaaagccccagtagtttcctcaggagaatggaatgaaagacccatctatcgctttctccaaacccaagaaaaagaattttttttccatggtggagttgatgattagcgatcttgaagagaccg

SEQ ID NO: 637236 - DNA, 322 bp, Homo sapiens
tcctggatactcattattttgccctatttatttgtgtagttgaaaaaaacattacatttatcatcctaacaatttttaagcatatagttcaatagtgttaaatatattcatgttgttgtatagcagatctctagaactttttcatcttgcaaaactgaaactctatacccattgagcgttaatttcctctctctcttccaccagctcttggcaaccacctttctactttctatgattttgactactttagatacttcatgtgagtggaatcatagagtatttatatttttgtacctggcttattttacttagcataatgtcc

SEQ ID NO: 637237 - DNA, 163 bp, Homo sapiens
tttacgggggggggccctttttttttttacaaaaacttgggaaacccaaggttttttttccccccgggggggttaattggggaaggtttttaaagacccccccccggtttcagattttgctggggggtgaccccaaaaaattgtcccgtttgttcccaattta

SEQ ID NO: 637238 - DNA, 389 bp, Homo sapiens
ggcggatatctctgccgggtgactagctgtttcctttctctctcgcgcgcggtgtggtggcagcaggcgcagcccagcttgaaatgcaagaaggaacgccgggaagtccggggaaccctgtaccgctgccgggacaagtggctcccgggtaagccaattcgctttcatcgggtgccaagggaacccgtgattttctatcgagattgaaggttgccgcggtatgaccatggttccccacggccgggtttttcaaggggccaggttaaaacacattgtaagtgcttatcgtggggggcgccatttccggagggcatggggtgaacatcagggatgattccaatgccaccggatgtggccaagggccgatgtggaatccgtcctaagagact

SEQ ID NO: 637239 - DNA, 1904 bp, Homo sapiens
acacgtaaccctacctaccggttctaacgtgtcgctgaacggcactgtgtgtggctgacacttcgtgcaccgacggtgacgacgacgacgacgacacctacgtctcaacgtttttttttttttttttttttttttttttttttttttttttttttttttttttttttttttgaggagagcagaggagacacacgcggcggggaggcgggggggagggggaggggggtgggagggtggagcagggtggtgtggtgcgaggggtggtgggagacacaccagcggggtgtgtgtgtgtgggggcgggcggagtgagcgggtgtgttgggtgtgtggtgggggaggtgggtgtgggtggggcgcgacgcacgcacgcgcgagggtggtgggaagacacacacacgcggagagggcggagccaggagcgggggggcgcagacacacacacacgcggcgagcggagacgccggcgagagagagagcgagagcgcagcgagtgcgaccgacggcacggccgcaggcaccacagcgcggcgtgccgcgacacgcaacagcacacacagagcagcgcggcgcgcagactcgcagcgcgaagcagggagagaccaaacagcggcgcggggggagtgaggcgagagaagagagaggagagagagcaaaagagacgagaggaggagaggagagacacacacagaacaacacaacaccacagacaggagacagagagagcgcggtggggcgccgacacgccgcgcgcggcggggcgcggccccccgcgcggcgcgcagcggggaggagcggcccacccagagacgccacagcgcgcagcgagggcccagccgcgaggggcgggcggacgcggcacagacacgcgggaggggccgagagcggcggacgaggcgccgagagccacgcccaaacgcagcccggcgggccgccgcaggacgcgcgcacccgagcagcgcgaggggaggaggcgagaaagccagccacgacagacgcagaggaccggacgccgacgggagagccgacacggggcacacgcgacaacgacacgacgggggacgagaagagtgcgagcgaagagaaacacacaccgcacgcgggcgcaggactagcaccacaacaggaagcagcgcgggaacagcgaggcggagagcggcggcggacagacaccgacgccacacagcgagcgccgcaggggcacgacggagacgaccgcaaaacgagagcgagcagcacgagagcgagcagagagagcagagcgaagacaggagacgccagcggaacggaagcgaaacccaacactggcacggagcaggacgagacccacagcacgaccgagagggaaagacagcagcgcagcacgacggacaccgagcgagcgagcgcagcacaagccaagacggagcaagcggggggggagacggagaggcggagggacgagacgcagccgacccaacgacggagcagagagcgcagcagagaaggacaccaagcagcagaacgcagcgagacagagacacgagaccgcagagaacggcaacacggagaggagcgagaggacggacaacgacgacagacacacaaagacgcgagcacacgcagagcgcaggatgtggagaggcaggagcaaggcaaggagcgaaacgacggcacagccagcacaaacgcacgagcgagaagaagacaacgcgagcgcggcgagaagaagaaagcacacacacaaggagcacgaagcgagacgacgagaaacacaacgaacatgggatacgccaccagaacgacagaagcagcacaagagaaagaggagcacgacgagagtgcagcctgcgggaccgcaaagacgaggacgacaaggagacacaccgcacggaggcacaccacagtgggcgaggggacaagca

SEQ ID NO: 637240 - DNA, 117 bp, Homo sapiens
ccttacccctccggggagcccttaacctctaactggcaacactctgcccattgtgcgcatgcgatttcctttgggcatcctgcaatgtatactcgctggcaatccaactccattcca

SEQ ID NO: 637241 - DNA, 376 bp, Homo sapiens
tcagaggatccttttctgccacgactcggatagtaaactagggtggggggggtaacttctgtgatacatagtaggtgaatagtaaactggtgggagtgtgatcatccagtgatggatccatggagagcaggtggacagtgaggggagaatggggaactgatgtgtgatcagttaacgtgttggtaaatgaaacgacgttccagggcacggaggctacgtgctgtgatctatgaacgggtctactgggcgcaacacctgagttactgggggctgctacactcagcactggacatgcttaacgtggggacgctaactagacccatgacttcttccaggacatgggttacgacggtccatacagggctgtacgtaccta

SEQ ID NO: 637242 - DNA, 136 bp, Homo sapiens
  misc_feature (9)..(9): n is a, c, g, or t
  misc_feature (53)..(53): n is a, c, g, or t
  misc_feature (65)..(65): n is a, c, g, or t
  misc_feature (87)..(87): n is a, c, g, or t
  misc_feature (89)..(89): n is a, c, g, or t
  misc_feature (102)..(102): n is a, c, g, or t
  misc_feature (105)..(105): n is a, c, g, or t
  misc_feature (108)..(108): n is a, c, g, or t
  misc_feature (110)..(110): n is a, c, g, or t
  misc_feature (112)..(112): n is a, c, g, or t
  misc_feature (115)..(116): n is a, c, g, or t
  misc_feature (118)..(118): n is a, c, g, or t
cttgcctgngagcctgacaaagggaggagacacagaaggaaccggcgacagtngtctcagggccnctccggggggcctcaacaaccngngcacccccggagnctnccncngnccnncnccccacacgacgaggccg

SEQ ID NO: 637243 - DNA, 262 bp, Homo sapiens
  misc_feature (183)..(183): n is a, c, g, or t
  misc_feature (196)..(196): n is a, c, g, or t
  misc_feature (211)..(212): n is a, c, g, or t
  misc_feature (262)..(262): n is a, c, g, or t
acgagttgtccgagttatgaatatggaatgaagggataaattcctgatgtctccatttatctcctctgtgtaaaatacttcatggcaaagttgctggtatttaaagtaatgagtatgatcttggccccgatctaaatcttttgatcttgaaagaaggatggagtatcaataaagagagggcangacagattttctntaaagaaatgtgatnnagttaaagggatggtcaagacccagcaagtaactcggacaactcgtcgan

SEQ ID NO: 637244 - DNA, 129 bp, Homo sapiens
acagctccatagtgcctcatactacattgatattatactagcgatttaccatgctcatgtctaggaatactagtatatcgctcaaacctagatattctccgctattatgcctagaagaataatactatt

SEQ ID NO: 637245 - DNA, 518 bp, Homo sapiens
  misc_feature (323)..(323): n is a, c, g, or t
atatgtgcccgtatacgaggatatatctggtaactatggtgccatcgctcagacttgggacgaccctagggcacaatgataaacatactggccgtcgtgttaaacatgacccaattgatgtgtgtaaaataggaagcaaggtatgtgcaagagataaaataattggcgtgaaagttctaggcatattggctatgattgacgaaggggaaaccgactggaaagtcattgccattaatgtggatgatcctgatgcagccaattataatgatatcaatgatgtcaaacggttgaaacctggctacttagaagctactgtggactgntttagaaggtataaggttcctgatggaaaaccagaaaatgagtttgcgtttaatgcagaatttaaagataaggacttggccattgatataattaaaagcactcatgaccattggaaagcattagtgactaagaaaacgactggaaaaggaatcagttgcatgaatacaactttgtctgagagccccttcaagtgt

SEQ ID NO: 637246 - DNA, 113 bp, Homo sapiens
agtagcacgacctcatttctacaaacaaaaaaaacatgggcttgggagtgaaatattaataacattctccctctctctcctttggccggtgtctccaaccatatcaatacatg

SEQ ID NO: 637247 - DNA, 342 bp, Homo sapiens
cagacacgagaagtggacccgagacactgaggactgactatctcaccacaggatggaactctccaggctacctgtcacccactgtgagcattaagacccaactcagtggggagcacacataccgcctgggaccttcagtgtacagctacatagaatcctttgcatctttacttccacacttaggaggcggcaatgtctactaaagtggaattaatatacacactagactagaatatgacccaacacatttcacagggacacgggaagcatgcttctgtatgtaacaaaatgaagggcaaaatgccgccgcacaattgactgctaccggtcgaaaggaaatcc

SEQ ID NO: 637248 - DNA, 914 bp, Homo sapiens
gatctgactctggcactgtgaatatacatattcgatccatttgaaagggcctgtgcccttatactctacactcattcttaagcattttcgcaatacgtgacatccacggactaatcttgctgaactgtaaatatttaaagcaagactaatgtatgttttgtatcaacgctaaatgagtcataagttctaagaaagtatgcattgtcaatcttgtcagtagattgttgaagctatgattataatagcatcgcatagtgacatgtacgatactgtatatacgccggatataacggggtatagcagttgtgtgccatcttattttatgacatttgacacctgtgaagtgtgacactaactgttgttcggagaaccgtgtcttatggaccgaataccctgctcagcatttagtcaatcttgtgcctcacatactgtttgatgtctaagtttgcctcagtgggtcgagaaaaatgcccagtgaggatgtcctgtccgctaaagagatgatgctgtgctatcactgtgatatgtgcaccagtaactactggcatcgaaatgtgaggcctggtgctgcttgcttctaccgtcccgtcagcaccctttaacgccctacagtatcgctggtgtgtcgggcccaagttgctggccactttccctggcagtgtacggcaacactggggcagcaattacggcgccggactaggagggcgaaacgtggaagggactctggcgaaccctggagacacgcgtcagttttccctgcaacgggctactcggtggccaagacaagctgggggggtaaaatggccgaaagggctgcgggcccagagaacacacgtgttgacactacagggggatagaacataggggcgacacataaaaataggttcttctgaccgtcatcaccctctcctgaa

SEQ ID NO: 637249 - DNA, 1309 bp, Homo sapiens
taacaggcagcacttttatttttccttacacaaggacgtgtggctgggggcctaaggtcctcacataacagtaaaaaaccaaaatttgtggtgggtcatctcttctttcaaaaaatctcgaaaattggcgttacaaaaaaaacctttacatataaatttaaaaatgtgaattacattttacgggggataaatgtgcaaacgggtttccaactctcaagagccaagtataacgagccccagcgggtggtcgcggggccaagagaacactcgagcataagaaagaggaacagcggggctccatagcgggcgtgggaactttctccaaccgcgtggacgagaacccgacaagaacaaacacaaagcgtgggtctctgtggcccgagctctctctctgagaagaaatattcccgaggaacacaactctcgagccccgtgagacaacgtgttaattacccagaggggaacaagagtttacacttctcaaatacagaggctccaaaaactcaggcacaacaagttcccatacaaaatctccgaggggcgtggcattattcagaattcacagagccttttcagagggggaccaatttctctttatcgcgcagagggcttatatctcccagtttcgcggtgagaggcctagccagtagagaggggcgggcgtgcgatttttggcccacgggggggccaaacatttcccatatttctctctacaaatatataaacgcccatgtggcaagggacaaaaggcgcgataagcgcatatcctgggcgagtggaagctccggggtttaaaaaaacgcatttgggcggggagggagcacagaaagagagaggggggggccccgagacactcagggtgaagaaacacacccatgggcgagtggggaaaacctcccacaaatctcgggcgtggaggaacggggttggggaccacgttgaggggcccaaggagatgtgtgggcagcccacccgggagtcacaaacacccgagaagaacactgggcgagccccgggggagagaggacgcgaaacaaacccctgagaaccctacccgagggcggcgtaggaggagcccagagaggggaggaaaaacacccgattagggaagaacccctgattcggagcaaaatggcccggaggaaaccactgacgggggagttgccgcgcccagaaaaaaacccgggattggggggcacacagggactatgagggggaaggtatcaacggatacaacccccatgaggaggaacgcaaaggaggctccccaggaatgtgcccacagaaacaaacccggcagagaaagagt

SEQ ID NO: 637250 - DNA, 350 bp, Homo sapiens
gcttatgttactccacaaacaggtggaaaggatatcacagacgaagtgattacagacattgccggggtaataccagctgagaaaatgatggagtattgctgcctgtcagagtggctctattagacaaactagaaagctgtggtcacggatttactagcatgagggtcatgcagcaactcagctcgtcaatcaactccaagatgtggtggtagaaacataacttatctgatcaacaggaagtctatcatcaacaggcaaaaaacttgcccgaagttgacaaaatgcctcagcagatggagcttttatgacatgtgccactcatcagcctttgtgcaacctgtgattgccag

SEQ ID NO: 637251 - DNA, 163 bp, Homo sapiens
cactgggcaggaactggagacctccatggccaggtaagaattcagatctcttagggggatggagaacacagagtatgaggtgcggcagaggtctcagcttaggagtaacccgtaactggtgtgaggacctcttaaaactccatgacctgtgtagaattcaaat

SEQ ID NO: 637252 - DNA, 157 bp, Homo sapiens
gactctagatgatcccgatttggtgggacacgggcggaaagctgttgctatgtgcaactctgtacctgcagcatggagaccacctgctcacactcttctcctggcgagggagcgagcccccaaatgttccacactgtgtccccgtggtcccacctct

SEQ ID NO: 637253 - DNA, 309 bp, Homo sapiens
tgacagattctcagatcacggcagcacctcttctgtacagcattctcagcatcacggcacgccaccctcttctgtgacgagattcctcagatcacaggtcatgcacccctcttgcgtgtgacgggctttcctcagctaccacagatgacatcagccgtcttcctgtcaccgacgtgtactcgggatccacaggtcaggtcagccctcttgctgtcaccagactttcctcagtatccacaggtgacaccacgcctcttcctgtcactagcccttcctcagcatccacaggtcacgtcacccctcttcctg

SEQ ID NO: 637254 - DNA, 280 bp, Homo sapiens
cggacgccaggaatgttttttttttagtaaaggcagcctcccctcgggcagttcctgcaggttcctcaccctccggggtgagcctggctttaggaccttaaaaacttttgaaggacccagccctggttagccaagggcaaccccccaaaaagccaggatttaaacggtggtcaaccaggccccttgggcctccggacaaacttgggggttaggggaaacagggcctcttgggatttactttgtggctttcagggcccataaaaccctgtgatgattagga

SEQ ID NO: 637255 - DNA, 102 bp, Homo sapiens
gatactaccagaattgctcgctacactactccgtgaggatgctactcccgagcccggagtaggacccacgcgtgacccgggccaggtacttcattcgtagat

SEQ ID NO: 637256 - DNA, 276 bp, Homo sapiens
  misc_feature (159)..(159): n is a, c, g, or t
tgattagaggatccctgtaacatctatgccacctcaggaacactccgacagtcttgaaatacccccatgttgccttgttgttttttccttctggcttcttctattacagtctcttcattggaagctctgtaggccaagtgcatgagctgatactgacancggagccacatgcagcatagcacatcatgatgctagagggtcgctgggagcgattaacgggacttaatcgtgctagtgaacaccctgtacttgacagtggaggaggctagtggggcc

SEQ ID NO: 637257 - DNA, 388 bp, Homo sapiens
taatgttcctccatacagttaaaacatcctaacttgtttttcaagctcactccagcctacgccaaacgtttccgttttttttaaccatgaggtttaatttatttttgtgataggagggatatttacatattttagtggacccccttttaagtgggatggcgggccctaaacttccgcaaaccctgtgccccttttcccccgatttttcttcgcggggtccctactcccccttctcctcgcgtttttatcccggcgtcttttttcgactccccctttgctttcccctccctaatcccgcctcctctctcccccttttttacattgccctgttccaaaaatgtattttgatttgtatttccgaacctcaatcttacaatgttgaaagaaa

SEQ ID NO: 637258 - DNA, 250 bp, Homo sapiens
ctctagagagatcccctcaccgagaggatgagagaaatatggagtacacgatgcttgcttggtaattagtagtcaaaacactacacacacccacacacacacactatataaggcagcccaaaggtctgtggcagaaaacactgcaaatgactcagtgatacactacatttgctattctctcatttataccaaaaaagaaacaagtttccagctgtgttttcaacaaatatacaacaaaagaaaaaaggga

SEQ ID NO: 637259 - DNA, 610 bp, Homo sapiens
  misc_feature (421)..(421): n is a, c, g, or t
  misc_feature (442)..(442): n is a, c, g, or t
  misc_feature (452)..(452): n is a, c, g, or t
tacatcaagaactcacaaaataatagcacctgcgaattatggagcgcccgtgtaagggtatattcggaaacctatcgattacacagttcctgggactattgttgggccatgggtgtgtcaagcagtggaaaataaccagcgctgcaaggaaactggcacaacgtgtcgatgacacaaattcactccatacatcaggaaacccgcgcaaggtccttccccagtgtcaaggccaggggaacacacttgtggcacgcgaactacgtcctttatacaacacccttggaaaccgtgttaaaagcccccacaaacgagttaccttaatggaactactagttgacccatgttccttgctaagtggcttgtgggaacagtcaacgcaataagttaccaagggccatgtggaccatagacaatttctctntcaagattccacgcagcaccnacgaggcacnacaacgtagctggcgacaaggtacagtggcgcacggcacatgtgcgcacagtcagcagacaaacaccatgtgtggtcaagcaaggtaagtcattgtgggcaatttccccaaattgtgcattgttgccttaacaactcttttcaggccaaacccaaaca

SEQ ID NO: 637260 - DNA, 387 bp, Homo sapiens
ccaaactcagccaggtggttcgaaagacttcaagcaattgcacatgaacttcatgaaatgggttttgctcaaggatcactctttggaggggcggtatttccagaattacagttatggaggtgtgattcaggatgaccatattccatttttaaaaaaaggtgttccagttctgcatttgaaaccgtctcctttccctgaagtttggcaccccatggatgccaatgaagaaaatttggatgaatcccccattgccaatttaaacaaaatcctccaagtctttgtgttggaaaatcttcatttgtaaaactctgatttagtttaggaaaattggttttaaaattgaattcaaaagtcaaggcctcctttaaaataatttgatttccccca

SEQ ID NO: 637261 - DNA, 281 bp, Homo sapiens
accccaaaagtcaaacagggccttccccctacatacaatatgtttcagatcttcaaaagtttgtgcataatccacatgccattacaagaagtagatgaaatgttaatcgcacaggtgaaaataaaagggatgtactttctctgtttttagaccaggacattgaaaacatgaaaaactctgctgtccaaagtatggtccataatcttatagtaacagtttatcaatagggacttcaggaagttactctttttgatttttttttttctattccttctatgggg

SEQ ID NO: 637262 - DNA, 275 bp, Homo sapiens
gggctaattaatttgctttaaccattttcttttcctttccttttttcctttttgggggcctcccatgctggtgctgggtctttatgaatgttttaccccttttcatggtggaagaattttatatttaggcggttggcccattttttttttttctgcaagaaaaagtgtaatgtttgaaataaaccccggtccccttgtttgaaaataaatctttattttggcctttttaaaaagcaatgcggtcccccataggctggtgttaaatgttgtctccg

SEQ ID NO: 637263 - DNA, 441 bp, Homo sapiens
ccggtgctacggacgcgcttcatggagttcttcgacactgagcaaggaagagcgcgcccaggtgtggggcatgacctttgccctggacgacggcaaaaacagcgacagcccgctggcgcacctgcaaagcgagttcgcgggcttggagcagcgtctcaacgaacgcctggtcgagcgcttgcagctggaacgcgacccggcacgacgcgacctgatctacggcttcccgcagcagttcggcgcgctgaaagattgcctgcaaagcttcctcgaaggcgtgttcaaacccaacgcttttgaagagcgcgtgttgctgcgtggcgtgtacttcaccagcggcacccaggaaggcagcccgattgaccgcctgatcggtgccatggcccagagtatgaacctggaccgccagcacctggcgcgccagagcggcaccgggcgcag

SEQ ID NO: 637264 - DNA, 1598 bp, Homo sapiens
ggaagagttggcgctcggggcggactccttggaactggcttagcgcacccatcccaccttcccgcaccctgggaccggtccaacgagcgctcctccaagcggagccttggagggcacggccggcaccattacctccaacgagtggagctctcccacctcccctgaggggagcaccgcctctgggggcagtcaggcactggacaagcccatcgacaatgacgcagagggcgtgtggagcccggatattgagcagagtttccaggaggccctcgccatctacccgccctgtggcaggcgcaaaatcatcctgtcggacgagggcaagatgtatggtcggaacgagctgattgcccgctacatcaagctccggacagggaagacccgcaccaggaagcaggtctccagccacatccaggtgctggctcgtcgcaaagctcgcgagatccaggccaagctaaaggaccaggcagctaaggacaaggccctgcagagcatggctgccatgtcgtctgcacagatcatctccgccacggccttccacagtagcatggccctcgcccggggccccggccgcccagcagtctcagggttttggcaaggagctttgccaggccaagccggaacgtcccatgatgtgaagcctttctctcagcaaacctatgctgtccagcctccgctgcctctgccagggtttgagtctcctgcagggcccgccccatcgccctctgcgcccccggcacccccatggcagggccgcagcgtggccagctccaagctctggatgttggagttctctgccttcctggagcagcagcaggacccggacacgtacaacaagcacctgttcgtgcacattggccagtccagcccaagctacagcgacccctacctcgaagccgtggacatccgccaaatctatgacaaattcccggagaaaaagggtggactcaaggatctcttcgaacggggaccctccaatgccttttttcttgtgaagttctgggcagacctcaacaccaacatcgaggatgaaggcagctccttctatggggtctccagccagtatgagagccccgagaacatgatcatcacctgctccacgaaggtctgctctttcggcaagcaggtggtggagaaagttgagacagagtatgctcgctatgagaatggacactactcttaccgcatccaccggtccccgctctgtgagtacatgatcaacttcatccacaagctcaagcacctccctgagaagtacatgatgaacagcgtgctggagaacttcaccatcctgcaggtggtcaccaacagagacacacaggagaccttgctgtgcattgcctatgtctttgaggtgtcagccagtgagcacggggctcagcaccacatctacaggctggtgaaagaatgagagactcggggagcagggaggggggaagagacgtgtgtgcaggaaacggggacgtggggaggggacctgcaggggcagccccctgaagtgccaagagagctgagaggagcagttgtgactctacccaggaacaaactgtgcctgaacctgaggtgcccaaccccaaataaacccaagatgctgtgta

SEQ ID NO: 637265 - DNA, 694 bp, Homo sapiens
  misc_feature (24)..(25): n is a, c, g, or t
  misc_feature (231)..(231): n is a, c, g, or t
  misc_feature (316)..(316): n is a, c, g, or t
  misc_feature (373)..(373): n is a, c, g, or t
  misc_feature (466)..(466): n is a, c, g, or t
  misc_feature (484)..(484): n is a, c, g, or t
  misc_feature (568)..(568): n is a, c, g, or t
  misc_feature (595)..(595): n is a, c, g, or t
  misc_feature (627)..(627): n is a, c, g, or t
tgtgtaaatgtattgctaagaacnnaggcctgttaggatttttgcaagaattagacagatgcctaagagggaaccgaagtttcatcatgatgagatgtttgagggggctgggaggtcaatgaatgcgttgttgataatttttattagtgggtgtgattttcggatgttggtcattaaggttcttgtagttgaagtacaacgatgatttttcatgtcattggtcgtggttanattccatgtgagaataatgacaatatatattgcatttattttaagtactatttttgttattgggtttgttggtttttcttctaanccctctcctatttatggtggacttgggttgattgtaagtggtggagttggttgtggnattgtattgaattttggtgggtcttttttaggtttaatggtgtttttgatttatttggggggtatgttggtggtttttggttatactactgcnatggctactgagatgtancctgaggtttgagtttctaataagactgtttttggagcatttgtttctggtttaataatggagttttgtatggtttattatgcnttgaaggaagaggaagtagaaattatntttaagtttaatgggcttggggattgagtaantttatgatacgtgatactctcgcggtgtgtacctcgagaagctataagaccgcttccctgaataaca

SEQ ID NO: 637266 - DNA, 222 bp, Homo sapiens
  misc_feature (25)..(25): n is a, c, g, or t
  misc_feature (48)..(48): n is a, c, g, or t
  misc_feature (105)..(105): n is a, c, g, or t
  misc_feature (133)..(133): n is a, c, g, or t
  misc_feature (197)..(197): n is a, c, g, or t
aaggcacagggtagcaatcctcaantagcccagagaatcccagaggantatagttttagggaaggaggatcactatggaatttgtggcggtaagattaattacantggaggttagtagctcatagtagcacangagctgctaggaagatgcaccgcattagcatttgtagcaaaggcaatagcagcagcttgctgcnggcggctgcctagtaagttattggc

SEQ ID NO: 637267 - DNA, 278 bp, Homo sapiens
gtccccaggttttggtatgttgtgtttctactttcttcttcttttttttttcttctttgagacagagtctagctctgttgcccaggcttgagtgcagtggcacgatttcggcttattgcaacctttgcctcccaggctttggaggctgaggcatgcgacgcttgaacccaggaggcggaggttgcagtgatccaagatcgccccactgcactccagcctggaagaccaaacgagactttgtatcaaaaaataataataattaataaagttttactgga

SEQ ID NO: 637268 - DNA, 1795 bp, Homo sapiens
ggaagagttggcgctcggggcggactccttggaactggcttagcgcacccatcccaccttcccgcaccctgggaccggtccaacgagcgctcctccaagcggagccttggagggcacggccggcaccattacctccaacgagtggagctctcccacctcccctgaggggagcaccgcctctgggggcagtcaggcactggacaagcccatcgacaatgacgcagagggcgtgtggagcccggatattgagcagagtttccaggaggccctcgccatctacccgccctgtggcaggcgcaaaatcatcctgtcggacgagggcaagatgtatggtcggaacgagctgattgcccgctacatcaagctccggacagggaagacccgcaccaggaagcaggtctccagccacatccaggtgctggctcgtcgcaaagctcgcgagatccaggccaagctaaaggaccaggcagctaaggacaaggccctgcagagcatggctgccatgtcgtctgcacagatcatctccgccacggccttccacagtagcatggccctcgcccggggccccggccgcccagcagtctcagggttttggcaaggagctttgccaggccaagccggaacgtcccatgatgtgaagcctttctctcagcaaacctatgctgtccagcctccgctgcctctgccagggtttgagtctcctgcagggcccgccccatcgccctctgcgcccccggcacccccatggcagggccgcagcgtggccagctccaagctctggatgttggagttctctgccttcctggagcagcagcaggacccggacacgtacaacaagcacctgttcgtgcacattggccagtccagcccaagctacagcgacccctacctcgaagccgtggacatccgccaaatctatgacaaattcccggagaaaaagggtggactcaaggatctcttcgaacggggaccctccaatgccttttttcttgtgaagttctgggcagacctcaacaccaacatcgaggatgaaggcagctccttctatggggtctccagccagtatgagagccccgagaacatgatcatcacctgctccacgaaggtctgctctttcggcaagcaggtggtggagaaagttgagacagagtatgctcgctatgagaatggacactactcttaccgcatccaccggtccccgctctgtgagtacatgatcaacttcatccacaagctcaagcacctccctgagaagtacatgatgaacagcgtgctggagaacttcaccatcctgcaggtggtcaccaacagagacacacaggagaccttgctgtgcattgcctatgtctttgaggtgtcagccagtgagcacggggctcagcaccacatctacaggctggtgaaagaatgagagactcggggagcagggaggggggaagagacgtgtgtgcaggaaacggggacgtggggaggggacctgcaggggcagccccctgaagtgccaagagagctgagaggagcagttgtgactctacccaggaacaaactgtgcctgaacctgaggtgcccaaccccaaataaacccaagatgctgtgtattttcagaggaaaaaaaacacacccacaaaatccaaaaaaaacaccgcgggcacaataactgccgggggggcgcaccaaaaggttctgacacacgggccgctgggctcacggctgtgccgggcacccgttttgtgccaaggggggaatcggggggcacccaaagggagcggcaaaattcggaaacgcggtacggtag

SEQ ID NO: 637269 - DNA, 697 bp, Homo sapiens
  misc_feature (24)..(25): n is a, c, g, or t
  misc_feature (231)..(231): n is a, c, g, or t
  misc_feature (316)..(316): n is a, c, g, or t
  misc_feature (373)..(373): n is a, c, g, or t
  misc_feature (466)..(466): n is a, c, g, or t
  misc_feature (484)..(484): n is a, c, g, or t
  misc_feature (568)..(568): n is a, c, g, or t
  misc_feature (595)..(595): n is a, c, g, or t
  misc_feature (627)..(627): n is a, c, g, or t
  misc_feature (656)..(657): n is a, c, g, or t
tgtgtaaatgtattgctaagaacnnaggcctgttaggatttttgcaagaattagacagatgcctaagagggaaccgaagtttcatcatgatgagatgtttgagggggctgggaggtcaatgaatgcgttgttgataatttttattagtgggtgtgattttcggatgttggtcattaaggttcttgtagttgaagtacaacgatgatttttcatgtcattggtcgtggttanattccatgtgagaataatgacaatatatattgcatttattttaagtactatttttgttattgggtttgttggtttttcttctaanccctctcctatttatggtggacttgggttgattgtaagtggtggagttggttgtggnattgtattgaattttggtgggtcttttttaggtttaatggtgtttttgatttatttggggggtatgttggtggtttttggttatactactgcnatggctactgagatgtancctgaggtttgagtttctaataagactgtttttggagcatttgtttctggtttaataatggagttttgtatggtttattatgcnttgaaggaagaggaagtagaaattatntttaagtttaatgggcttggggattgagtaantttatgatacgtgattcagggttttttanngtgaggcgtaattaggtgttcgggatcctctagatcgccc

SEQ ID NO: 637270 - DNA, 300 bp, Homo sapiens
gtaacacaaaaaagaggctacgctagcctcctcgaattaactcatatattttaaacctttctatgacttcagttatcgtattcattaagtattcagggtccacgccaacaccaccaagctagccctgatacctctatttatatttgccacggcatgtcccaagaaagaacagattttgaacacggactaaccccgtctctggtagctttggcttttccagttcttagtctaacaatgttttgggatatagaatccaactagtaatcccgagtaataagacctgtatgccccaaattgatg

SEQ ID NO: 637271 - DNA, 1589 bp, Homo sapiens
gtcctcctcgcacactcgaggccagggggcgggagggccgcagctccggcgccgccgcgtcccgccaggtccaacgagcgctcctccaagcggagccttggagggcacggccggcaccattacctccaacgagtggagctctcccacctcccctgaggggagcaccgcctctgggggcagtcaggcactggacaagcccatcgacaatgacgcagagggcgtgtggagcccggatattgagcagagtttccaggaggccctcgccatctacccgccctgtggcaggcgcaaaatcatcctgtcggacgagggcaagatgtatggtcggaacgagctgattgcccgctacatcaagctccggacagggaagacccgcaccaggaagcaggtctccagccacatccaggtgctggctcgtcgcaaagctcgcgagatccaggccaagctaaaggaccaggcagctaaggacaaggccctgcagagcatggctgccatgtcgtctgcacagatcatctccgccacggccttccacagtagcatggccctcgcccggggccccggccgcccagcagtctcagggttttggcaaggagctttgccaggccaagccggaacgtcccatgatgtgaagcctttctctcagcaaacctatgctgtccagcctccgctgcctctgccagggtttgagtctcctgcagggcccgccccatcgccctctgcgcccccggcacccccatggcagggccgcagcgtggccagctccaagctctggatgttggagttctctgccttcctggagcagcagcaggacccggacacgtacaacaagcacctgttcgtgcacattggccagtccagcccaagctacagcgacccctacctcgaagccgtggacatccgccaaatctatgacaaattcccggagaaaaagggtggactcaaggatctcttcgaacggggaccctccaatgccttttttcttgtgaagttctgggcagacctcaacaccaacatcgaggatgaaggcagctccttctatggggtctccagccagtatgagagccccgagaacatgatcatcacctgctccacgaaggtctgctctttcggcaagcaggtggtggagaaagttgagacagagtatgctcgctatgagaatggacactactcttaccgcatccaccggtccccgctctgtgagtacatgatcaacttcatccacaagctcaagcacctccctgagaagtacatgatgaacagcgtgctggagaacttcaccatcctgcaggtggtcaccaacagagacacacaggagaccttgctgtgcattgcctatgtctttgaggtgtcagccagtgagcacggggctcagcaccacatctacaggctggtgaaagaatgagagactcggggagcagggaggggggaagagacgtgtgtgcaggaaacggggacgtggggaggggacctgcaggggcagccccctgaagtgccaagagagctgagaggagcagttgtgactctacccaggaacaaactgtgcctgaacctgaggtgcccaaccccaaataaacccaagatgctgtgta

SEQ ID NO: 637272 - DNA, 485 bp, Homo sapiens
  misc_feature (254)..(254): n is a, c, g, or t
  misc_feature (272)..(272): n is a, c, g, or t
  misc_feature (356)..(356): n is a, c, g, or t
  misc_feature (383)..(383): n is a, c, g, or t
  misc_feature (415)..(415): n is a, c, g, or t
  misc_feature (444)..(445): n is a, c, g, or t
gccccaaattttgatgtctaatccaatgttatagcgtttcatgaaataggtgacccctcttactaattttcacagcttatatgtaatggcttttaacaacaaataatgtaatatattgttttcgataatggagatttcaggagagattgcagtcaactgctagaatagattgtggtggtctttagtttttaagggatctttttttcttaatttatttggggggtatgttggtggtttttggttatactactgcnatggctactgagatgtancctgaggtttgagtttctaataagactgtttttggagcatttgtttctggtttaataatggagttttgtatggtttattatgcnttgaaggaagaggaagtagaaattatntttaagtttaatgggcttggggattgagtaantttatgatacgtgattcagggttttttanngtgaggcgtaattaggtgttcgggatcctctagatcgccc

SEQ ID NO: 637273 - DNA, 462 bp, Homo sapiens
ctccatttctggaggcatatctattcaggtagggcatcttgacaagaggagcaaggtcaaccacgacgatcttatatctcctgcagtgcactggccaagtgtgtgtgtatcgctatgcttgaagcccctagggtatctcaacatgccaaatcacaaaggggttccatttgtggactagcaacattgcccccaagcaagactgtcatccagtccctaaaagacttgaagcctggccatagctttggactacctcatggatcaaagtccttacaggcatctagttaccagaatagaaaggtttcatccatatcgaacataagttctggcaagtgattatcctccagactcagcttatctagagttacccaaaattcttccgctgactttacatcagcactcacaaactacacacttacccattatgtcatgcataacgatccttgcattgtctacaccacccag

SEQ ID NO: 637274 - DNA, 1524 bp, Homo sapiens
gggggggtgggagagctccactcgttggaggtaatggtgccggccgtgccctccaaggctccgcttggaggagctctcccacctcccctgaggggagcaccgcctctgggggcagtcaggcactggacaagcccatcgacaatgacgcagagggcgtgtggagcccggatattgagcagagtttccaggaggccctcgccatctacccgccctgtggcaggcgcaaaatcatcctgtcggacgagggcaagatgtatggtcggaacgagctgattgcccgctacatcaagctccggacagggaagacccgcaccaggaagcaggtctccagccacatccaggtgctggctcgtcgcaaagctcgcgagatccaggccaagctaaaggaccaggcagctaaggacaaggccctgcagagcatggctgccatgtcgtctgcacagatcatctccgccacggccttccacagtagcatggccctcgcccggggccccggccgcccagcagtctcagggttttggcaaggagctttgccaggccaagccggaacgtcccatgatgtgaagcctttctctcagcaaacctatgctgtccagcctccgctgcctctgccagggtttgagtctcctgcagggcccgccccatcgccctctgcgcccccggcacccccatggcagggccgcagcgtggccagctccaagctctggatgttggagttctctgccttcctggagcagcagcaggacccggacacgtacaacaagcacctgttcgtgcacattggccagtccagcccaagctacagcgacccctacctcgaagccgtggacatccgccaaatctatgacaaattcccggagaaaaagggtggactcaaggatctcttcgaacggggaccctccaatgccttttttcttgtgaagttctgggcagacctcaacaccaacatcgaggatgaaggcagctccttctatggggtctccagccagtatgagagccccgagaacatgatcatcacctgctccacgaaggtctgctctttcggcaagcaggtggtggagaaagttgagacagagtatgctcgctatgagaatggacactactcttaccgcatccaccggtccccgctctgtgagtacatgatcaacttcatccacaagctcaagcacctccctgagaagtacatgatgaacagcgtgctggagaacttcaccatcctgcaggtggtcaccaacagagacacacaggagaccttgctgtgcattgcctatgtctttgaggtgtcagccagtgagcacggggctcagcaccacatctacaggctggtgaaagaatgagagactcggggagcagggaggggggaagagacgtgtgtgcaggaaacggggacgtggggaggggacctgcaggggcagccccctgaagtgccaagagagctgagaggagcagttgtgactctacccaggaacaaactgtgcctgaacctgaggtgcccaaccccaaataaacccaagatgctgtgta

SEQ ID NO: 637275 - DNA, 1631 bp, Homo sapiens
ggaagagttggcgctcggggcggactccttggaactggcttagcgcacccatcccaccttcccgcaccctgggaccggtccaacgagcgctcctccaagcggagccttggagggcacggccggcaccattacctccaacgagtggagctctcccacctcccctgaggggagcaccgcctctgggggcagtcaggcactggacaagcccatcgacaatgacgcagagggcgtgtggagcccggatattgagcagagtttccaggaggccctcgccatctacccgccctgtggcaggcgcaaaatcatcctgtcggacgagggcaagatgtatggtcggaacgagctgattgcccgctacatcaagctccggacagggaagacccgcaccaggaagcaggtctccagccacatccaggtgctggctcgtcgcaaagctcgcgagatccaggccaagctaaagacaggtgctgagctaggcacctgtggtagagaggaccaggcagctaaggacaaggccctgcagagcatggctgccatgtcgtctgcacagatcatctccgccacggccttccacagtagcatggccctcgcccggggccccggccgcccagcagtctcagggttttggcaaggagctttgccaggccaagccggaacgtcccatgatgtgaagcctttctctcagcaaacctatgctgtccagcctccgctgcctctgccagggtttgagtctcctgcagggcccgccccatcgccctctgcgcccccggcacccccatggcagggccgcagcgtggccagctccaagctctggatgttggagttctctgccttcctggagcagcagcaggacccggacacgtacaacaagcacctgttcgtgcacattggccagtccagcccaagctacagcgacccctacctcgaagccgtggacatccgccaaatctatgacaaattcccggagaaaaagggtggactcaaggatctcttcgaacggggaccctccaatgccttttttcttgtgaagttctgggcagacctcaacaccaacatcgaggatgaaggcagctccttctatggggtctccagccagtatgagagccccgagaacatgatcatcacctgctccacgaaggtctgctctttcggcaagcaggtggtggagaaagttgagacagagtatgctcgctatgagaatggacactactcttaccgcatccaccggtccccgctctgtgagtacatgatcaacttcatccacaagctcaagcacctccctgagaagtacatgatgaacagcgtgctggagaacttcaccatcctgcaggtggtcaccaacagagacacacaggagaccttgctgtgcattgcctatgtctttgaggtgtcagccagtgagcacggggctcagcaccacatctacaggctggtgaaagaatgagagactcggggagcagggaggggggaagagacgtgtgtgcaggaaacggggacgtggggaggggacctgcaggggcagccccctgaagtgccaagagagctgagaggagcagttgtgactctacccaggaacaaactgtgcctgaacctgaggtgcccaaccccaaataaacccaagatgctgtgta

SEQ ID NO: 637276 - DNA, 86 bp, Homo sapiens
atctcctgaagctgcgaggcggtgttgcagttagatgaactgacacaccacacaccactgcactccagcctggagacagggtgacc

SEQ ID NO: 637277 - DNA, 234 bp, Homo sapiens
  misc_feature (1)..(1): n is a, c, g, or t
ngactctagtggatcccctgagctatcgcccaacacaaaaatggtcaaataaatatttaaaataacaataaggccgggtgcagtggctcatgcctgtatacaatcccagcattttgggaggccaaggcgtgcagatcacttgaggccaggagttcaagaccagcctagccaacatggtgaaaccccgtttctactaaaaataccgaaaaattagccgggtgttggggataacat

SEQ ID NO: 637278 - DNA, 1468 bp, Homo sapiens
ggaagagttggcgctcggggcggactccttggaactggcttagcgcacccatcccaccttcccgcaccctgggaccggtccaacgagcgctcctccaagcggagccttggagggcacggccggcaccattacctccaacgagtggagctctcccacctcccctgaggggagcaccgcctctgggggcagtcaggcactggacaagcccatcgacaatgacgcagagggcgtgtggagcccggatattgagcagagtttccaggaggccctcgccatctacccgccctgtggcaggcgcaaaatcatcctgtcggacgagggcaagatgtatggtcggaacgagctgattgcccgctacatcaagctccggacagggaagacccgcaccaggaagcaggtctccagccacatccaggtgctggctcgtcgcaaagctcgcgagatccaggccaagctaaagtttggcaaggagctttgccaggccaagccggaacgtcccatgatgtgaagcctttctctcagcaaacctatgctgtccagcctccgctgcctctgccagggtttgagtctcctgcagggcccgccccatcgccctctgcgcccccggcacccccatggcagggccgcagcgtggccagctccaagctctggatgttggagttctctgccttcctggagcagcagcaggacccggacacgtacaacaagcacctgttcgtgcacattggccagtccagcccaagctacagcgacccctacctcgaagccgtggacatccgccaaatctatgacaaattcccggagaaaaagggtggactcaaggatctcttcgaacggggaccctccaatgccttttttcttgtgaagttctgggcagacctcaacaccaacatcgaggatgaaggcagctccttctatggggtctccagccagtatgagagccccgagaacatgatcatcacctgctccacgaaggtctgctctttcggcaagcaggtggtggagaaagttgagacagagtatgctcgctatgagaatggacactactcttaccgcatccaccggtccccgctctgtgagtacatgatcaacttcatccacaagctcaagcacctccctgagaagtacatgatgaacagcgtgctggagaacttcaccatcctgcaggtggtcaccaacagagacacacaggagaccttgctgtgcattgcctatgtctttgaggtgtcagccagtgagcacggggctcagcaccacatctacaggctggtgaaagaatgagagactcggggagcagggaggggggaagagacgtgtgtgcaggaaacggggacgtggggaggggacctgcaggggcagccccctgaagtgccaagagagctgagaggagcagttgtgactctacccaggaacaaactgtgcctgaacctgaggtgcccaaccccaaataaacccaagatgctgtgta

SEQ ID NO: 637279 - DNA, 806 bp, Homo sapiens
ggaagagttggcgctcggggcggactccttggaactggcttagcgcacccatcccaccttcccgcaccctgggaccggtccaacgagcgctcctccaagcggagccttggagggcacggccggcaccattacctccaacgagtggagctctcccacctcccctgaggggagcaccgcctctgggggcagtcaggcactggacaagcccatcgacaatgacgcagagggcgtgtggagcccggatattgagcagagtttccaggaggccctcgccatctacccgccctgtggcaggcgcaaaatcatcctgtcggacgagggcaagatgtatggtcggaacgagctgattgcccgctacatcaagctccggacagggaagacccgcaccaggaagcaggtctccagccacatccaggtgctggctcgtcgcaaagctcgcgagatccaggccaagctaaaggaccaggcagctaaggacaaggccctgcagagcatggctgccatgtcgtctgcacagatcatctccgccacggccttccacagtagcatggccctcgcccggggccccggccgcccagcagtctcagggttttggcaaggagctttgccaggccaagccggaacgtcccatgatgtgaagcctttctctcagcaaacctatgctgtccagcctccgctgcctctgccaggggggcagccccctgaagtgccaagagagctgagaggagcagttgtgactctacccaggaacaaactgtgcctgaacctgaggtgcccaaccccaaataaacccaagatgctgtgta

SEQ ID NO: 637280 - DNA, 376 bp, Homo sapiens
aacttgaccgatttccacatgtggtacctaagggtcagagaggctaagtaacttgcccagggtcacacaggaagcagatagtgttgaggcacattagactcagggttgcatgacattagaatcttatcttctcaactgctttcctattttgcaagaaaataaagttgccttgactagtagaaagatttgctaacattcaggcaaagctggagaaatgggcttggtatgtgcaatccaacgtccatagatagacaatcagacagacagtgcttagcacaactatccacagatgtacttagatatatgggtagagagatgcatgatgggtagatggatagaaagattcaatgctttgcacagtgagttatctttgaca

SEQ ID NO: 637281 - DNA, 395 bp, Homo sapiens
caagcacgctagacatctaggtttagtgtgaaatctctctgttaatataggagacttaatagtaaaacattttcaaaatacgtcagtgagctgccagttttcaatttctgcttctgaatagccttaggaagacctctgtcacctatttttttttttattttatggagatggagtttcgctctggtggcccaggcgggagtgcagtggcgcaatctcggctcactgcaacctctgcctctcaggctcaagcaattctcccgcctcagcctctggagtagctgggattaccagcacccaccaccacgcttggctaattggtgtattttaagtagagacagggtttggccgtgtgggccaggcttctctcgaactcctgacctcaggagatccacccg

SEQ ID NO: 637282 - DNA, 856 bp, Homo sapiens
  misc_feature (13)..(13): n is a, c, g, or t
  misc_feature (105)..(105): n is a, c, g, or t
  misc_feature (110)..(110): n is a, c, g, or t
  misc_feature (112)..(113): n is a, c, g, or t
  misc_feature (148)..(148): n is a, c, g, or t
  misc_feature (212)..(212): n is a, c, g, or t
tgaagcatgggcncatgagtgggagctggggccgaggctgcggttcgctgctgctgtgcgccgcgctgctggcgggggctgcgcctgggcctgcgcctgggccgnggcangnngcggcggaccgatgcgctcatctggctctgctacnacgcgctggtgcacttcgcgctggaaggccctttgtctacttgtctttagtagaaacgttgcanattccgatggcttgattgcttctttatggaaagaatatggcaaagctgatgcaagatgggtttattttgatccaaccattgtgtctgttggaaattcgtgaccgtcgccctggcatgggtctctggactaattgttcctcatttatggcatagtcaaagaaaaatattaccggcatttcctgcagatcaccctgtgccgtgtagcgagctgtatggctgcgtggatgaccttcctcccagagtggctcaccgagaagtcccctaacctcaacaccagcgaacatggcttggtcctgttggcttttagcgtgtatttggctcaacggggcgtgtgggctcctgatcccagggactgctactgtgggcagtcatggataggaactctaagaagaactgcatcgaggaaagaaagccagttctagtgaagaagttaacagtggaacgtttctagaaacgatttaggcaccattatctaggttcatgaacccagaattgaattccaatctttttctgtttggccaacggtgtgaatacattccagttctacactttgtttttgtatttgttgtcctgaaacaactgtttcaaattggttttaaggggacagttttcggagtattgttgtcagttaaatgggaattaag

SEQ ID NO: 637283 - DNA, 438 bp, Homo sapiens
gttctcctttgggcccttggtcaataactgccatagaatttcgctttgtgtttctataggtagctgctcacggttcagtaaaaatactgctgctatcaagtatgcaaatatggaagtatgatggtttgactatatggcagtgttgtagcagcctctcggtttttcctctttcctccttttttttaaacctataaagtcacttttaagtcttcaatgatgagagcaatattaagaagacgttgctatctaatttttaatctttttaaataaaaagttcctgtgttcagtagcatggttaatgctattgtttagcctcccttttaaactgtacactggcttggaatgttcacagtttcgcgtgtgtggcagcagaagataaccccacattctacattgctactgttttgtatgaaataaattgataaagattgacactaa

SEQ ID NO: 637284 - DNA, 195 bp, Homo sapiens
agcaaggaagcggcgcttgggccctgcaagggtaaggggaaaccttctcttaaccacacacccccccggcttattggcccttcagggcgcggccgatgcggatttttttcttccccaccgggcgggtttacaacccaaaagcaaaattcgtttgggaaaatttacaagattttaatcgccgggggggcccccccc

SEQ ID NO: 637285 - DNA, 607 bp, Homo sapiens
ccgtcatggcgaccttgctgctattaccctctggatgtggtggtgacctggacccgagaggactggggggatcccccgccccagtctctgggccctccttttcccgcctccggccaagcgtggcaggcacctacagcatctcctcctctttcacccgccagaacctggctctgccggtggccccttacacctgcgcggtcacacacatctctctggaggagccccttggggcccgcaccccggttgtcccccccgagcggagaacagccttgggagtcatctttgccagccagtctcttccttctttgcactgatgttcctggggcttcagagacggcaagcacctacaggacttgggctgcttcaggctgaacgctgggagaccacttcctgtgctgacacaccagagctcccctctccctgaagaccgccccgcgcgtgtaagcccgccccgcctgaccttaagcgacatgagactactagaaagaaacgacacccttcccccagcccccccagctactcccaccccaaccaccacccagcccgtttaatggtaggaatttgtattttttgcccttgttcagaaaacaagacccttggtaaatta

SEQ ID NO: 637286 - DNA, 107 bp, Homo sapiens
  misc_feature (66)..(66): n is a, c, g, or t
acttacaatcaccattttattataaagaatacaaatgattagccagacaaagaccacgccccctcngtttgctctgtttttttccagagctcaggagcctttgtcct

SEQ ID NO: 637287 - DNA, 495 bp, Homo sapiens
agactgtcgaccaggttggagtccagtggcacgatttcgactcagaataataataataataaagccacatcgctatctttttccagggcatggaatttaagtaacaactttaaaagttatcataacctgtattctattaggtatacatgtgacatttcataaatcataagtattgcctaatttaataaaggcatatctgaatacacaccgtgaacaagtaacagtaggtgagagaatataaatatataagaaatttcagacccagtgcagtggatcttgcttgtaattccagcactttgggagatcaagacaagaggattggttgagttcaccatgttgccccacctttagtagactctgtctctgcaactttgcaaaataattcagtggggtgtggtggtgcacacctctcatcccagctacttgggaggctgaaaccagaaggattgcttgagcccaggaggtcagggctgcagtgagccgtgtacatgccac

SEQ ID NO: 637288 - DNA, 304 bp, Homo sapiens
  misc_feature (41)..(41): n is a, c, g, or t
gtctatcagcaaatgaacagataaaatgtggtatatatacnccgtggaatactatttggccattaaaaaaacaaaattctgttattctcagcaacatgtatgatcttagaagacattatgttaagtaagccaggcacagaaagataaatactccatgtactgtacttatgtggaaggtaaaaaagatctcatagaagtagagagtggctcatgcctctaatctcggtgctttgggagtctaaggtgggaggatcacttgaggcctggagtttgagaccagcctgagcaacatctctcaaaatta

SEQ ID NO: 637289 - DNA, 341 bp, Homo sapiens
gagcatgaaaataaagataggtgtcccttccttgctgtcatctaacccagactgtctgcttgctctctggctgtctgctccctggaaaggcttaaggaggaccagccaggacagaataaccatgctgccatctgtacggaagctggatctcaatgcacagggacattgactgtggatggttgccgtctctgatgggaggtgacagatagaagtgactacgagctaagaggagcttctgggtgccttggaggcggtccgtcttgctgtgatcaagccaggacataggacatggagcttggctgtgagaggagcagattctgaggaggatgcaaggtccttct

SEQ ID NO: 637290 - DNA, 697 bp, Homo sapiens
ctttgcatgccaggctagcagcagatacctatagaagcagtaggcatgaaaggagagatctctaaccttaccacacacactcctttggatcctcttcattgcaaagcatgaagactaccacatcattaagggaatctgaattcttgggaacatggctgggaagaggcccatactaaaaggacagagctaggtgggggctttggatggtaaagggttcgggtttgccaaaaaataatctgaagtgttgcatggggccctgaggaccactgaaaaccatttcatgtcttatcactggtagttctctctgcccgttacggcatctgtgggccactttcctagcaacccaaaggatcgttatgaaaatatgtcctgtgtgtgatctggaacacacaactcgattagacaactatactcctctgttaaaggcagcctatgtggtcttacctcaggaatagcattgcccatcaacagccaggccttcttacccagagacagaaagtaattacacaatagtactgcatgttcttcttcatcccctgccaggagatcaagaaattgctgacatgtgctccagaggtcacaaataccaccgaatgagacagtgtcaggcaagaaggttatcaagggctacaatcgagccagttgtcctgaagtgtctgttttcttcgtcttggtgtctgagttggtaatgcgcgcg

SEQ ID NO: 637291 - DNA, 126 bp, Homo sapiens
  misc_feature (104)..(104): n is a, c, g, or t
cgcttgtggtcagttagaaaagtcttaacatcgttaaaagtgatagaacgccgttttgtagtcgtttctgcacccggcaaacgcaatgctgaagataccaaggntaactgatgccttgatcaaata

SEQ ID NO: 637292 - DNA, 868 bp, Homo sapiens
ataattattgaaccatagaccaaaacgggcctcaggttaagtttgtaatgtaggataaaggcaaagaaacatgaaaatccgagggggcttataataccttactctctgggacaacgatcagtctactggtccatatactcactcttgcacgccgtggctctattttagctaggtgtcaacaaagttcactgacttataaagggttctaaaatattttcgcttcgggtcgaaatggggggggcgtaaagtcaaagggactttctgattaaagaagtttagctttacctgtaatttaaattcacgtggctggttgcttggtgataagcggcggggaataagaattctcaagtgttgaacccctcgacaggcgcatgatagcggaagggcttatttgtaaagggactattctcatagcttgggcctggtgacatcaaaatttatccttagtggagattcatatcgttgaatattaaaccaaatattgtcaggacctattaaacagcccacatttttcaagggacagaatgtatcaaattgtccataaaaatgtccactgcagggattccatattaaataacgaccttgctcccaagttagcacataggcagttggaccctcaggaatagcattgcccatcaacagccaggccttcttacccagagacagaaagtaattacacaatagtactgcatgttcttcttcatcccctgccaggagatcaagaaattgctgacatgtgctccagaggtcacaaataccaccgaatgagacagtgtcaggcaagaaggttatcaagggctacaatcgagccagttgtcctgaagtgtctgttttcttcgtcttggtgtctgagttggtaatgcgcgcg

SEQ ID NO: 637293 - DNA, 1049 bp, Homo sapiens
  misc_feature (115)..(117): n is a, c, g, or t
  misc_feature (380)..(380): n is a, c, g, or t
  misc_feature (384)..(384): n is a, c, g, or t
  misc_feature (413)..(413): n is a, c, g, or t
tgagtaggttcggtctgaaaggtgtggcctttatatttagatccacacacgttggtcttttaaccgtgctgagcagaaacacaacaccaggttaagaagagccgggtggcagctnnnagaggaagccgctcaaataccttcacaataaatagtggcaatatatatatagtttaagaaggctctccatttggcatcgtattaatttatatgttatgttctaagcacagctctcttctcctattttcatcctgcaagcaactcaaaatatttacaaataaagtttacattgtagttattttcaaatctttgcttgataagtattcaagcaacatcattggcacttgctgccgtaatttaaagctctgttgattttgtttccngttnggatttttgggggaggggagcactgtgtntatgctggaatatgaagtctgagaccttccggtgctgggaacacacaagagttgttgaaagttgacaagcagactgcgcatgtctctgatgctttgtatcattcttgagcaatcgctcggtccgtggacaataaacagtattatcaaagagaaaaaaaaaaaaaaaaaaaaaaaaaaaaaaaaaaaaaaaaaaaaaaaaaaaaaaaaaaaaaaaaaaaaaaaaaaaaaaaaaaaaaaaaagggaaaaaaaaaaaaaaaaaaaaaaaaaaaaaacatgggggcccccttggcccaaggggtttttaacttgggcaagctttttccttgggccccaatttggggctacttggcccaattgcccttaaggggggcggtttaaaaataaatgggccgggttttaaaaagggcggacttggaaaaccctggggttaccccaattaaatgcctttggaaaaaatccccttttcccaagtgggggaaaaaccaaaaggcccccaccggatggcctttccaaaaatttgccaacccttaatgggcaatgggaatttgaagggcgaaaattttggtaaaaatccggggaaaattttggtaaaacccccctatttttaacccaaagggccgctgggcccctttttc

SEQ ID NO: 637294 - DNA, 594 bp, Homo sapiens
  misc_feature (123)..(123): n is a, c, g, or t
ttttctttaagaattttttcaaacctgtcttgtagctcagctgcagctgctttgtctgagcgctggtaaattagctcttcaggctgaacactggaaaggccaggatatggaaggcttcttganaagaaagatttccatagcttgggcctggtgacatcaaaatttatccttagtggagattcatatcgttgaatattaaaccaaatattgtcaggacctattaaacagcccacatttttcaagggacagaatgtatcaaattgtccataaaaatgtccactgcagggattccatattaaataacgaccttgctcccaagttagcacataggcagttggaccctcaggaatagcattgcccatcaacagccaggccttcttacccagagacagaaagtaattacacaatagtactgcatgttcttcttcatcccctgccaggagatcaagaaattgctgacatgtgctccagaggtcacaaataccaccgaatgagacagtgtcaggcaagaaggttatcaagggctacaatcgagccagttgtcctgaagtgtctgttttcttcgtcttggtgtctgagttggtaatgcgcgcg

SEQ ID NO: 637295 - DNA, 1066 bp, Homo sapiens
  misc_feature (5)..(5): n is a, c, g, or t
  misc_feature (277)..(278): n is a, c, g, or t
  misc_feature (280)..(280): n is a, c, g, or t
  misc_feature (284)..(285): n is a, c, g, or t
  misc_feature (291)..(292): n is a, c, g, or t
  misc_feature (946)..(946): n is a, c, g, or t
  misc_feature (948)..(948): n is a, c, g, or t
  misc_feature (954)..(954): n is a, c, g, or t
  misc_feature (956)..(957): n is a, c, g, or t
  misc_feature (963)..(963): n is a, c, g, or t
actcnctcatgtgtacctcgatctctaagtgcagtggcattcctatatgcttaccgaacaaaagatgctgaggtcatattcaactacggcagcaggccccagacgttggacgcccctacgggctactacatccctgcgctgacgccttaaaactctttaccaatagtagctccctaaaacccgccacatctaccatgaccctgtacatcaccgtccccaccttagctctcaccatagctctgctactatgaacccccctgcccatacccaaccccanngncacnngaaccnnggcctcctatttattctagccacctctagcctagccgtttactcaatcctctgatcagggtgagcatcaaactcaaactacgccctgatcggcgcactgcgagcagtagcccaaacaatctcatatgaagtcaccctagccatcattctactatcaacattactaataagtggctcctttaacctctccacccttatcacaacacaagaacacctctgattactcctgccatcatgacccttggccataatatgatttatctccacactagcagagaccaaccgaacccccttcgaccttgccgaaggggagtccgaactagtctcaggcttcaacatcgaatacgccgcaggccccttcgccctattcttcatagccgaatacacaaacattattataataaagaccctcaccactacaatcttcctaggaacaacatatgacgcactctcccctgaactctacacaagcatattttgtcagcaagaccctacttctaacctccctgttcttatgaattcgaacagcatacccccgattcgcgtacgaccaactcatacacctcctatgaaaaaacttcctaccactcaccctagcattacttatatgatatgtctccatacccattacaatctccaggcattccccctcaancnctaaanannaaaaanagaggggggggccccctttatagtacaggagggacacctaacaggggtcataacagcgcgttagaacaagtggccgcgccatctgacacccaaggggggtata

SEQ ID NO: 637296 - DNA, 1075 bp, Homo sapiens
  misc_feature (115)..(117): n is a, c, g, or t
  misc_feature (406)..(406): n is a, c, g, or t
  misc_feature (410)..(410): n is a, c, g, or t
  misc_feature (439)..(439): n is a, c, g, or t
tgagtaggttcggtctgaaaggtgtggcctttatatttagatccacacacgttggtcttttaaccgtgctgagcagaaacacaacaccaggttaagaagagccgggtggcagctnnnagaggaagccgctcaaataccttcacaataaatagtggcaatatatatatagtttaagaaggctctccatttggcatcgtattaatttatatgttatgttctaagcacagctctcttctcctattttcatcctgcaagcaactcaaaatatttacaaataaagtttacattgtagttattttcaaatctttgctttaaattacggcagcaagtccaatatttcttaatacttatcaagcaaagatttgacttgctgccgtaatttaaagctctgttgattttgtttccngttnggatttttgggggaggggagcactgtgtntatgctggaatatgaagtctgagaccttccggtgctgggaacacacaagagttgttgaaagttgacaagcagactgcgcatgtctctgatgctttgtatcattcttgagcaatcgctcggtccgtggacaataaacagtattatcaaagagaaaaaaaaaaaaaaaaaaaaaaaaaaaaaaaaaaaaaaaaaaaaaaaaaaaaaaaaaaaaaaaaaaaaaaaaaaaaaaaaaaaaaaaaagggaaaaaaaaaaaaaaaaaaaaaaaaaaaaaacatgggggcccccttggcccaaggggtttttaacttgggcaagctttttccttgggccccaatttggggctacttggcccaattgcccttaaggggggcggtttaaaaataaatgggccgggttttaaaaagggcggacttggaaaaccctggggttaccccaattaaatgcctttggaaaaaatccccttttcccaagtgggggaaaaaccaaaaggcccccaccggatggcctttccaaaaatttgccaacccttaatgggcaatgggaatttgaagggcgaaaattttggtaaaaatccggggaaaattttggtaaaacccccctatttttaacccaaagggccgctgggcccctttttc

SEQ ID NO: 637297 - DNA, 547 bp, Homo sapiens
ctagctcaaaacccgggttacaaaaattagctgggtgtggtggtgggagcctctagtcccagctactcgggaggctgaggcgggagaatcacttgaacccaggagaggcggggttgcagtgagccgagatcgcaccattgcactccagcccaggcaacagtgcaagactcagtctcaaaaagataataataattaaatcaacaaaaaaggtaaatccataatgtaattaaaatctaccctttattaggctgggcgcagtggctcatgcttgtaatcccagcactttgggaggccgaagcgggtggatcatgagttcaggagatcgggaccatcctggctagcgcggtgaagccctgtctctactgaaaatacaaaaaaattagctgggcgtggtggtgagtgcctgtggtcccagctattatggaggctgaggcaggagaatggtgtgagcccgggagctgagcttgcagtgagccgagatcgcgccatgccctctagcctgggcaacagaccgagactctgtctaaaaacaacacccccaaaaaac

SEQ ID NO: 637298 - DNA, 371 bp, Homo sapiens
tctatgccgacggtacatcgtttccccagggaaccatgatacaaccggcatccacttcataacgacactgacacacttatactctggaaccacgttctgatgtaacccaagtgtcaagtaccagacacctttctaccaaggtggtctcataatctagaatgaaaggtccagggggtgacaaaatgaagcacagacaacacaatattcactcgtgtggagatatcctactcataactatgcactgtgctgtgatcctgcaacataactcgtcccaaaaccttgtcacgatcatcctgactttttaggttggctgatccatcaatcttgcaatcaactgtaacttctttcccagtgttgttagagcgtgctgt

SEQ ID NO: 637299 - DNA, 214 bp, Homo sapiens
aggcctgcccaatccagaggcctggacaactccagaggactgtccaactccgaggccaggtgtgctgtgagctgtagtcccagactacaaggtgggaggattgcttaggcctgggtgattgaagatgcaaatgagactgtgacttgtgccaccactactccagtcctgggacaactacagacaagtacttgtctcaataaacaaaaacaaaacc

SEQ ID NO: 637300 - DNA, 979 bp, Homo sapiens
ggagattgcgtggggagcttggttataaaatgtggacccgaatcccgggtgtccgaggaacttctgcttttgcggcctccccttcacacggtttgaagtgcaagtttcaggtccaagtaactgccctgactgagcctgcatgcagtaggggcggccggcagacgctaggcttaaactactagacaatctttctgctcccacccctttctctccacctccggcctgactgtcgctgggtcgccccgctagagtcgcttgttctgagagcttggatgcacttgccctccagttcccgcgaacttctgagtagctgctgagccgcgttgcctgcggagccctcagcttccacagcctccatcatgcgcgtgtgggtccccgtgggtgtcctgacctcgctggcttactgcttccaccagcggcgggtggccctggccgagcagcgggctcctaatggccagcgtccggtggaccgcaacctactggagctgaaaatggtgcaggtggtgtttcgacacggggcacggagtccgctcaagcctctcccgctggaggagcaggtggagtggaaccccaagcttttagagatcccacctcaaactcggtttgattacactgtcaccaatctagctgggggccgaaactcattctcattacgacactgaataccgaagacacttgaaggggtggcgtgctgctgggcaggtggacagtgggcatgcaacgatgtttgcctggagagaactgggagatacgtgggggtattccttctttaacagttaaaccccaaagtttattgtccccacagttcggactggatccctcggctgtgcgggattcccatccaaaggtgccgccatagagaagaggctgaatgtcccccaataggggcgaaaaaaacacactggcacgcccggagaaacaaaagccactactcagacacaggaaccgcctacttccgagataacatacacgtgtggct

SEQ ID NO: 637301 - DNA, 624 bp, Homo sapiens
  misc_feature (148)..(148): n is a, c, g, or t
  misc_feature (552)..(552): n is a, c, g, or t
aagcctgaagcgtccagaacataagagttattgcccccctaataatggaagcagaattatgggttaatggcccttaaggttgtgtgacaaaaatgcagggcaattctgcagtacccccccctaaaaagaaggggggattgtgataaanccaggtatctaggaatgaccagtaaaagggagcaggttggctccttgattccaacagagtaaatgaagtactggattggggaaaacctggttttattagaacatatggaatgaaagcctacacctagcattgcctacttagccccctgaattaacagagcccaattgagacaaacccctggcaacaggaaattcaagggagaaaaagtaagcaacttgggctaggatgagctgactcctttagagcaaaggagagccagcccccattaccaaataccatttttgcctggggcttgtgcagctggcagtgttcctgccccagcatggcaccttattgttttgatagcaacttcgttgaattttcaccaacttattacttgaaattataatatagcctgtccgttngctgtttccaggctgtgatatattttcctagtggtttgactttaaaaataaataaggtttaattttctcccc

SEQ ID NO: 637302 - DNA, 404 bp, Homo sapiens
  misc_feature (341)..(341): n is a, c, g, or t
tccccatttggcgaggcagtctcatttgggattggagacccctttgtggggttttgggagggcctggtcggcttgggggcttaggagatagctcatgaggcagactgttgggaggtattctcctagctgagagttagaagggggcctgttttgtaagaggaaagggcgtccgtatattaactcaaatggactgaggaaggagggtgcttttggactggctctaatgctctccagtgctatgggcaaaagggaggtccatggtttttggacttcaagagtgagtttggttaactgagccttaaggatcccatttaccctttcgacttttccggatgtctggngccagcatgggatatggagacgccactggatgccaagggactgagaaacctgttgagtgattt

SEQ ID NO: 637303 - DNA, 215 bp, Homo sapiens
ggggtttttaaaaggggggtttttaaaaacccggggcccccaaaaaattttaaggggccttttcctttttttaaacccctggggggggccaggatctttttttgtttaaaaaaaaatttttgggggggggggccccctttttttttttttaaaaaaaaaaagtttattttggggcccccggttttgggtttaaaaaaaaaaggggtttcccccca

SEQ ID NO: 637304 - DNA, 788 bp, Homo sapiens
  misc_feature (558)..(558): n is a, c, g, or t
ggctaggtacgaggccgggtgtgaatcggccgaggggaagcttgttctttgcaataaatcttgctactgcttactctttgggtccacattgcttttatgaagctataacactcaccgcgaaggtctgcagctacactcctgaagctagcgagaccatgagcccactgggaggaaaaaacaactccagacgcgctgccttaagagctgtaacactcaccgcgaaggtctgcagcttcactcctgagccagggagaccacgaacccaacagaaggaagaatctccgaacacatccggaacatcagaaggaacaaactccagtgcgccaccttaagagctggaacactcacccacggagggtccgcgggcgttcacttcctggaagtcacgtggaggaccacagaacccgacacattccacgagcacgttgttggcattgccactatgggacctgtgtcgcctagtcgcgcaagttggtggctgaccaatcgccgagcaagtgagagcactgtgcgcgcgtgatctgctgcacgccaagaattgtagcgtcgcagtcaggnctgacaggactcggtcctatacatcgtggacattcccacgtgtgaccgttcaacttaggcacactttactaccgagggtctcgcctggatcggacccgtcgtggcctcttcgccctgtgcctcgaagagttcgcctctggaggatacctggactacgagggccccgttcttcgtgtctatgccagggggaagtagtgcgagatggcatctgttcagcttcccaccagtag

SEQ ID NO: 637305 - DNA, 1789 bp, Homo sapiens
atgctgagactacataagtgtccttcaaataatgcagaagaaaaagatcataggcaggcaaaaattacttaataaattaagctttttaaagaagtgaaagaattatatccagaaccaacagctcttaaatattctatttcaataaaaacaatttctatacaattgcggtgaaacttatttttggcaaatactcttccgtaagttatgaacatttctcttgataaattttatactaggtatataagttcctttattggtgttttggatgacagcaaatgactttccataaggcagatgtagattttattcacacaacttttcaggagtagctttatgttaatatgttaggactgtccttccttgagctttacagttaaccaatgaaagtgagttattttagggaatggttagatttggacatggaccaaaattagttttctaatgagtggtgttaaagatgtgtaactactattacagagataatgtaaatggccttctactttttaattctctgattctgatcttgttttgtagtaagaaaggctcagtatgaatttgaggtacttaactaacttgttacagtggtggtcagtgaagaaagattctatcgggcaggactctctggaatgcatgtgtcagaagcccagcccaaattggcctcagcagaaaacaaaacatagcgaaaagcaaatgacaattcattggctaaagcaatggaaaaatacaaggatatctagcttgagactcagctagagccaaatattcaaatctggtcatccaacattgattggtctctttcaatttacttagctgtgctaaacactgttggcttggttttggggcacgttcttctcaaacatggtgaaagtggcccctagcaccgccaagattgatcctgtcacagcccagcaatcccagtggttgcttaaaagcaagtccttttcttgataattctagcaaaaatcatagggaggtcacccattggcccagtttagggcatgtgccatcccttaaccaatcagcaatctgattagccaggcctgaggcacgtcttcatcactaaaactagtcgtgatagaatcaacttaagtggaaccctgttgagagaaggagaggagggatggcttccctagtggaaatgagctattaccaagagtggatgagggcgggcagaaacaagaggtgcacattacagggataccagggatttgagtctgcagtctctctgattttccatgagtgcttatcttcttgggggaggtgggggcggtgtgtgaacatccacacagcctcctgctcctcctcatctactggggcgctcagtcacccaggtttggaatgcttctgaggtgatacttaatgttacagttcatggtcaccgtgctccatgtacgtgaggtcatgtgtattgtgtattgtcactgtctctcttcccagttatttttttcagtcaggtgctagggaattctccttttcttactatgtcatggctgtcctccccactccatggggctttcagaaagacaggtagaacataagagtctagagagaccttgggtgtcacccaggccattgaggctccatctgggcttgaaagagccctcacctgcagtaaaggtgcctctgaggccaaggagaaattatggcataagaagggaacaccaaggagatgggggcccggacataccctctcccacctccttcagatttcattctttataaaatttcacataagggaagagtctccaaagtgtaaggagggccacaacaaaaaaaaacaaacaaggtt

SEQ ID NO: 637306 - DNA, 141 bp, Homo sapiens
  misc_feature (139)..(139): n is a, c, g, or t
ccaaaagtcagtgtgaggtctttcatttggcatttcaatctgcttttgggtcaaagaaaagtgtcagatttttcgccttctatgaaaagtatgttataaatgaaattcataatgaaatatttctatttcgccaggtgtngt

SEQ ID NO: 637307 - DNA, 111 bp, Homo sapiens
aactatcatcagagtgagcagacaacctacaggtttgttggctgcataaatgtctttcgtttgggttccttgtagattctggacattagacctttgtcagatggatagatt

SEQ ID NO: 637308 - DNA, 378 bp, Homo sapiens
  misc_feature (197)..(197): n is a, c, g, or t
  misc_feature (246)..(246): n is a, c, g, or t
  misc_feature (254)..(254): n is a, c, g, or t
  misc_feature (273)..(273): n is a, c, g, or t
  misc_feature (297)..(297): n is a, c, g, or t
atgctgctactctcactagatttgagatatgcatagtctctgcctgagtatgtggggatgcagtgtgacctagaggagggagatctgggaaaggctcaacgtggaactggtattcaaccagcaatagcatctctgagcaaatgaaggcagaagatgcaaacaaacgttaagttcagagtccgctgacattggaagcnagccaggtgaaaaccgttcacgtggatcttcaagggagtcaggcatttnttagagtngccatcagcatttcttctnttctggaatgtaaagtttccttcnctttgtatgtaactagggctctatctgtatccagagagggtgaaatgctttccaaattatagctatctctccctttctgca

SEQ ID NO: 637309 - DNA, 194 bp, Homo sapiens
  misc_feature (96)..(96): n is a, c, g, or t
  misc_feature (165)..(165): n is a, c, g, or t
ctcaaaaataaaaataaaaaagttgaaagttgagccaccgtgcccggccaaaatttgcataattttttttaaaacttttttttttttaagacaggntctcactgtcacccaggctgcagtgcagtggcacaatcacagctcaccatagcctcgacctccccaggntcaaatgatcttcccaaatagctgagacc

SEQ ID NO: 637310 - DNA, 172 bp, Homo sapiens
aaatatgcaatatagaatcaacctaagtatcatcaaccaacaaatggataggctgagcgcggtggctcacgcctgtaatccccatactttgggaggccgaggcagatggattgcttgaggtcaggagtttgagaccaacctggccaatatggtgaaaccccacggacatcgt

SEQ ID NO: 637311 - DNA, 159 bp, Homo sapiens
gcccagactcaaggctgactaaactggaggctgaataccgtggaggtccacatgcagcttccctggagggcaggccggagcttcccgcccctggcttgaggatgctgtacccctggcttcaggcctgccagatgatgccttaggctctgtccctggcgg

SEQ ID NO: 637312 - DNA, 208 bp, Homo sapiens
agcccgatgcctccctcacctgtgtccctgttgtcatgctcttatcacagccttcaacacccaaataagagaacgagaaaagggaggcccaggtagaatcttgtggttaaggttaaacctgcaaaaggtaagcctgcaatagaccgccctgttccaggctgcctttttttttttttttttttttttttttattttttttttttttttc

SEQ ID NO: 637313 - DNA, 167 bp, Homo sapiens
tccccttgcaattgggcacagaagttacagaaaaatttgtaaagggtcatgaacccagtgggatggcacccagacacggtgtagagctaacgacagctgcagcttgtaggacataattattgacacgtcttcagtggtgatgaccatagacgaggagactgacagta

SEQ ID NO: 637314 - DNA, 319 bp, Homo sapiens
aaccaaaatttttttgccaaatgggttcctttttttgatgaaggtgagccactggcccacaagggttagtttgggccttaaaactgccaaggagtttccaaggatttttaaggggatccctatttatggccaaaaaaaatttgccgctataatttggttttggcgggtccttttttgtggaaccttatttttgggggtttaaaaaaagccttgccctttttgtttgccatttttcagctaaacttttttggggaatggtatgggtccccttttgttaaaagttttttttgggggttttaataaagccctttttgtttta

SEQ ID NO: 637315 - DNA, 396 bp, Homo sapiens
tctgcaggttgagtatagagtaaaggcgagtgcgacctgtcaaaacagttctaagcacacagaacaaagctggaggcatcacactagctgacttcaaactgtactacaagcctacactagtcaaaacagcatggtactggtaccaaaacagaggtatagaccaatggaacagaacagaggcgtcagaaataacaccacacgtctacaaccacctgatctttgacaaacctgacaaaaacaggaaatggggaaaggattccctatttaataaatggtgctgggaaaactagctagccatatgtagaaacctgaaactggatcccttctttacaccttatataaaaattaattcaagatggattaaagacttaaatgttagacctaaaaccataaaaa

SEQ ID NO: 637316 - DNA, 135 bp, Homo sapiens
cttagccagaggaggtggacagcagcacagaggaggtggtcagcacagaggacggcaccagccagaacgcctgaacgctggcacatcttcctattctacaccctagtagtgctcccttcccctcctctgtgctgt

SEQ ID NO: 637317 - DNA, 294 bp, Homo sapiens
accaggacgataaccaaggctggcgtggtggctcatgctggtaatcccagcacttggggaggccaaggtggacagatcacctgaggtcaggggtttggagaccagcctgaccaacgtggtgaaaccatctctactaaaaatacaaaattagctgggtgtgggggtgcatgcctgtaatcccagctactggggaggctgaggcgggagaatcacttgaacctgagggggaggttgcagtaagccgggatggcacaatgcactccagacggggtgatggagaaactccatctcagg

SEQ ID NO: 637318 - DNA, 987 bp, Homo sapiens
  misc_feature (156)..(156): n is a, c, g, or t
  misc_feature (455)..(455): n is a, c, g, or t
gggcccagacgggctgcttggagatgcgccccggagaccgctgagttccggggtgaggacctgtctgacaggtagaacagcggctggagccggtcaagcgggcagaccacaataggactccgatcgaaggcggcgtgtcagtggcctgctctgcanggggccagaggcggggcgagacagtgtgacaagcgggtgaagaagcttccctctcactgggctctggtccacgcgagcgatgtgctgagatgcttcaagtgatctggacccgtgattccagacactggggaagggctatgtgagattgagctggttgccatccatggaatcacgtctgggccgcgcatctctggccagagtttgtagatgacgcctggaggagggacgtcctgaagccatctcaggctaggcgtgagtgaggaggatgctgccgagcctatccgtcagaagcatgaagnaaacagcctccagaagcgtcgtgtccgagctggtaagcgacgagcgtctaagagcaggcttccagtcgaggctaacctagaattcaggcagcagctcaaggccgtaggaggcagtcccgggtagtcactaggccatacgaccactggccaatcaaggtggagacgctgaacggaaggaggcaggaaggagcgtgcatcgcacggacacatgtgcgtcgccatctggaccgttagcacatcctgtgtgatgccctgtacgatctcgttccctcaggagcaggcaactccctaatgccattggtaaacatgccttgtccagtgcctttctcgaggagcattcctcgaagggcgggttttactaagaacgcccctgggacaatctcggcgacatcagctgggaaagaatgagttgcgtaggctggatccatggagggagacgaaactcactgggcttgggacagaccacgttcccaactatcaggcattgaaggcccatccgctcattcccacaagggatggatatggggagagt

SEQ ID NO: 637319 - DNA, 112 bp, Homo sapiens
cccccccacaccccaccccccccccaggggggggggaaaaaaaaaaacccccaagccccccttttatatttgggtgacacccccaacatttattgtagggggggcccccttt

SEQ ID NO: 637320 - DNA, 740 bp, Homo sapiens
  misc_feature (731)..(732): n is a, c, g, or t
tgaacttgaaaaaaaaaaaaaaaaaattaaaaaaaaaaaaaaaaaaaaaaaaaaaaaaaaaaaaaaaaaaaaaaaaaaaaaaaaaaaaaaaaaaaaaaaaaaaaaaaggaaaaaaaaaaaaaaaaaaaaaaaaaaaaaccttgtggcccccttggccccagcggcttttaaattgggcaaattttttcattgggcccaaatttggggttaattggccaatttccccttaaggggggcggtttaaaaattaatggcccgggttttaaaaacgtgggactgggaaaaccctgggggtacccaatttaaacccctttgaaaaaaatccccttttgcccagttggggaaaaaccaaaaggccccaaccgattggcctttccaaaaattggccaaccctaaagggcaatggaaatttgaaggggtaaaattttggtaaaaatccgggtaaaattttggtaaaacaacctattttttaacccaatggcccaaattgggaaaaaccctttaaaatcaaaagaattaccccgaaaaaggtttgagggttgtccaatttggaaaaaagggcccatttttaaaaaccggggcttcaaccggaaagggcgaaaaaccgctttttagggccaaggcccaatttgggaacccttaccctataaaaggtttttgggggcaagggcccctaaaggccttaaattggcacccttaagggaaccccctgtttaccttgcgggggccgnnaccgttgc

SEQ ID NO: 637321 - DNA, 192 bp, Homo sapiens
agctacagacggggtttcaccctgttagccaggatggtctcgatctcctgacctcatgatccgcccgcctcggccccccaaagtgctgggattacaggcgtgagccaccgcgcccagcctacaaacaattttgaatctgttcctatttagaaacttttccaatgcaaatatcgctaggatacagtagggaga

SEQ ID NO: 637322 - DNA, 85 bp, Homo sapiens
tactgccttttttaaaaaaatatttgacagaaaccaggggccttcaaaggctctttgatttaaataaacctttcttgttttttta

SEQ ID NO: 637323 - DNA, 368 bp, Homo sapiens
  misc_feature (261)..(261): n is a, c, g, or t
agtgtacgaggtctaccgcaagggtctgattgaccaccagacgtacctggagttgtccgagcaggagtgcgagtgggaggagatcaccatctcctcctcggacggtgtggtcatgtccatgatcatcgaccgccgctccgggcgccagtacgacatcgatgatgtcatcgccaagaacctcatcgaccgctcggtactggaccagtaccgcgccggcacgctctccatcaccgagttcgccgacatgctctcgggcaacgncggtggtttccgctcccgttcctcctcgggtgggatcctcctcctcctaccccatcagccccgtcgtcttcaggaccagttggcctcctggtcagacccactgagga

SEQ ID NO: 637324 - DNA, 335 bp, Homo sapiens
  misc_feature (310)..(310): n is a, c, g, or t
cttcaaaattcatatattggaacttaaacattaaggcgatggtataagaagtggagcctttgggaggggttaggctatgaggactccatcctcatgaatgggattcatgcccttacaaaagagggcattcatgcattcacaaagattcattccttttgcccttttaacccctcactgtatgataacaatgttcctcccagcaagaggacaacaacaaagtttcatcttggaattagagagtaattccaagacaacaaatctgccagtgccttgatcttggacttgccaacctccagaactgtgagaaatnaattttcaacaattattaaaaaaaa

SEQ ID NO: 637325 - DNA, 212 bp, Homo sapiens
ggtcgacaaaacgagtcttcactacccagaatccagttattcatccatttcatcaaaaaagaggtatgcagggttcacctggggaaatgtaagaaatctggaaggatgggccgtgcccgtggctcacgccggtaatcccagcactttgggaggccaagcgggcggatcacgaggtcaggagatcaagacaatcctggctaacacggtgaaac

SEQ ID NO: 637326 - DNA, 1006 bp, Homo sapiens
ctcctatccctccccctgccaccatccctcctctgcatactctcagccctgtaatctgttcccttttacagcttctagttagctctctaactccaaaacacactgatcccatttcccctttcccttacacctgagggcacacgagctacgctaccttgtgtcctgaagacctctgtcacaggtctggcaatgctcttcttctgctcgatggccctgcacaacgcgcgcaggacttactctgcagctgacacagttcccctccccacctgaacagctcattcctctgctgctcggagctctaccatgtgggtctatgcctagcaccccacagcctctcactgcccagctcctttccactcacgggatcgctctatcctgatactcctactactggcgcacaaacacctattctcacacctgcgcaactcatctgacgtcgaacctaatcggcgcactctacacctgctgctctaaggcactccaccccccacccctcgcaccaccccctagaagcacgagctcaacacacccctcagcccgcacctcccatccctccccaaccaccgccacaaccacccaaaacgacggggaactgcacacccccacaccccgcccgcccagccctcgaccctcgcaccaaaccccagcgcacccgcgcacatccaacaccacaccccccacaacctccagagcccccccagtgacgtcgcaccccacaccaacccccgcccccccagcactcccccacccccagcacccacggccccccccccaccccacactacaaccaacccacccggcggccccgcccaacacccgccccccaaccggcgggcgcccacacccccccataccagcaggccccccccccaaccaccccaccccccccgggcgaaaccccactctacccgccgcccgcccaccccccaccccgcgaccaccctgccaggacgcccaacccacacaagcaccccacccaccgccccaacccaggacgccaccccac

SEQ ID NO: 637327 - DNA, 121 bp, Homo sapiens
tatatagcccgacaggggggaacgtagggctttatgaggtctaggatactagtagatagagatagggggaagtagggctacaggaggtctaggatactagtagatagagatagcggggaag

SEQ ID NO: 637328 - DNA, 422 bp, Homo sapiens
actactactaaattctcaggcgctcgaccaaaagtctaatcgtagctgggcgcggtggcttatgcttgtaatcccagcactttgggttgggaggctgaggtgggcagatcacctgaagtcaggagttcgagaccagtctgggcaacatggtgacaccccatctctactaaacacacacacacacacacacacaccatctctactaaacacacacacacacacacacacacacacacacacactagccggcgtggtggtgcatgcctgtagtcccagctactcaggaggctgatgcaggagaatcacttgagatggaaaggcggaggttgcagtgagccgagatagtgctactgcctccagcctgggtgacacagcgagactccgtctcaaaaaaagtcgacgcggccgcgaatttagtagta

SEQ ID NO: 637329 - DNA, 1073 bp, Homo sapiens
ctatggctaggtacgaggctcgtgttaatcgtccgagggttctaaggcagtggttgacaacctccacaggcctggctggggctgcggtcctccctgagtggctctggtgatgggcggcccacctctgctggcagtggctccccctcggtcctggacacccctgcatcgctatcccacagagggtccccggaccacgacggccgcctgagcctgggtcatcctacagatctaggagtggccacccagtggaaagtggagctgggggccggaaggggcatgggaggaactgacggggagccagactccagggagcccaaaggaggtacccccaaagctcaggcgccgcctagaactacagactcacgcaatacagcctcagacctcaaggccaccgagagacagcacatgcggcctccagccccacagagctaacacaggacataaccttgcttggacagacagtgccctgagagtaggcacacactaatgggtgcactgggctactggcctgcccctacttgaggacggcctacggagcccggccaggccccagagcctggatggaacacagatactgagacctacctggggcccaacatggaacagacctcccaaaggattcggtcaaccgcactgcatctgcttgactcactgcttgacccccgcaaaagctgacatggctaaggccaaccctgtctgaacccattgaccttgggatgccttggccaagaaccaaaatgagatacccagactctgaacttagaagccaggagtcactcatcccctaagaccaaaacatggatggaccaattgatccatatgccaaggacacatagcagtctgtgcatagctggtgatgatgttgacgtttggatggacaggactaaatgggcaagggggaaataataacttaataaatacataaagtatagatgggtagaacagaagaacaaaagagtaattagaaaagaaaagcgaaaaaaaagacaaacaaagacaaacaagataagaagagagaaacagagaatagaaaaagaaaaaacagaaatacaataaaagtcagataagaaagg

SEQ ID NO: 637330 - DNA, 204 bp, Homo sapiens
  misc_feature (173)..(173): n is a, c, g, or t
agcgacagaaggaggaatttggagcagaactctggccctatgcggtgaggcatactttgcaaaccgaaactatgtgctatggcggttccgcagcagcagtagctatggcagtggcagcaagattttaattcaggaaaccaaagcttagcagggagacgccaggaagaagtggncccggagaagacatggtggcaggcatagttt

SEQ ID NO: 637331 - DNA, 162 bp, Homo sapiens
ggggagtatcttcttattcgacatagactgtctggagtttagaagtagattgcaggcattggacggcagagtcgctaagggcggattcgtgataggaaaaccccctggggatggaggctgacagccacacccaggcttcaggtggaggtgaggctgctgttt

SEQ ID NO: 637332 - DNA, 344 bp, Homo sapiens
agggtatgcatagcaaacacaggaacagatttagtcaacgtaaaaaaacaaactatgttgcatctacagcaactggactgatgctcgcaacaaagctgacaatcacagaaaaacgcaatacttaagtattcaagccagcatgtgattgctacgagtacaaacaccttcagagctgagtgcagaaatgctccgtctgtttactacgaagaagacacatcaaaatgttggtccaaggaacttgactcattcgatagagacctttgaatgccaatatgaaaaagagaaagcagcacagagaagtagctgtgagacagcttcaactaaaacgcgatgatgtcttaagc

SEQ ID NO: 637333 - DNA, 187 bp, Homo sapiens
gagattaacagggctgtgggagggatcccagagcaagctcgagggcgtctggtgcttaccacctggaaactggtgaggtggtgcgagaactcctggtggacctagtggaagctaccagtaatttcttgaagctgagcgctcaggtagagtagggcgacatctggtaggcggttgttgacggtcattt

SEQ ID NO: 637334 - DNA, 351 bp, Homo sapiens
atggaatactatgcagccataaaaaatgatgagttcatgtcctttgcagggacatggatgaagatggaaaccattactctcggcaaactaacacaggaacagaaaaccaaacactgcgttttctctctcataagtgggagctgaacaatgagaacacatggacacagggaggggaacatcacacactggggcctgttgggagtggggggctaggggagggatagcttaggagaaatacctaatgtagatgatgggttggtggatgcagcaaaccaccatggcatgtgtatacctatgtaacaaacctgcaatttcctcacatgtataccaagacttagagttcctggccgg

SEQ ID NO: 637335 - DNA, 135 bp, Homo sapiens
gcaaatctgcatctgcagggccaagccccgtttttcaggtgatgagggtttctgcaccttgcaactttgatattcaggcacaattggggaacagcaggaggcaagggtggcaaaaaacaacagggaacaggggga

SEQ ID NO: 637336 - DNA, 181 bp, Homo sapiens
tcaggaaagggtctcccttcttccccaaggctgggagtgcagtgccatgatcatagctccctgcatccttgaaacccctgtggcctcaagcaatagtctgtgcctcagcctcccaagtagctggaactgcaggcaggcacctccaggccctgctaagtttggggggttttttttttttttt

SEQ ID NO: 637337 - DNA, 909 bp, Homo sapiens
ccaacaggggtttttgtgttgacccgaggtgtacgaggatatgtggttgtgcccacccatcaaggttgtttttgtagcggcgcaccgtttgacgaacagctccacgaccctgcctatttgttgtgttagccacgccacacacgggggtgttgctacacagccccccccctcgggggtcttacactcccgtcccccctcttgtcgtgtgtgagtaatgcacgctctctgcaccccgcgctggttgtatagaccaacatctatctaatggcagacgcacctcacgcgcggataatattatttgttttgcttcgctgttgtgtctcctctctagtgcaggcagatcgaacccaaaattttgtttcctccacagaccgcctgtctatctgtgcgcggcccaccacgacccacgatttattatctcacgctgtgctaacacacccacttttgataacacacacactcaccacacgcacaattcaagacgccgccgagttagtatttttcaatatttattacgcgacacacaccaaattgttctggagactcccgctctccactcacaccacaattattggaggggagtccttgtgcctcattttgatactactcatcttcttttctttacgcagattatcccacacatgacctgctaaaatatgctcatcgcaccaccacacagcataatttttttgttccccactataacagacatctacttcttttttgtgatctcttattcgcagcactcatatctctcttttttatcacagtatagtggggggcaacaacccatgatagtaccactttcttccccccttgtgcaaaaaacccccttttttttttccccccccttttttttttatcaccccttttttcctttttttacaccaaaaatccaagtggggccta

SEQ ID NO: 637338 - DNA, 497 bp, Homo sapiens
  misc_feature (404)..(404): n is a, c, g, or t
  misc_feature (406)..(406): n is a, c, g, or t
  misc_feature (464)..(464): n is a, c, g, or t
catggccatgatgtgagataacatctcttttacagcttaaaggtactggccagctttgctatcctgagcacttcatttatgaaatggccttcactagatcataaaacaacagaaatttgaatggcctgaaactcttctccagttctaacaagtattctgaaagccaagacaaagttctagaatggaaagaaaaccataacaaaataaattagttcacaatttttgtgacatttgttagcaacagcctggaagtgaccaaaaatcatactcatgacacctttaaatatggtaggattattaattatattgaaatcagtcccctcaacttagatatgagaaaactgagaacagtttccttatctgtccctggatgcataaaaacttctgcctaggttcccagagantnactttatcttcaaacagaaaatttgagatcacatgtgattttttattttcagatcatnaataaaacaaatggaaagagaaaatataaaaaa

SEQ ID NO: 637339 - DNA, 128 bp, Homo sapiens
tggtttcgtttacttgcctacagtgctgtacgcaataaaatgatgatcccaaaatatggtaaagtgaacccatctgtttgcattttttactttgagcccatttgttaataaacccttatttttatata

SEQ ID NO: 637340 - DNA, 102 bp, Homo sapiens
tcaacaaggaaaaatgaggggtctgctttagactagcctaaggtaagtcagcagaatggtacctttttcttgcttctctcagcaagtaagacaggtgtctcc

SEQ ID NO: 637341 - DNA, 323 bp, Homo sapiens
agttaaaagagtcactatggctcaggacacaaggcagggaggtgccaggcctatgcccctgctgggggagaaggaggctcgggccaaagtgggagaagtgctgggcatgggctgagcggtaggggccacaaaagttccggtgggcaccactgtcggcaggtcatgggtgggactcatggcgacctcgctgctacctcttcttgtggtggggtgtcttagtgctgcacctgaggccactcttgttcctgagggaccaccaggccacaggcaggatgccagatgttagtcacttggatgaggcagtagagggtctttagtgcgat

SEQ ID NO: 637342 - DNA, 159 bp, Homo sapiens
ccgatcaacctaccttaatagtctttgacaaagtgggattttaaattttaatgtagtttagtttattaaaatatgtctatgattacaggcatgagccactgtgctcagcccagttgctgcttcttatttttaattttaccttcattagggtttcgatga

SEQ ID NO: 637343 - DNA, 263 bp, Homo sapiens
tgtttctctattagcgctgcgatgttggataattggtcttgttctaaaaccaagcagtgttttactaataaaattgggcaaagatgaaaggggcaatcctttgacgtaccctgctgatgcgatagtttcttcttttgataatgatatatcgaaaacaagtttgtgcagaatccaaaccatcattctgggcaaatcttctccaacatgtaatttgccttctgttgcagcgtctgccaaaactttatcgactaaatgccctaata

SEQ ID NO: 637344 - DNA, 139 bp, Homo sapiens
atgcgcttcagatgccgtgctgtggctgcatagaacgcgcatgactaatgtgtgtacagcacagccatggggcaggatgaccacagtgaagagctgggtgctggctatgatgaccacaagagtggcgctggcgttgccg

SEQ ID NO: 637345 - DNA, 164 bp, Homo sapiens
tgccaggagtacggttgaaacaatagaggtactgtttgacttcatggcttcctgaggcagtgattaacaggtggagaaaacaacaggctaaccaaaaaggtttaaaggaaaagctggggaataagatgtccacagaggcttagaaaagccccaatatattcctg

SEQ ID NO: 637346 - DNA, 262 bp, Homo sapiens
tatacttgctggatggaaatgttccctcagggaggagaaaacaggtgcagaaaagagagcttatctcccagaatacttcgggaaagggaggaactttcataacataaccgttctcctcctggtccaaagtcggcatgtattattttctttctttctttctttctttctttctttctttttttcttttttggagacggagtttcgctctggtggccccaggctgggagtgcaagggcacgatctcggctcaccacatcctcca

SEQ ID NO: 637347 - DNA, 104 bp, Homo sapiens
cgctgtaacaccatacacttcttcaacgtcaggtccggtatggacgaagttgttgcgccgagggtcatacccttggtgacgcagatcagagtggacgatagttg

SEQ ID NO: 637348 - DNA, 379 bp, Homo sapiens
acctgggcttcccttactaccttaaggtcaactactcttgcaaggaaaagccaggcgtggtagtggtacctgtagtcccagctatttgggaggctgaggtaggaggattgctgaagtctgggagaggtggaggttgcagtgagctgtgatggcaccactgcactccggactgggcaacagagcaagaccttatcttaaaaaaaaaaaaaaaaagccaggtgcagtggcttacacctgtaatcctagcattttaggaggctaaggctggaggattgcttgaggccaagagttcaagaccaacctggccaacatagcaagaccctgtcccatgtaaaaaataaataaataaataaataaataaataaattaaaaaaaaaaa

SEQ ID NO: 637349 - DNA, 445 bp, Homo sapiens
tcgcccaacagcataaagataaagatcatcgcaccccgcatgagcgcaagtactcggtgtgcgatcggtggctccatcctggcctcactgtacaacttccagcagatgtggattagccagcaggagtacgacgaagtctggcccgtccatcgtccaccggaaatgcttctaaacggactcagcagatacgtagaatccggtgcagtgggttaattgagaaatagaaatttgcccctggtcaaatgcacacacctcatgctagcctcacgaaactggaataagccttcgaaaagaaattgtccttgaagcttgtatctaatatcagcactggattgtagaacttgttgctcgattttgacccttgtatttgaagttacctgttcccccttggtattaaacgtgtcagcgctgagtgttgggggataaaccataagggtaccggagg

SEQ ID NO: 637350 - DNA, 187 bp, Homo sapiens
  misc_feature (5)..(5): n is a, c, g, or t
  misc_feature (25)..(25): n is a, c, g, or t
  misc_feature (59)..(59): n is a, c, g, or t
  misc_feature (90)..(90): n is a, c, g, or t
  misc_feature (139)..(139): n is a, c, g, or t
  misc_feature (149)..(149): n is a, c, g, or t
  misc_feature (171)..(171): n is a, c, g, or t
gtttncccagcctgtccttccagancctcacccagcctgagcggggttcctagggtgantccctgctgcttggggatgccccaaggcccntttggaggcagcgccccaccttgggcttctgagggcatcataggggganccctagagtntagttcaccacaggccctgggnagagtcaaagaccccc

SEQ ID NO: 637351 - DNA, 585 bp, Homo sapiens
  misc_feature (11)..(11): n is a, c, g, or t
  misc_feature (36)..(36): n is a, c, g, or t
  misc_feature (61)..(61): n is a, c, g, or t
  misc_feature (176)..(176): n is a, c, g, or t
ggcgattttgnccagcccgctgtgtgttgggatttnttgctttattgaatttagttgtaanggggggacaagttattatgatgaagaataattgaggtttcttttccatacttaataattatttttttagcatatgtcataatataatcctactataaattttattccagaacacntttataacaatataaagtgttttccataattatgtaaataataattaaatggcaagcaaagaagggtattataatggattttttgttatgctactgtattaccaggacctaataattatattttcatttgttaagctttatatgtatttatcactattttttttgtaaagggataatattattgttgatataggcacacacatcagataatccttaagttctgtttttgcctagaactttattttcgttgcttaaattagaattggttgctttctaggacctgatgctggctggatacctatgagtttttttttggaactttataaatgtgggtattttgaataccatggtttgttttccccacatttggtttggagggatatacttaaacaggtttaagagaaaatgg

SEQ ID NO: 637352 - DNA, 972 bp, Homo sapiens
ggctggcggcggcgacaggaccgaggggccttagttggtgggcaatgtcggggatcccagaaagagaagcgtgacccggaagcggaaacgggtgtcctgtcccagctccgtgcctgccagtgagcttctaccatcatggacctatttgttctggtgcgcctggaagacgccagagagagctactgcgtgcagaaccagagtgtgccctgaaccgtgccatgctgggagctggacctgcgagcgacagaaactagagacccagtgagaatgaaaatcattgcagacattcaagaagatggccaagcaatggccatgatggatgcttgttctgcatcagtggcaaaatgacttgtgtgctgcaccctggcgctatgtgcgcaagtttgtatatgattgcgggccaacatccattgctgtgtccctcaagatccagacaactcaatgtccaacaactcgatggccacaagccatgaaggggtgtcaccaaggccatgggcaccatgaacagacagctgaagttgccccagatccagaagaatcatgatggagatttgatcgggcacggaagagatcatggatatgaaggaggagatgattgactgatgccattgatgatgcacatggggtgactgaggaaggatgaagagggagacgtgatggctgctgtgtgttccccaggtttcctggcatggaggctggggacccttagccttacacagcatgcagctgttcgaaaccttaccctcaagctgtggggtgctcgactacagtgggtggacttagccatggttggtgacaacacacagcacgatggcgggcaggcctcaaagcgccttagctggattgctagagtgacagaacgcctggaggggacccggctaaaagaagccgtgcgggatggggagtggggtgccacattgccaagatacgagtgaataacccctgtggatcgcccgaggatcgtgtaccagg

SEQ ID NO: 637353 - DNA, 216 bp, Homo sapiens
agagatttatcagcttaactcagataaaatcattgaaggtaatagggtaaaggctagtctctaacttccaggcccacggctcaggtgaatttggaatactgcatttacagtgtggggtaacacataacattgtatgcatgggaacatggggggacagtattacgagtgtcctaccactctaatcgggaggggagttcgagatcctgattctacgag

SEQ ID NO: 637354 - DNA, 204 bp, Homo sapiens
tgactagaatggtatgcaatgaagcgacttttaggtctgtatgtcgtacgcgactgagcttgttatatattatgccatcactagggatagtacatggaaggggtaggctatgtgttttgtcagggggttgagattgagtgtgccgcgtattataccatagccgtctagtttcaatagtacttgccgcagtactcttgaaactag

SEQ ID NO: 637355 - DNA, 881 bp, Homo sapiens
gagtgggcgtcgcgcgaaaggctaagggagtgtggcgggcggctccgggagccaacatgcctcggtatgcgcagctggtcatgtggcccctgctggcaagcgggaagagcacctaacttgtgccacaattggtccagcactgtgaagccctcaaccggtcttgtccaaagttgtaaacctggcatccagacagcagaacatttcaaataatccgtgatgggtgacatccgggaaactgatcgagggtggactgatgtacatggaggatgattctcgtgacgattacggtcccaaagggagggaatgggtacattgcgcattgggagatatttgtgccaataattttgggacgtgtgcttggagaaacgggtctgtggcaatgtaagaaggaaggactaatatcgcttaggggacttgtccaaggtcaagcattgacggttgtaacactcaacctgccttgttgattgaaacatggtggtccagccaagatcgagagcaggtggggaagatcccgaagtctgtggaagtttaactttgtagattactcaagttccatgggtggaagtcattcaagttaaattatgtgggaaattcttggcaagcccttgaggtgccaatgatcttctctaagaaaattccggcaagtcaaatatcatggacaacacagtgggatctgcttgagttaaaaaaaggcaaaaacacggaacattggacgacacattattaagaatccagaagagtgtattgctaaatagagaaagaattctaccaagttgagttaagaaaggacaaaaaaattcaggaacattgaattaaagagctatatgtggacctggatggatgaactacggaatgagacaattataacgtttacgataaga

SEQ ID NO: 637356 - DNA, 410 bp, Homo sapiens
cgctatgatatgaaaaggctagagcagtcttagccctatgaactctcacaactaacaaagcaacactgtctttaaaaatgaaggccgggcgcagtggctcaggcctgtaatcccagcacttcgggaggctgaggaaggaggatcacaaggtccagagatcgagaccatcctggccaacatggtgaacccctgtctctactaaaaatacaaaaattagctgggcatggtagtgtgcacctgtggtcccagctactcaggaggccgaggcacgaagatcgcttgaacccggggggcggaggttgcagtgagctgagatcgtgccactgcactccagcctgggtgacagagcgagaccccgtctcaaaaaaacaacacggggcaaggtaaaaggtgctgaagttaaagggagg

SEQ ID NO: 637357 - DNA, 303 bp, Homo sapiens
tgagacagggtcttactctgtcacccaggcaggagtgcaatggtgagatctcggctcactgcagccttggcctcccaggctcaagcaattctcgtacctcagcctcccaagtagctgggactacaagggcacaccaccacgcccaggctaattttgtattttaggtaaagacagggttttgccatgttgcccaggctggtctcaaacccctgggctcatgcctcggcctcccaaagtgctaggattacaggcgcaaacttttcttaagtatgaaattatttcaaaatagaaaggtcgtcgacg

SEQ ID NO: 637358 - DNA, 160 bp, Homo sapiens
ataggcttggaggaacaaaccccttttttcaagcttggcgtaaaaaaggaaaaaggccggcaccgaatgccctttcccaaaaaatgtggaaactcttaaaggggaaaggggaaaatgttaagcggtaatattttgtttaaaaatccggggtaaaattttg

SEQ ID NO: 637359 - DNA, 129 bp, Homo sapiens
aactgtggagatgtcatgagcctttctcttgctcctgacaccagactgtacgtctctggtgcttgtgatacttcagccaaactctgtgatgtacgggaagtgcatatgccgacagaccttcactgagga

SEQ ID NO: 637360 - DNA, 380 bp, Homo sapiens
cttttgccaaccgaaggcactaatcctccaagaggcgtctggcatgggcgccctcctggccgagttccgggcagcacccgttcgtgcgctcagcacgggctttgcggctccaaggcccaggggggttcgcttccccggtctggagggtcatggattcggttcatcctcctcctataaaggaattgccgggaggagttgctcctcctctctggcctggggctggaaatgaaagcgtcacctcaattcccagcctactcggggggccgaggcaggagaatcgcctgaacctgggaggcagaggttgcagttagccgagatggcgccactgcactctagcctgtccttttttcttctatttttcagaaccctgggcggaaagc

SEQ ID NO: 637361 - DNA, 1117 bp, Homo sapiens
  misc_feature (556)..(556): n is a, c, g, or t
  misc_feature (784)..(784): n is a, c, g, or t
  misc_feature (800)..(800): n is a, c, g, or t
  misc_feature (821)..(821): n is a, c, g, or t
  misc_feature (877)..(878): n is a, c, g, or t
  misc_feature (900)..(900): n is a, c, g, or t
ggtagcgaggcctgggtggccgcgcaaggcgaggcgggcatgtcttatcccgctgatgattatgagtctgaggcggcttatgacccctacgcttatcccagcgactatgatatgcacacaggagatccaaagcaggaccttgcttatgaacgtcagtatgaacagcaaacctatcaggctgatccctgaggtgatcaaaaacttcatccagtatttccacaaaactgtctcagatttgattgaccagaaagtgtatgagctacaggccagtcgtgtctccagtgatgtcattgaccagaaggtgtatgagatccaggacatctatgagaacagctggaccaagctgactgaaagattcttcaagaatacaccttggcccgaggctgaagccattgctccacaggttggcaatgatgctgtcttcctgattttatacaaagaattatactacaggcacatatatgccaaagtcagtgggggaccttccttggagcagaggtttgaatcctattacaactactgcaatctcttcaactacattcttaatgccgatggncctgctccccttgaactacccaacagtggctctgggatattatcgatgagttcatctaccagtttcagtcattcagtcagtaccgctgtaagactggcaagaagtcagaggaggagattgactttcttcgttccaatcccaaaatctggaatgttcatagtgtcctcaatgtccttcattccctggtagacaaatccaacattcaaccgacagttggaggtatacacnaagcggaggtgacccntgagagtgtggtggggagtantgggcggactccctctacaaaatgcttggttacttcagctggtcggggttctccgnnctgcactccctgttaggagatnactaccaaggcatcaaggtgctggagaacatcgaactgaacaagaagagtatgtattcccgtgtgccagagtgccaggtcaccagatactattatgttgggtttgcatatttgatgatgcgtcgattaccaggatgccatccggcgtcttcgccaacatcctccgtctacatccagaggagcacagagcatgttccagaggaccacgtacaagtatg

SEQ ID NO: 637362 - DNA, 446 bp, Homo sapiens
agcggaatggaggcttgggctgcgtgcggcgcgcgctcccggaacgcgcgcactgcagacggtgcggatcgcagggagccggtccgccgccggaactggtatcctggtgtgtgcgtgtggagtccggactcgtgggagacgatcgccgatgaacacggtgctgtccgttgtgcgaactacactgtatcggcctttcgtcgcctgacgctgtgattggcggcgcttcaccttctggcatgcttcaattcgagccaccgggccttcaagagacgacggatgcgtcccggttgcgtgattgcgacgttctcgcgggatcatcgcgtagacacaagatgtacaggaagaattttcacctttggaacccttagaggaaacggacaggtgatcatggggattttaatcaacaatatttggatataacctgcttgattcttaagaacgaattg

SEQ ID NO: 637363 - DNA, 156 bp, Homo sapiens
gcggaatcgggggtatgctgttcgaattcataagaacagggaggcaccatgttcttttttcctttcagatgttctaaaattcctttctcattttcttcctgtttagagaactgcctttagccattctttagggaagactttttttttttggagggg

SEQ ID NO: 637364 - DNA, 1008 bp, Homo sapiens
  misc_feature (675)..(675): n is a, c, g, or t
  misc_feature (691)..(691): n is a, c, g, or t
  misc_feature (712)..(712): n is a, c, g, or t
  misc_feature (768)..(769): n is a, c, g, or t
  misc_feature (791)..(791): n is a, c, g, or t
ggtagcgaggcctgggtggccgcgcaaggcgaggcgggcatgtcttatcccgctgatgattatgagtctgaggcggcttatgacccctacgcttatcccagcgactatgatatgcacacaggagatccaaagcaggaccttgcttatgaacgtcagtatgaacagcaaacctatcaggctgatccctgaggtgatcaaaaacttcatccagtatttccacaaaactgtctcagatttgattgaccagaaagtgtatgagctacaggccagtcgtgtctccagtgatgtcattgaccagaaggtgtatgagatccaggacatctatgagaacagctggaccaagctgactgaaagattcttcaagaatacaccttggcccgaggctgaagccattgctccacaggttggcaatgacaggcacatatatgccaaagtcagtgggggaccttccttggagcagaggtttgaatcctattctctgggatattatcgatgagttcatctaccagtttcagtcattcagtcagtaccgctgtaagactggcaagaagtcagaggaggagattgactttcttcgttccaatcccaaaatctggaatgttcatagtgtcctcaatgtccttcattccctggtagacaaatccaacattcaaccgacagttggaggtatacacnaagcggaggtgacccntgagagtgtggtggggagtantgggcggactccctctacaaaatgcttggttacttcagctggtcggggttctccgnnctgcactccctgttaggagatnactaccaaggcatcaaggtgctggagaacatcgaactgaacaagaagagtatgtattcccgtgtgccagagtgccaggtcaccagatactattatgttgggtttgcatatttgatgatgcgtcgattaccaggatgccatccggcgtcttcgccaacatcctccgtctacatccagaggagcacagagcatgttccagaggaccacgtacaagtatg

SEQ ID NO: 637365 - DNA, 135 bp, Homo sapiens
ggatcttagtccgctcggacgacaagaagtagaaggacgtggaaagtcggccaagaaagaccatagacccatgtgaacaaatccgggggcaggccgataaagaagaagtggtccagaggcaaagttcgggacaag

SEQ ID NO: 637366 - DNA, 260 bp, Homo sapiens
ggccaaaacccccctttccccttatatgggggatttaacggccaactccaaaaaacaaaagtcttcgggtttttcccccaactgggggaggaaaaaaatagttgttccatggggttttagggtcaacccccccaaaaggaaaaacctttttagattttttggataaaaaaaagcccataggttaccaaacttttcggggccccccaaggatgtgaaaagggtaattttttgtgtttttttccccataaaaattgttatta

SEQ ID NO: 637367 - DNA, 479 bp, Homo sapiens
tcactagagcaccgatcccagcatccggacactacagcggcccgttcgctccacgacagaaaaccacacttctcacaccttcactcaagcacttccttccccaaacgccacgaagtatgcacaaaggaggaacatgaagtggccatgtgctgcggggcacacaacccaagataaccataccttacacaaggtaccaaccgtataataccaagataccacaagaagagaacactccgatgcaccgatccatgtaacgtaactaggtacacactgattatcaaacaacacacacatcatatgcttgcaacaacctaggatgcattgatcctcggcagcttacattaggcactttgcgacactcaacttcccgactggacacatactagcgcgcaccagctgaactcgatagaaaagcgagaagagagcgcatgaaccccgtaggacagccgagcgacacgttaactggcccaatccgaaaa

SEQ ID NO: 637368 - DNA, 848 bp, Homo sapiens
  misc_feature (796)..(796): n is a, c, g, or t
gcagcatgccatcatattggagagaagactgcttgtctgtgtggcccagtaatccaagcagccagagttctggttggcgcagcacccgtaagaccaccgcgtttgacgtgagtacatgactgggaggtctggcactcggcagtcggcagtcagcatcgacaagattggtcacgacagagcgacgttagggacgggcggagagtgaagcactcctctcctggagtacagtatcacgagctgagtcgcaatcttgtcgagcttggacagatttgctggagctatggtgcagtcgatatcaatgtaaccgcgcagagagatgcaggttggcgtaggaaaaaaagaactgctgggctgcttccaccactacaataagatgttcgtagcgatgcgtgagctactacgaaatggttctgaggagagcctcgcaagggacgtctccctgtgacccgggcttgtcggtcgatgcaaggacgcaatagtatccgttccagcgatgacaggagctagaagagaagagagaattaaacggatgctgttgagtgagcagggaccctggtggtgccatgcggcggggtattaaaagagttcgccaattaagtaggaacgagattgacgagaccatccttgctgaagcctaatagtttcttggaaggcatccgttgtgccaacatagaagccagcatggggcctgcatcatttttaagaccagcttcgtgggcgatagttggatgagaatctgcaatgcctggtgcacacagggtgtcccttcgctgcgcgcgtgacataaggagctgancctcctaagctgtccgaccaactctcgaaggaagatagagatcagctgatcc

SEQ ID NO: 637369 - DNA, 121 bp, Homo sapiens
gtgagggtgtaggtgagtgaacgtgtccagggtgagtgagggtgtcaggttgcagagtgaggtgtccagggtgaggagtgacggtgtctcctaagttcagagccagggggtaccgagctcg

SEQ ID NO: 637370 - DNA, 277 bp, Homo sapiens
ggaagggcccggggggctggagctttaggttcaggagaggaatcataaccactctgtgccctgggtgctgctcttggcttatctttgggtccaggtgaggaaccagacctactgcccccaggggatagtcgacatttgctgccaacctatggagatgatccacaccgactcctgtgccaaaatggagaccgtgtcttgactttaaaatctggacaaaagcctcactcacttctttcctgaagggatacactgggtttcacataccactcgggagagg

SEQ ID NO: 637371 - DNA, 225 bp, Homo sapiens
attcgcggccgcgtcgacgataaatgcaattatcatctcattaaatacaaatgcagataaaatatctttagtgctgtaacattttacctaactttttatatgttttcatgactgtgtgttattttcaaaagctgttactacttcaccatgaggttttatggattgttatgtataataaatgttctatataagacagataaaaaaaaaattaacataagttgtccc

SEQ ID NO: 637372 - DNA, 207 bp, Homo sapiens
ccatatgaaatgacggggcctgtgtcttcaaggaaggtaaatacaagcagctttactacagtataagaagctcgtgtcttggctggagatatgagtctagtttttccaatgaggaagcacagaaagcactggcccttcgactggccgctgtcctccacatgggcatgtgtcatatgaaactacaggccttctctgctgtgatacctt

SEQ ID NO: 637373 - DNA, 970 bp, Homo sapiens
ctggcatgggccagtaatcgtgagccagcaggagctgggagctggtgtgtgaaacgactgccagtgaaatgctatcgcgccagagaggggggacggggtgctcgtgtgaatgccctgacatgttggctttttgctgcacatgcttgcctggctggcttgctaaccctgccccgtgccaagcccccgatgaactgctgctgaccatgtgcacccatgtcctggtgtcacctgcatgctggagatgctctgcctgctcgctgcagcgatgggcctggatgctgtgccctgcatgtggaccctccccaagacctgcctgggtgcctgccctggatgtgcactaaaatggaacatgcccttctaccactgactgactcatacacagctaccgtggatactgtgcctgtgtgcccctgtgtggcctctctctacactgactacaaactcctgaaaccgaagcctggctgtgtcaacctggcctgacccctacctggagtctcaaatgctgcctggtggctctgctggaccctgtgcccagagtggctggcgctgtgttgtgctgtgcatgctaccttttcttggtcagggctctgtgacacctggctgctgtctctcaagctctgcctcttctggaggcttggaactgcctgattgtccccaacagcaactggcgtgatcacgactgacgcctacaccccctggggacagtacttttaccccccgcgggggttggcatgcggtggatgtgtgcctgcgtggcgcacgggggcgggtgtcaccgaggaggcaggagggcttcgccgacggtttgtcaaagccctggacgatctgcaccaagatgaccacgtgaaccccccaagtgtccctggcgctaccgggggggccccggtgggccgtgggcgtctacgcggccgggcacctcctgtttaccagcttcgaggttctcccgctttcgtctctggagggccgggtc

SEQ ID NO: 637374 - DNA, 109 bp, Homo sapiens
gtgactctacaggatcgtcacactggcagtgctgatcctccccaagctcgttatcgaatgaagtacttggcccgggtcacgcgtgggtcctctccgggctcgagtagta

SEQ ID NO: 637375 - DNA, 1268 bp, Homo sapiens
tgctggtactggtctgcgaatgtatttggatatagtcgacccacagctgtcaggacccagaccctggctgacccacctacccgcgatcctgcccgtggctgacgggctgtttcggcgcagaccctggggtctcgagcagattcgccggaccccgagtcctgaaggcctgtttgacaagcctcccccggaagaccctcccgctgccctgcgggcccagtgtcggctgtcggcctgcggtgcaagaacgtgcttggtccggcagctgctgggcgtggagtgtgcagcagtggtggtgcctgcgcctgggcagcccccctgacaggcctgcatctgcgccccacctgccgcacagaaggaaggcgccatcacactggcacgaaggcgctggctatactcgcacacagttattccggcaccatcttccattctatcatactaccgcaagcgcgatcggccgttcatccattcacccgtccatggcaatcattttacgcgtattattcccacgtttctaccagagcatttgccattgaaggatggccccatgcgccaggcgaacatgggcgttgcgcgcacgcacagtgcacctgcagctgtgcgcaacgcgggacaacgtgcgacaaccacagcgggacttcgtagcatattatggtgctctccagacacacatgcagcatgctatacgcccatatcacttgtcagctttatcgaactgcgtgtggttttcgtttaccaggatcgtaattgtattgtcgacgtagtcgtatgtggtcctattcaagataactgacaagttacaaagaggttaggcattggccgggcaagtggacaataaggggggtggctggttattggagacgcgttgcaagcgttacgaggggatgaaaggcacgataagagacaatattatggggcggcatgcttcacttatgcaagcacacccggatgtgtacttacatttaaggaaacaattggtcccctgtgggaaagccccacataaaccaaaatcttcctttggttgaaccggcttgtctggggggccaaccgtccgtgactaggggtggaatttaccccatattcaaattatataggggatggataactggtagtgggacaagcacatacaacagaaagattggccggcaccacaacaattcccgtattgcggcagacttcacgtttacaaaaggtggacatggcatgtctcactggaagcgccacatggtaaccctcctgcgagtgtgaccatttcgactaaagaaagagag

SEQ ID NO: 637376 - DNA, 396 bp, Homo sapiens
cgatggtctcagcttggaggctgaagtgagctacagttgccctctgtactccagcctgggggacaaaaggagaccttgcctcttttttgaaaaaaagaagaaacaaaaaaatggaaggtttggttctaaaaaggagtagcttttgaaatatggaaaggaggagacatatttgctaaataaatgcccatgataagccaagaacaatgatcttttatatctctgtgattgcatttaatctttaacaagcttatgaagttagtatttttattttatttagacgaggcatagtcaaggattagataatatatataacaagtggtataagatttgaatttgagtctgtcttcccaccacactatattggctcccaaagtatcaaacattattttttgtttt

SEQ ID NO: 637377 - DNA, 339 bp, Homo sapiens
  misc_feature (82)..(82): n is a, c, g, or t
cacgcgcaccgcgtttcaaacaatatcactgcactgggaaacacccaagaggatgagagcactccaagtctctgccctgacnttgaagtgaggttgtcctccatttccaggtacaccccctcttcagcaataagggcaccagtccacacacaagctgaacaagtaaaaaagacaaccagtacctccagaaccccggctcttaacaggcttccaatcacccacaatgaagaaatgccaacgcaaaaggcaaatttcttccactggcatgaaacttgtctaagtgttttaacttataccggaaaattctaggatagtatccagccaggcaaattcatccgt

SEQ ID NO: 637378 - DNA, 1364 bp, Homo sapiens
  misc_feature (424)..(424): n is a, c, g, or t
  misc_feature (1177)..(1177): n is a, c, g, or t
  misc_feature (1202)..(1202): n is a, c, g, or t
ggactccttgtggcatccctacgaatagctagtcttcaatctccatcatgaagtgtgactctggaccgatccgcacagagacctgttacctacctacaccgaaaccagctgctgctctgagccggtcaactctaaactcattgttagccctggaaacttgactctgaacaagaggatagcaacgaagaggcgtaggatacacctagacgctctgtgcatcgccatggtaccacatggaaagatacaagatacattgtctcctacctgtaggcagctacagtactccgtgctggaatcagtctgggtcctattcctgagccacgtccgaccatgattcgcgacacctctctcgaaactagaaatgcctgtgggaatcggagtcagacagtcccaggacagcaattgaacagaagatcccgaggcncccacatcagcaatccggtcccttacccgggcagacaaggtcatgtgcttagtgtcagaaggacgtcaatgcacctgtaagagtaggcagtctcaacgaacccgtatttcctttgtgaaaaccatatagaacccattatagcatatgactggactagcagagattagacctacaagtacttgcaagaatgtcgcgtcaattggcccttttctaagtatataaggttctatgtatcttttggttgttttaatctaggatttggtctccgagatatttctatttttccttccttaaacaagagggctttgtcccacaccgctacgacggtgattaatgtaaaaaatcttccctttgggggcaatacggcgttattaaaaaatgtagcgttgaaaacaaaccaagggacgaacccagtgttgtggtgccaagcgcacaaagcccagcaaagttcactctgcgacaaaccgaggtgttcacggcccggattgtggtggaggtgttcacctcccacgttgtaacgccaatggtaaggcaaatggtcgcacagcggcaaaaatggcgttttgggagaataattcctataatattaacaataatcaagaaggtgccaaacttcgtcccgcaaccacaatcttatcgtggcacatgaaaacatcccttatgtgatggtgttcacccaaaccgaggaaaggatggttattctcccactattggataggcctcaaaccttggcgcctattcagatatgagggnaccccagggcgcaccccaaacattnttttccgggcttgctggtcacttcacaagagaggcgtaggcgcaacaagtgggcgttcccctccccaaaagagatcttcctttttaatctttcacacgcacattgcagggtgtcacacacgcgggaaaaccgttgggaagggggcgggcacggttgtaactt

SEQ ID NO: 637379 - DNA, 389 bp, Homo sapiens
  misc_feature (14)..(14): n is a, c, g, or t
  misc_feature (40)..(40): n is a, c, g, or t
  misc_feature (46)..(46): n is a, c, g, or t
  misc_feature (50)..(50): n is a, c, g, or t
  misc_feature (163)..(163): n is a, c, g, or t
  misc_feature (172)..(172): n is a, c, g, or t
  misc_feature (213)..(213): n is a, c, g, or t
  misc_feature (252)..(252): n is a, c, g, or t
  misc_feature (334)..(334): n is a, c, g, or t
gaacatgttctttnaacatacaacatagctttaggtttanttatgnctanatatttctagtgttattacattactctcaatggttgtaatacagtaggctgttatttctgtcaggcggtagctttgtcaagggaattggtgagtactgtagtttcatcatggntaagcaggnggtgtttgtcttgtgacattgcatgtattattaggtgtggnagtgaacaagtgacgaagacaacaactcggttttccctntaaactacataagtaatgtcaactcggccacctgaggtgtatactacttggggatccgtgcacgttaacgattactaggacnatgcagaaaccagagagtttaagaatcccgcatttggcactactcccttctttca

SEQ ID NO: 637380 - DNA, 152 bp, Homo sapiens
ctgctcctgaactcaggttggtctcaaactcctgagctcaggcaatccacccgccttgttctcccaaagtgctaggattacaggtgtgagccacgacacccagctattttttctttcgttttttaattttaaagttggtgggggtctcaatt

SEQ ID NO: 637381 - DNA, 239 bp, Homo sapiens
gggaaacagctatatacgggtagtggtatttgactctgggaaacagcaattcacggggtgtactgacgtcttgggcggggatggcttcattctgaccgtgagtggagcttaagctgagtgatggagaatgctggggggcctccagacccaccggggcctgaagagcatgatcaaggaggtggatgaggacttcgatggcaagctcagcttccgggagttcctgctcattttccacaagg

SEQ ID NO: 637382 - DNA, 821 bp, Homo sapiens
taaaaccgtgcccggttctgtggaaagtgggctgtgctgtgagccagtgtccctggaatggcggagactctgtcagtgcctagtgtgattctggagcggctggtgcgcgtgcgtgctctgacgctccgcctcgtcatgagacctgtggactgcggcgcctcagcgacctgcgagttgatctgatcttgctgggctggatgctgatggaaactgtgaatgttggactcgatgcgtgcaaccaagagcgttttgactggagctgtgctgacacgaacggcagattgacacgatgcaaggtggtaagtcctgagcgacacattgaaattacctccgagggaaacaagaacaaccatcaaaggaggtctagcaacatggtgcgcaaaccagaacgaagacgggtgtggaagataacgggctgcgaggaaacactctggggatggacaggacggactgtgacgaccagctctggagaacttgcacggacatcgacatcatggatatcagtgatgtaggatgacagcagaaattgactactggaacgcgttgcagacctcgctgtcgaagacgagtgatgctgactcacctccaggaggtccctgatcgggacttacggtagaaggagctaaggtcgaagggcggaacctgaccaggagctatccggcagccacgcttcaggggactcacgtgcgtatagagcgacggcgggacacgcgtgttaagcagctttaggatacgttgagtcatcgtgggcttcacctcatccttccagggagacgtggcccgcagcccatcccctgggcgcccggcacacaggacgcagc

SEQ ID NO: 637383 - DNA, 225 bp, Homo sapiens
tctggactgggctgggaacagagtgatcctggggcagtagtgaggaacactctgttcccagcccagtccagcaatcactatgtccgtaggacttgcatggaaccgttgagtactattcttagaagccatagacgtcctgatgaccaaccgtagcagtgtctaaaccctacccgttatcgtgcaaaggacagtagtgaggtagaccttgcaaggtaccagtgcccc

SEQ ID NO: 637384 - DNA, 563 bp, Homo sapiens
gccagcttgatgtttcaaccctggagggtttttttttgcctccctttattttgggcatggggaacactcctataagaaagttcaggcttgggggagtagaaaattttccttcccagagtcagaggaaaagagccatgtccttttcccttgttccttccttccaactaagccagagggtggaaccttaagaaagcgtggggtaccaaatggattaatggtcccggggtccagaccccttcccaaagttcagccttgccggggtccctttttttttttccccgggtccttcctttaggttgggttgttgccccatttgtttggttgggtgccaattaaaacccctcttgtgggaaaacaaagggggtcaaaaaaaacctttaaccccaaagggttaggggggtggggtcctttttttttacccgccagggggggaaaaaaaaatccaaaagtggccttattgtccctaatggaaaaaccccccgggttaggggatgaggggttttttgggtctttttcccccccccctttggggtcccacccattaagtccccgggttgacccta

SEQ ID NO: 637385 - DNA, 769 bp, Homo sapiens
ttggcaagaacaagcgccttacgaaaggcgggaaaagggagcccagaagaaagtggttgatccaattttctcacgaacgattggtcctgatgtgaaagcacctgcgttatgttcccatattaagacacatattggccaagacgctcgtcaccaggaccccaaaggtaacccaaaattgcgatctgatggtctccaagggtccgtgtgtttgaccgtcggagtcctcggcctgatatttggcgcaaccgcatgcaaagtcttgccctttccgagacaattcccagcgtgcatatcacttgcaaggatcgttccacacgggtgaaacaaagacttggcttgtactaaacttacccatagggccataggaatctattaaccccgttgccaacacatgtttgtcccattgggtcccaaaacataggcgcgacccattgatttgaaagctccacgcttgatagtctccagactacccgatagggttactctggctacgggcctagtccctggtgaccttgcggcgtatcagctatacaacaaacagccggcgcccacaaacatccagcaattaccgcggagagcgaaaccctcctttacgttgtccctccaggccacccacaacaaagggttcccgcgccaaaaatttcccggggaaaggacaccgacctgtacctgtgggcgcacctccacctgtgagcccccggagcaagaggtgtccatcgaacccacacttgagcctttgcacaaggacacgctggggtcccactaaaac

SEQ ID NO: 637386 - DNA, 214 bp, Homo sapiens
tgagattccgcggatggcagcagcaagcgtccatacgaagccagcatcacccactaggatacaacaaacctagcgacccttaacagtacatagtacatgaagccatttaccgtacatagcacattacagtcaaatcccttcacgtcaccatggataacccccctcagataggggtcccgttgaccaccatcctcgcgtgaaaatctccgcctca

SEQ ID NO: 637387 - DNA, 468 bp, Homo sapiens
ggcgcggcgtatattgttcaatcccgggaagacctcggtccccccgattgtctgtctgggccacccgcgcgtcactctgggcgacattggctgcgacggggtgcacaccaccgcgggggttgccacctccccggtgctgagcccccccccctgtggtatataacagctcctcccaacagttgttcgcatagatctcatggacgtgccccccccacgtaagggctatcaaaccaggaagcagcaattcccgggaggttctatactccacgcacccctttgcccccgttacacacagcccggggttaatacccacgggccaagtcttagtaaaacagttgggacgccgacaccacccaaattcttcacaacgcccttcggctcgcttaagaatgattccccctctaaattttttaataggccccctttttccctattcccccccctttcccccctttgagcccccaaaaa

SEQ ID NO: 637388 - DNA, 993 bp, Homo sapiens
ggaggctcgcaagtgcgcgtggccgtggcggctggtgtggggttgagtcagtttgtgggacccggagctgctgacccagacgggtggcccaccgaaccggtgacacagcggaaggcgttagggctcgggagccgcgagcctggccatcgtcctagagctcggccgagaccgtcagccgcacgatcgtcccccgaccccagtcagcaaaccgacgccgctgggctgcgccacccgctctgcagcttgtctctccgatggctgtccgactcaggggccatggggaaggcacgaagcagatcctggtcctcgatccgcccacagaccctcaaattcaaaggcacattcagagatgtagtcacgtacaaatcttaaatggcgaaatccatcggatagaaaagtgtgtatcaaagtgaagagtacagaacctcgtcggtactgtgtagaggaccaacaggtggacattttggagccagggatcaagtgtgagtgttcagataatgcatagaggagcctttgactatgatccagaatgaaacgagtaaacaccagtaaatggtacaagacagttattgatccagcaaacacttcagatatggaagcatgtgtggaaaggaggaaaactgaatgaattaaagggaattccagatttgagaatgcgtatttgaaatggcacaatgagaaatgataaattgagtgagtatggaaacatagaaaaggtggatacattggagtgcaattaaggaagatggaagcttttgcgaaagcaaccacaagtttacagaattcaagtgtgatacacgaacagcagcgaaacatactggacaagacgtgttgccgaggacgtcaccgggaaggcactgctaggaggaatattagacgaacaccttggtgaacgagtagacaagcgacgctttcagaggatcaacaacggggaacaacttgcgtaaaccctggaaccacctcagactgcacttttccgaccatagttagcat

SEQ ID NO: 637389 - DNA, 271 bp, Homo sapiens
  misc_feature (172)..(172): n is a, c, g, or t
aacgatggtcctcagctaatccagactctgcgctaaagggcagtgtcgggcagcagtggggtatagcatattaccaaagatgagaccagcaaaaacaacaatgtgtataaagctttaaattaacatagatcatatacgagcgctcagagatacagacaaaagcacatatgantacataaatgccaaaacaaacaagatactttggagatttacatgacaggcagacagttaactagcacacgtcaacagacatttaaactcacaatatatt

SEQ ID NO: 637390 - DNA, 216 bp, Homo sapiens
cttgtttgcaaaggcctgcaacgtcaacattggagcctcatctgcaatgtaggggccggtggacctgctccagcagcctggtgcttaaccagcagggagggtcctcccccttcactgcttgcttgcttcagctgaggagaagaaagtggaggcaaagaaaggaggattccaggagttttatgatgacatgggctttgggctttttgactaaacctc

SEQ ID NO: 637391 - DNA, 504 bp, Homo sapiens
agtactcatcacagctctgtaggttgaacctgaaggatcaagaaggaaacacaattcaactccctactttgtccatcaggtgatgaggttactcgaagaattatccctgaaactgccaacaaatgtggtcgaagcatctgcccgagcttctgtctcagttttgggcgacatattaggctctgccatgcaacacacacaaaatcttctccagatgccctatggctgtggagagcagaatatggtcctctttgctcctcacatctcatgtactggattatctaaatgaaacacagcagcttcactccagaggtcaagtccgaaggccattggctatctcaacactggataccaagagacagttgcactacaaacactatgatggctcctacagcacctatggggagcgatatggcaggaaccaagaaaagccctggctcacagcctttgtactgcagactttagcccaagctcgaacctacatcttcatcgatgcagcccacatca

SEQ ID NO: 637392 - DNA, 567 bp, Homo sapiens
caaaggagatcattcctttcagggggcctgcaggtgcttcagctgttgttgctgtggccttcggcatgagctcctgccctaacataaaaatgattttcccctcatcatgatgccatgatcccatccgctatatcctgctgccccgaatcattgaagccaagtacttggatgtcatggacgctgagcacaggccttgattggcagaccctgcccacgccccatttgccagccctccaggtcctcccaggctggctttgaaactgtaaggggaggtgtaggtgtgtgggtgactgctttgtgctgcgccttttcatggctgactcaggcctggggcatttgggcattgtaggggtgcagtggtatgtgcccccccctctcccattatcctttagctttaggccaaaagcgttgctcagggcagcttttgcccagggtgggtgggactaaacaggatggattttttttttataaaaaagtcgatgcctgaaaaaaaacccctttccttgattgtgtaaggaacttgctggacgcccattaaaaaataaagctcctgtttttaggctccta

SEQ ID NO: 637393 - DNA, 1361 bp, Homo sapiens
  misc_feature (852)..(852): n is a, c, g, or t
gcctccgtggcacatgtgacagtcgtctttaaaccctggcgtggcaattccctgaggcaccgcgcgtgatgccctagggaaggactgggcgaccttggaaggtgcggaactaacttccttaagatcatccaagctatttgtgctgatctattccgatagatgtctcaattggtgtgggatgcacgaacaaatgtcgcgcgtatccaacgcgagaatgactcgtacgcaatccagccactgcttaccatttcagcgggcaacagggctcgttgagtgcctgaatggagcaacgaatcacccactgattgcgcacaggcctactcgcagaaggcgcaaaccctgggatagagatcaacgcctacgactccttgagagacataccttgacttgcacttcaattatccgggcgtgcgaaaatcgcttgagggcctgttgtagtttcaaccccaactggtagtgatcctcgagcttagagattcagagggaacattggtttgcttagggccctaattacaggggattgcacatggcttgcgattgcgcccaagtggccatggggttagaacctacattttggctaaccacgaattgttgaacaggttccaacatgatgccacaatggccccacagtgaataccacaattgggtttctctctagagggaccccggacagggaaacgaactccctttcccactctatttattccccgaagggaccttttatgatgcagggggtctattcgacccccaaacggttacaaggaacaattctgttcctgccaaaggagggtaggcgcatacaccccatagattttgggaatcacacgttcgccattgcacggtagttgtacnttgcgttggaccacaggcgttgggaattccacaagggcaccccgtcgcggcccggcacactaaacaacgagttggaggggaaaacggccccgaacggcgaggaacacgcgccctcagctggtacagtggacccttgttaagagccgaccgtttggcgcattcgtaagagcaagcatttcttcggcacgcaacccgctattatacactttccgcccatagtatgatcgggtgaccattggagggatcaaaattcccccaaggcgaaaggagattggctgtacacctgaaacccgaaaacggtcgggagggccaagggtcccaatatttccagttagcccatacagcgcccacttttggtaaacacagacgctgacccttaggggcacgctatatttccaacacaagggtacaagggggaacacaaatcgacgttcctgatggtacgaacactttcccaatccctgacgcgttgttaacaccgcttgtgtgtaacgggcggcagatgggaa

SEQ ID NO: 637394 - DNA, 133 bp, Homo sapiens
gttctgggcgtatggcaagcgggctctgggggcctggattcctcagggacggaatgggagttaccagtggggaccagtgccgtgttggtttgctcgcaccccattcaactccgtcactttaccattcaggtat

SEQ ID NO: 637395 - DNA, 951 bp, Homo sapiens
gccggcttcgctatggcggcgaattcacccagattcctggcagccacccaaggtttacttggagactaccatgggaatcattgtgctggagctgtgactggtacatgcatgctccaaagacctgtaatgaactttgctgagcttggctctgctcgaggttaactacagatggccgcaaaattccacagaattatcacagacttcatgatccaaggaggtgacccaacagggacaggtcgaggtggtgcatctatctatggcaaacagtttgaagatgaacttcatccagacttgaaattcacggtgggctggaattcatctgcaatggccagtgaaccagtcttctagatgacatagaatgacgatgtcatgctataattcattgtggcttcgcaagtcatgaacgcttagcgaggcctggcatcttgggtgagttagacgatggaacgtacagttttgaatacgggaatgcatctctttctacatcccccagttgccttacggttcgccaggaaccatgtgcccaaagatgccccatggcctaatcaatctcaggctagactacgttactacacatgaaccataagtgcatgcttcttgtgcatgtctgctctgatatacgtcgaaccaatgtagccagccactgtcatttctcaactggttctgcctaaccaaaccttcttcctacggagcatagatattctggcctaccacagcagatccttgatggctgacaggcacagcaattccaaagccaaagtagtagactggtcagccctcttaactctgtgcacgcccgtatatcagacttttacatttgtacatctagggacactgtatggcatctctatatatattctccctgtcaaaacccagaacatcaacagggctgcttctgacacttcagaaatccaacggaaagccagtgaattttgccaattgaaaaggatc

SEQ ID NO: 637396 - DNA, 162 bp, Homo sapiens
gtggatatgcttattaatgcacttgtttcaaaatcccaattgcacaatgtgttaatattttagaacaaatgaatcctacaagggagagtgattttttagccacacataggggtggatcttgagagtgacctacagataaacgactttttaaataagtagtca

SEQ ID NO: 637397 - DNA, 998 bp, Homo sapiens
gggtggtggggaatcattaccgtgctgcttaggagcgggtggtgcatggatcgcggaagagtgaacgtgactgaatcagtctcagtcggaggtcagatggagtgggaagtacaagagagccggtaaagccccgaaaagatttgaaattccatccaggccggagcaataccgcggaggctcacgtaggtccgtccctcttatctgtgggacaggcccccgagaacttgagtgggtatgcaggatggctactgaggggtagccggtgagcaaaggcagtagagtacctttgttatcatggaggatggtcgcatcgccagaaacttgatcatggtgggagctgaaaaggtggcctgggggtcggtcaagaatacggtccatcttagaaatggttcatagacgcacacgagacgcagtaggctagagaatgatcgcggcaatgtgaggctgtcagtgacgacccagggagaaaacagggccctgatagggtggatgggcctgcctgtgcaggtacaggccaccttcaagcttctgggagagctccctatttgtcaaggaatccagctcctttcgaggtggactagctctaaggggccaggatgctttactccctagtcatgttgaccctgtatggcttccttactcaaggcccttgacgttttcattcctgtgccgcatttacctcctggtcatctcgcctaatggttggtgggttagatgaactctgcagagggtgcgtctgaggaatgatgcatctagttgcaactcaattgtttgaaggagcctcattgcaagctcaatggtaaagcacggcggacggggcaagggtcctgtttccgccaaattaagtcgaaagtagggtggaggggacgctgcacgttactggagtcgccaggacacgttgtgtcgttaatacagccagaccatcccaatcggccgggggacacaattctcgggaacccgtatgtgttatcgaaataagagatgctgtgtgcgcatta

SEQ ID NO: 637398 - DNA, 860 bp, Homo sapiens
gctgcccctgacagattctcctatcgtggtcacagggactctaagattgctacctgaacttacgttgaccatgctgtcccggttggtacttcactcgccgccgcacaggccagagtgtccctcgtacatctataacgaatgcagtcctgtgccttaactgaatcctcaaggtcgatagtatgcatgcgtccatccaagggacctgtgtccatgacacggtgcagtttcagcacccctttgttcccctgttgagcctaccgttctttacctcgcaagtaccaggagtgaaaaaaggtttcgttgcaatgagtacctggattcccccatgtagagaatatctatcgcaggatccctgttgattccttagcaacctgggtgttaaatacgcgaccactatgtacttcgcatacatggggctaggatcctctgttaaccggcatatataaatcccacaaagtagaactactcacttgctgatttaggcagccacgaagaatccgttccatctgccccgtactctaggtaacataggttggtgattgggatctagtggaactttacgccctaatttatttggtcccctattgatttgcccagacgtgtgtgcctgattactagcctcaattgcatgccaaacatactctggctccaacctacgaagagcatggtcgaataggcagtgcttttccagtcccaaccacaattccagcaaatgcctaatatggatatcgtgagaatggctcgaatcagggcacctgggattcaggaaagtctgcccctttaccctttctttgcatgctggcccacgggaagtaaccgtggcgtcttggctattgcgaagctcacttactcctgaacga

SEQ ID NO: 637399 - DNA, 711 bp, Homo sapiens
  misc_feature (51)..(51): n is a, c, g, or t
  misc_feature (98)..(98): n is a, c, g, or t
  misc_feature (114)..(114): n is a, c, g, or t
  misc_feature (130)..(130): n is a, c, g, or t
  misc_feature (223)..(223): n is a, c, g, or t
  misc_feature (232)..(233): n is a, c, g, or t
  misc_feature (243)..(243): n is a, c, g, or t
  misc_feature (246)..(246): n is a, c, g, or t
  misc_feature (259)..(259): n is a, c, g, or t
  misc_feature (476)..(476): n is a, c, g, or t
ggtaatgcttaacccagttacacaggatgccgtcttgtgtttcctcttgtntagttacccactacagtgattttgtgatctgctaatgggttgccacncacaaccattgctttngcacttttacttcaantcaatgaaggattgataaaagttctcctggtgtctccgcagagtgccttccaggaacagatctttgcatagaatatcagtggtttcctttttngtttcaaannagtggtcagnaanatacccacgtgcnttgactcagcgcaaggcaactccacgcttcctctttatccgcttttttattcgttctctctctctgttacacatttctatattttctgctttattttattttcattttatttctttgagacggagttccactctgtcgccaggctggagtgaagtggtacaatcttggctcactgcaacctccaactcccgggttcaagcaattctcctggctcagnctcctgagtgctgggactacaggcgcgtaccttctttagtagagactgggtttcaccatgtcggccaggatggtctctatctcctgaccttgtcgatctgcctgcctcagcttcccaaagtgctgagcatgacaggtgtgagccatcagacccagcatttttcctctccactcttccatttaaattttttccattttctctgacacgcgtcatatcggtccggtaacggtagccg

SEQ ID NO: 637400 - DNA, 164 bp, Homo sapiens
aggctcagataaacgatatatggaggtcagcacgatgctcacgtagtacgacggaacttgtacagggaggcatgcaccgcaatgataaatacacgtactaccaggatccatctatacgtatataaggagatacagcacggttctcacgtatagacggaacttgt

SEQ ID NO: 637401 - DNA, 237 bp, Homo sapiens
aacgggtgatgcggttgcagtgagccgaggtcgtgccacgcactccagcctgggtgacagagccagactccatctcaaaaaaaaaaaaggtggagtaggttgttcatcacagagctgaaatttaaaccaggccgtttagctccagaggctggggtcttaggcccagagtctggccatcaggggggggctcctaagtagtcagggagcagaaggagggattgagacctgggagggaga

SEQ ID NO: 637402 - DNA, 264 bp, Homo sapiens
tactgtggccccctcgagctcgacggtatagataagcttgatagtcaggagtacaagaccagcctgggcaacatggtgaaaccccgtctataccaaaatacaaacaagttagccaggcacgatggcaggtgcccgtaatacccagccaactcaggaggctgtagtacaagctaatacgcttgaacctagggaggcagaggtagcagtgagccgaaattgtgctattgcactccagcttgggcagcaagagcgaaactccatctc

SEQ ID NO: 637403 - DNA, 895 bp, Homo sapiens
  misc_feature (460)..(460): n is a, c, g, or t
gaggctggcaactcccggaacaacagccacaaccactcaggagcaggagcggcagcggcgacggcggcttgcagaccgtccgccagccccgcattccccacacgtcacctgcccgtgtcccgtgagagagcggacgagcaaggggcgcgagggagcgaagcagaacgtggcggacggtcggtcggtcttggtacttagatcagggtcaccgcttgtcgatgtacttttagtgctatggaggttttgtaatggtataggatggacctaagcgtgtctgtctactcggcatgtaccctctcgtgacctggtcccgtgtcgttgtatgttgtgtcaagtagttttctagcctgcacgcggtcctttgtgttctactgggtagagccgtctgccagtacttttaccctattacgccataccatttgtgatcccgcgtcatgatcgtctagggtggcctactcgnagtcttacacttaacaaaagatctttctcccattgacttgacattccctccatggctcttctccactcgaatagcttgggagccacctttcgttcgaccttgaatctcgcacgcgtcgatcgctcgagtctccgtaacttttctaccatcatttttgcttcacctagtaagcgtagccatggttgcgcgatcgacctttgtgcttgaactttgctagtatgcagttttgcttccttcggggccaacctctcctttcctggtgcgccccggtcagcgtgggaccggttcacttgccacttgctaggtccccccccgctgcataggttcttcgagtttgaccggggcaccgcctttcggatgatatggtgcctactcctcgcgggggacccggaatgcatctgtcgcccttgtcttacgttgggccggtgccgtcgc

SEQ ID NO: 637404 - DNA, 816 bp, Homo sapiens
cctgtgagaaaacactctcacaagctagtgtaactagtacttcatctgtacagaggaatagtctacaaaagaagactggtgacctggagaagagagctgtcatttactccatcctttatagtgatgctacgggacagaagaaggcaatggataatacacgattggcgagcaacgcaatctacagcggtatgaacgccttcctggcaggcatgcagtggagtacgagatccttgcagaaacaaggatattacgcgtcataatagacattgagaacatatcgagcagagaatacatgaacaactaggaacagatgctcaacttgagactagactagtgtcttgacacatgctacatacatcatcgagctctaacgtatgctatgttagaatgtgccactccgagacgatagacaatttatatggcctagcggttcccgtctgccttatggaatagacatgttgacaagcagaagacaagagatatattgagaactctctggatgcgatgctcgagcgaagaataagagtgatgaacagggaattgggccaaaggagcaccacaaagctcctcaagaggtgcttcacgagaagaccaacgcagggattatcgtaaccttcgctatgaaataaaggaaagaactatcagggccaacgaaggttccttggggccaggatccccttgggtcatccagttgaaagaaggggggataagtgatagtaaggacgtggactcatactggaggattcgtgataaggacaggagaaacatcagtaccacataggggctttgtgctggccaaaagaccgagagatgacc

SEQ ID NO: 637405 - DNA, 240 bp, Homo sapiens
agtgctccagtctatacgatatttggaggtcagcacggatgctcacgtgtcgacggaactatgtacaggaaggcatgcaccgcagtggtgaatacacgtcgaccaggctccatgtatgcgtgcttgggtggtgagcacggagctcatgtatctcaaggagctggtactagggaggtatgcaccggcagtggtgaatacacgtcgagctggaggcatgcatgcatgctcgggtcactgaac

SEQ ID NO: 637406 - DNA, 111 bp, Homo sapiens
cgacccagttcagcaatcatccagcatttgcagaaaaccaatcacgcagctgcggtgctggggctgaccgacacgccctatcgcctgggcaaaggctggatttaccagtat

SEQ ID NO: 637407 - DNA, 161 bp, Homo sapiens
attccgacattgctagtattcgctgctcagcatagaatatctgcaatgggaaaatccaagagtaataccttcgaacaacaagaggaattcagtctattagaggagcgtgtttacactgtctcaggtcgagtaatcatcgcgccgtgagagaagaacaagtg

SEQ ID NO: 637408 - DNA, 162 bp, Homo sapiens
cgccatagcccgacagatttggtagcaaaatggggcacttgaaaccattatgctagctgaaccacctgggtgcagactagtgcagagtgtacgagcatatgccagctgatctctgggtagcccagtgtacagtaatcccgtgctctagttgtgtaccgtcgt

SEQ ID NO: 637409 - DNA, 186 bp, Homo sapiens
ccttccccccgccccccccctttttttttgccgggttgcctgaggggggaatgcgggagggaggggggggggccgggggcggggggcggggggccgggggcccggggaggctgggaatgctgcccccctttgccattttttttttttttttttttgagagagggaaaggaaaaggccgaaacctta

SEQ ID NO: 637410 - DNA, 348 bp, Homo sapiens
caagcacagcgtttatatggggttgactgagctcgtgtaatatgtggatctctcttaagcttagtgccttcagttcggttggtgctcatatctcagaccttgtaaacggtggcctgatagatagaaagtagaaccgccatgagtcgatggaaggatcagcgtgtccctggctgcattttaacatgtcgcgaaacacagagtagacagtgtattagctgcctcccgccagcttcaagcgtgcagcgtcagtctgggtctggctccaggcagcttgtcagcgatgatagcctccgcatgtattcaccctcaggatgtaaagcatgcgcagcaagtgtgtgtgcgcggtct

SEQ ID NO: 637411 - DNA, 211 bp, Homo sapiens
ctttggatctgatgatgaggaggaaagtgaagaagcatagaggctatgggaagaatgtcttgcacaatatgaatcaaagaaagccttaaaacctgtacttgttgcccagtcttccatcttactagatgtgaaaccttgggatgatgagacagatatggcgagattagaggagtgcgtcagaagcattcgagcgaaggcttagtctggggct

SEQ ID NO: 637412 - DNA, 151 bp, Homo sapiens
cctccaggtctcctgatgcatttacattctaatttccaattgaaagtcaagaggctacaaggaagagtgaatggaggagagaatgcagaaggggtaatcagtgttggaattgaggagttaaaaggtctggagagtgcgtaggggtaggacg

SEQ ID NO: 637413 - DNA, 557 bp, Homo sapiens
ccgaggaaaaggaaatagatcaggtagggccttagtaagcatgcataaaggatttggatttatcctaaactcagatgagaaagcatctagaagggtaaggtggggtaggatcagtgtacatgacctatcagatttgcctacttattaaaggcttttatgagccatataaaaccattgtagcttttaaaacagaaaaaggaaaaaaacaacaatagttgtctaccccattctttcacctgactaaatcccagcactataaccaattggtgtacatcctttcagatttttccctaggaatatgcaaacacgaatttaaaaacgtgtgtgtgtgtgtgtgtgtgtgtgtgtgtgtgtgtgtgtgtctgtgatatatatgaggtatattgtgttgtgtagagagacaggctctcactcttatgccgaggctagagtgcagtggtgctcaagggatccttctgtcccaatatccccaataagtgagaatatggacatatgctaccatgcctggctaatttataaatatctcttgtgtagagatggggtcttgctacaaatag

SEQ ID NO: 637414 - DNA, 632 bp, Homo sapiens
gaggggccccccccaaagggtggctccggtctctttcccgagaggaaagcttaaaggctttcccgttgtggggtgaaggcgcccctccaacgtttcaattcccgcgcggagcttatgcccccgcggtcctccggcatgcgcccacagcgcgcgatcacacttcggcccgcccccacttgggccttctggtttttccgaggtttcgccctggcattttatacttcggccctcacttttctgccaccgacacgaatagaaggttaccaccttcccggaaggaataagatccatggccctcactttaagcaccccgcgtggtaaatgtttgagccctttttggccctgggcttggtttgcccaaggccctggccacaacgctcaaacacttgggagaccctcactttgccacaatgtataggggccggtgagcctgctccacgcacgctgtgtgctgcacccaaccacggaaggtcctgcccccctcacactgctgctgctccacgctgaaggaagaaagaaaagtggaacgccaaagaaaagaagaatccgaggagtctgatgatgacctgggctttggtctttttgactaaacctcttttataacctggtccaataaaaagctggacctttta

SEQ ID NO: 637415 - DNA, 529 bp, Homo sapiens
  misc_feature (15)..(15): n is a, c, g, or t
  misc_feature (70)..(70): n is a, c, g, or t
  misc_feature (87)..(87): n is a, c, g, or t
  misc_feature (107)..(107): n is a, c, g, or t
  misc_feature (239)..(239): n is a, c, g, or t
  misc_feature (274)..(274): n is a, c, g, or t
  misc_feature (342)..(342): n is a, c, g, or t
  misc_feature (355)..(355): n is a, c, g, or t
  misc_feature (388)..(388): n is a, c, g, or t
  misc_feature (402)..(402): n is a, c, g, or t
  misc_feature (522)..(522): n is a, c, g, or t
  misc_feature (527)..(527): n is a, c, g, or t
taaccctggaaatangaaggccattggaatttcccggggttattaatatggagattttcaacccttgaantgtttttttgcttctgnggaaaataatttggggattnttcagtatttgtagtagtttgatagaaataatgaggaaccatattcattttaggcattgtttatatttgaagttactgagtttgaggaatggcaaattaaatttgcctaacccccaaaacaaatgaaatatntcaattataaaagcaacatggccgggcacggtggntcaggcctgtaatcccagcactttgggaggctgagcaaggtgggtggatcacttgaggccaggagttngagaccagcttgnccaacacggtgagaccctttttttactaaaaanacaaaaattagccnggcgccccattgtattcccagttattcaggctgaggcaggggattcgcttgaattgaggcagaggttacagtgagtggagatcacgcccactgcaattccagtttggtgacagagtgagnccttntc

SEQ ID NO: 637416 - DNA, 832 bp, Homo sapiens
gacagtgattcggccgccgcgccggggggtgggggggctgcgcgggacttttttttttttcagactgaccgcggggcagctgcggagcttgtcgaccccggcccggaggaggctcatgcgggatttcaagcggttacaagaggacccacctgtgggtgtcagtgggcgcaccatctggaaaacaacatcaatgcaggggaatgcagttatattgggaccagaggggacacctttggaagatgggtacttttaacactagtaatagaatttctctggaagaatatccaaataaaaccaccaactggttaggtttttatccaaaaggttttcatccaaaggtgtatgctgatggtagcatatgttaagatatccttcagaatcgagggagtccacatatgaggtatcttctatcttaacatcaattcagtctcggtggatgaaccggaatcttaaagtccagccaatagccaggagcacagttttatcaggaaaacaaaggagaatttgagaaaagagttcggcctttgttgaacaaagctggattgattcataatagacaagtggtctgttaagtcttttccatcattgctggtatactttaccctctcattagaaggttaacaacttttagttgcacaggtttacggatttgagaacaaaacgaaaaaagtccttcagttagaactaaaaggtgtgttttggataaggcttacatggctggggactagtttggctattggaatatctgttgctttccaggatgggggggagtagaaaaattcattggaatcgctctcattgagctatgatctgattaggaagcaggtttgaa

SEQ ID NO: 637417 - DNA, 133 bp, Homo sapiens
tcggttcggaagcacacggaacatacactaggggaatcctctatagcactctagtaccttgcagaaagagagccctgctcttcaataataggaactatccaaaccctatctacccctaccatatggagaggat

SEQ ID NO: 637418 - DNA, 142 bp, Homo sapiens
  misc_feature (2)..(2): n is a, c, g, or t
gntcttttaagcctcgaggcacgcgcaagacttacccgccagtcgccctggcaggcagtacaacacagaaggcatagtgcgtgctatgcttatgttccgcacgaatcgcgtcaaaacgaaaataacaagcaaaagacaaagt

SEQ ID NO: 637419 - DNA, 520 bp, Homo sapiens
  misc_feature (56)..(56): n is a, c, g, or t
  misc_feature (59)..(59): n is a, c, g, or t
  misc_feature (90)..(90): n is a, c, g, or t
  misc_feature (155)..(155): n is a, c, g, or t
  misc_feature (191)..(191): n is a, c, g, or t
  misc_feature (203)..(203): n is a, c, g, or t
  misc_feature (206)..(206): n is a, c, g, or t
  misc_feature (248)..(249): n is a, c, g, or t
  misc_feature (275)..(275): n is a, c, g, or t
  misc_feature (395)..(395): n is a, c, g, or t
  misc_feature (465)..(465): n is a, c, g, or t
  misc_feature (480)..(480): n is a, c, g, or t
cgtaaggcgaaagatgacaaattataacctaagcataattataggatggactaacnccnataccttctgcatatgaattaactagaaatnactttgtcaaggagagcctaacagcataagactccccgataccagacgagctacttatgaacagntataatagcacacccgtctatgtagcataatattgngaagatttatangtngaggcgacaaacctaccgagcctggttatagctggttgcttnnctatgaatcattagttcaactttaantttgcccacagaaccctctaaatccccttgtaaatttaactgttagtccaaagaggaacagctctttggacactaggaaaaaaccttgtagagagagtaaaaaatttaacacccatagtnggcctaaaagcagccaccaattaagaaagcgttcaaacccactccaccttactaccagacaaccttagcnaaaccatttacccanataaagtataggcgatagaaattgaaacctggcgcaatag

SEQ ID NO: 637420 - DNA, 550 bp, Homo sapiens
  misc_feature (56)..(56): n is a, c, g, or t
  misc_feature (59)..(59): n is a, c, g, or t
  misc_feature (90)..(90): n is a, c, g, or t
  misc_feature (155)..(155): n is a, c, g, or t
  misc_feature (191)..(191): n is a, c, g, or t
  misc_feature (203)..(203): n is a, c, g, or t
  misc_feature (206)..(206): n is a, c, g, or t
  misc_feature (248)..(249): n is a, c, g, or t
  misc_feature (275)..(275): n is a, c, g, or t
  misc_feature (395)..(395): n is a, c, g, or t
  misc_feature (495)..(495): n is a, c, g, or t
  misc_feature (510)..(510): n is a, c, g, or t
cgtaaggcgaaagatgacaaattataacctaagcataattataggatggactaacnccnataccttctgcatatgaattaactagaaatnactttgtcaaggagagcctaacagcataagactccccgataccagacgagctacttatgaacagntataatagcacacccgtctatgtagcataatattgngaagatttatangtngaggcgacaaacctaccgagcctggttatagctggttgcttnnctatgaatcattagttcaactttaantttgcccacagaaccctctaaatccccttgtaaatttaactgttagtccaaagaggaacagctctttggacactaggaaaaaaccttgtagagagagtaaaaaatttaacacccatagtnggcctaaaagcagccaccaattaagaaagcgttcaagctcaacacccactacctaaaaaatcccaaacccactccaccttactaccagacaaccttagcnaaaccatttacccanataaagtataggcgatagaaattgaaacctggcgcaatag

SEQ ID NO: 637421 - DNA, 175 bp, Homo sapiens
ctaagcgtttggagagacgactgtatttgaaggggctcccatctgtctactcttggatctggctcatggctttgctggggtgatcctcataaagaaggctggagatatgatccaaagaagcatccaaaggctgctagggattcccatcccacggtgtgtaacaaggtgccaggca

SEQ ID NO: 637422 - DNA, 805 bp, Homo sapiens
gattttgcagacgcaccgccgagaaaaaccgtgtactattagccatggtcaaaccccaccgtgttcttcgacattgccgtcgacgggagcccttggtcggcgtctcctttgagctgtctgtggacacggtcccattaaagacagcagaacattttctgtgctctgagcatctggtggagacacggattcggttataagggttcctgtcttgcacagcaattgattccagggttgatgtgtcagggtggtgacttcacagcgctcatatagtgcactggtgcacatgtccatctatgcggagaatttcgacgactgagaacttcaatcctaaagcatagggttcctggctattgtgtcaagcggaaatatgtggaccaagaaaggtggttccgagtttatcatctgacatgccaatacgtgagtgtgtgtggatggcaagcatgtggtgtaggcaaagtgataagacgggtgaatagttgtggaggccgaattggaagcgcttgggtccaggactggcatgactagcaatgaagatcaacgattgctgactgttggacaactcgagtaacgttcgacttgggggttcaatcttgaagcaccagatttattccttctgtacgctcagggagagcaccctccaaccaattggtccgcagtacctagaaatctagtgccctcgtgaagtccttgggatcaatgttccttgtcctccatgctagtggttgagacgcgtcctgctctgaaacacacacggcagaacaaattggggtccgcaaaaattaacaatgtggcgcccagagaacgc

SEQ ID NO: 637423 - DNA, 193 bp, Homo sapiens
ctagctcaatgttttggagtgaaaggagcttgaaggtcatagttagctatgccagggttctcctggcctcatgtcagatacaggtcctaactcccaagcagcctaccatagtgtcctccttttttttgcgtgtgtgaagtggttacgcactaatagaccaggttgtagtgcaatggtgcaatctcgagctcac

SEQ ID NO: 637424 - DNA, 1054 bp, Homo sapiens
  misc_feature (327)..(327): n is a, c, g, or t
  misc_feature (332)..(332): n is a, c, g, or t
  misc_feature (454)..(454): n is a, c, g, or t
  misc_feature (995)..(995): n is a, c, g, or t
  misc_feature (1054)..(1054): n is a, c, g, or t
tccccttccgccatgattgtgtttcctgagactcccagccacgcttcctgtacagcctgcagaactgtgagtcaaccaaacttccttttaaaataaattacccagtctcagctaggtctttctagcagtgtgagaacggacacgtagagggtgtgagagccagaagactttaaggagagggacgagctggggcctggatgcccggggaggtggacctggaccaggacaggtgtcagcgggcagagatggggcagaggtgtggctgtctacctgcgaccggggccatgccctctcgggctcggttgaggagctgctcttcctccagangcgcncggacggaacgttaggaaggccctggtgagtggccccgacctcctcccccaggactggcttctccggccctctgccctttcgggcagaacagctcgtggctcttccaggacctggggctccntcttgcagaacagctcgtggctcttccaggacctggggctccatcttgcagaacagctcgtggctcttccaggacctggggctccatcttgcagaacagctcgtggctcttccaggacctggggctccatcttgcgaacagtcgtggctcttccaggacctggggctccatcttgcagaacagctcgtggctcttccaggacctgggggctccatcttgcagaacagctcgtggctcttccaggacctggggctccagtcttgcagaaccagtcgtggctcttccaggagctgagggctccatcttgctgaaggggtgcttcttgagactccttagggacgattctgattttccctggagctgtacaatggcggtctatctttcaaggtcccctgggcctgggctccgaggtagccactttccctggagcccgtgaaggaggtttggacgccagctgggctgcctgcctgtggcggggcaggaatgagagctggtgcggctggggcccctgggtgcctggtcctgctctcatgacgcccancccttgaaacctgacatgggcgccgaggattctcccgcaggctcgagattcactgatcn

SEQ ID NO: 637425 - DNA, 878 bp, Homo sapiens
  misc_feature (327)..(327): n is a, c, g, or t
  misc_feature (332)..(332): n is a, c, g, or t
  misc_feature (454)..(454): n is a, c, g, or t
  misc_feature (819)..(819): n is a, c, g, or t
  misc_feature (878)..(878): n is a, c, g, or t
tccccttccgccatgattgtgtttcctgagactcccagccacgcttcctgtacagcctgcagaactgtgagtcaaccaaacttccttttaaaataaattacccagtctcagctaggtctttctagcagtgtgagaacggacacgtagagggtgtgagagccagaagactttaaggagagggacgagctggggcctggatgcccggggaggtggacctggaccaggacaggtgtcagcgggcagagatggggcagaggtgtggctgtctacctgcgaccggggccatgccctctcgggctcggttgaggagctgctcttcctccagangcgcncggacggaacgttaggaaggccctggtgagtggccccgacctcctcccccaggactggcttctccggccctctgccctttcgggcagaacagctcgtggctcttccaggacctggggctccntcttgcagaacagctcgtggctcttccaggacctggggctccatcttgcagaacagctcgtggctcttccaggacctggggctccatcttgcagaacagctcgtggctcttccaggacctggggctccatcttgcaggggtgcttcttgagactccttagggacgattctgattttccctggagctgtacaatggcggtctatctttcaaggtcccctgggcctgggctccgaggtagccactttccctggagcccgtgaaggaggtttggacgccagctgggctgcctgcctgtggcggggcaggaatgagagctggtgcggctggggcccctgggtgcctggtcctgctctcatgacgcccancccttgaaacctgacatgggcgccgaggattctcccgcaggctcgagattcactgatcn

SEQ ID NO: 637426 - DNA, 504 bp, Homo sapiens
  misc_feature (226)..(226): n is a, c, g, or t
  misc_feature (253)..(253): n is a, c, g, or t
agaggacccacactggtcgagtcagcatgtaagaggtatacagtccatactcctgtctctctaggctgataatactgcaacttcatgtagctcagactgtctgagctattttctttctcagaacagtggtagtcgtctcaaaaatgttactggaaaaattgtgccatccatattaaaaaatagaaatcttacctatacctcacaccatttataaaaattaactcanagtagaccctatatctaattgtaaaanctaaaactctaatcaaacttttatcaaaaatcatagaagacattttttgattgtaggctaagcaaagtttttttacagataggacacaaaaaacataaaccataaaagaaaacataaataaattagacttcgttgaaattaaaatgttctactctttgaaagtccctgttaaaataagacaagtcaatattggagaaaatatttgccaaaaaaaaaaatctgataaaggactaatattccgaatatttaac

SEQ ID NO: 637427 - DNA, 116 bp, Homo sapiens
ggaaggccctgcgcacgcagctggacctgcgcaggttccgaatctattccaaccattctgcactggagtgggtggctctgaaaccattacaggcccctctggagaccatgctgcaa

SEQ ID NO: 637428 - DNA, 191 bp, Homo sapiens
  misc_feature (33)..(34): n is a, c, g, or t
gatagaaatttataaaattcagtgtatattatnntttaatgtgtaaatgaaactggatactaaaggctagtattatcataaagggtaacttaaaaaccactgagtgaactgatgataaatagtttgacacactatatttttaataatgagggttaaattaaaaggttaaatgcaagtgtagaactaaattt

SEQ ID NO: 637429 - DNA, 230 bp, Homo sapiens
  misc_feature (99)..(99): n is a, c, g, or t
  misc_feature (104)..(104): n is a, c, g, or t
tgtagtcccagccctttgggaggctgtggcaggaggaacacttgagcttaggagtttgagatcatcttaagaaacaagagtcctcctcttcgggtttgnaaaanagaagggatgaatacttatttatttttgcttttaacattatttactttttttctttttttttgggacggccttgctctgttgcccaggctggagtgccgcggcccgttctcggctcactgccgcct

SEQ ID NO: 637430 - DNA, 105 bp, Homo sapiens
ccaccaaccttactaccagacacccttagccaaaccatttcccaaataaaggtattggcgatagagatttaaccctggcgaaatgaattttgatccgtaggggaa

SEQ ID NO: 637431 - DNA, 235 bp, Homo sapiens
ggtttatgcagtgttatatatgggggccctcattatgccaactgtattaagggggttccatcggtgtgtgggccctcatcaggctaccacgatatacaatgagtgggatacttaagctcttgctgaattgtgtctgtaatgtaatctgactcaaggagaacaaatggagaggggctttgtcattctactgtgtcatgtgaatggcgtctgggtctggagtctaagttgtactgtg

SEQ ID NO: 637432 - DNA, 1034 bp, Homo sapiens
gtgaaggcaccgcacgtggtattgtatgtgtacactggcggatcgcactgtgatgggaagaattgccacacttgcttctgggctggaaggaggccagacccccattgctgcccacacttgacacattttatccacatcatcacgggctgtggctgctgtcctgggctgtgtcttccttcatccttcctctcatccttgacgtacacctggcttgcaggctgtccactcttcctcatcggctcctcatcgtacccccatgctcgccggcacacggctccgcctggccacttgtcacggctctgctctggaccccttccctggccataaccgcactggcccaccgcgacccccccttgtcccccctgcacagccccccttccccccccccttgctggcaggccccctaatggcgctggtcccaccgacatctcaccccactccttgcctccgtgcactaccacaacccttgcgcacacctccttgacgcctccaagaaaaccccgcgaccttgcccccacccttgccgcacccccaccccacttgcctccgcgattctcggcacccaccaagtcccaaacaccttccccaactgccaaacccccttgcgaatttaccggaaccaatgaacgcaaaaactccacccgaccgccttgcggcactgcgcatccataccgaacttatcatgtgtcaacccgtcgacgccaaccgctttctcgcacgccccttataaagcccctttgcggggcctctatgctgccacctccttagggcttacccccatgcgacaccatttctcggcccaagcgtgcattcccatactcagggcctcaacacccagaacgcacggctaccccacagccccggaccccgacactcccagccgcggcccgtatcaaagcccccaaggaccgccacccaaacacacgccctctaagccccccctaaacgataccccgctcgacgcacacggcccgaagagcacccacagggagtcggggccaaacgcggcaaccggcaactagggcccccatatc

SEQ ID NO: 637433 - DNA, 585 bp, Homo sapiens
tctccaagggcaaccatagacatcctagagtgatgtgcagctgatcaagactggagacaaagtgggagccagcgaagccacgctgctgaacatgctcaacatctccaccttctcctttgggatggtcatccagcaggtgtacgacaatggcagcatctacaaccatgaagtgcttgatatcacagaggaaactctgcattctcgcttactggagggtgtccgcagatgttgccagtgtctgtctgcagattggatacccaactgttgcatcagtacaccattctatcatcaacgagtacaaacgagtcctggccttgtctgtggagacggattacaccttcccacttgctgaaaaggtacaaggccttcttggctgatccatctgcctttgtgctgataccccattgctgctgccaccacagatgctactgtgcagctgcagccccagctaaggttgaagacaaggaaaatcggcggagtcggaagaagatatgggatttgatctctatgactaatcaccaaaaagcagccaacttacccagttttgtttgcaaaacacacgacataaaggcttacttctttaca

SEQ ID NO: 637434 - DNA, 127 bp, Homo sapiens
ttctccgggttctccctccatagccgctgtctgtgtccgtgtcgctgccgctctgctcgcagtcgagtgagcgcccgtccgcgtgctgactggcacgcagtttttcccaggacctttctgaaccctg

SEQ ID NO: 637435 - DNA, 150 bp, Homo sapiens
acgggacggctagcgtgcacttccatttgggcctccatcttcactgcctgggacggctgcttctcagcactggcctgcgagtcatttctgtgctactagtagatggaggatttcgatacctgtccttcaatgcttacagctggctgggca

SEQ ID NO: 637436 - DNA, 919 bp, Homo sapiens
  misc_feature (28)..(28): n is a, c, g, or t
  misc_feature (75)..(75): n is a, c, g, or t
  misc_feature (88)..(88): n is a, c, g, or t
  misc_feature (144)..(144): n is a, c, g, or t
  misc_feature (217)..(217): n is a, c, g, or t
  misc_feature (265)..(266): n is a, c, g, or t
  misc_feature (285)..(285): n is a, c, g, or t
  misc_feature (308)..(308): n is a, c, g, or t
  misc_feature (339)..(339): n is a, c, g, or t
  misc_feature (383)..(383): n is a, c, g, or t
  misc_feature (387)..(387): n is a, c, g, or t
  misc_feature (426)..(426): n is a, c, g, or t
  misc_feature (452)..(452): n is a, c, g, or t
  misc_feature (496)..(496): n is a, c, g, or t
  misc_feature (501)..(501): n is a, c, g, or t
  misc_feature (503)..(503): n is a, c, g, or t
  misc_feature (507)..(508): n is a, c, g, or t
  misc_feature (513)..(513): n is a, c, g, or t
  misc_feature (518)..(518): n is a, c, g, or t
  misc_feature (527)..(527): n is a, c, g, or t
  misc_feature (543)..(543): n is a, c, g, or t
  misc_feature (582)..(582): n is a, c, g, or t
  misc_feature (609)..(609): n is a, c, g, or t
  misc_feature (612)..(612): n is a, c, g, or t
  misc_feature (616)..(616): n is a, c, g, or t
  misc_feature (618)..(618): n is a, c, g, or t
  misc_feature (675)..(675): n is a, c, g, or t
  misc_feature (717)..(717): n is a, c, g, or t
  misc_feature (736)..(736): n is a, c, g, or t
  misc_feature (788)..(788): n is a, c, g, or t
  misc_feature (798)..(798): n is a, c, g, or t
  misc_feature (800)..(800): n is a, c, g, or t
  misc_feature (803)..(803): n is a, c, g, or t
  misc_feature (808)..(808): n is a, c, g, or t
  misc_feature (810)..(811): n is a, c, g, or t
  misc_feature (819)..(819): n is a, c, g, or t
  misc_feature (825)..(825): n is a, c, g, or t
  misc_feature (891)..(891): n is a, c, g, or t
ttgtcaaatattcctcattgccccagancagtgttttttttatttctatgcaaaagtatgccttcaaactgcttnaatgatatatganatgatacacaaaccagtcttcaaatagtaaagccagtcatcttgcaattgtaaganataggtaaaagattataagacaccttacacacacacacacacacacacacacacacacgtgtgcccgccaatnacaaaaaacaatttggcctctcctaaaataagaacatgaagacccttnnttgctgcgaggggggaacnctgtgtgacccctccctacaatncaggtagtttcctttaatccaatagcaaatntgggcatatttgagaggggtgattgtgacagcgacgttgaaatnctgnggggaaccattgatgtccacccgctggtgcgctgaaaanatgccaattatttttcgctcccactnctgctgctgtttctcccacatcctcacatagaccccagagccgntggcncntggnngggcntcgcnttgctggtngagctagtgataggtntcgtctttgacgtcacagagcgcgatagaccatattgcntgggcggtcattgtgataaccagagangtnaatncngccccctggcagccgcttagcaggagggctcaccccaatcttcataaattttctctngtggggctttttgagtcccaggagggcataatcataatccangccgatgttattggcattncccttgaaccaacccttgggcacatgggtgcgtatcacccggatccactganatttcatctncncgngcatngnngacgtcgngtcgtnggcccctcgaccaccatctttaaacttgggcttgaggaagccactcgaagcttctgggttcctttnacataggtttttccatcgtgtatgccgt

SEQ ID NO: 637437 - DNA, 236 bp, Homo sapiens
gggccttcacagacacagcattgagcattatctttaacaggcaggaggaacactggtgtatattaatttatgacacaggatcattatagggtaggccagctggtgttatggcatgcaggcatatgtatgccaccatgagggctggaagaaccagaagccaaagaagaatatgaccgcatctattctaaagctactgtggtggtttctcatgcttcagagtctcgtaagtctcctgg

SEQ ID NO: 637438 - DNA, 274 bp, Homo sapiens
gtaaaacccagcccatgacccctaacagggccctctcagccctcctaatgacctccggtctagccatgtgatttcactcccactccataacgctcctcatactaggcctacttaccaacacactaaccatataccaatgatggcgcgatgttaacaggggaagcacataccaagggcaccaaaaacaccttttccaaaagggccttcgatacgggataatctatttatacctcagaggttttttctcgcagattttctgagctttacactcagc

SEQ ID NO: 637439 - DNA, 818 bp, Homo sapiens
  misc_feature (818)..(818): n is a, c, g, or t
gacgagctgtctcgccgagcgcacgcgtgtccggcgcccggagaaatgcttcggttacccacagtcgtttcgccacgatgagaccggtgtccaggtactggctcctcatctcactcgggctttatgccaaagatgtagaatctctgggtgcatgatgcccgagcctttacatgcctgtgaagggtgtcacgacccttttagaccgagtgctgtggccgcttgacgagtggggccaaagggacagaacagctgattatggagcagaggtaggggaagtcccaaagtaactaaaagatggtgtgactgttgggagaaggtcaagggagcttaaaaggataatatacgaaagatacatgggagctaaacgttgtctcgaagagtgttgccaataagcgagaaatgaggaagactgggcgaatggggactaccgactgactactgtagctggcagcggcatcgtagtagtccaaggagagggcttgcgagacagattaggcaaaggtgactaatccagtggaaatcagagacgagggtgtgatggtagctgttgactgctgtcattgtgctgagattggaggaatgtcaggtacataaaacgcttgtggaacgcctcctgaaacaactggccccaagtgccgcattacggcagactcgtggcggaaaccgcgtgcgacccatgggcacaaactgggacgagcatcctacagatctcgggggacgtggccttggaggcgccgaaagttgggaaacgcagagcgtgagtacaacactgggcgccaagaggggttggacacaaacacgggaagggagcagaaacn

SEQ ID NO: 637440 - DNA, 192 bp, Homo sapiens
  misc_feature (4)..(4): n is a, c, g, or t
  misc_feature (29)..(29): n is a, c, g, or t
  misc_feature (46)..(46): n is a, c, g, or t
aatntctggtaccgtttggaatccatttnggaaagaattcaccctnaggtgaggctcctggcagaagatggtgactggagtgccagtccctgtcctccagataccactgagctcactcccatgatgcagagctttcaaggataggctttattctgaagcaatcaaataataaatctattctgctaagagaaa

SEQ ID NO: 637441 - DNA, 118 bp, Homo sapiens
ctgtcacccgaggctatgagtgcagatggctgcgatctcggttcactgtgaagctcggcctccagggttcacgcaatactcctgactcaggctctcgagtagctggtactagcagtac

SEQ ID NO: 637442 - DNA, 188 bp, Homo sapiens
ttagaggaccctgctgcttgactattgttgtttttaaataatgtcacattcaagctctagcgtctatggctagagattcctaacgggtaatatgcatcctttccccttgtacttaacctgtgtttgcattccagatcagtctgacactctccaatagaaccaaatacatttcgtatgaggcaacacaa

SEQ ID NO: 637443 - DNA, 114 bp, Homo sapiens
tggagaaatgctatgcattggctttggagtccaggactgctcatggtaattgcacttgttgtgtttgcaatgggaagcaaaatatacaataaaccaccccctgaaggaaacata

SEQ ID NO: 637444 - DNA, 248 bp, Homo sapiens
aaggagcaaacagacgaaaagacagcaaagagcacaagcaagagaagcacaacacacagaacaaacacaagcacaaaagtaaacaagagacgacgaacacagaaaagaaaaccaaacaacaaaagaaccacacacgaacacaaggagagacaacaagcagacagcaacagaaaccagacaaagacgaacagagacagaaagacgaacacatctaaatagagacaccacacgacagaacaacacagaca

SEQ ID NO: 637445 - DNA, 833 bp, Homo sapiens
agccccctgccgggggggggggtcataaagacacaacgagccttcctttgtgttggtcccccgccttccgtccgttctgctgggttgaggacgcccgcccccgccggtggttgtctcccccccgactaagaacaccgccgcgggggcagtgctttcgccctcccctcgcgcgtgattttgtactttattgcgtccgccggcgggcggagtgatcaatgcttcttctcccacgcggcgcgcagtcctgttggtccacctctcgtggccgctctgttgtatgtgggtgcccacctagtgcatgcacgatggtgtgtgtccaccaaataacaggaccgccggggttgggttcgcgctcgctcgcgcgcgattttctctctgcgcgagtagttttgttgccgcccaccccgcgctcgcgcgcgctgtgtttttgcaccacctggatctgtttgtctccgcgccctcctccacccacccatgtgggtgcgacgcgcgactgctttttctcatgatgatcttgggggaggcgtcgtctcactcagttgacgatgctgccgcccccctccccccagggatgtttgtcgtcgcgtcctcatcgctgctttgttgccggctcgctcttttgtagtggcgccctgacgacaccatcccgtcctcctcttttttttttctcggccggggggtgcttccaccaaccccccggctggtggtaccccccccccccctctcggtgggtggtattccctccctcccccccctcccccccaccccccccgttttttttttttttttctctttgactcccctctttttccccccccccctctggggcccca

SEQ ID NO: 637446 - DNA, 1095 bp, Homo sapiens
gtcgagggtttcctgcttcaacagtgcttggacggaacccggagctcgttccccaccccgggcggatcgaccatagaccagccctccctcacctcttcaccgcaccctcgtgactgccccaaggcccccgacctgacgtccagcgccgcgcagccaccgccgccgtcgccgcctctccttagtcgccgccatgacgacctggtccacctcgcaagagtgcgcaagaactaccaccaggactcagaggccggcatcaaccgccagatcaacctggagcctctacgcctcctaccgttttacctgtccatgatcttactactttgaccgcgcatgactgtggctactgaagaacttttgccgagaatacgttacttcaccacactctcatgaggagagggaacatgctgagcaaacctgacgacggctgcagacaaccaccgaggctggccggaatcttcccttcagcgatatcaaggaacaccagactgtgatgcactgcggcagagcgcgctgaatgccacaggagtgtgcatgacactaggacaacacactgtgcacatcagtcacaaagctggcaactgcacccacactgcgccaccttgcacccactaattgaaccccacgacataaggtgaccgactcttcgagttgcacgaaaaccatatagccagtgacactgacacaaggctgtaaaaaccgaatcacaaaaaatatggcggatgacccaaaggataaacgccgaaccatggagaccaaagaatcggcaggcgacaacgcaaacactgcgcattggacaagggagacgcaactcccccctatggaccagaccacacacaaccccatgcggaaccacacggccgactcacttgaaagatgagataacgggcccccgggcgagaaaaaagcggccgcagcaagcccagccgagacgacgcaccgcacaaaaccaacacaacacccagccaacgcgaccacgcgccccgcccgctaagccgacgcgcaatcaggcctaacaacaagacacaccgagcgacgcacagctacccacggcaaccaagccgacatgagggaaaaggatcgaacaaagcggccaaa

SEQ ID NO: 637447 - DNA, 186 bp, Homo sapiens
cgtgcagtagcatggtgtcaatgcgtgcacatctggctctcccaggcaagcgccgccacctgtgtcaggtcaggcatagtagtcgttgcggaccacaatctgcagccagcgactgcgcatctcagcgttcatcgagtccagcagggaaggagtagcacttggacaggctcatcaccacctcctgcg

SEQ ID NO: 637448 - DNA, 276 bp, Homo sapiens
ctctgaggattcctggcaggtggaaatcaggagggtgacatgaccagcagacaaatcttttttttttggaggcggagttctcgctctgtcacccaggcgtgattgcagtggcacgatctcggctcactgcaggctccacctccggggttcacgcctttcttctgcctcagcctctcgagtagctggaactacaggcccccgtaaccacgcccagcttatttttttggtatttttaagtagagattggggtttcaccggtgttagccaggagtgccc

SEQ ID NO: 637449 - DNA, 948 bp, Homo sapiens
  misc_feature (379)..(379): n is a, c, g, or t
ctttttttttcttcttttcttttggaggtgaggaggagaagagaacacaggggaggggcacgccgagcgccgaccctgttggggagttgtgccctcctctctggcctggcccacgcttctctcccccacattgtgttgcgccggcgcggcctctttatcttctctcctatgcctattccccttcctcgcctgactgcacctttggaggctccaaatatagacgccttgtcgctccccgaggctccagccctttgagtaggccctctcgttccgacagggcggacacttgcgctccaaacttcgggcgcgggagcctggcctcccccaggcccccccctttctggttgctctttgctttccccgttaagctttgcccacncgaggctctccctgccggatagagttactgtcacgccagccacctccaatttgccctagctggctggtggaagagatttgtggtgaaccagaagagtgctctcccaagctctaatttcccgggctttaaactacccctgagtgtggttgccccccaggattaatagttagagaaaatccaccatgccagcctcattttaagagaaatagagttccaaagactgcccgcgtccagctttgatgggaccaccagcttattttggaagttcgaaggggctgtcgtgtgtgtggccctgatcttcgcttgtcttgtcatcattcgtcagcgaccattggaccagcaaggctctggaaaaggtgcccggaagccaaatcgagtgcccataatagctaccattccacccctgtatcctgggttttagagacacctatttccagaccacatgtaaaatgataatggactgatattgcactcttggttctttggagacccttgtggtggaatccccctttccccctacttttttttttccagatccattaatgagccagaataaaaagagtaaaatg

SEQ ID NO: 637450 - DNA, 102 bp, Homo sapiens
gatattatcggcttgatagcacaaaaacaaggccgacatcccaaatgtgcgtatttaaaattccaagaattaggattcttggggtgcatgccctgctagacc

SEQ ID NO: 637451 - DNA, 253 bp, Homo sapiens
atgagagatatgggtcagtttcatgtagtagtgtggtggagtgagtgcttagtcctgagttctaattagatgcactgtggtctgagggactgttgttatgatttccaatctttgcatttgctgaggagtgtttgaattccaattatgtggtcaattttagaataagtgcaatgtattgctaagaagaatgtatattctattgatctggggtgaatagttctgcaaatgcccattaggtttgcttgttccgctg

SEQ ID NO: 637452 - DNA, 236 bp, Homo sapiens
tcccctctacgcgagacagggagagcttaaagggctcgggagctccctcggcacacataaatcggcgcggcgatgccagcgcccccccggcgccctctatttccagcttcagcactcgcaggtctttacagcacagggtgatggtgcccgagtcactcgcaaccctggagagggacgttccttcccaggagaggggcaacgagtttcccggattgggcttacgcaggagggcgcca

SEQ ID NO: 637453 - DNA, 273 bp, Homo sapiens
gggttaagctgaagaataaatagatctgagctttccgggtatttgtgtgtcctcttatagacgtccaaagtgcgttcaggcctctcaaacatgcttctttcccactcacaagcatatttagtcagttatctaacccctggtaaatgaggctactacataggcccagttaacaaactcctcttctcctcgggtaggccatgatacaagtggaactcatcaaataatttaaacccaaggcgataacaacgctatttccaatctgtcaatcataat

SEQ ID NO: 637454 - DNA, 131 bp, Homo sapiens
tgtctgtcactgaccaaagtccacgaatgggtcaggtggacagtggggcagaagctcgggttcggctctttaagatggtaatgcttcataccaagtttcgcaaagtagcctgaagggtcccgtcgaagtgg

SEQ ID NO: 637455 - DNA, 263 bp, Homo sapiens
  misc_feature (248)..(248): n is a, c, g, or t
gacttggcatgctttgatctacgtaggaatgcagaatgctcagctggaacaggaaagacctgggagtgcaacagacctggatttatagtcctggctctctatattagagacttgcttagtaatttcagaagaatcatttcacacgttaagactcaagtgctggatttgtcttctaaagagcggaaattgacatttgtgctttattaacctcacattattgatttgaccattgactcaggagaagctcntaacagctattgcaa

SEQ ID NO: 637456 - DNA, 227 bp, Homo sapiens
ggacaacatagtgagatccccctctctacacacacacacacacacaatttaaaattagccatgttctgcattgagaaaaatgaaaatgaagtatagaaattaaaaaaaatagctgggcatagtggtcacgcctgtggtccatgcatctgggaggctaggcaggaggatcacttgagcttggagttcaaggctacagtagctataatagcacactcactaagtctggg

SEQ ID NO: 637457 - DNA, 320 bp, Homo sapiens
gttttcttagaaactacatctttatgcaaaatgaggtataattatactaattttggctgtgcaaggtgtctcaggcctttattccctgcactttgggatactgaggcaggtgtatcacctgtgggtcgtgagctcatgaccagcctggccaatatgtgtataaccctatttctactaataatacaaaagttagcctcctgagttgctgggattgcagcgtcctctaccacaactggcttgtttttacatttttagtagagacgggggatattgctatgttggcctgtcttgtcttgagcttctgacctctgttgattgcc

SEQ ID NO: 637458 - DNA, 180 bp, Homo sapiens
actcgcgtggttcttgcagaataatggtaaggacaataatagccaccatttactgaagatgtcctccgtgcagtctctggtccaagaatactgcacaaattatcacatttaatcttcacaataagagtttatttatgatgccatttcacagatgaagaaactaaagcatgggcagaactt

SEQ ID NO: 637459 - DNA, 780 bp, Homo sapiens
  misc_feature (490)..(490): n is a, c, g, or t
  misc_feature (661)..(661): n is a, c, g, or t
  misc_feature (690)..(690): n is a, c, g, or t
tctccctccggagaacagcgtgcatgggggattttggagtgtaggaagactagttgactcattgaagcagatcactgcttccttttatttttataggaatagaggaagaaaggtcacatgcgtgcccagctcttcatcccacaatgtcttggtggggaggggtgtacctaaatatatatcatatccttgccctcgagtgctagctagagagaaagagaactactaagggaaataatattatttaaactcgctcctatagtgtctttgtgagacgtgtcaccgtatctcaggatgtgcagccacttgtctggaacacacccctgctcacatacagagtgacggagtccacactgtcaccttgtggtcgcctgagaccctgtgacaccccgcgccccccgcgcccctctttttccccttgatggaaattgaccatacaatttcatgctccttcacgggatcacaaagacgcagtgtggggacagagactctnattaggacacagtggtttccaacgctgtctatagatttaggagcacaaatgcgacgtgctgcatgacctaccagcacagaacttttcccaattacacggtgactcacagacacattggtgactcactttatgtgtcgttatcagctgctgtgtgtgagcagagcacacccnatgcaggggtgggttgacagacacacccncataggattaactaccttagtatatttgagacccaccaccacaaggagggcgcactgggtgtatccactttcggaggcgagcggaggttc

SEQ ID NO: 637460 - DNA, 397 bp, Homo sapiens
aaccgagctcttacccgtcctacatagtgttgcccatggttttcaacagtaaattcaatcctcctacacccatctttctacattatttccacagaagtcaccaagcctctgcatacttattttcttcagcctagtggaagtagcttccaataccaaccttttggtattcttttcctattcttaaatctacagcttctacaagcatgtcatacatatataaatttgcctttctttgggaggccaaggcggatcacctgaggtcaggagttagagaccagcctgaccaatatgatgaaaccccgcctctactaaaaatacaaaaattagccaggcatggtggcatgcgcctgtaatcccagctacgcaggaggctgagacagaagaatcacttgaacct

SEQ ID NO: 637461 - DNA, 183 bp, Homo sapiens
cgacaccaagtttatagaagaaaaaagaaacactagcctcattatccccagccatcatagccaccatcaccctgccttaaacgtctacttactacctacgcctaatctacaccacctacactcacactactcccgcatatctaaacaacgtaaacactagaatgacagttatgaacaatacaa

SEQ ID NO: 637462 - DNA, 191 bp, Homo sapiens
  misc_feature (42)..(42): n is a, c, g, or t
  misc_feature (45)..(45): n is a, c, g, or t
  misc_feature (50)..(50): n is a, c, g, or t
  misc_feature (53)..(53): n is a, c, g, or t
  misc_feature (63)..(63): n is a, c, g, or t
agcgcaaagtgaaaaccacaagttacagagcaactaagaaantgnctagncantttcttagtntacatgtttgaaatgggaaaggtgactgactgcctttcaccagagtcttagctgtttcacgttcacattttcactctgtatatggaagaatttctcacttcacctgaatgatttactttcattcctat

SEQ ID NO: 637463 - DNA, 736 bp, Homo sapiens
gactgtgagggaaaacaaataagtgtttttaaatctgctcccagaaaaataaagaaatcattttttgcctagccaaggctatggtacaaacctcttatgcccctcatcccaggaatgtgttcggctattgggcttttataggcagggtagattccaagcagggaggtcagcaccctggttaaacatgggtggttacgaccaacctccctgagcaatccacttcatggaacagggctcacgtcaggcatatgcctcctcaggtcaagcgtctaaacaaattatatctgaataaagatgggtttagacaggtttacgtcctcaggttttctctcgacattattataaagttcgcccagggggcttcttaaacatgagaggcaggaaaatattcataagccggtttggtcgcgtgaaaggtatcacagtaagatcaaacaggctggagtttgaattacgtccaaatatcttgttatagaataccggctctgtgtaagaacggaagtatgtaaagcctcatcctaggaaggagcaagcacctctgcaaggtccagtatgattctcctggtggtgtatgcaacattgtaaagagtcgtaggtcaatatttgggctagcacctctcattgttgtctggcactattgtggacacgtctgttaactgctgactatacacactatcgctatgtagtattttatcgccatgtgtcagcactaagtttttcgattgcgcgctactaa

SEQ ID NO: 637464 - DNA, 300 bp, Homo sapiens
acaataccataatttaatcacttaaaatcttactcaaaactaaatcaatgatcttttaggccaggtgtggtggctcatgatagtaatcacagtactttgggaggccaaggcaggaggatcacttgaggtcaggagttcaagaccagcatggccaacacaatgaaaatccatctctactaaaaatacaaaaattagccaggctaatggcacactcctgtaataccagctacttaggaggctgaggcaggagaatccttagagtcccacctgggcaacacagttgacaccttgtctcagcga

SEQ ID NO: 637465 - DNA, 411 bp, Homo sapiens
atcacctgtaaaacagcggatgtatagattacacctccatgtaagatgtcttccaacgctcgcagaccaaggtaaccttaggtttgataagcagacagaaggtttcccctcccgcaggtagttggacaaacactgcggtgtctttcatatgacagcccgcagatgtctctggcccacacgtatgccacgcatgttgaatagagcaatcaaagtgcatagaagtagagtgttaataacggggggtgcaagcaccaactcatgatgtgtgagtgctcggagctccgaccctttcggcctctgtgtcaggttggggaaacacctgaacggggagctccgagcttgtgcgcatgtcagggcacacgacagttgctaatacagtccagagtgcacaatgcctctcgcaactcgttc

SEQ ID NO: 637466 - DNA, 146 bp, Homo sapiens
cacgaggggaagacaaaccatcgacatgagaccggagagggacagccaccatcacgaccctcgacacgctcaacgttcgctcaaacaccgacaggcactgtttatgaggccctcttttaatgccggtcagtgtaaaattcttgtgg

SEQ ID NO: 637467 - DNA, 325 bp, Homo sapiens
cattccagaactaatcagttcatatagttcttagttacaccctgtgtgaagttgtgtctccacaaccttgtgaggttctgctctggtccatccaggacttgaatcatccctttgtcaagcatatccacactgtctacactacatgcctgttagtgacttagtagccatctagatcaaaaaaacatagaacataaaggatttggtaatatctgaggtttcaggcatccacaggggtcttcgaacttatcccccatggataaggggggactactgtacaagaagaatggatttgaacttcagactggttggacacgaatgttcaggc

SEQ ID NO: 637468 - DNA, 213 bp, Homo sapiens
ccgtgttatacatacgtattgatcgtcatgccttctgcagctgtaggaatacttctggtagggcactgtgcggaaactagaggatgaaatcagtgagctgcatgcacttgaacggcgtaggcctgtctcctcacttgagtagcaaggtccatcgtaccaaagccctgtaactagatcaatcactcatagtacagaccagggggcatcctacta

SEQ ID NO: 637469 - DNA, 194 bp, Homo sapiens
cggccttcccaaagtgctagaattattcatgagccaccacacctggcttggtaaatgtttcatgtgcccttgacacgaatgtgtattaagcccaagagtttgagaccagcctgggtaacatggcgaaactctgtctccacaaaaaatataaaaattggttggatgtgatggcatgtgcctgtaatgccagctac

SEQ ID NO: 637470 - DNA, 444 bp, Homo sapiens
cccagcaactaaaacaggtcaacaacatcactaaatgttggttgaataaaagagtaacaagaataattgaaagctttttttcttcctatataaagcatgaagactgtcattgtttctctaggaaatgtatgaattctaacctttgtgacttgaagaaaaacattcttttgttacagagatttggactttgatgataggttttaaaaatatttgataaatattttttgtacttgtttgatattttctttaaagactttacttcagaaagggaaagactgtttagaaagaatgcatattttttccctatttatttctggggttactgcttatggagttcaacagtgtttgtatttgatatttgtatatgtttgattgctatctttaaagcgccttataagatttatggctctgtgctattactttttgagctttgcaagttgtgta

SEQ ID NO: 637471 - DNA, 599 bp, Homo sapiens
ggaggcacttgaggagccaagtttcttcaccactggcgtgatgtggtccattggtgcaggagccctgggtggtctggtgccttggcgaatgcgtgcttgcgcgaacacagacgtgttgctgtccaagccccagaaagcggtgcctgtgagtacctggacggatatatgacctgagaaatcactggacgaatggaaccaacggagctttcaaagcgaaggagctatgggaagaaaacatggatgctgtgacttagtggctcgtgcggagggcacggttggttcctctgtcgagatggaagctgcggactctgtcctccctgagtagagcagtgttggaccagttgggcgtccccctctatgcagtggtaagggagcacatcaggactgaaggtgaatggatttcggcagctcttatttgcaagaggagaaatcttcctgtgatgaaaaggaaaaagttctatggtgccacaaaggcggaagatgatgtttatgggatttactccgtctggtgagtgtggtacagattcttacgaggctgtgacggcggcttctttggagatctgaaaggagaaggttcatacttggaggagtctgaggtg

SEQ ID NO: 637472 - DNA, 722 bp, Homo sapiens
cagaggttgaggtgagagaattgcttgacccagaagtgggaggctacagtgagttattattgcagcattgtactctggcctgggcaacagagtgagaccttgtctcttaaaaaaaaaatgttttaggccaggcgtggtggctcacatctgtaatctcagcactttgggaggctgaggcgggcggatcacaaggtcaggagttcaaaaccagcctgaccaacatgctgaaaccctgtctctactaaaaatacataaactagctgagcatggtggcgtgtgcccgtaatcccagctactcagaaggctgaggcaggagaatggcttgaactcgggaggcagaggctgcagtgagctgagattgcaccactgcactccagccagggcaactgagcgagactccatgtgaaaaaaaaatgtttttaaaaattaggaaaaatccagcctgggcaacatggtgaagctcagtctctacaaaaaatacaaaaatcagctgggcatggtggcgtgtgcctgtagtcccagccactcgggaggctgaaggtgggaggatcacctgagcctggggaggatgagactgcagtgagccatgattgtaccactgtaccccagcctgggtgacagagtgagaccccccgtcctcaaaaacaaaagcaaacaaagcaaaaaaacacagacttaagggggaaagaccttgcgcaggaagactaacagatagatacaac

SEQ ID NO: 637473 - DNA, 1021 bp, Homo sapiens
  misc_feature (474)..(474): n is a, c, g, or t
agcgggtgtcgtcgctatcgagctccccgcttgccctgggctctgctggctggcatccggcccggcggcagacgcgggacagcccttctgcaggtctgcggggccgaggtgtcccggctggtgcacctcgtggcgagaaatcgggagacagggcggaataactaacaacggataggccccaagcgaacttaaggggacttccaacatggagaaaacgaacgcagggacagcaggtcctcaggcaagtgggaacagagttggcccaaacagagaaacacaatggcaggacaagagggacaccaaaggttgcgttaattaagagggggttagccgccttgaggggcgtcacgcgttatgggactggccttgggctgaattaccttggtggtttgcctaaggaggcaaagccgtgacaggcagggttcccggcgtttaaggcagccactatatcttggcgaggaataaggactgggnattattggaccggtcattaggggccttgagcgagagaaccaccagggtcaacgggatggtagaagtaacgaaggaaagtaatgggggaacagggattagggggaagagaaggtggagggaacaggcttgaattgggaaaaaggcttgaagggaaaacaagaccaggggaggagtacacataagtcctgacagggggacgagttccatggtacattggagactacgcgctccttagaagctagtgggacccacttcaataggaatgaacgtttgtatgccgtataattggctcgcgttgcacatttccttggaatgggtttatcccctgaacaggtttatatacgggagaatcagtaccccgtgggggataaatgcgcgaaaatgtgtgagcgccattggtttgacactggaagtggaagaccccctatgggttgggtaagaaacgcttttgaaagctggtacaactttggttcaaccagtggggttcatcctaaatttacaccaacgcttcctaaatttgaaataataggagggggatgggaaacca

SEQ ID NO: 637474 - DNA, 114 bp, Homo sapiens
tcctaaagggctatctaagtttcatcacaacaattatcaatatgaaaccccgcgggcgataaccttaataccaaaggcccctgttcgtcgtgatccgtccttaattacagcgag

SEQ ID NO: 637475 - DNA, 850 bp, Homo sapiens
gtaattatgtatcctttgaccaacttcttcccatcacctactcccactcctaaccaccctatcctctggtaaccaccattttattctctacatctataagatcaatgtttttagattccatgtatgactgagatcatgcagtgtgtgtctttctgtgcatggcttatttcacttaatgaagaagacacaaataaataggaatatatcccatgttcatggattgggagaattaatattgttaaaatatccatactacccaaagtgatctacagactcaatgcaatccctattgaaatactaataatattcttcataaaaatagaaaaaaatgctaaaatttatatggaaccacaaaaggcccagaatagcccaagcaattctgagcaaaaagaacaaagctggaggcatcacattactcgatttcaaagtatactacaaagccataacaaccaaaatagcatgaaactggcataaaaatggacacatagaccaatggaagagaatagaaaacccagaaataaatccatgcatttacaagcaattgatttttggccaagatgccaagagcacacatttgggacacggacagcctctttaatacatggttgttggcaatctggatatccacaggcatagacagaaattagggccatacctctcatcatatgcacacataaactcagacatagatgaccaacttaactgtaagaaccagaaacttatacaagtctggcagcaaacaccaggggaaacccgttcgggacattggtgtaggcacagaattttctgggtaagaacgtcaaaagttacaggcaacacaaaaccaaatagaccactgtgacctttccaa

SEQ ID NO: 637476 - DNA, 144 bp, Homo sapiens
ggctgttacctcattctgctgacatctgtgcctggacggtctacctggcatccccatcagcgtcagcccccttttgattctgttgccctgcgcgtgtcttgtatgtgtgtgtgtccgtttacatcaccgcttcaagcttcaaaa

SEQ ID NO: 637477 - DNA, 894 bp, Homo sapiens
  misc_feature (97)..(97): n is a, c, g, or t
  misc_feature (104)..(104): n is a, c, g, or t
  misc_feature (112)..(112): n is a, c, g, or t
  misc_feature (121)..(121): n is a, c, g, or t
  misc_feature (136)..(136): n is a, c, g, or t
  misc_feature (167)..(167): n is a, c, g, or t
  misc_feature (194)..(194): n is a, c, g, or t
  misc_feature (293)..(293): n is a, c, g, or t
  misc_feature (301)..(301): n is a, c, g, or t
  misc_feature (385)..(385): n is a, c, g, or t
  misc_feature (393)..(394): n is a, c, g, or t
  misc_feature (396)..(396): n is a, c, g, or t
  misc_feature (409)..(409): n is a, c, g, or t
  misc_feature (437)..(437): n is a, c, g, or t
  misc_feature (450)..(450): n is a, c, g, or t
  misc_feature (452)..(453): n is a, c, g, or t
  misc_feature (455)..(455): n is a, c, g, or t
  misc_feature (489)..(489): n is a, c, g, or t
  misc_feature (507)..(507): n is a, c, g, or t
  misc_feature (523)..(523): n is a, c, g, or t
cagtaaggtccctcagagcttggtggctcaagactgtatagcctggcagagccagggtgaagggagaagctctatgagagcagtgcaggatgcccancgctgcntcagctgnctcctcgcncagctaccctttggncccattgggccctcgtctgcctctccaggantgtatgtttcaagccttgtcctgtgtncctttgtctgacgctctgtgtattgctctttgaatcgagtttggaggaagagttgagttgtatgagtggcggcatgttggtagtgccggacttcctgtnctaagttnttctggggcctcgctaattgaatgtggaacagtagcaccacttgacggctacaagtgccgactcctgaattttcccatggtgtnctgactannangggctggcagccnggagaatgggcccagggaagcaaagacntcttccctctgcngnntnctgtcccacttaactgacctcactggaggctacntcacccaaagtagatgtnagaaaacctaaattantgaaccatatttttaaagatcctattctttgcccaaacagggccctctggagcccatcctttccttccgtccttctgaaaccagatacgcccaggtgccaagcgccttgctgccacgcccgaacctcttaggagagaacgtatgactgcgtgtgtctaaacttaagccagcaggcaaacaacggtgctgtgtcctcgagaccctggcccgcgatgtaacccttcgctggagggcacttccatacactgggatctgcgggctaacagagcgttcaacacaagttacggcccgtagtcgcaaacaatggttgccgcggacatcacatggtaggactgcgtagcgagtggggtgaaaactggaggtctgcaaca

SEQ ID NO: 637478 - DNA, 1294 bp, Homo sapiens
ttttttttcaaacagtctgatttaattaggaagttaaataagttgaggtggggtggagtgtgggatcattcagaaggctgacagtgggaccgcgtggagttgtggcaatcattagcaggtgtgaggtgtggcaaggggagcaaccccctttcaagacaaggcacaacactattgggcaaggagagatgagggggtgggacctcacgtgtcaagtggacatgtgcctcagggaaggccaggtgggttacattgcaacaggaggactcattcaggcaatttcagctattgaggctgggcattctgtgagggcatgagaggcttcaaggcgtgattcttcaaagaggctttggtgtatctcacacctgtgggaagaagtgcttccacggccgtggtgaagatcttttccaaaacatcctcgtaggcaggcgacagtttaacaatgctccaaggtatattccccgagaatccacatgtgggatgtgcacccccaagtggatcccaacgtgccgatgtggaacaacacaggtggtgatctatagtggggggtgaaagttcagagggaaccacaggaatctccatcgtgacacaccggggggcaggcattcgttatagaccagggatgtgttccaaggcgtagagacaagcctcttggggtacaagcgtgggaaaggggctctcaagcacatttcatttgggcccatctgtgcatccagccattcggacctacgagaagactcagggcccccgtattgggacaaaagggcactcagagatttcccagcaaaagacatttcggtagaaaggaaacgacgggattatcttggcctacaggcgccttggaataaatgtacgcgtgggggcaacttaactctggcccattcaggatataggcaggcacacaagtatttggtagacagcctaccgaacgttcacgactgtaggcttctcccgcaacgccggggagcctcaaagattatatttttagccagcagggggagacacccgagtaccgtgagaggggcaacgtggtagggaccgcgtcacacaactggacgtgaaacgcgatgccaccagaccgggagaataaaacggggccccccacgattaagaaccgacgaaaacaggtgccgaggggggtgcaccccctactagagggcactcacaaacgacaacacaggcgtggacgacagcccacagaggagaaccacatagcggcggggccccgacacaacaacgggcaaacagcacaaaatgaagaacccaggagcataacaacgcaggagacgaaccaaag

SEQ ID NO: 637479 - DNA, 1229 bp, Homo sapiens
ggaggacacggctccagggcggcgcggcccaggcgcaggcgcgggtgtcggtcccaccgcgcgtcgtcctcgccccggccccggccaatcccttcgaatttggccgaggccgggaaatactagctaatcacggcgcgcgctgttgacgccggccaatgggagctccggaaggctgcgtggagacgccagcggcgggcggtggacagtcatggcggcccggcgcggggctctcatagtgctggagggcgtggaccgcgccgggaagagcacgcagagccgcaagctggtggaagcgctgtgcgccgcgggccaccgcgccgaactgctccggttcccggaaagatcaactgaaatcggcaaacttctgagttcctacttgcaaaagaaaagtgacgtggaggatcactcggtgcacctgcttttttctgcaaatcgctgggaacaagtgccgttaattaaggaaaagttgagccagggcgtgaccctcgtcgtggacagatacgcattttctggtgtggccttcaccggtgccaaggagaatttttccctagactggtgtaaacagccagacgtgggccttcccaaacccgacctggtcctgttcctccagttacagctggcggatgctgccaagcggggagcgtttggccatgagcgctatgagaacggggctttccaggagcgggcgctccggtgtttccaccagctcatgaaagacacgactttgaactggaagatggtggatgcttccaaaagcatcgaagctgtccatgaggacatccgcgtgctctctgaggacgccatccgcactgccacagagaagccgctgggggagctatggaagtgacccaaggctgcccactggagacgcctctccctgcagtcccccgagaggtgggagactcgcggaaggccccgtccccagcggagtccagaccccacaacttcaggagctctttcccggcagcagagatctgcaggctgcctcttctgccccggagctggggtgcactggggacccccgtggtggggaccttggcagtgtggacatgagcagagcgatggagcagtctcctgccctctcccctgtcctgatggcactctgttgtattttcttactgaagttcagtgataactctgagcagtttcattgtgatcactgtaaatggtaatcagttggaattctcctaaatgtcttccagacactagtaaaaaacgacctgaaaatt

SEQ ID NO: 637480 - DNA, 968 bp, Homo sapiens
gaccgctcattggctactcgtctctgtgtcttgtacattcgtgttggggagcggatcagaattcgagagctgacttgtgcgcgtcatccggacggggcctttgaatgataatttgcgtattggatgcttctgggtcaatatcttatcgtgaccatacgtctctagtgtcacatgttacgcaagggcacaacacgggttgcgtgcggtaagtccctcgtccttagggaagtcgcaccattttactccgcagtaattttgggcgtgtcagttgatgacgttcgtaggcatggccgggtcgatgtctgctcatcgacgttagccccactattgatacaccctcgtaggtgcgtcctgaaggtctaagtgtctagttgagagcacgttatttgttggaatcgcggaatcacgtgtccttatgttgagcagggatgtcgacgaatatctaggtcgaggagttcgtactagatgcgcgcgtactacggtagtggacctaccaagccgcttttggtggctccatgtcaatcccacacagatttagagcacctggaatccatcctgtcatggcaattgagaaaaaccaggcctgcagtgttcagagggggtaataccgccatgctgcttttatgccgtgaaactgtcgacagtgatataccgggctgtgcctgtcctgatcaggaatacttacggtggcagggacctggttcgagagggaaccaccaggctcggggacttcctgagaagctccgtcgcggcacgagggacgcgcagcgttccatgcacgatgggtgaccgctgacaacttctcagggaggggtcacggtgcgctggcagtggaaatgtccgagaggccggtgccgccgaacaccagggatgggcgccttacggggccggcagcaggttagagaccgcccgacagagacaaatcaagcggccgaacctggagaaaaaaacggtgggcaacacaagcg

SEQ ID NO: 637481 - DNA, 1429 bp, Homo sapiens
  misc_feature (1246)..(1247): n is a, c, g, or t
  misc_feature (1250)..(1251): n is a, c, g, or t
  misc_feature (1256)..(1256): n is a, c, g, or t
  misc_feature (1265)..(1265): n is a, c, g, or t
  misc_feature (1269)..(1269): n is a, c, g, or t
  misc_feature (1271)..(1271): n is a, c, g, or t
ggaggacacggctccagggcggcgcggcccaggcgcaggcgcgggtgtcggtcccaccgcgcgtcgtcctcgccccggccccggccaatcccttcgaatttggccgaggccgggaaatactagctaatcacggcgcgcgctgttgacgccggccaatgggagctccggaaggctgcgtggagacgccagcggcgggcggtggacagtcatggcggcccggcgcggggctctcatagtgctggagggcgtggaccgcgccgggaagagcacgcagagccgcaagctggtggaagcgctgtgcgccgcgggccaccgcgccgaactgctccggttcccggaaagatcaactgaaatcggcaaacttctgagttcctacttgcaaaagaaaagtgacgtggaggatcactcggtgcacctgcttttttctgcaaatcgctgggaacaagtgccgttaattaaggaaaagttgagccagggcgtgaccctcgtcgtggacagatacgcattttctggtgtggccttcaccggtgccaaggagaatttttccctagactggtgtaaacagccagacgtgggccttcccaaacccgacctggtcctgttcctccagttacagctggcggatgctgccaagcggggagcgtttggccatgagcgctatgagaacggggctttccaggagcgggcgctccggtgtttccaccagctcatgaaagacacgactttgaactggaagatggtggatgcttccaaaagcatcgaagctgtccatgaggacatccgcgtgctctctgaggacgccatccgcactgccacagagaagccgctgggggagctatggaagtgacccaaggctgcccactggagacgcctctccctgcagtcccccgagaggtgggagactcgcggaaggccccgtccccagcggagtccagaccccacaacttcaggagctctttcccggcagcagagatctgcaggctgcctcttctgccccggagctggggtgcactggggacccccgtggtggggaccttggcagtgtggacatgagcagagcgatggagcagtctcctgccctctcccctgtcctgatggcactctgttgtattttcttactgaagttcagtgataactctgagcagtttcattgtgatcactgtaaatggtaatcagttggaattctcctaaatgtcttccagacactagtaaaaaacgacctgaaaattgaaaaaaaaacccgggnnttnnggggnggaaaaagnaagngntggccttgggaagtcttccctgcccccttctgaacgggggaatccggcccctagggggggaaattccagccggcatctgcacgagaatcaacagaagtatgaacgagctaacaaccgcacagggggggcccattagccccgaatcacatataagcacg

SEQ ID NO: 637482 - DNA, 1192 bp, Homo sapiens
ggaggacacggctccagggcggcgcggcccaggcgcaggcgcgggtgtcggtcccaccgcgcgtcgtcctcgccccggccccggccaatcccttcgaatttggccgaggccgggaaatactagctaatcacggcgcgcgctgttgacgccggccaatgggagctccggaaggctgcgtggagacgccagcggcgggcggtggacagtcatggcggcccggcgcggggctctcatagtgctggagggcgtggaccgcgccgggaagagcacgcagagccgcaagctggtggaagcgctgtgcgccgcgggccaccgcgccgaactgctccggttcccggaaagatcaactgaaatcggcaaacttctgagttcctacttgcaaaagaaaagtgacgtggaggatcactcgggccgttaattaaggaaaagttgagccagggcgtgaccctcgtcgtggacagatacgcattttctggtgtggccttcaccggtgccaaggagaatttttccctagactggtgtaaacagccagacgtgggccttcccaaacccgacctggtcctgttcctccagttacagctggcggatgctgccaagcggggagcgtttggccatgagcgctatgagaacggggctttccaggagcgggcgctccggtgtttccaccagctcatgaaagacacgactttgaactggaagatggtggatgcttccaaaagcatcgaagctgtccatgaggacatccgcgtgctctctgaggacgccatccgcactgccacagagaagccgctgggggagctatggaagtgacccaaggctgcccactggagacgcctctccctgcagtcccccgagaggtgggagactcgcggaaggccccgtccccagcggagtccagaccccacaacttcaggagctctttcccggcagcagagatctgcaggctgcctcttctgccccggagctggggtgcactggggacccccgtggtggggaccttggcagtgtggacatgagcagagcgatggagcagtctcctgccctctcccctgtcctgatggcactctgttgtattttcttactgaagttcagtgataactctgagcagtttcattgtgatcactgtaaatggtaatcagttggaattctcctaaatgtcttccagacactagtaaaaaacgacctgaaaatt

SEQ ID NO: 637483 - DNA, 1172 bp, Homo sapiens
ggaggacacggctccagggcggcgcggcccaggcgcaggcgcgggtgtcggtcccaccgcgcgtcgtcctcgccccggccccggccaatcccttcgaatttggccgaggccgggaaatactagctaatcacggcgcgcgctgttgacgccggccaatgggagctccggaaggctgcgtggagacgccagcggcgggcggtggacagtcatggcggcccggcgcggggctctcatagtgctggagggcgtggaccgcgccgggaagagcacgcagagccgcaagctggtggaagcgctgtgcgccgcgggccaccgcgccgaactgctccggttcccggaaagatcaactgaaatcggcaaacttctgagttcctacttgcaaaagaaaagtgacgtggaggatcactcggtgcacctgcttttttctgcaaatcgctgggaacaagttaggtttcctcttcattcaacacttaatgttgagaatttttccctagactggtgtaaacagccagacgtgggccttcccaaacccgacctggtcctgttcctccagttacagctggcggatgctgccaagcggggagcgtttggccatgagcgctatgagaacggggctttccaggagcgggcgctccggtgtttccaccagctcatgaaagacacgactttgaactggaagatggtggatgcttccaaaagcatcgaagctgtccatgaggacatccgcgtgctctctgaggacgccatccgcactgccacagagaagccgctgggggagctatggaagtgacccaaggctgcccactggagacgcctctccctgcagtcccccgagaggtgggagactcgcggaaggccccgtccccagcggagtccagaccccacaacttcaggagctctttcccggcagcagagatctgcaggctgcctcttctgccccggagctggggtgcactggggacccccgtggtggggaccttggcagtgtggacatgagcagagcgatggagcagtctcctgccctctcccctgtcctgatggcactctgttgtattttcttactgaagttcagtgataactctgagcagtttcattgtgatcactgtaaatggtaatcagttggaattctcctaaatgtcttccagacactagtaaaaaacgacctgaaaatt

SEQ ID NO: 637484 - DNA, 1157 bp, Homo sapiens
ggaggacacggctccagggcggcgcggcccaggcgcaggcgcgggtgtcggtcccaccgcgcgtcgtcctcgccccggccccggccaatcccttcgaatttggccgaggccgggaaatactagctaatcacggcgcgcgctgttgacgccggccaatgggagctccggaaggctgcgtggagacgccagcggcgggcggtggacagtcatggcggcccggcgcggggctctcatagtgctggagggcgtggaccgcgccgggaagagcacgcagagccgcaagctggtggaagcgctgtgcgccgcgggccaccgcgccgaactgctccggttcccggaaagatcaactgaaatcggcaaacttctgagttcctacttgcaaaagaaaagtgacgtggaggatcactcggtgcacctgcttttttctgcaaatcgctgggaacaagtgccgttaattaaggaaaagttgagccagggcgtgaccctcgtcgtggacagatacgcattttctggtgtggccttcaccggtgccaaggagttacagctggcggatgctgccaagcggggagcgtttggccatgagcgctatgagaacggggctttccaggagcgggcgctccggtgtttccaccagctcatgaaagacacgactttgaactggaagatggtggatgcttccaaaagcatcgaagctgtccatgaggacatccgcgtgctctctgaggacgccatccgcactgccacagagaagccgctgggggagctatggaagtgacccaaggctgcccactggagacgcctctccctgcagtcccccgagaggtgggagactcgcggaaggccccgtccccagcggagtccagaccccacaacttcaggagctctttcccggcagcagagatctgcaggctgcctcttctgccccggagctggggtgcactggggacccccgtggtggggaccttggcagtgtggacatgagcagagcgatggagcagtctcctgccctctcccctgtcctgatggcactctgttgtattttcttactgaagttcagtgataactctgagcagtttcattgtgatcactgtaaatggtaatcagttggaattctcctaaatgtcttccagacactagtaaaaaacgacctgaaaatt

SEQ ID NO: 637485 - DNA, 1259 bp, Homo sapiens
  misc_feature (1193)..(1194): n is a, c, g, or t
  misc_feature (1197)..(1197): n is a, c, g, or t
  misc_feature (1199)..(1199): n is a, c, g, or t
  misc_feature (1223)..(1223): n is a, c, g, or t
ggaggacacggctccagggcggcgcggcccaggcgcaggcgcgggtgtcggtcccaccgcgcgtcgtcctcgccccggccccggccaatcccttcgaatttggccgaggccgggaaatactagctaatcacggcgcgcgctgttgacgccggccaatgggagctccggaaggctgcgtggagacgccagcggcgggcggtggacagtcatggcggcccggcgcggggctctcatagtgctggagggcgtggaccgcgccgggaagagcacgcagagccgcaagctggtggaagcgctgtgcgccgcgggccaccgcgccgaactgctccggttcccggaaagatcaactgaaatcggcaaacttctgagttcctacttgcaaaagaaaagtgacgtggaggatcactcggtgcacctgcttttttctgcaaatcgctgggaacaagtgccgttaattaaggaaaagttgagccagggcgtgaccctcgtcgtggacagatacgcattttctggtgtggccttcaccggtgccaaggagaatttttccctagactggtgtaaacagccagacgtgggccttcccaaacccgacctggtcctgttcctccagttacagctggcggatgctgccaagcggggagcgtttggccatgagcgctatgagaacggggctttccaggagcgggcgctccggtgtttccaccagctcatgaaagacacgactttgaactggaagatggtggatgcttccaaaagcatcgaagctgtccatgaggacatccgcgtgctctctgaggacgccatccgcactgccacagagaagccgctgggggagctatggaagtgacccaaggctgcccactggagacgcctctccctgcagtcccccgagaggtgggagactcgcggaaggccccgtccccagcggagtccagaccccacaacttcaggagctctttcccggcagcagagatctgcaggctgcctcttctgccccggagctggggtgcactggggacccccgtggtggggaccttggcagtgtggacatgagcagagcgatggagcagtctcctgccctctcccctgtcctgatggcactctgttgtattttcttactgaagttcagtgataactctgagcagtttcattgtgatcactgtaaatggtaatcagtgacttgtcggtgcccnntantnaacacgtccgtctccgagggacanacattaagtatacctaggcgccctccctctttttgg

SEQ ID NO: 637486 - DNA, 1726 bp, Homo sapiens
  misc_feature (1017)..(1017): n is a, c, g, or t
  misc_feature (1066)..(1066): n is a, c, g, or t
  misc_feature (1474)..(1474): n is a, c, g, or t
  misc_feature (1542)..(1542): n is a, c, g, or t
  misc_feature (1638)..(1638): n is a, c, g, or t
tctgtatctaagactgactgctgattcgtggagactctgcgcgggttgggcgaagaccctgctggtaccatgggtaccagcgttcatccgatgagacggcctgtcacatggtccatctcttcgagatctccatccactatggacatcttgacatattaaccacgtaacaggagaccacataaagtcctcagacatgtgaccaggacgtaagttaaccagctgcgagatatggcgtgcaacgacgagtctcgggctacgagggaacctgggtgttccgcgctcggcatgctagctatagtgcgctcctcaactaacgatgcgggtagacataatgcgcgtcattcaagtaggctgattcctagcgtagcaaatacccactcactagcagcagggaaatggtccccgtatacggcacaaaaccgagtccctgtggaggatccttgcgccatttacctgactataccaactttagtactggggattgaccaaccggaccattgcatggccactcgatcggcttaccgtatcagcacacgcccttggacttatgcatccgggagcgttaccacccaacacgtgctggcgctcggcatatgtccttggatcccgttcgcacccacattgttgacaggaatcccaaaaggagtattctaccgaatacgtggggacaactctgatgcacggaaaacggaatacaaggcacgacgctgtagggggtccctccattcgacaacccctctaatttgtggccaaagctacgcaacattcctttccccagcttgcggacaagcataatcccaaagaaacagtgggccggaaacaatgttagcgcaccgaaggttaatggttcctaggaatggtgttggggtagaccatcaagaacctagggccagagcttatatatactgtcggcactctttttcaccattgcgggtgcccacaatggtacagcggacattttatttttccgagagacacagcggtgtgcgaacacgacacaaacagagtttggtgggnaaaccgcaaagagagccaacagccaaacttgtgcgggtgcacagaaggncgcgctcccaaaagcaaaaaggggagcccaccgacaccaaacggaggggtgggaaacgatgcgcacataacacggccagagagttgcgagacaccgaatcgcacagatacacaggtttccagcaaaggcccccggtggacacaccgaaggacgaacgcggaaaacggcaatgtaggcacggcccaaaaggccccactatcaagatagtcacacccgcaacatctgagtgtgataagcaccatatatatccgggttgggatcggaacaggtgggaaaacattggacgcggctgagcacaccgtttttcaccccatttccctagggcagtggtgcacaacgtgaaacacgatggggcattgcgatagcgacataaccgccaaaggagacagtgtgcaatctcagtgtggntgggggccacaccatgggccatagccgcgtagtgacagagtgctatgaagaaggcacggtctccccgnttatcttgaggagccttttgccaaattgtagcaccaggggttgagggggaaaccgcccgttctgacacccgcaccagcgcacggatccccatgtgnacggcgggctcctccactgacgaactctaatacgcaccccacgagagaggagaagcgcaaatacgcgcgcaggaggacgccacaacag

SEQ ID NO: 637487 - DNA, 1009 bp, Homo sapiens
ggaggacacggctccagggcggcgcggcccaggcgcaggcgcgggtgtcggtcccaccgcgcgtcgtcctcgccccggccccggccaatcccttcgaatttggccgaggccgggaaatactagctaatcacggcgcgcgctgttgacgccggccaatgggagctccggaaggctgcgtggagacgccagcggcgggcggtggacagtcatggcggcccggcgcggggctctcatagtgctggagggcgtggaccgcgccgggaagagcacgcagagccgcaagctggtggaagcgctgtgcgccgcgggccaccgcgccgaactgctccggttcccggaaagatcaactgaaatcggcaaacttctgagttcctacttgcaaaagaaaagtgacgtggaggatcactcggtgcacctgcttttttctgcaaatcgctgggaacaagtgccgttaattaaggaaaagttgagccagggcgtgaccctcgtcgtggacagatacgcattttctggtgtggccttcaccggtgccaaggagaatttttccctagactggtgtaaacagccagacgtgggccttcccaaacccgacctggtcctgttcctccagttacagctggcggatgctgccaagcggggagcgtttggccatgagcgctatgagaacggggctttccaggagcgggcgctccggtgtttccaccagctcatgaaagacacgactttgaactggaaggtgagaatcccagaactgcacactaggaagcgtggagaagtggctcaggatgacaccgtggtggctggcacagctcgttgtcacgccaaagctgctgccgtttccgtctgttcctcccagatgtgtgagcccggggagtagtcgttcacggagttctcgggtgccagccaaatactttttttttgggcgaccgcattctgccctgggttgcccccagggctcactcgctggcccatctccgctcactcccctctgtctgggttccttgtctct

SEQ ID NO: 637488 - DNA, 511 bp, Homo sapiens
catactgatctgatagtgacatactttcagcaatgttatccaggctaccataaaatccttggaacagcgtaggtaataggatagggaagtagcgatcccgctaaactcccattccatacctctgcatgatattcctcagccgtatgagtctaggtgagtagcagattaacaggtataatagagggattggattgtcgggagctatattaatttagagataaaataaggccagttgacagattctgtttccagcagtttaaacagcaacagtggagtgcttcagtatagtgtacctgtaaatataatttagatccgcaatcatttggtatacaatgctgtttgaagtttagtacctattggaaaaagtcttgtgtagcaggggtgcaagttaagatcttagtgatgaggactgggatggactactttatagccgttttcttggaattgggggcatggcaaatacagtagggtagtatagttctctacacagaacatgaataaatacacctgt

SEQ ID NO: 637489 - DNA, 666 bp, Homo sapiens
  misc_feature (626)..(626): n is a, c, g, or t
ggaggacacggctccagggcggcgcggcccaggcgcaggcgcgggtgtcggtcccaccgcgcgtcgtcctcgccccggccccggccaatcccttcgaatttggccgaggccgggaaatactagctaatcacggcgcgcgctgttgacgccggccaatgggagctccggaaggctgcgtggagacgccagcggcgggcggtggacagtcatggcggcccggcgcggggctctcatagtgctggagggcgtggaccgcgccgggaagagcacgcagagccgcaagctggtggaagcgctgtgcgccgcgggccaccgcgccgaactgctccggttcccggaaagatcaactgaaatcggcaaacttctgagttcctacttgcaaaagaaaagtgacgtggaggatcactcggtgcacctgcttttttctgcaaatcgctgggaacaagtgccgttaattaaggaaaagttgagccagggcgtgaccctcgtcgtggacagatacgcattttctggtgtggccttcaccggtgccaaggagaatttttccctagactggtgtaaacagccagacgtgggccttcccaaacccgacctggtcctgttcctccatttacagttgcggatgntgccaagggggagctatggaagtgacccaagttgccattg

SEQ ID NO: 637490 - DNA, 645 bp, Homo sapiens
ggaggacacggctccagggcggcgcggcccaggcgcaggcgcgggtgtcggtcccaccgcgcgtcgtcctcgccccggccccggccaatcccttcgaatttggccgaggccgggaaatactagctaatcacggcgcgcgctgttgacgccggccaatgggagctccggaaggctgcgtggagacgccagcggcgggcggtggacagtcatggcggcccggcgcggggctctcatagtgctggagggcgtggaccgcgccgggaagagcacgcagagccgcaagctggtggaagcgctgtgcgccgcgggccaccgcgccgaactgctccggttcccggaaagatcaactgaaatcggcaaacttctgagttcctacttgcaaaagaagatctgcaggctgcctcttctgccccggagctggggtgcactggggacccccgtggtggggaccttggcagtgtggacatgagcagagcgatggagcagtctcctgccctctcccctgtcctgatggcactctgttgtattttcttactgaagttcagtgataactctgagcagtttcattgtgatcactgtaaatggtaatcagttggaattctcctaaatgtcttccagacactagtaaaaaacgacctgaaaatt

SEQ ID NO: 637491 - DNA, 2460 bp, Homo sapiens
ggaggacacggctccagggcggcgcggcccaggcgcaggcgcgggtgtcggtcccaccgcgcgtcgtcctcgccccggccccggccaatcccttcgaatttggccgaggccgggaaatactagctaatcacggcgcgcgctgttgacgccggccaatgggagctccggaaggctgcgtggagacgccagcggcgggcggtggacagtcatggcggcccggcgcggggctctcatagtgctggagggcgtggaccgcgccgggaagagcacgcagagccgcaagctggtggaagcgctgtgcgccgcgggccaccgcgccgaactgctccggttcccggaaagatcaactgaaatcggcaaacttctgagttcctacttgcaaaagaaaagtgacgtggaggatcactcggtgcacctgcttttttctgcaaatcgctgggaacaagtggggagacagtctctcattctgtcacccaggctggagtgtagtggcacgatctcagctcattgcaacctctgcctcctgagttcaagcgattatcctgcctcagtctcccgagtatctgggattataggcatgcaccaccgtgcccagctaattttcatacttttagtagagacggggttttaccatgttggccaggctggtctcaaactcctgacctcaagtgatccactcatctcagcctcccaaagtgctaggattacaggcatgagccactgcacccagcctccagatgcattttcaaagatggttcatttgtagtacttttttcccccgttttttgaaagagggcgtctccctctgttgcccaggctggagtacagtggaacaagcaaagctcgctataacaactcttgggcccaagtgatcctcccgcttcagcctcccaaagtgctgggattacaggcgcgagccaccgtgcccggccacgccctcactttttaattctgccatttcttcatgtgttagcttgagtccttcccctctgaagtattacgttgtataataaggaggacaagactcatgattcctttgcttcttcctgctgtgcggatcagctgacagagccgcaggctctgtgggaggttctcgtggacgccttccctcagctcattgtgctgttgtgtgatgtgtggcctgcagtcacagcctttctggtcctacctttcctccggaaacaggacagcatttggagggagatgggatgagtaagggagggagagagggtgctggcacagccctggcaagaagggccagtggatgagactaggctggcacataacaggctctaggagtgcctgtcttcttcctgctcttccacgggagaggagaccctggcgtgtgtgtggcagaaaagacactgccaaggacctcgtgcctgtgtccggacccagctgctctgtgctgcaggcgttctaggccgggggtctccaggggttctgtacatagactgtttgctcctggccagcaggcctgtagctgcgctgggagggcctccatggggcctgggctgtgggtggcggggactggcagccgttctatctacctacttttctgtccacttgtctgtttacaaaggaaaaacaaaggtgacactggagaaaccgacacgtttgaggttctaaaaattaaacgagccacaatataaacagtctcacatcttggtacctcaccaaatgtcccctcattttttcctgtttttacgactttcgaaacaaaaacctagactacactaagctttaactgttgggttctttcttggcagaatttttccctagactggtgtaaacagccagacgtgggccttcccaaacccgacctggtcctgttcctccagttacagctggcggatgctgccaagcggggagcgtttggccatgagcgctatgagaacggggctttccaggagcgggcgctccggtgtttccaccagctcatgaaagacacgactttgaactggaagatggtggatgcttccaaaagcatcgaagctgtccatgaggacatccgcgtgctctctgaggacgccatccgcactgccacagagaagccgctgggggagctatggaagtgacccaaggctgcccactggagacgcctctccctgcagtcccccgagaggtgggagactcgcggaaggccccgtccccagcggagtccagaccccacaacttcaggagctctttcccggcagcagagatctgcaggctgcctcttctgccccggagctggggtgcactggggacccccgtggtggggaccttggcagtgtggacatgagcagagcgatggagcagtctcctgccctctcccctgtcctgatggcactctgttgtattttcttactgaagttcagtgataactctgagcagtttcattgtgatcactgtaaatggtaatcagttggaattctcctaaatgtcttccagacactagtaaaaaacgacctgaaaatt

SEQ ID NO: 637492 - DNA, 366 bp, Homo sapiens
  misc_feature (52)..(52): n is a, c, g, or t
  misc_feature (79)..(79): n is a, c, g, or t
  misc_feature (83)..(83): n is a, c, g, or t
  misc_feature (96)..(96): n is a, c, g, or t
  misc_feature (186)..(186): n is a, c, g, or t
  misc_feature (191)..(191): n is a, c, g, or t
  misc_feature (196)..(196): n is a, c, g, or t
  misc_feature (213)..(213): n is a, c, g, or t
  misc_feature (220)..(220): n is a, c, g, or t
  misc_feature (255)..(255): n is a, c, g, or t
  misc_feature (265)..(265): n is a, c, g, or t
gcccaaggggtgtttttgccccttgctttcctcagagttgggtttttaaccnaagtgccctgggccaggtcagggcctncaantgtgttgtccagnacaggagccccgagcccaatgtggcatttgaatttgaattaacttagaaattcatttcctcccctgtagtggccccctttatatttaggngctcnataancaaaagtggtcggtggntgctgtnttgggcagcccaaaaaaaaatttccctccccccanaaaggtcggntggcagccctggccaaggtgatggggtgtgctacccagtgtatgtccctgtgtagtggatggagttttctgtttgtggaataaaaacggctgtttccgtta

SEQ ID NO: 637493 - DNA, 330 bp, Homo sapiens
  misc_feature (285)..(285): n is a, c, g, or t
tcgagccggtaccagtacgacggagactctctggaacagcaacagtttatacatataatggctgctatttactagagcaccaactcagtcaggcattgtcctatgcaattaagcgtggtagtgttaatctgttggctcctttcaatctctgatgggtagagtagttatgataactatttcctgctatatttatcaatgacagtgtgaggagttaacataatctcggctacgaagctctagttctgtgtgatcgtagtcactgtcgaagcgacacagtcccagtgnctgtaaatgaccgatctttgaccacgttgactccaccatgactta

SEQ ID NO: 637494 - DNA, 148 bp, Homo sapiens
gtggtgtgttatgtgctatgtgtcatgcatgtgtatgctgcgtatgatgtggtgtgtagggtgtgtggcatatagtgtggtatttgacgcgtgtgtatggagtgtatgatgcatgtaggatgtatggcatgtggtgtgttatgtgctg

SEQ ID NO: 637495 - DNA, 321 bp, Homo sapiens
gagcgggctgggggtacagacgccctgtctgatctcatgatctggaggtgtgttgatactaaattaaaggaggatccattggatgtattggacaattggatgataagtagtatttccagcattcttctcattgccaccattctcatcaggctgctgagtataggcactgctcaggcttgcttttggattatgatccatttgaaagggaccagtgagcctgcttttgtgttccccgcttttgtgttccggaacacaaaagcgggaaggggaatacttgggcagtggtgttcccatgtactgaacgtgcttgttccatctcac

SEQ ID NO: 637496 - DNA, 313 bp, Homo sapiens
  misc_feature (37)..(37): n is a, c, g, or t
  misc_feature (53)..(54): n is a, c, g, or t
  misc_feature (180)..(180): n is a, c, g, or t
gcaggctgtgtccttggtgggcagctttatttatttntttaatgtatttattnntgagacagaatctcgctcttgcccaggctgtgcagtggcatgatctcggctcgctgcaacctccgcctcacgggttcaagcggttctgctgcctctgcctcctgagtggctgggactacaggagtncgccaccacgcctggttaattttcgtatttttggtggagaggggatttcaccatgttggccgggctggtcttgaactcgtggcctcgggtgatccgtccacctcggcctcccaaagtgctgggattacaaggt

SEQ ID NO: 637497 - DNA, 124 bp, Homo sapiens
cccctgtgaactgggtcctatgaccacagtgttggtgacacagggataggtgaaatcaggataagcaaaacagatatgcatttctagaacaatgtagttgtgtccaggctgatgtttttattat

SEQ ID NO: 637498 - DNA, 521 bp, Homo sapiens
gacacgcttttcatctgtcccgctgcgtgtttcctcttgatcgggaactcctgcttctccttggctcgaaatggaccccaatgctcctgtcgcctgtggctcctgtgcttgtgcgggtcctgcaaatgcaaagagtgcaaatgcacctcctgcaagaagagctgctgctcctgttgccctgtgggtctggtgccatgtgtgcccaggttgcatctgcaaggggacgtcagacactgtgcagcttgcttgtgcctgttgccaggacagctgtggctctccagatgtaaataagaggcaagcctatattaaacctgtattttagtttgttatatttttttgggtgtacaaccctttgaacccgttcggtgcgtttggtgggtgcaaccatcttttgtgcactatatggaaattctttggtgattgggcacacaaattttctctttagactttaggcgaaacaacacagctatctctcagacaaaacgatccaagacagaaacaacaatgtttttgttgcgggc

SEQ ID NO: 637499 - DNA, 483 bp, Homo sapiens
  misc_feature (272)..(272): n is a, c, g, or t
  misc_feature (401)..(401): n is a, c, g, or t
ccttccaacatctcatttctcctccaaatgacacctattacatataacagttttatagaaatttggaggagaatgaggttactagtatggtgtggtccatgcaaagtttttttttttttctgagacagggtctcattctgttgcctaggctggagcgtagtggcgcgatctgggctcactgcaaccaccacctcctggcccaagcgattctcgtacttcagcctccgaagtagttagattataggcatgctccaccacacctggctaatttntgtattttttgtagagacagggtttcactatgttgcctaggctggtctcgaactcctgagctcaagtgacctgcctgccttggccttccaaagtgctggcatgagccaccgcccctgaccagttcatgnaacttaatagagaagatgggacttgacttacactttgaaagatggtatggatttatataagcagaaagaaatgagatggtgg

SEQ ID NO: 637500 - DNA, 633 bp, Homo sapiens
ggggtgcacccacattttctgtcaaataattttagctctttcaccacaaggaacccaccccccaaacgtcgccttcataagaagaagctccccccgccctccgttgctccacccgctcaccttagggcagatcctcccgcctcacggggtcctcttcatccgttcgcctctcctgttgcgcaccacgcagacagagtgtgtctatcgcgccacacaatcctccctacatgtgtggtgtctcctacaccgatcgagtctttggctgagtcatggggctctcctctgacaccccccccacttgtggtgaggtcagttctttcacccacatctttctgacacgagggtactcattgttccgccccagcctccagtagaccgtggcagtagtcacactatgtcgccacaccgcggtctccgcaggtctatccccccacgggtgctgtttccacctgtggtgtccccccggtttcccactgccgacccccaccacagactttcgaccgtacgaagttttttcttcccaaaagagacccacggagtgcgggccccccccccccccccccgggggtcatactcttcccagggcggggggtggcgcccccctttttttttcacccaaaaccggggcgggga

SEQ ID NO: 637501 - DNA, 1690 bp, Homo sapiens
  misc_feature (583)..(583): n is a, c, g, or t
ttggtacgtgcgtggggacgttcatgcttctgtgtggggtgcactgtgccagcatgttgtttgtttggtccagttgcttgttgcgtaccgggtgtatcgctggattgtgtgctcgttgtgtgatctctttctcggtcgaggggtggtgtgcgccgcttgtcctgcgtgtgtggcttttgtgtctcagttcgtttttgcctcccgttgggtgtttatgtcgttgttctggtgggtggtcgtagtgttgtttgtcttgcttgggggtgctcttgtactcagccccgcttctgcctccggtgttggggagtgtttggtctctccgtgtctcgctcgtcgttgtcgtgttgccgcgacgcgtgttttgtgtggcactttgcggtcacgtgggttttgcgttctggttgtgctcccctgtgtggtgtgtggaatcagtattctggagtgctcatcttctctcgggtggtggctctcttaggcgtggttttctctggaccgatactgcattcgttgtgtgtgtgtgtgtggttgttgtgtctgctcccttgttgtggtgccgaatatctcgtctttcgtctggtcggtngggccacgtcggtgtgtggtcccctttttccttgggtggtgtgggcttcgtgtcattctcacttcgtccttaccgcagcgttctctcggggtgtacctccgcctcttcgtgtggagtggtcttcttctcgtcgatgtctgggctggttatgcggccttgctcccctcggatgtttctgctgggcgattcctctggttttcttttgattcgtctactgagtggtgtctgtggtctgctgactgtacgtggggggattttatatggttgtggtggtatctccccagacctcttttttgttgggctcccgttgctttgggtgtatgtgctgcctgttggctgcgccgctctctggtcgtgtatgatgctcctcctgatcacggggattgttgctccgcgcgcgttgtttttgtggggtggagatttcttgttgagttgcctgagggaatcctgtgtctccacttgggacatagatggctgcgtggtgcgttttaatagaccttattctctgggggcgtgtgcttggtgagaggggtttaacccgccactggttgggcccgcagaacctcctctgtgattagcgcccgcacacataatgtctttgtgtgggggttgtttctcgttcgcacatttcgctggtctctccccggatagggccctcagagatatcacggctcgcaccgcctccaaaagaggtgtcttgccctctgtgcctgtctgtggcttattggggccccgggctcttggggttctctctcctccgtgtgcgcacctgaaggccccttatgtgatgctttgtgtttcatttctctctcaccgctcctcctccgggtctcctctggtgagtggaaggcacaggctcggcacccccacacactgtgcctgtaggccccggaaccctttgccacaccggccatgcgccccagatccaggcccgttttagaaagagcttttacattgggccgcccccccgtttttggcggcgaaccactggaaagccatatactactttatgtgctgtgtttttgtatttttggaaacatttgtattttttcaagtaaggccacaaagtaacttttataagagcgtgactgtgtaataaagggttta

SEQ ID NO: 637502 - DNA, 420 bp, Homo sapiens
tgacgagggcccaagatgccgcagtctaccaaggctcttcctcctcaccagaaaatccctgggcttccacaacgtgaactcactcattgtcagtatgctgcgtggagtgtttttggcatggtgacctgtctgggcccagcatgttgcagatgtgtatttatgcgcaatggtatgcatatctctgtgtgactgtcagtgttgcaagctggctggatccaaccatctcttctgaaataatgcatccaaagggttgatattctgggggaggtcactgcagaaggatggaactgacctttattccccagtgggcagttactgagctttcctcctcagagccatgctggcagccctgggacagagaacggtgtggctttggctgcctctgcatggaatcttgccccggactcctgattagaactg

SEQ ID NO: 637503 - DNA, 119 bp, Homo sapiens
gcggtgctgctgccggatgctatagcgagctcccacaccagcacacgccggtgtggtgcagacaactggtggccgggtccgacgctcgacacttcgtaactactggtcactacgcggtt

SEQ ID NO: 637504 - DNA, 203 bp, Homo sapiens
gcaaggacaagcttttttttttttggagatggagtttcgccgttgttgcccaggtgggggtgcagtggcgcaatctcagcccattgcagcctccgcctcccagttcaagtgattctcgtgcctcagcctcccgagtagctaaaattgcgggcttgtgccaccacacccagcttatttttgtatttttttttttttaattaaag

SEQ ID NO: 637505 - DNA, 316 bp, Homo sapiens
ggtattatgtaatatatgatgtatataccaaatgatctttatcaaatctgaaaaatctggaattaccaaatatatcagaccctaagggttttgattaacaaactctagaagtctggacaacacagcatgaccccctctctacaaaaaataaagataaaaaattagctggccatagtgcctgtagtcctagctactccagaagctgaggcgggaggactgctcgagcccagaagcttgagattacatgaaccatgatcgtgccacggcagtctagcctgtgtggacagagtgagactccatttctaaaataaaaatt

SEQ ID NO: 637506 - DNA, 513 bp, Homo sapiens
ctgccgatctccgtattctgtcattacgatcgaccttgacatacagtcagtgtgaaaattatcccagaatctatagtctattgttatgattgggtgaatgggaagtttaaacctaatacagatcacatccatccagtttacagattactcctctacatgagtgtgcccgtttgatcaaggtactatcggaacacatttgcaaaacgctgttgccttggttcatagaggctctgggaaggcaaccttgggggtggagatcggctgaccaccctggaacacctgaggtgagcgacaaggtatgctcgggtctggctcttcccttacagcagtctactcatcccaaggattcaggggccatctttccatgggactataaagctgcccaggttccctcgggccatgtcctctcttaaccactttagctgaagaaggtggtaaggcctctgctttgaaaggaaattgaagctgggttgagggtggaaattggctatagtttgaccctcagatctcact

SEQ ID NO: 637507 - DNA, 273 bp, Homo sapiens
  misc_feature (29)..(29): n is a, c, g, or t
  misc_feature (84)..(84): n is a, c, g, or t
caacagaaattgtcatgatatttgtatanaaaaactaaccatcaaacaagtgggtattgaccaactatacaatctgatttctancaacaccgaaacactgattaaccatggccgtaatggaagtctgaagaactcttaaacagccatttgtctcggggccgggtgcggtgctcacgcctgtaatcctagcactttaagaggccgaggcgggcagatcacgaggtcaggagatcgagaccatcctggctaacacagtgaaatcccgtctctact

SEQ ID NO: 637508 - DNA, 266 bp, Homo sapiens
gtctagcaacgtatattcttatgatcttacataaagcttatttgaaattatatcttgtaagcttcggtctatttcaattcttacctagctgtataactaaacctggagaataacttaagtatttctataaggctttgatccatctggaattatcttaagataggaacccaattattctcgagcgacgtgtccagcaccacttattaaataatctccccattcctcattgaaccggatagcttgcccgggggtaacccggaggctcg

SEQ ID NO: 637509 - DNA, 1703 bp, Homo sapiens
tccgagggtttttcatttaacatgttctagtgggtgagagggggtcccggcgccaagagagggaggggggtgggagggtgggggcaccgcgctggcgggggacaccagcgggacacccgcgaagagacaatgtggccgcgggggcccccaaactttctctgcgtggcgcgtgcggggagagagagagggtgagtgagaagagagacaccgagagacacgcgggggcgcgggagcagcgcgggggtgtggaagagagaggcggagagcggcgagacaccgcgggcgcgtggatttctccgcgcgcgcgcacccgcgagagagagaggccccctgtcgtgagagcgctcgtgtgagcagcccactctcgtgcgtcactccacgcgcgtggtgcgcggcccctatagagaaaactctcacatctctctctctctctctcgtgtcgcgctctcgtgtgcgcgcctctctcgggtgcgcgtctcttctcctctctcgtgtgcgtcccccctctgtgtaagctattgttcccccactgtgagagagagatatacccacgagagtgagagagagagcggagtgtatacacgagagggcgcgcgatgagaccccccgaacacaccccgcgaaagatagccaccccttgaagagatgagagagaggttcacaccaagcgcgtgtgtgcgcgcgcgccacgccggtgatgagagagtggcgcgcctctcctcactagacccacatcaacaccccgaggtagtatcaccacgccctctgttggtgggggagaccatgagctgctgatgtagtagctcccccgcccaactgcggtatcctcacctcataatcactcgctcactcacctctcactgcggtgtggtgacaaacacaaacaagagagaaaaacggaggggaacaaagaacaaaaagaggcgcacacaaaaaaaaacaccgccgcagaagagggaaagaagaggaaggcgactaccaattgaaaatagaacaccaaaccaggctgggtggagcaccaacagacaacagcacaaacttgattagaaacaagcggaggaacacaaacacaaaggcagagcaccacctcgcaagaaggcacggaacacagaacagcgcaggcgcacacacacacagaagcctgtcaccccacgtgtatgagactacacaaacacaaaggaacagagcaggaatcataggacgaggtactaataccccacagcgaacaacaataagaaaaagaggggaggagcataacaataggaaagcaggcagtgatgaaagacggcacacagaagacactcagctcgtcagacagcgcccaccccccctgctctgacgcccaacagaccgggcgctgaacaggcgaaggagcgagcctccactcagcgccaaacccccacgtcgcgctagtagcgcgaacgaaatacaagtcaaacgatagaaggtaaggagcacaggcacaaccaatacccatagccagtgtaaaatacaagtagacagtgcgtcgatgcgacaaaaagaaaacaagccacgtcgcagacagacgcacgcacagcacaggcttcccacacctctgcaaacaaaaaccagcctacgcttccccccatctacaacaacttcgaaggaagacgccctccaagggctagcagccacgcgacgaacacaacaggcacccgccagacaccacacacaagacgtgg

SEQ ID NO: 637510 - DNA, 352 bp, Homo sapiens
  misc_feature (352)..(352): n is a, c, g, or t
taacagcacattgctggctgcacaagaggcaggtgagttgcatcatgcacatgctgcatggacttcactgagatgctgttaaacaccacaggagccaacctatcagaatcccagcagcagaggattgattgcaaatgcctgccatgaatgattagtaagtaattatgcatgatccatcacagcagtattgtaggcttttgaattgacccagaggatccgggaccccattacactgtctctcttgatcgtgacaatgatgcaatcagaggtcaagacaggccccatgaagtatgactgcactgcgatggacaaatgaattatcttccactgggctctgtctcatacgcagccn

SEQ ID NO: 637511 - DNA, 218 bp, Homo sapiens
gcgcttcctcctagctcctggtatttgctggtaatctttggtgttgcttggcttatggcggcacaactccaatctctgcctccatcttcacgtgaccttataaggacaccagtcattggattaaggcctgtcctaatccagtatgacctcatttgaactcgactatgtttgcaaagaccctgtttccaaataaagtcccataaacaggtaaaaaaaaa

SEQ ID NO: 637512 - DNA, 625 bp, Homo sapiens
  misc_feature (94)..(94): n is a, c, g, or t
  misc_feature (104)..(104): n is a, c, g, or t
  misc_feature (167)..(167): n is a, c, g, or t
  misc_feature (186)..(186): n is a, c, g, or t
aaaatatttttaagatttcattcaaaagcacttctttaaaataaagcccctgcctgccttagattccgtgggtcatgagccatgagtccttggnacatctgagnattgggatttctttgttcaccccgcaaaatagttaatgaatggtctgcccctggcaaaaatgngggtggggcttggggaatnatgcatgttgcagaagccggcgttttttattagcggtcttgagtaatttcccttggcaaaatcccaagttttccactctctggaccaagatcctgggagctgtcaccaagagccaggtaagtgagcagttatggcaagcactttccatgtggtgcttccgaccctggctgtcaaagtaaaatgtaaagtcagggctctgtacagttttgccatttcactgttctgctttaagcttagcttattagaactcttggtggagggtgcgtacacacattccagaaaaggcttcactcgctgggaacgtcaacccagcgagaaaggagggctagccccttctccgtggaccttatctgtggactcaggaatgatggtgtttattgcaaatgcacaatctttttcccattgaaatgtcatcacactggaaattgtcctatatgta

SEQ ID NO: 637513 - DNA, 296 bp, Homo sapiens
tgatcggccgcgggtcttgtcgaccgctaggccaccaggttcaatgtggaggctcccaggcggcccacgccggcgcttcgggatgatccggacggcgtgtggagaagcatgtagccggagctgaagacggggagccatgacagtggcgggagcgaatggagcgcgcctgtagtcgcgctgcggtaccttctggaacccaacgctgagcctcgtcatacgtctttgtgctgatgagtatgccacaagatacatgcaggcgcgacccagagcgagcctcgtctggcgtcgagtcaata

SEQ ID NO: 637514 - DNA, 553 bp, Homo sapiens
  misc_feature (2)..(2): n is a, c, g, or t
  misc_feature (88)..(88): n is a, c, g, or t
  misc_feature (107)..(107): n is a, c, g, or t
  misc_feature (122)..(122): n is a, c, g, or t
  misc_feature (139)..(139): n is a, c, g, or t
  misc_feature (160)..(160): n is a, c, g, or t
  misc_feature (162)..(162): n is a, c, g, or t
  misc_feature (166)..(166): n is a, c, g, or t
  misc_feature (173)..(173): n is a, c, g, or t
  misc_feature (176)..(176): n is a, c, g, or t
  misc_feature (179)..(179): n is a, c, g, or t
  misc_feature (434)..(434): n is a, c, g, or t
  misc_feature (439)..(439): n is a, c, g, or t
  misc_feature (442)..(443): n is a, c, g, or t
  misc_feature (460)..(463): n is a, c, g, or t
  misc_feature (481)..(481): n is a, c, g, or t
  misc_feature (503)..(503): n is a, c, g, or t
gntgggggaatgtgaatcagggcttgtaaataacttcttctgggtggcttgtcttgaggatttcattgaaaatgcccgtctcttcatntttgagactttctgtcgcnccccccagtgtttcngcattaacatgttggcngataaattggacatcaccccngnagangctgaanggnggnttgtaaatttgattagaaatgcaaaactggatgccaagattgattctaaattgggtcatgtggttatgggtaacaatgcagtctcgccctatcagcaagtgattgaaaagaccaaaagcctttcctttagaagccagatgttggccatgaatattgagaagaaacttaatcagaatagcaggtcagaggctcctaactgggcaactcaagattctggcttctactgaagaaccataaagaaaagatgaaaaaaanaactntcnnagaaagatgaaataatnnnnctattatataaagggtgncttacattttggaaacaacatnttacgtataaattttgaagaattggaataaaattgattcattttaaaaaa

SEQ ID NO: 637515 - DNA, 287 bp, Homo sapiens
ttagctgggccttccgtgcctcctggaagcagcaagattggaatgaggggaaggagggtgttctgctgggtttatgtccccctccttacttacaaccaccaccctccctgtcatgggtgccctgagccagtggtgcttgtaacctgagcaggcaaatccttcttattcatgtcccgatggtctgaccacaaaacaggcgtttgtgcctgactgaaccccacccttggtccggcgcttactaaagccggacccttcagggggtgaattttgggatacagtaagtttgt

SEQ ID NO: 637516 - DNA, 152 bp, Homo sapiens
agtatcggtctgacgtagccagatattttcgttcactgcgattcaggcgcctgaccgacatagtgccaccgatggacggggatattgtgctggtttcgcctgctccatcgcaattgcacctgataatccgagcgatggtgcggctatgttgc

SEQ ID NO: 637517 - DNA, 1364 bp, Homo sapiens
  misc_feature (160)..(160): n is a, c, g, or t
  misc_feature (301)..(301): n is a, c, g, or t
  misc_feature (336)..(336): n is a, c, g, or t
tgcccctcactttacataaactattatactagcactttaccatctcacttctaggcaatactagctatatcgctcacacctcatatcctccctactatgcctagcaacggcaatacactactattcgcctgcttcacttactaacgctactcctcacttnaacccttctaacaactccacctccacctcctctacgcccacactactctgctggccatattatggcacactaccataacgctcctctctggcccggaccattgccgcacacgctacgcccgcgcctgcgcgcctcctcagncactcataacataagcctcctccaactcctcacgnagcaccactacttgcgccctacgcacctaacgctaacactacacctaaaaccctaactccaaatgcctaacaacctaatcgtcccaacaactcatattacctacccactgacactgactttccaaaaacaacacactaactccgacctccaaccacaacccacccacagccctaactctactcagccatcatcccctcatactaatcccctaacccaaactcaacaaccaaccctatcttagcctgttccccaaacctcttccctccgaccccctaacaaacccccctccctaatacctaactacctgactccctaacccctcacaactcatggccaaggccacagccaacttaattccagctgacaaccacctactcacgacaacacacactctatacctccatctaatacctaaatctcccttacaaatttccttaacctcataaccattccaacagcccaccgtacactcatcactctctcacaacatccccctcggaacccacacttataccccacactgcgcttcccactccccgagtagcaccagccacaacgccgtcacccagccataactccaccctctaagcccgagaggggacccgccgcccaaatcactgcgccgaactcaaccacaaaaccccggcccccacaacagtcccaccccccctcaggccacgaacaatccccgcggcacacccactactcgcacccccgcaccgacgagaacctgcggcaccagctccaactctctgcccgcgtgacagacgacactgagcgcagagcccaccgccgaccccccatccatgacacccgacgaccagccatcaccatacaccacaccacccccgccgccgcgaggcagcccacccaccacccatccgacccaccaaacccaacacaccaccccgaccaccaacacacaacccacgcgccgacacgcaccccgccccacgaccacccaccaacaccagcacaacacaccacacaacccacgccgaccagcgcctcacccccaccaccgccc

SEQ ID NO: 637518 - DNA, 199 bp, Homo sapiens
  misc_feature (4)..(4): n is a, c, g, or t
aggnagatcgaggaacaatacagatccctacaagcgggccgtgtactgtatcattggcagatgtgacgttaccgacaaccagagtgaagtggcggacaaaactgaggattacctgtggctgaagttgaaccaagtgtgttttgacgacgatggcaccagctccccacaagacaggctcactctctcacagtcccaggat

SEQ ID NO: 637519 - DNA, 910 bp, Homo sapiens
  misc_feature (11)..(11): n is a, c, g, or t
  misc_feature (15)..(15): n is a, c, g, or t
  misc_feature (19)..(19): n is a, c, g, or t
  misc_feature (24)..(24): n is a, c, g, or t
  misc_feature (38)..(38): n is a, c, g, or t
  misc_feature (56)..(56): n is a, c, g, or t
  misc_feature (67)..(67): n is a, c, g, or t
  misc_feature (82)..(82): n is a, c, g, or t
  misc_feature (85)..(85): n is a, c, g, or t
  misc_feature (236)..(236): n is a, c, g, or t
  misc_feature (297)..(297): n is a, c, g, or t
  misc_feature (305)..(305): n is a, c, g, or t
  misc_feature (448)..(448): n is a, c, g, or t
  misc_feature (686)..(686): n is a, c, g, or t
  misc_feature (819)..(820): n is a, c, g, or t
  misc_feature (897)..(897): n is a, c, g, or t
tattttaaatngttngaanttttntagagccaaaaagntcttaaagaagttgtttntcccaaaaacnaagccaggttaatgncantcaattctaaatgatacattggaattgtgccttttctaccacactggattaaataaacttgtcaaaatatggttttgtcattttctgagacacttggtaatttgctgttctttctttcatgtgcccgttagtacatttggccaactgaccncctgtaacagggaggtctcatgtttgttagtagatacgcaggtaaggaaacttgaattcancctctccncggctcaggtctttgcttttcttttaatatatgcatataaaatagtaggcatttgattctgcaaaggaagtagagtagttgaattaaagattgtgtcgagagggataataccagggtttcgttttcgtgatgtgtagtaagtntgaggtccttgaaagaaataggtggagtattcaaaatttgcttgagtgaatcgaaatgtgaaaaagggaagggaagtcgatgaaagtgtgtttcctcctgatttcccatgatgtgtgtgtgtttagtattgtttaaggaatgatagatgtagaccatgttttgttgaggttcatgagattgatgttgatcggggagtagtgtgaggaaaatgtggtgtttaaaatggagtgtgagtanagtgtccagcctgggtaagtttccacgtggtgttgacaggtgtgccccatgtccgggagagtaaggggggagtgtgtggataataaaatccttcttgatgtgtgaggaaaggagttgtttggtgccctccagnnggtctggaagtgtggtgaggaagcgagttaatggtcttgtaggaagagttgtggattccacctggaggagcaggtgngggggtatgcggg

SEQ ID NO: 637520 - DNA, 287 bp, Homo sapiens
ctagagccatatactcagatataaagcacagagattcatatctattaagatttatcatatataagcagcaaatctctggtccgctgtgcttctgcaacctaaaatctttaaagggaggtaggtgtgggcaggaggaggaatgataaatagggccagggcaagaaaaatctagcttcatataattagtctgggactatacaccctatataatgtaagatttacagaagtaatcatgacttttgattgctacataccacaaagagattaatgaacagcatgggctgtat

SEQ ID NO: 637521 - DNA, 256 bp, Homo sapiens
gaacgactcatgatcattgaattgaagatgaagatcttagaaaatcagatcttcattagatggaataaaatgaatctccacgggcgctcagacatacagcagagttttgtcttgaaaaaacacagaatgaggaggcatgagtcaatttgctccaccctgactgactgtatatagactttccccagctaatgagtctgaggcggggtgacctctatcgatatggcgttttacttcactaaaacccagtcaccgctta

SEQ ID NO: 637522 - DNA, 1394 bp, Homo sapiens
  misc_feature (63)..(63): n is a, c, g, or t
  misc_feature (72)..(72): n is a, c, g, or t
  misc_feature (102)..(102): n is a, c, g, or t
  misc_feature (337)..(337): n is a, c, g, or t
  misc_feature (1027)..(1027): n is a, c, g, or t
  misc_feature (1312)..(1312): n is a, c, g, or t
  misc_feature (1316)..(1316): n is a, c, g, or t
  misc_feature (1322)..(1322): n is a, c, g, or t
  misc_feature (1325)..(1325): n is a, c, g, or t
  misc_feature (1328)..(1328): n is a, c, g, or t
  misc_feature (1364)..(1364): n is a, c, g, or t
gggtggggacggcgccctcaccgcgagtcacttgtcagcccttgtctgaggcggaggagcccncgccgcgcnggacccgagcatatttcattttctgtcatnggactttgagccattagaaccatgagcaactacagtgtgtcactggtgtggcccagctcctgtggggtttccggctgcagggcggtaaggatttcaacatgcctctgacaatctctagtctaaaagatggcggcaaggcagcccaggcaaatgtaagaataggcgatgtggttctcagcattgatggaataaatgcacaaggaatgactcatcttgaagcccagaataagattangggtggtacaggctctttgaatatgactctgcaaagagcatctgtgacccaaagcctgagccggttcctgttcaaaagaaaacacaagtgacaaataaccctggcactgtgaaaatcccacctaaaagcccaccaagaaaacacatgtgtggagcgctatacagagttttatcatgtacccactcacagtgatgccagcaagaagagactgatgtgaggatactgaagactggcgtccaaggactggaacaactcagtctcgctctttccgaatccttgcccagatcagtgggactgaacattgtgaaagaatctgaagcgataatacaaagaaggcaaggaaaaagatacccttcagtctttagtcccaaatacacaaaattacgtgactggcaccatgaagtttcagcacgtgctcttaacgtacagtgatttatgagccttgccccccaagcagccagcacataccttttcatttactttttttttttcaacttcatagcaaaatctgtattaaattggccttatgaaaaaatagaactttttctatacttttctaacaatttcctatggtggtgagaaaaggaagatgaacatgtttggtgctagtgggtagctcacaaatgtaaaaccaaaaaaaaaaaaaaattagaaatttaggggactagatctattgggggattggtatcngttgggtggggataaggggtagtaatcttgggaaaacgatttttttccaaaagtggaattggggtaagtgggtgggtggaagcagagggatattggagcaaataaaggtcctggtctaattggggcaaatacttcctttattttattatcttctcccaaggataacttttaaaggtccattattatggtaccttccaacggtggatggtaatttatcctaaataggtaatatatgggggcagataaccaaagactttttacagaagagtgggtgcttggcagatnaggnctcttnaanagnaggcctatccggaggctctatgaagaggagggaggnccaatgggctctggaaggcgagaggagatc

SEQ ID NO: 637523 - DNA, 105 bp, Homo sapiens
atcccgctgtgggtctagctctctgcaagccctggcattgatcgagtcggacctgatgcttggtgtgacctgagtaaatttgacctccctgaggaaccatctgca

SEQ ID NO: 637524 - DNA, 818 bp, Homo sapiens
gacagtgctgacactacaagggctcggagctccgggcactcagacgtcatgagttggtcctgtgcgcccccggtaattgatagttctgctagcttgctactgtctctgtttattgtgctcatctttcaagcagtggtgtatgcatagtgcttgcgtatcctagagtagcaagctgcgtggatcgttagtatgaatagattgctggtagttgattgtcgcaaccatacactgtgtgcatttgcgaagatttgcgtgtctacttagtcataatgcgaaaagtagacaagggatctggcagtctttggtaagactactcttactagtcgagaagttagataaagcaaaagcagtgcatgatagtcaagatcgggctgtataaaagcaatcctataactcgagcttgagtaatccgtgatgaatcatctaaaatcggaaatatggatagagtgcgtgttactttggaagtcgcaggacgaagatgttggaaggaaattatgaaggtatgaaagcatgcgattttaacacatgatctcaagtagttcggatagtttgcaggaaatatagtaatgtcgaggataatcaaatagattgtgtaaccgtgaagagagaaggtagcccagcttgaagacacagtgccatggcaaccttgccaaaagacacggtgcaaatccatgatatcgactgggaaccgattgtccggagacattgccaataagggagctgatacagacgcgggcttcactttaattaaacctctgaaagctaaccagcaattcttaggtctactgtgacactcgctgggtctcggaaattggatg

SEQ ID NO: 637525 - DNA, 812 bp, Homo sapiens
  misc_feature (445)..(445): n is a, c, g, or t
  misc_feature (730)..(730): n is a, c, g, or t
  misc_feature (734)..(734): n is a, c, g, or t
  misc_feature (740)..(740): n is a, c, g, or t
  misc_feature (743)..(743): n is a, c, g, or t
  misc_feature (746)..(746): n is a, c, g, or t
  misc_feature (782)..(782): n is a, c, g, or t
ctgtgcatgatggaattagtctaaaaccttataccttcatcttagtatgactcttctatcactcatatatgtgtgggaccagtgtatgtccacaggaaaaagatacccttcagtctttagtcccaaatacacaaaattacgtgactggcaccatgaagtttcagcacgtgctcttaacgtacagtgatttatgagccttgccccccaagcagccagcacataccttttcatttactttttttttttcaacttcatagcaaaatctgtattaaattggccttatgaaaaaatagaactttttctatacttttctaacaatttcctatggtggtgagaaaaggaagatgaacatgtttggtgctagtgggtagctcacaaatgtaaaaccaaaaaaaaaaaaaaattagaaatttaggggactagatctattgggggattggtatcngttgggtggggataaggggtagtaatcttgggaaaacgatttttttccaaaagtggaattggggtaagtgggtgggtggaagcagagggatattggagcaaataaaggtcctggtctaattggggcaaatacttcctttattttattatcttctcccaaggataacttttaaaggtccattattatggtaccttccaacggtggatggtaatttatcctaaataggtaatatatgggggcagataaccaaagactttttacagaagagtgggtgcttggcagatnaggnctcttnaanagnaggcctatccggaggctctatgaagaggagggaggnccaatgggctctggaaggcgagaggagatc

SEQ ID NO: 637526 - DNA, 660 bp, Homo sapiens
gagaaatgcacactaaggaaaattaaaaacaaaaaaacaaccattttgcctatagtcatctgaaatcttcacattcatacccctcgtgtctgcaaggcgaatatgaccatgtttcatccccatgtctgtgttggacacagcgtagtctcaatcagacccggtcacctccctttgctgccatttgagagctgatcgatgctggacccgctccctcctccctctctgcctagtttctcgcccctcagattaggctctgtctgtggctagcttgaggggtggccatgaggcctaaatgagggcgtatctatatggagacagcacttggcctgcggctctcccacattccctgttagtctctcacacaggcccaaaaccttgctttaaaaatgctgcctaccacgaaactttgcatcaggacgcgcccgtgaggaatttgttcttgtttaatgcccaggacgtttgcatgaaaacaggatcttccgtgcttaggaattgataacctcctgctgctgcttttccttgctgaaaggccagtcccatattgtgccaagcaaacccatcaccttgtgggatggttgggacctccccgattgaggatgttgctgctcagcctatgcacaggcatggagcggaagaataggaccattttgagagcgttgc

SEQ ID NO: 637527 - DNA, 661 bp, Homo sapiens
  misc_feature (294)..(294): n is a, c, g, or t
  misc_feature (579)..(579): n is a, c, g, or t
  misc_feature (583)..(583): n is a, c, g, or t
  misc_feature (589)..(589): n is a, c, g, or t
  misc_feature (592)..(592): n is a, c, g, or t
  misc_feature (595)..(595): n is a, c, g, or t
  misc_feature (631)..(631): n is a, c, g, or t
tcgttttccaagattactaccctaatcacaacaaaaacagatacaaatccacaaatagatctagtcacataccttttcatttactttttttttttcaacttcatagcaaaatctgtattaaattggccttatgaaaaaatagaactttttctatacttttctaacaatttcctatggtggtgagaaaaggaagatgaacatgtttggtgctagtgggtagctcacaaatgtaaaaccaaaaaaaaaaaaaaattagaaatttaggggactagatctattgggggattggtatcngttgggtggggataaggggtagtaatcttgggaaaacgatttttttccaaaagtggaattggggtaagtgggtgggtggaagcagagggatattggagcaaataaaggtcctggtctaattggggcaaatacttcctttattttattatcttctcccaaggataacttttaaaggtccattattatggtaccttccaacggtggatggtaatttatcctaaataggtaatatatgggggcagataaccaaagactttttacagaagagtgggtgcttggcagatnaggnctcttnaanagnaggcctatccggaggctctatgaagaggagggaggnccaatgggctctggaaggcgagaggagatc

SEQ ID NO: 637528 - DNA, 616 bp, Homo sapiens
  misc_feature (280)..(281): n is a, c, g, or t
ctcaactgttttgtgagtgttcaattctacagcatctacactcatccgatttgctgggttgtaatttcattttatgcatctctgcagcttttcttcttcttcacacaatattttacaaatctttttgaaatcctttctggtattgacaaaagcacgtccctttcagtccgacgacaaacacgtctgtttcatacctgcaatgcaggccacttcggctttggacttggccagttctttacacatggactcgagagctgacatgaggaatgtaccccatccnntctccgagactctcatctcaacgggagggtggcattgcacttgggccatgatccctctgaaatcccaacactttgggatgctgacgtgggagggctgcttaagaccaagagttcgacaccagcttggcaatagagtgagatccccttctctaccaaaaatttaaaaagtatccaggtgtggtacacgcctgttgtcccagctactcaggagcctgaggcaagaggatcacttgagcctaggagttcgacgctgcagtgacctatgaccacaccactgcactccagcttgggagacagaacaagaccccgagtcggccgcagcttattcccttagg

SEQ ID NO: 637529 - DNA, 149 bp, Homo sapiens
ggaaattggttcgctatttcactttgacccgggagaacccccacggaaatcattgcaaattcaaggagggttccaattctttcggtgtttcaacttttaaggaaccacttcggtgaaaacttccttcagggcccattcaagggggtatt

SEQ ID NO: 637530 - DNA, 443 bp, Homo sapiens
  misc_feature (292)..(292): n is a, c, g, or t
tcgtaccagatatgcaagaacccaggcgcgatggctcacgcctgtaatcccagcactttgggaagccgatgtgggaggatcacgatgtcaggagttcaagaccagcctggccaagatggtgaaaccccatctgtactaaataaaaaaattagccgggtgtggtggtgggcgcctgtaatcccagctactcaggaggctgaggcagagaattgcttgggcctgggaggcaaaggttgcagtgagctgcgatggcgccactgcactccagcctaggtgtcagatcaagactccntctcaaaaaaaaaaaaaaaaaaaaagggattagcacggtgtaattactaggctcttttgaatggctgattaatagtccatcttatgaagattcgagtttgggtcagcctacttattggggggacatggggggtcctcggcatcatcggggg

SEQ ID NO: 637531 - DNA, 303 bp, Homo sapiens
caaccttacatgcacaacccgcgggctacttacatgtccctcaatgtcctttcagaatatatggtattactgtacaatataatactggattaacatcgtcatcgttattgcctgtctaccatatgatggatgtgaaaatctacggccaaatactttagaaaacacctttctatattgcacagtgggcaaatggcttatgtgaggtaagacactagagggatacatttccagatcaacatggctatggtatttagtaatggcccagcttagagacttcagctactgatctcatcacttattaga

SEQ ID NO: 637532 - DNA, 528 bp, Homo sapiens
tagactgggcaaagagggaggctctgtctcaaaaaaaaaaaaaaataggaaaagaaagaaaatgaggtaacagagtcataattgtagtagcatgatttctataatatggaaaaaaaacatatccatggttaagttaacctactaaagaaaataaagttatatggctccagttcgtaaagttatttacaaaaccaaaataattaattaagtattttaaaaaagcaaatacaagtctgggacgggtaggtatgaacttaatgggagcaattttctgtacagtttcccttgagtggaggtaactaagtagctacagtataccttcagatggatttccagctcatggtaagcggagaacagggtcagctacagctatgttacgagatctgggtaatttaaaagaagtttccgttgcagttgtaacagatgtgatttactctagtaagcaacccagggaggtaaaatcgttaccctgtctctgtagccttctgtttactgaaaatgcttttcattctgcaaaccacagaatct

SEQ ID NO: 637533 - DNA, 420 bp, Homo sapiens
tgtgtccatcgatataggtccaagtcctggcaatgaggtgaattttgattcatcaggtcgagttttagctcaggcaagtggcaatggtgttatccatttgctagatcttaaatctggggagattcacaaattgatgggccacgaaaacgaggcacacacggttgtgttttctcacgacggggagattctcttttctggaggctctgacggcacagttcgaacgtggtcttgaccgtcagcacatcccgctgcagagggcattccctttaaggcttgaaaatgcctcctgtagtcccaaaccagcaaagaactggttaaatgtgccagcaggtaacatttacagtctgctttaaaacatgctttggacatatattttagtgctcatactgttactaataaaaaaataactttatgctcaaa

SEQ ID NO: 637534 - DNA, 109 bp, Homo sapiens
ccgaagtagcccttttatatacccaagacatggagaatatgagtgatgatgatggttgggaatttgtgaaccttggacatcagcaaagctttggtattaaaactgcagg

SEQ ID NO: 637535 - DNA, 308 bp, Homo sapiens
tatagtatgataaataattggacgtatgtttagtttgaagattgtcctatttgcctatcttgctgcaggaaacatggacttctgattaggttaacagattgtgaacttttagtgtaaatgttaagtgctttcgaggagaccaaactattattaatatataaaatggccttgcccttaaggagcaaattaaatctcatggagattagactcaaaaggcaataaataatcgagggtatatgcaatgacatagaatttcagaagagttaggatctcaaagattgtccttcactctcagaaacaggcaagta

SEQ ID NO: 637536 - DNA, 1129 bp, Homo sapiens
ggcaagatggcggcgccaggccgccgcctgccaggctgtcgggcgtcatggtgccggcgcccatccaatgacctggaggccctgcgcgcgctcacggcgctcttcacagagcagcggaaccgagaaacagcacccaggactatcttccaaagagttctggatatcctaaagaaatcttctcatgctgttgagcttgcctgcagagatcatcccaagtggaaaacctggcttccagtctgcagttaataacagaatgcttcaggtgtcttcgcaatgcttgcatagagtgttctgtgaaccagaattcaatcaggaacttggatacgataggggttgctgttgatttgagttcttctgtttcgtgaactgggagtggaacaggaatctctgttgacagcgtttgcgctgtggtccgctgcagtgttgttaggcaacgattgctctcgacggaatgaagattcccagtctattgtgtgggtgcatgctttcccagaactgttcttcgtcttgcttaaatcatccggacaaaagaaattgttgcctactcttgcaagtagatttgtgtacatcccttaatcatgaaagaatgaaggaactggaggagaacctcgaaatatgcaattgatgtcatagatgcttgtaccaaaaacgatcctgaatcagaatggcgttctgtgattattacagacctctttctgaaaagcccggaattgggtacaaagccatgtttcccaaactgaacaatcaagaaagagttaccactgttagaccttatgatagccaaagataacgagtgatgagccactcaccaaggatgacatccctgtgtttgtgcggcatgctgagttgatgcaagcacctttgtggatcagtgcaagactgtgctcaagctggctcatgagggagccttctgatgatgaggaaggcactgggcacaataggctctcggaagtccgggggaaatgatgggatactggactgtcgctaattgaaggttcccggtgctggaagaaaaagactttgcggggacacagaggcgggaaaaaaccaagcttcaatgggggataagacaagggtacccaggcacagggaacatctacacaaggaaagttcacaacaacaccaaaaa

SEQ ID NO: 637537 - DNA, 121 bp, Homo sapiens
cctagcgggagcacatccttacgtgaaataccctcaacaactaagaaaatcacaaccactatatattaaatctatgatatctatatggaacaacaattacatatagaaatctagcatttct

SEQ ID NO: 637538 - DNA, 253 bp, Homo sapiens
  misc_feature (41)..(41): n is a, c, g, or t
caacgccacaactccggatctttttactgtttccatgattntgtcttttccacagtgtccaagtgttagaatgactcagtctgcagccatctcaaagtggattctttcccttagtcataagtatttaaacttcattcatgtcgttttatgagctaaccctttttttcttcctcttcttttttttttttttttttttttttttttttttttttttttttgaaacccgggggggttttaaattgggggggggaaa

SEQ ID NO: 637539 - DNA, 336 bp, Homo sapiens
ttttttttttgagatagagtctcgctctgtcactcaggctggaatgcagttgcatgatctccgctaactgcaacctccacctcccgggtccagggactcccctgccccaccctcccgagcagccgggaccacaggcgctcgcaccacgcccggccaatttcttttttttttcagtagagatggaatttcaccatatcggccaggctggtctcgaactcctgacgttgtgatgtacccgcctcggcctcccaaagtgcccggactacaggcgtaacgtattgcacccagccatgtgcaggtctttttaggcaaaacaatgccaggcactcaaagaat

SEQ ID NO: 637540 - DNA, 404 bp, Homo sapiens
gccatcctcaaagactctatgtgtacagtacagaagagcgcatataactaataagtagttgatcgcgctaggctgccctcacctctgagtgggaccgaggacttctaggaactagtacaatacagtgtccatctctgtagttcagttcacactttactcccaacttgcttcatccattgctattgcctcacagtggcaggcagatccttggataagaaagaattcaaatttgggaccacacactttgaattccaaatggaaacaccattccctggaattagactgcttccattgcaaaaagaatgatgtagttacttagtatgtccttgcttcttttttcatcgcatgtacctcctttaaacttaatatgaaaactctccaagtcttgatcaccaccaggacat

SEQ ID NO: 637541 - DNA, 535 bp, Homo sapiens
  misc_feature (58)..(58): n is a, c, g, or t
  misc_feature (60)..(60): n is a, c, g, or t
  misc_feature (66)..(66): n is a, c, g, or t
  misc_feature (86)..(86): n is a, c, g, or t
  misc_feature (112)..(112): n is a, c, g, or t
  misc_feature (516)..(516): n is a, c, g, or t
taagttgatctgattcgcaactaccttattagcataaatgaaatgtctctctgcatancntagcgntactgcctgatcgaaaacantaaccacttcttacgtaatcatgctnggctgccgtgggcagttgatcaaatgcgttcgaggacaagaacgttagataaagaggcgccgctctgttgatgattcccgaagcatgtaccgtgcttcacacaagacatcctaaaatgaacaatccagcaccatgacgacatctaatcaatcaggaggcgagcctaaattcttcagtccttccaatctcttacctctggcgccaacgtactctcaaatcagcatggcacatttcaccgccagctccagaattgtctgcataagcggtcaaccaggaatcggtgcaaacacagatatgtcctcgccaccatcattcccagagcaagtcaaagcggcccttgcgaacgtggataagtgccttgctgcagcaggagcctcaaagcaaaacatcgtacgcaacactcnatacatggttccacatggc

SEQ ID NO: 637542 - DNA, 171 bp, Homo sapiens
ttgtgaggacaagatcaactggggtggtgtgtgtgtttgtagacaagatacagctgtggtaggtgtgtgtgtgagacaagatcagctggggtggtagtgtgtgtctggtgaggccttcttgcatactcacatggcagaagcggggaagagggcaaacagggcctaaggtag

SEQ ID NO: 637543 - DNA, 410 bp, Homo sapiens
ttctcccctgacactgtaactaaaaatttagaaactaaaaatcatttttaaaaagtgcttccattgctgtgcttcacaaagcacaacatgatgaaaaaacaaacaaaaaggcagctgggcatggtgacatgcacccataatcccaactactcaaaactgaagcaggagaactgcctgaaccagagatgcagaggctgcagtgagccgagatgatgccactgcactccggcctgggtgacagagcaagactctgcttcaaaaagaaaaaagaagatcaggcgtggtaactcacacctgtaatcccagcactttgggagtccgaggcgggcggatcacctgaggtcaggagttcgggacctgcctggccaacatggtgaaaaacccatctctactaaaaatacaaaaattag

SEQ ID NO: 637544 - DNA, 762 bp, Homo sapiens
agcgggagtccggtcacggctccggcgcgagcgcgaggctagcagcccccgagtttctcggccgtctatcgccccctactccccctcctttcttctaattactctgactctacctgcctctcgccgctgcatacctacccgacgctcctaccggcactagaatcctacgaacctataaatgtgcataatcccacctaaaccctagaccgagtcccctacgcgtagccacaaatgcgccaccggcggagcagggcacaggcagaggacgacagagaccacaccacagcagaagcaaaacaacaaaagcaccaaacagaagaaagcgacaaagggaacatgcgactgtgacccggcacccacccagcgagtccgacaggcgagacacgaccgacagcgtcatgccgaccgccgtcacacgcgacacgagcaacatcggggacagccgccacaacccactgcgcgtgagcgcgcgcaagaagcccagcagatggacgagaccccactccgagcctcagcgatgacagacacccacaacacagcacaccacatcgacagtccatgacccacgcgcgcaacgccggccgcagagaagcacagcccgacggcacggaccgccaggaccgcagcgccgcagaaaccgcgcgtcaacaccggacactcaccggcggcccctcgaagcgactgcaaaccgaaccggagagcgcgacgatgtagacgcccgcagcagcgccccatccataacggcgctctggcgcggcgcct

SEQ ID NO: 637545 - DNA, 217 bp, Homo sapiens
tggagacaggggctcattttttcaccaaagtgggagggtgggggtgggaacatggctcactgcagcctctgggcctaaagggattcttctgcctaagcctctcaggtggctgggaccacaggcatgtgccgcctggttaatttttaaaattttttatttatttggaagagagggggtgcgcactatgttgccaaggctggtctctaactctgggcct

SEQ ID NO: 637546 - DNA, 339 bp, Homo sapiens
  misc_feature (209)..(209): n is a, c, g, or t
  misc_feature (305)..(305): n is a, c, g, or t
  misc_feature (315)..(315): n is a, c, g, or t
  misc_feature (330)..(330): n is a, c, g, or t
tttttttttgctttgttttgttgtttgttttttccatctctattgttgtaagtccaaaggccatgtttaagagtttgcttataggggtttagagtcccactgctgctctttttaggttcctcccaacatcaggggtagattgagtaataaaatgcacaaccaggagagtttgcccttccagggagtctgggtctgcattagtgtatttnttgagtacctcaacaaaaaggctctgaaacacagcaggacttttgtctttcccgagttacttctttaattttgtcatgtttaactggcttaacgangcatgttttnaaatatattaaacangttaccagg

SEQ ID NO: 637547 - DNA, 751 bp, Homo sapiens
agaacactgctatagaagaatttagcacaccaaaattccgctgaaagtctaaagtatgtgtccataacttacactctgaggcaatctgctcagtgtgtagccactttataaaaggataagttacgattgataacctggaaaggtggactatttgtaagtagctggtgtttatggattaaaccatggcacagtattcatgatagtccaagacatgtagctgaaatcggagtgcatcttgaaagagctgtggagtgataatgctgaaactttggatgttataatgaatctactcatgtgtgtaaggagtatttaagtctgtaggaccacaatgatagaaagctcagttagggctgcttacgtgacaattagttgacatattaatctggtaaggtagtgggaagtattgtgaatatttcacctgggagaggcagttagagacatcattagtgtaatacaggtgcaggcggggggaacgctccaaaatagcctacaagtatagtaaggtccaccaggctccaagaggaaaaagctgtgattatattacatcagtgactgtaatgctcgctgaccgcgctacgtactcagtagctaaacaaatcatacattagagactaccacagaaaaacaccaaccaagacacacccagccaaagaacgacggtcaaaaacacaaacaagaagccacacgcagcgccggccccacagccaacaagaaacaaagtcggggcaacgcacgcacacagacaacacgt

SEQ ID NO: 637548 - DNA, 1058 bp, Homo sapiens
  misc_feature (218)..(220): n is a, c, g, or t
  misc_feature (223)..(224): n is a, c, g, or t
  misc_feature (229)..(229): n is a, c, g, or t
  misc_feature (243)..(243): n is a, c, g, or t
  misc_feature (252)..(252): n is a, c, g, or t
  misc_feature (413)..(413): n is a, c, g, or t
  misc_feature (500)..(500): n is a, c, g, or t
  misc_feature (514)..(514): n is a, c, g, or t
  misc_feature (516)..(516): n is a, c, g, or t
  misc_feature (518)..(518): n is a, c, g, or t
  misc_feature (651)..(651): n is a, c, g, or t
  misc_feature (685)..(685): n is a, c, g, or t
  misc_feature (705)..(705): n is a, c, g, or t
  misc_feature (722)..(722): n is a, c, g, or t
  misc_feature (767)..(767): n is a, c, g, or t
ccttttccctcctcagttggccgagtcgtcccgctctcaccctccggcgcgcctatgtgaatgaggtggtgacgggcccccggatgaccccgagtcatcactgggagctctgcacctctgccgcgaggaggaggaggaaggaagaggacgagaaggtagctacaccaagctggtacctgcagatccaaggatatcatgaagtttacaggggcctttgnnnacnngagangtctctttcctgtnggaaaggcnatcactagggaagcacagatgtggaaagtgaatgtgcggaaaatgccttcaaatcagaatgtttctccatcccagagagatgaagtaattcaatggctggccaaactcaagtaccaattcaacctttacccagaaacatttgctctggctagcagtctttnggataggtttttagctaccgtaaaggctcatccaaaatacttgagttgtattgcaatcagctgttttttcctagctgccaagatgtngaggaagatgaganantnccagtataaggtatggcaagagacagtttctgtggatgttcctcatctgaaattttgagaatggagagaattattctggataagttgaattgggatcttcacacagccacaccattggattttcttcatattntccatgccattgcagtgtcaactaggcctcagtnacttttcagttgcccaaatngagccatctcaacattnggcagtccttaccaagcaatacttcactgtatggctgcaaccaanttctgcatcagaggatccatgcttgctctggcatgttagtctggaactggggaactcattcctgttgggttctcttaccattgacctggttcgaacgcacgttggtccccaggagccctggcggacttgtgcctcaccttttaccggggttccggccgaatcggggttaccggcctcaaggcctggcttgccaggggtcgtaatcttctgtcggccagttccgacagcgcagcgcaggagctccacccccgcgggccacacagggggtttacctataggttagcccccctt

SEQ ID NO: 637549 - DNA, 87 bp, Homo sapiens
  misc_feature (25)..(25): n is a, c, g, or t
ggtgtcatcaccattgaatcccagntgcacccgcagagcccactgtgtcccctgccaggctccgctttcactttgagcactcccagt

SEQ ID NO: 637550 - DNA, 1094 bp, Homo sapiens
  misc_feature (218)..(220): n is a, c, g, or t
  misc_feature (223)..(224): n is a, c, g, or t
  misc_feature (229)..(229): n is a, c, g, or t
  misc_feature (243)..(243): n is a, c, g, or t
  misc_feature (252)..(252): n is a, c, g, or t
  misc_feature (413)..(413): n is a, c, g, or t
  misc_feature (500)..(501): n is a, c, g, or t
  misc_feature (513)..(513): n is a, c, g, or t
  misc_feature (534)..(534): n is a, c, g, or t
  misc_feature (539)..(540): n is a, c, g, or t
  misc_feature (562)..(562): n is a, c, g, or t
  misc_feature (687)..(687): n is a, c, g, or t
  misc_feature (721)..(721): n is a, c, g, or t
  misc_feature (741)..(741): n is a, c, g, or t
  misc_feature (758)..(758): n is a, c, g, or t
  misc_feature (803)..(803): n is a, c, g, or t
ccttttccctcctcagttggccgagtcgtcccgctctcaccctccggcgcgcctatgtgaatgaggtggtgacgggcccccggatgaccccgagtcatcactgggagctctgcacctctgccgcgaggaggaggaggaaggaagaggacgagaaggtagctacaccaagctggtacctgcagatccaaggatatcatgaagtttacaggggcctttgnnnacnngagangtctctttcctgtnggaaaggcnatcactagggaagcacagatgtggaaagtgaatgtgcggaaaatgccttcaaatcagaatgtttctccatcccagagagatgaagtaattcaatggctggccaaactcaagtaccaattcaacctttacccagaaacatttgctctggctagcagtctttnggataggtttttagctaccgtaaaggctcatccaaaatacttgagttgtattgcaatcagctgttttttcctagctgccaagactgnnttgagggaacgnactgagaggacactctccagnttacnntaaaggggctaatttcggggcnccaaaaaaagcaggacagtttctgtggatgttcctcatctgaaattttgagaatggagagaattattctggataagttgaattgggatcttcacacagccacaccattggattttcttcatattntccatgccattgcagtgtcaactaggcctcagtnacttttcagttgcccaaatngagccatctcaacattnggcagtccttaccaagcaatacttcactgtatggctgcaaccaanttctgcatcagaggatccatgcttgctctggcatgttagtctggaactggggaactcattcctgttgggttctcttaccattgacctggttcgaacgcacgttggtccccaggagccctggcggacttgtgcctcaccttttaccggggttccggccgaatcggggttaccggcctcaaggcctggcttgccaggggtcgtaatcttctgtcggccagttccgacagcgcagcgcaggagctccacccccgcgggccacacagggggtttacctataggttagcccccctt

SEQ ID NO: 637551 - DNA, 253 bp, Homo sapiens
tctgtatacatctctgtgtccaaattttccctttttaaatagatatcaatcatattgtattaggggacaccttaatgaccttattttaacttgataacctctataaagactctaagtaccattgtgaggtacaaaggagtgaggacttcaatatatgaatttgggcggacacagttcaacccataacaatgctatatgttttaaagtgttttcacagtgtgcttttatttttgcttagagtaggactaaatga

SEQ ID NO: 637552 - DNA, 258 bp, Homo sapiens
  misc_feature (118)..(118): n is a, c, g, or t
acagctcaatgacttatcacaaagcaaagccccaagaagtcaccacccagctccagaaataacacattgaaaagctagaaaaatctcaaattgacatcctaacaccacaactaaaggntctagagaaccaagagtaaacaaaccacaaagctagcagaagacaagaaataaccaagctcagagcagaactgaaggcaataaagacacaaaaaacctttaaaaatagtcaatgaatccaggagctgtttttttgaaaaa

SEQ ID NO: 637553 - DNA, 231 bp, Homo sapiens
caggtctcctgggagtcggaggggccatggttccaccccaggcccacctcatcagcacagtgctctcaccatctgagcaccagcccagaggaaaaggagaaagaatgtgtgatgctgatcccccaagcagaatggtatcctccacctcccaccctcagtgccagggcccgttgttgggtgcttttgagggtgggaggtggaggggtttccattttgatgttggagcggccc

SEQ ID NO: 637554 - DNA, 729 bp, Homo sapiens
  misc_feature (55)..(55): n is a, c, g, or t
agtgacgtgacacgcagccaggtctgtactgacgcgcctcgcttcttcctctttntcgactccatcttcgcggtagctgggaccgccgttcagtcgccaatatgcagctctttgtccgcgcccaggagctacaccccttcgaggtgaccggccaggaaacggtcgcccagatcaaggctcatgtagcctcactggagggcattgccccggaagatcaagtcgtgctcctggcaggcgcgcccctggaggatgaggcccctctgggccagtgcggggtggaggccctgactaccctggaagtagcaggccgcatgcttggaggtaaagtccatggttccctggcccgtgctggaaaagtgagaggtcagactcctaaggtggccaaacaggagaaaaaaaaaaagaagacaggtcgggctaaacggcggatgcagtacaaccggcgctttgtcaacgttgtgcccccctttggcaaaaaaaagggccccaatgccaactcttaagtctttggtaattctggcttctctctaatccccaagccacttagctcagtacaaaaaaaagcaacacaacacacaccaacaatggggggggcagcatggccacacgaaagagggtcaccaacaaccgcggaggggggcggggggcacaaagaaagacagacgggaacaggtgtacccaggaaacacgtggaacagacacagggggggggtcccacacaaaaaaaag

SEQ ID NO: 637555 - DNA, 636 bp, Homo sapiens
  misc_feature (1)..(1): n is a, c, g, or t
  misc_feature (62)..(62): n is a, c, g, or t
  misc_feature (73)..(74): n is a, c, g, or t
  misc_feature (81)..(81): n is a, c, g, or t
  misc_feature (87)..(87): n is a, c, g, or t
  misc_feature (117)..(118): n is a, c, g, or t
  misc_feature (126)..(126): n is a, c, g, or t
  misc_feature (147)..(147): n is a, c, g, or t
  misc_feature (150)..(150): n is a, c, g, or t
  misc_feature (158)..(158): n is a, c, g, or t
ngattttggaggggaataacatttttcccccaaggaacaaccctttgccctgtgttttcccnagcccgatttnnccccccntaaggnacaaaaatggaggtccccccgggggggccnntcttaaantattggatcccccgggtccanaanttcggccnaagctggggcccccgttcagtcgccaatatgcagctctttgtccgcgcccaggagctacaccccttcgaggtgaccggccaggaaacggtcgcccagatcaaggctcatgtagcctcactggagggcattgccccggaagatcaagtcgtgctcctggcaggcgcgcccctggaggatgaggcccctctgggccagtgcggggtggaggccctgactaccctggaagtagcaggccgcatgcttggaggtaaagtccatggttccctggcccgtgctggaaaagtgagaggtcagactcctaaggtggccaaacaggagaaaaaaaaaaagaagacaggtcgggctaaacggcggatgcagtacaaccggcgctttgtcaacgttgtgcccccctttggcaaaaaaaagggccccaatgccaactcttaagtcttttggaattctggccttctctaataaaaaaccccctttgttccc

SEQ ID NO: 637556 - DNA, 647 bp, Homo sapiens
  misc_feature (446)..(446): n is a, c, g, or t
  misc_feature (464)..(464): n is a, c, g, or t
  misc_feature (474)..(474): n is a, c, g, or t
  misc_feature (493)..(493): n is a, c, g, or t
aggggtctgtacattggcctggcctgcaatacggctcgctatatttatatttcctacctggagaatgcctggactgttctccccatggaagttcttcaaggtaagttaacagctgggattgaaattatttctctgccttccctgagctgtggctaaaagcccagtggccttcagcatctgattctataaaggaagggcaggcctactgtttcatgtgattttgaagtggttgttaaggaagagatgacatcaggagggatggttccttggttaccctgagtgctgctttgtgttgagccaaacaaagctggacttgatccacaccctttgggattaaaccaaaggaagaggaacctctagaataaactcctgtgcacaactattagacatggacaatccagggtgtttttaagaaataaaaatatttatcttttaaagtttttggngttttaagtttggtgggntaactatagntacctgaaaaaaggatggnggcataaataatttatcttttaagtatttttatacaattggggactattacctaagtttatagcccacccggtgtttttccataacctttaaaaatttttctcaaaggccctgcctgaggtctttttggtcaaggacctgtccccatcaggaaa

SEQ ID NO: 637557 - DNA, 634 bp, Homo sapiens
  misc_feature (1)..(1): n is a, c, g, or t
  misc_feature (62)..(62): n is a, c, g, or t
  misc_feature (73)..(74): n is a, c, g, or t
  misc_feature (81)..(81): n is a, c, g, or t
  misc_feature (87)..(87): n is a, c, g, or t
  misc_feature (117)..(118): n is a, c, g, or t
  misc_feature (126)..(126): n is a, c, g, or t
  misc_feature (147)..(147): n is a, c, g, or t
  misc_feature (150)..(150): n is a, c, g, or t
  misc_feature (158)..(158): n is a, c, g, or t
ngattttggaggggaataacatttttcccccaaggaacaaccctttgccctgtgttttcccnagcccgatttnnccccccntaaggnacaaaaatggaggtccccccgggggggccnntcttaaantattggatcccccgggtccanaanttcggccnaagctggggcccccgttcagtcgccaatatgcagctctttgtccgcgcccaggagctacaccccttcgaggtgaccggccaggaaacggtcgcccagatcaaggctcatgtagcctcactggagggcattgccccggaagatcaagtcgtgctcctggcaggcgcgcccctggaggatgaggcccctctgggccagtgcggggtggaggccctgactaccctggaagtagcaggccgcatgcttggaggtaaagtccatggttccctggcccgtgctggaaaagtgagaggtcagactcctaaggtggccaaacaggagaaaaaaaaaaagaagacaggtcgggctaaacggcggatgcagtacaaccggcgctttgtcaacgttgtgcccccctttggcaaaaaaaagggccccaatgccaacttttaagttttttgtaattttggctttttttaataaaaaagccccttagttc

SEQ ID NO: 637558 - DNA, 290 bp, Homo sapiens
cgtcgacatgggaacgaatggagtgaaattgtacgcagtagaagagaatagaatggaatgcaagtgaaaggaaaggaatggattggaatggaatggaattcattggaatggaagggaatgtagtgtaatggacaggcctggaataaagtggaatgctacggtctcgaatggaataaaaatgtatggaatggaatgcaatgaaacggaatcgaatgtcatagaatgtaatggaatgcaaaaaaatggactccaaaatcattgactggaaaggctgggtgtcgagtcgacgc

SEQ ID NO: 637559 - DNA, 549 bp, Homo sapiens
  misc_feature (55)..(55): n is a, c, g, or t
agtgacgtgacacgcagccaggtctgtactgacgcgcctcgcttcttcctctttntcgactccatcttcgcggtagctgggaccgccgttcagtcgccaatatgcagctctttgtccgcgcccaggagctacaccccttcgaggtgaccggccaggaaacggtcgcccagatcaaggctcatgtagcctcactggagggcattgccccggaagatcaagtcgtgctcctggcaggcgcgcccctggaggatgaggcccctctgggccagtgcggggtggaggccctgactaccctggaagtagcaggccgcatgcttggaggtaaagtccatggttccctggcccgtgctggaaaagtgagaggtcagactcctaaggtggccaaacaggagaaaaaaaaaaagaagacaggtcgggctaaacggcggatgcagtacaaccggcgctttgtcaacgttgtgcccccctttggcaaaaaaaagggccccaatgccaacttttaagttttttgtaattttggctttttttaataaaaaagccccttagttc

SEQ ID NO: 637560 - DNA, 1125 bp, Homo sapiens
  misc_feature (23)..(23): n is a, c, g, or t
ggacgcgtgggtcgacccacgcngtcgcccacgcgtccgttctagatcgcgagcggcctcccctcaaaaaaaaaaaaaaaaaaaaaaaaaaaaaaaaaaaaaaaaaaaaagaaaaaaaaaaaaaaaaaaaaaaaaaaaaaaaaaaagaagagagagggggggggcggcgcgaggaggaagctagctccctcaggagggggagccgaacacagggcgacgccgaccaccacctagtttgtagcgggaggagagaggggggcgcgccgcaacaagagggaagggagcaaatatatataaacaaacaagaggaggcggggaggaaggaggactaacacaacacaaagacgaagagggagggaagcaagacggggctaacacggggaggagatcttatgttggggagaaggacgacgcgaccactatatataagtgagagggggggaggaggaacaatatattgaggtgtggaaagaaaacacataccaactatacgatgagtatatataaaacagaggcccgagggtggggagataataaataataaaaaattttagatcagagagagagtgaaaagagagagggagggagagacaaaaacaacccgacggagcgacgtataaaggtagggggggaggagcgcgcgagagagacagaaaatatgagtgaggaaaaaaggggcgagatggaactatataatttgtggagagtaaagatctatcttacatgaacgcggcggagcagagaagtgattggggtagtagtcaagaacgcgcagaggagaacagagaccacgaaggcgagcgagcagcagaagacgagaagggacaagcacgacacgcaaccaccagggcagcacaagagagagaaggacacgagagacgggagacacgggaagggcgcaaggagaaagagggagcacacacggagacgagcggacagagagagacgagaagagagcgagaaggagagaccaaggcgaggaagagagacgaacgagaggaaggagaggcaagcgcgagcgaggagagagaacagcgagagagaaaaagaaagaacaacaacgcaagaacagagagacaggagagaagccaagcgagacgacgaaggagacgagtactaagagag

SEQ ID NO: 637561 - DNA, 690 bp, Homo sapiens
  misc_feature (1)..(1): n is a, c, g, or t
  misc_feature (62)..(62): n is a, c, g, or t
  misc_feature (73)..(74): n is a, c, g, or t
  misc_feature (81)..(81): n is a, c, g, or t
  misc_feature (87)..(87): n is a, c, g, or t
  misc_feature (117)..(118): n is a, c, g, or t
  misc_feature (126)..(126): n is a, c, g, or t
  misc_feature (147)..(147): n is a, c, g, or t
  misc_feature (150)..(150): n is a, c, g, or t
  misc_feature (158)..(158): n is a, c, g, or t
ngattttggaggggaataacatttttcccccaaggaacaaccctttgccctgtgttttcccnagcccgatttnnccccccntaaggnacaaaaatggaggtccccccgggggggccnntcttaaantattggatcccccgggtccanaanttcggccnaagctggggcccccgttcagtcgccaatatgcagctctttgtccgcgcccaggagctacaccccttcgaggtgaccggccaggaaacggtcgcccagatcaaggctcatgtagcctcactggagggcattgccccggaagatcaagtcgtgctcctggcaggcgcgcccctggaggatgaggcccctctgggccagtgcggggtggaggccctgactaccctggaagtagcaggccgcatgcttggaggtaaagtccatggttccctggcccgtgctggaaaagtgagaggtcagactcctaaggtggccaaacaggagaaaaaaaaaaagaagacaggtcgggctaaacggcggatgcagtacaaccggcgctttgtcaacgttgtgcccccctttggcaaaaaaaagggccccaatgccaacttttaagttttttgtaattttggctttttttaataaaaaagccccttagttcctgtcaaagggatcgtggaaaaaaaaggggttgagagactaaggagacgaaacccg

SEQ ID NO: 637562 - DNA, 160 bp, Homo sapiens
ctttttttgggggccccttcccttcccctggggcggggttttttaggggccccccccccccctttttcggggggggggggggccgggggggccgggttttttttgggggtttttttttcccgggcccctttttgggggggcgggccctttaaaaggttta

SEQ ID NO: 637563 - DNA, 343 bp, Homo sapiens
ttcgattggcgggcacttagggagaccctgcttctgaaaaatccaaaaactagctgggcatggtggcttatgccatgttcccgctacttgggaggctgagacaggaggatcacttgagccaaggaggtcaaggctgcagagagctgtgatactgctactgaactccagcctgggtgacagagtaggaccctgtctcaataaataaatgaacaaggtctgggcgtggtggcttatgcctgttatcccagcactttgggagaccgaggtgggtggatcacttgaggtcaggaattcgagaccagcctggctaacatgatgaaaccccatctctactaaagataca

SEQ ID NO: 637564 - DNA, 290 bp, Homo sapiens
taaaggatttgaatttaaaaattttctttttagctttgaaaatattttgggggaaactttccttttgcccctcctgcccctcctggttttcggggggtaaagtgatttttttcccaattatttaaagttggatgccccccctatgaaaaaaatatttgttttttttcccctataaatatgcccaagggttctgggcctgctcctttttgttaccccctgcccctggaattatacttgttttttttgttgccccaatgaaaaataaatgaatgtttgttttttggggccga

SEQ ID NO: 637565 - DNA, 170 bp, Homo sapiens
aagaaaaacattgacagctataactgctgtgtctctcatattatttatactctttaccataaatcacttacaagacaagagtttcagtcctagtatttagccccaaactgaacctttaaacatttttttggtaatttttatattttctgtctttttacaactcttacatt

SEQ ID NO: 637566 - DNA, 326 bp, Homo sapiens
tagaaggaaagtcaggctagggaattcatgttctagcttgatctggtgtcagtgggatggactgcccaagtgatgggccacagaaaggcaaatttcgtgttggctcctcatccggtacctctttttccattaagaatcctgcctggaagtttaggtcaaagaggctgcttggagcaaaatacagtggtgtctcatcccaaatattctccaggcgtttcttccatccttccaggatttgaattcgggcgtctgctggagtgtgcccaatgctatatgtcagttgagattctaagacttggaagccacagaaatgcagaatgccactc

SEQ ID NO: 637567 - DNA, 127 bp, Homo sapiens
gcgcgggtcgtgcagagagtgccgattctatcgtcttcccgtggagaagattgaaactgccaaatactttcccgaaaagttcgagtggcttccgatatctgcaaggaacccacgcggtaccgagctc

SEQ ID NO: 637568 - DNA, 108 bp, Homo sapiens
ccactcctccacctttgactgcggtgctggatttgccctcaaggaacactttgtcaagctcatttcctggtatgacaacgagattaggcgtacaggaacagggttgtg

SEQ ID NO: 637569 - DNA, 529 bp, Homo sapiens
gggtgggtgatagtggagaaggtgggagtttggtgagaagaatgtaggtgggaagggggagagaagttggagggaggagggttgattagtggaggggttaggggatgggttggtggagggttggatattttcccccgccgctcccccccccccgtcgcctccgcgcccgcgcctccgcccgcgccgccccccccctctttttccgccccctccccgccgccccgccccccgacccccgtcctcccaccgcccgcgcgttcacgcccgcctcgcccgctccgatgcgtcgcttcagcgccccgcgctctcgcgccccccctgccagcgcccccccccccggctatgttaggtctgtttgtcgcaggcagatgccgcttgctatcactctgcctctccctctctctctctctctctctctctctctctctctctctctctctctctctcctgaacctccgtccccggccacgcgaccgagactgtcaccggttcgtcccgcccgcccgccgccgcggcgcccacactcacg

SEQ ID NO: 637570 - DNA, 238 bp, Homo sapiens
tatgcatacctagcttatcaaccatttcatctatataccgaaaatattagagtttacatgaacgtattcactttcagctgggcgtggtggctcacatctgtaatcccagcactttgggaggccaaggcaagtggatcaccgaggtcaggagttcgagaacagcttgtccaacatggcgaaacctcgtctctactgcttcttggcattttaaagtgctctgcttttggtagaatctccc

SEQ ID NO: 637571 - DNA, 168 bp, Homo sapiens
gcataagtagaatataaaaaaatataaccagtattttacttcagaagccaaacagaggcaataagagaagacactttgtggtggcctttatgtgtcctttagaattggtttctgtcaaacgtgtaataagttgagtatctaccgagagtatcaagttctgaagtttac

SEQ ID NO: 637572 - DNA, 343 bp, Homo sapiens
cctacaggatcccccttcgaaaccagtgtgttcgtgcaacatactccagaactgtgtaggtaatttgctataccttcagccttgtaattcaccttcaatttgaccccatcagcttcagggacctatctttacatttccactggcctgatccatgtatgcaatgctatttttgcagtgatatgtgatgttctgggaagctcggctggagagaagtcgaaggaatgccagctgcacatcacggacatcttccggaagttcaggattgccgtagctaaactgataaccaccatccatggactctccaaaccaaacgtgtttcttctcagcactagaatctgtccac

SEQ ID NO: 637573 - DNA, 590 bp, Homo sapiens
aagtatcttcaccatggggatgtgtgtccattggtgcaggagccctgggggctgctgccttggggtagctgcttgccaaacacagacgtgtatctgtccaaagccccagaaagcggacctggagtacctggaggatatagacgctgaaaatacactggaggaaaggaaccaaggacctgttcaagagccacaaggagcgtatgggacaagaaaacatgggggctgtgcattatggccgatgcgggaggccagcgctgtgaacctctgtcgagaggaagctgacggatctgtcctcccgtgaaaaagccatgttggaccagctgggcgtccccgctctagtgcaggggtaaggaggagcacagtcaggacgggaagtgaaggactgtccagccttatgtcaccggagaaatccttcctggagtgagacgcgagcagaagttctatggtccataaaggccggaagatgatgttaatgggatttatccgtctgggagtgtggtacaacgttcttccgagcctggaacggaggctctctggaacctggaaggagaaggttcatcttgggggagtaccgtggtggatccggaagg

SEQ ID NO: 637574 - DNA, 246 bp, Homo sapiens
ccatccaatacgaaaagggtgtatatgctagtatgttgcaagaagcctaaactgagtacaaggacgatgttactttaatcaagttccagaatgagggtaacacagcttcgaaaagcagtctgtagcagaagatgcaagggtgagtgatgccatgtatcagaatataccacaggcaacacaccacaaacccagctgtgcccctcagcgataccctcgatgctgctccatactgccgcgcagcccggc

SEQ ID NO: 637575 - DNA, 1028 bp, Homo sapiens
agggtttctttatccaccatttgttgcctccccccaatagatatgtatgttggttcgtctttgggttgatgttttctctcgctgggtgttctttctccagcaccctgggttgtgtgtggaaggaagatgtcttgtctcgtctacatcagcaaaatgttgtttttgctccacccggggtgtttctatgttgatgatcccacccctcttgtttttctatggatcctctcttggtggggcgccctgacgtactcaccatagtgtgacgcctcccccgcggattattttgccgcccccctctcttgtgtgggcacactcatttgggtagagacactagtacctatatatatgtggcggccccccacttctcgttgggggacgcacacactgcccgtccgtgctctttttggaggtctgtttccgggtggtttgcccccacccagctactatatcgcgggcgggcctgatctttcgcgtggagtgttagttcacttccgcgcgcgtgggctgtttgtttctatacagagcgtgctgcatgttcctttccttggcgggcggttgtgggctacgcgaagcgctttttttcactggcggcgggtctctccccacacactcatctgttcgtgtgccccgcggggagagaaaactgtatccgctagctgttgtgactccccaccaacaccttttgttgcgcgctgtctatcacgccgaccccaccacgcgggggcgccgcatatttccctcgtgcaagggcctctcccggttctaccaccagggcggcccccctgtctcacaccaccgggtgcctctcttaggtgtgttacggggccccccccgctgtggcgtctcatatcgagcggtgggcgacgtctccgctctacaaccagggtgctgccattttcctctttctccctacgaacttgggtcaacggaaaagggcccccctggcgctcccccccccgacttccttatttttttttcttggggaaccccccctttgtccctttttttaagagttcaaatttgttata

SEQ ID NO: 637576 - DNA, 475 bp, Homo sapiens
ggtacgctctgaatcccgtcgttgcgctaccgtgtaatcagcctgcctttggttttgacagcgaaggcaaagccaaaggcggattcacccgcgatggtcgcgccgacaccttggcggctcaggctgcgacaccgtttctggcagcgcatgagatggcaaacaaagatgcggccgacgtggtcagtaaagtacagcaaggcagctatgccaatgagtttaaagccgctttcggcagcacgattttcagtaataccgacaatgcgttcgaccgcattctgtacgccttgcagcagtatcagaaagaagatgcggattttcatccgtatgattccaaatacgatcggtttttagcaggccaggcagttctcagtgatgccgaattacgtggtctggccttgttcaataatccggtcaagggcgattgtgcggcctgccataccagcagcaagggcgcaaatggtttggcaccgttgtt

SEQ ID NO: 637577 - DNA, 217 bp, Homo sapiens
ccgctaccgacgcacgttcacgatgggagaaaggatcggcgccattaagcaagagttccaagaaccccccacaaaaaagaaccggatgccgcttttggatgatgaaaggcatttcacttgccgtgacctgatcagcttcccgtttctggggccggacccacaccaggcttctttctggctggccttctacctgatcccacctttaacgactggctac

SEQ ID NO: 637578 - DNA, 349 bp, Homo sapiens
taatttttaaaaaaagaaatagtcagggttttcctcctttcaaccgaaactatttctggattgtgtgctcctcgtcagttgacttgttttggcacacgttttcttaacttcagtgttcccctgtcaacaaccgtccgtgctccccacctcccccaggaaataaggggccgtgctcctctccctacgtgtgacccgtggaggctcttaagatgatgagtggtttttttatatggggctgagttcacgaaattaggggcaggagctggaagtcgccctaggaacaccagaatttccgggtctctgtctcaagtgggcatttctgggttgggaataacactatttctgggac

SEQ ID NO: 637579 - DNA, 161 bp, Homo sapiens
tcaaaacgcattttgcctatgccttgaacttaccagtctgcagaaattcatgggatcgggctaaaactaataggctaggacgttcttccgttttctactgttttaactcgaagtctcttttatggaccctatccgttgacattccacttacagtgtagtgc

SEQ ID NO: 637580 - DNA, 226 bp, Homo sapiens
agaccgcatggttattatgagatggcaccattgaggtagtcagaaaagggagcaaagtaaaagatctgaaatatgtcagaagcacttgcagatggataccatataaggcgggatgcagaaaaagagaatcaaggataattactagatccaaatttgacacaatcatgagtgctgctagtgttaagtaaaatggggagcatcacagacaagcaggtacaagtatgtg

SEQ ID NO: 637581 - DNA, 354 bp, Homo sapiens
ttcgaccgaagcactgttcactttagcaccactcagagggtgaccttgcaaggatggcttcacggaggccagactgcagcaggttaaggagggaaatgggaggggaggggagacacctctcaggaagtctggctgtggttagagaggaaagagggccgtagctggagggagaggcagaactagagaagggagtcagatgtttgtcagggtgggagagatgctgtgtgtttttaagttgaggagcttctgtgaaaactgcagttccaccctaccctctgtactctctgaaggctgaacttcacttcggaccaattaaaccagaacttctgaggggtggagcctaggcattgatac

SEQ ID NO: 637582 - DNA, 409 bp, Homo sapiens
  misc_feature (243)..(243): n is a, c, g, or t
  misc_feature (352)..(352): n is a, c, g, or t
  misc_feature (370)..(370): n is a, c, g, or t
  misc_feature (388)..(388): n is a, c, g, or t
cctgtggctgagcctcctccatggctgccccaaatccctttcctggtgcctgaggtctagggattcactcctcttgctcaggaggttttccagagggaagctcacatggatgcttcgcaggtggtcctggaaagactcacttctccttcaggcgctgcctttcatggggctcttctttgtcccagggcctcagagctggggtgtggtggctcacgcctataatcacagcactttagcaggctnaggagggaggattgcttgaggtcaggagtttaagaccagcctgggcaacatatcgaggccccatctctacaaaaaaatgcaaagggccaggcacagtggctcaggcctnataatcctaacacttttnggaggccaaggcgggcanattgcctgagctcaaggagct

SEQ ID NO: 637583 - DNA, 102 bp, Homo sapiens
ggtgagtggtaggaaggttttttcataggaggctgtatgaattggtcgtaacggaatcagggcgtatgctgttcgaattcataagaacagggaggttagaag

SEQ ID NO: 637584 - DNA, 151 bp, Homo sapiens
tcttgtttcctgcacttcacactggggcatcaccctgaattctttcttgcacaagatccaagaaccctctcttggggtctagattgggacccctttcctgtaactatcatgctactgcactccagcctggacagaagtgcaggaaacaaga

SEQ ID NO: 637585 - DNA, 438 bp, Homo sapiens
  misc_feature (273)..(273): n is a, c, g, or t
tcccgaagcccaccccccatccccaaggagcccagcagctatgactttgtctatcactatggctgagcctggagccagaaacgacggtacccaggagaagggattttgggcccaggagaaacacttacattctggtgccttgtcttttgcttgtacagaatctgtagtgattttggtggccagtaaatgccagccatttctcaaacccacctcggaccacccagagtttcctcttggtccctgtctactaagagtcatgaaggcagggtgctntgcccactccatcaccatgaagcctgggattgggccacgaggaacaaacagcagatgcccttgccttccagtccaagaaactgcttcttgaaatggatttaacaacagccaggagcttcctgtcagtaaccatgttttcaataaatactctttcatgtaaaaaaa

SEQ ID NO: 637586 - DNA, 202 bp, Homo sapiens
cagctgtgataaagcgttcgtatctgattcttgcgtgaatgatatgacctcaagtgctttattatatggtatactattaactagtgggtttagatgttctttatcatgctccataagttactttctattaccactgtgctaagttctgatgtccatttgttaaaatacacaagattatatgagaattttaaaactgttattt

SEQ ID NO: 637587 - DNA, 560 bp, Homo sapiens
attcccctttcttccgccacggtcatgcaggactctggctcttcgtcctctcctgccgagatgatgaagccccctgaggtagaaaggctccagagttctgacctcggggcccttggtatctgcagcgtcgctgcgggcagctccctcactcctgaatcaccccctagctgtcgcgtcctggggctgcggccccggcgcctgaggtctactcgccggtgaccccagtgcccaccatggcccccctcaactcctacatgaccctgaatcctctaagctctccctatccccctggggggctcccatgcctccccattgcctctggagccctggtacccccatgttcctgcagtctcccctggggcccactttcccatggcctgggtgtctagcggtgtgcctgcagacatggctccgggtagcgggggccccgggtcctgggctggtgcactgggaaggagatgcgcgaaggggtatcggcgtgcccctggtcgacaactggccaaagtccaccgatattcctatatctcactcatcaccatgggcatccagcaggcgccggg

SEQ ID NO: 637588 - DNA, 142 bp, Homo sapiens
ataaatcgtactcaaattattattgtagcatgaacgttgaagatcagatggtacttctgcagtgactgtggagataataatacatatggcggttcttattcctttccttaatggcatagattagtaattagggtagaaaaga

SEQ ID NO: 637589 - DNA, 783 bp, Homo sapiens
ttggggcccgtttgctgtgccgatttagtgccgcgcgctttgagtccgtgaggaacttgctagtgtgccccgagcggaacagagaatgctgaggtctaaccatgaatatcggaatgtcccatctatgaaggaggtttgctgctgcaacaggaatatccatgaacatggaggggtgtgctcatgtcccaggatctgtcctatagactgctctcaggaggaatgggagtgcctgacgctgctcagaaggcattataccagagatgtactgattggagaactacagcagcctgtctcactaggtctctctatcccaaagcctgattgtgatttccttactgagcatgggaaagagccctgatggtttcaagggacgtgctgggaggatggtgcggaggttgtgcgaccacggtatgacaccaaatacatcattcccagaagaccacattttctgaaaatacattagctgtaatacttcacaaaagagaagctgcccactgatgcttacttggatacccccccagtggttatggttcaccatagcgataccccaaagatatattctttccctttcaggatcacccgtgtttcacgataaataacttgggttcttattggtctgtgatcacctggttctttgctatgtgctacacagttggggcattcaactgcatttggggtcaccatataaatttactaatttcacgtgccgtttctcttttccaccatcattggcattttcttttccaccatcaaagtgggctatcttttccgactaatgcggtt

SEQ ID NO: 637590 - DNA, 572 bp, Homo sapiens
ccgcgagggtcggccgatgtcggtgcgtgagtatgtggctgtgcgcagaggctggggcttggtggtgaggacgggccagtgtcggcacgtgactgtgtcgtgggtgcggtggtgtgcggcgcggtttccgggtaggtgagactggtgtggaggccgcggtgattcctcctgactgcgccgggggcggagccccgcgtagcggttgctcctcccgtctcgggcgcacccataaggcgcctgcatgtcccttttgtctgggtactgctgagacagtagcacacttgtgggaagcgggcgttagaaggaagtggctagacacgcagatccggcgcgtcttttgggaggtgttgaaccgtcttcagctgccaccgcagtggtgatgactctcctggcatgcagctgcccccattggtgggggctgcgctgaacgtttggagtagtgcctgtaccccctcactcgctcgataatagagcaggcctgctcttcgcatgcaggacaaatcaatgggccccggtttcagccacaaacaataccgcgcgttccccatgcaaaaactcaccgcacatataaa

SEQ ID NO: 637591 - DNA, 1256 bp, Homo sapiens
gactgatctcgatggacctggaagaatgcagatggagccagacatggaggaagactgatgatcagaaatgctgtgaaatgatgaactgtaatacgcaaaggccagaccctggtgcgctgcctgatgaccccatcgtgggtgctagcacaccacatgcatgcaagctgcactgcctaccgaatgcctgctgtgcctcgcattgaatgtgatgtggctgtctgccctggaatacccatgtggaacctcctctgaacgtgacaccatcacccctcacacacctgtcctgttcaccccctgtctcttcacttctgcttatacagagtttattggaacagggatccatactccagtgcatgccacccttggtggggccttgtttcctagaaaccatgcatgtacttatttcataccatgagtctgtccagagtgcttgctacctgtgttctggagtctcgactgcctccctcccgcggggagtgtttctcctcttttttgaaaattcccgtcttgtggtgattcataagaccattaatcctgaccatcagggatatttgttccaccgttggaccattgcctcctctggaaacgccttgtcccccgatgttgttcacgttgactggagccgagaatggacattggtcactcagtcacgtctgcagtagttctgccacatgaatgatcatggctctagacattcaatgggtaaatgcaaattccggatcctgtcatggatgtccccatgcctggcaccacaacttgttttggcttgacaagcaacttatagcacctgctcaggagcattgaggcataaacactatacttcaatgacaagagtcaacagaactaagtagatgagacaaaaatgttacgaacattagctctataaacaagacagaatgagagctaagtaaaagagaaacccatctgacccatagatcacgcgggtatgaacattaccaccaacagacaccacaaaacaatcaatctcataactatccccaccttctttttataccaccacataaacaccttaccacccaaaacattattttatcacaacaaactaaataactaaacacggagcccaaaccaccttaacacaccacaacttatacaatttgatattacactcccctcatatcagctctccctaaacaccatccataccaataccatacaatcatctatcataacaaactcacataattactaccatacatcatacatcatctctactaccatctccacatacgaac

SEQ ID NO: 637592 - DNA, 243 bp, Homo sapiens
ggtccgagagaaattaggcctacgccgtcgcatttatgaatcattctattttccctccatcattttgatccccacctccatgtctctcatcatcatctgacgaattagccactcatcaatgtcttcttaactatcctctgtgatgaatgataaccatacacaacactaaaggacgaacttgatctcttatactagtatccttaatcatttttattgccgcaactaatttctctcggaccaatg

SEQ ID NO: 637593 - DNA, 731 bp, Homo sapiens
  misc_feature (48)..(48): n is a, c, g, or t
  misc_feature (65)..(65): n is a, c, g, or t
  misc_feature (70)..(70): n is a, c, g, or t
  misc_feature (99)..(99): n is a, c, g, or t
  misc_feature (114)..(114): n is a, c, g, or t
  misc_feature (116)..(116): n is a, c, g, or t
  misc_feature (118)..(120): n is a, c, g, or t
  misc_feature (124)..(125): n is a, c, g, or t
  misc_feature (155)..(155): n is a, c, g, or t
  misc_feature (178)..(178): n is a, c, g, or t
  misc_feature (182)..(182): n is a, c, g, or t
  misc_feature (186)..(186): n is a, c, g, or t
  misc_feature (193)..(193): n is a, c, g, or t
  misc_feature (203)..(203): n is a, c, g, or t
  misc_feature (206)..(206): n is a, c, g, or t
  misc_feature (227)..(227): n is a, c, g, or t
  misc_feature (282)..(282): n is a, c, g, or t
  misc_feature (300)..(300): n is a, c, g, or t
  misc_feature (416)..(416): n is a, c, g, or t
  misc_feature (421)..(421): n is a, c, g, or t
  misc_feature (514)..(514): n is a, c, g, or t
  misc_feature (520)..(520): n is a, c, g, or t
  misc_feature (523)..(523): n is a, c, g, or t
  misc_feature (625)..(625): n is a, c, g, or t
  misc_feature (711)..(711): n is a, c, g, or t
aaaaaaaaaaaaaaaaaaaaaaaaaaaaaaaaaaaaaaaaaaaatganaggaatgctagaaaaangaatnaattttgaagatctattaaaaataaaaanaattgtaccccctananannnatannaaaatagtatggatgaggtcctcaatgtcnataatgtcaatgcaagaaaaaanaaanaaanaagtagnaaaaaaaaanaanagcaattaattggggaaaaanaaaatatcatggccttcacaagaagcaacaacacagctttgtaacagggttatanaggtttcaaccgagaggnaaagatgcactaaactgcctacacatacccaggtatgtaacaagcaaggaggccacctcaagttcagtttccttcatgcatgacacatgctttttttctcctcatggacaattaangaagngtttcgtaacatgtctaaggcagcctgaagaaggtaggaaagccttagtagagggaaaatcaaaccaaatgagattaagtcaaaagaacaganaactancgnctgcttatcaactaaaaggggtgtggcatttaccacagtgaggagctaacaggagcctcccacactacatgcagggcccaaaggggccagcgatggtgtganaaccagccaccgatgatgagtttgcagttggaccaagtacagaaggaggtgtgctggcccatgcagggcctctgtgtgtgtgaggntcacaaggactagctgcagg

SEQ ID NO: 637594 - DNA, 308 bp, Homo sapiens
aatagtcgtatgccgaacaaagcaaagtataaccatgtacatattaatagggcacaaagagaatctggtagagtgccagcagtgtctaatcagataagtttatttcatatggaaaatgtgtgtcaatcttagatgaggctaatttgtagaaaataactgaattctggactcttatagatagtcagaaagggattcatttaacagtaaaattcaatccagatatatgtagacatatgtattaaaactttttaacccctgaaacttattgaaatatgtgccatattaatagtctcagcttgagacacgcg

SEQ ID NO: 637595 - DNA, 136 bp, Homo sapiens
  misc_feature (74)..(74): n is a, c, g, or t
ttgagacccccaccaactgcaaaatctgttcctggcattaattctccttcttctttgcaattcggtctttcttngtggtccatgaatgctttcttctcctcctggctggagcgagccatggcaaacttggaggagg

SEQ ID NO: 637596 - DNA, 139 bp, Homo sapiens
gatccccgtccaaagtatgatagaactattgtggcattgaacgtacccgaataattgttagttttagcatccaaaaagtaatattgatttgaaatgaatttttgtatgtgccaggttgaagagagtgctatgggtcaga

SEQ ID NO: 637597 - DNA, 927 bp, Homo sapiens
agctgatcacgcagatacctggctgagcttctgtgaaccccgatgagatgactcgcatgtggcttctacgttggcctatgtggcgcccttccagtgcttaccttctgaaagtgccggctccagcagtgttctcacaggtttaaagagcatgtaacccacacttcccccgaggacgtaatgtttatgcttgagtccagtgaggagacggcttgaaggccaatatgctgaggattttgccagactgattagggtgttgaaatgcagtgatccccagactgaaagtctgtgtgcggatgatgaagtgtttaccccagatttatctagtgctgcatgcttggtccttagaattgagaacatgaactataccctattgtggaccacagacattaggaggagatctgttgtgcacaaaccaatgtgggttccctgcaaacggtgctctgcccatttgaccccatgatccttgctttggacatcttggatcagcttcatcgctatggcactctgaacagcgcacagacactaggatgacaatggactcctaatgcgcccaaatatcttggttgacacagcaattcatttgtagctatgttagttggtgaaccccaagataagggacaaggttgacatacaatgtaattgtgcaccaggcatatctacgtaagtgcatacaaacatcaacgtgaactaagggagtttgaatatccgtggactggccataccattgcgtacattattgcaacaagtaccctacacaaattaacaacaaagtgatttacccacaaaccttaaagtgatgataacatgctgaaagcaagcagtcattaaacacagtgtatcagaagatgtagtggcacaccgtgacaaaacaatgtgataaagtacacgtatgagtaatgctcagtacagaacagaaatacgacacac

SEQ ID NO: 637598 - DNA, 414 bp, Homo sapiens
  misc_feature (314)..(314): n is a, c, g, or t
  misc_feature (340)..(340): n is a, c, g, or t
ccaacggggacggcagcggggccctggcttctcagaacagcaggtgcgggctgcctgggtcccatgcccggtgggggaggctgcacggttgggcccttgttcttcgctgtgtggccgccgaggctctccggaaggttctatgagcccgtcctaatatcttgtattgggttccattaagctggccagagtgggttctgccggttccaagtggtgtgtgggatggggaagtgctctcagctctgtccctgggacaggtggggggtgggcgcgtcacatgccagagatctggggtgaaggcctgaagacccttcccnctcctgctggaggagagccgacctcncccacagggcctcgtgggagtacaggcgcagcaggcccgtgggagatcaggagggagatgtgttcatagccggc

SEQ ID NO: 637599 - DNA, 273 bp, Homo sapiens
ggggaacccctatcaggtatgtattgaaaggaaaagacatcattatatcgaagagatatctgtaccctaatgtttactgtagcactgttcacggtaaccaagatacagaatcaacctaggtgtccaacaacagatgactggatcaagaaaatgtggtaagccataaaaaagaatgacatcctgtcatttgcagcaacatcgcatggacctggaagtcatgttaagtgagataagccaagacaagaacgaaaacatcttatgtttacaccaatg

SEQ ID NO: 637600 - DNA, 183 bp, Homo sapiens
tgtggtggcgcacgactgtggtcccgactactcgggaggcttatgcaggaggatcatttgagcccagaaggtgaggctgcactgagccgtgattacatcatcactgcactccagcttgggtgacagagcaagactctctctcaaaaaaataaaaaattataaagtatgtgagacttctggttg

SEQ ID NO: 637601 - DNA, 247 bp, Homo sapiens
tggtaatattggtatatttggtatatttgagcaacttgttctaactgtagggttttgaaaaaaaccattttttgtggatcttaaatattgtagtaaatggaaacgccctttttatgggagcctgtgctgggcgttcacacgtcacacacgagttgcctcttgagaaacaaggcaatccagttatacaactcatgtacaagttggcggggtcaccgcagctcgcaattcgataatccatgggtcatta

SEQ ID NO: 637602 - DNA, 349 bp, Homo sapiens
tccataatgtgtgccaggctggttcaaactactgagctcaagcgatctgcctgcctaggactcccaaaatgctaggattacaggcatgagccaccatgcctgtacttactcttttttttttttttctcggaaagggagttccattctggtggcccaggttgcagggcaagggcgcaatctgggctcacaacaacctcggcctcccaggtccaaggtgattctcgggcctcagcctcccaagttagcgggaataacgggcatgtgtaatcaccaccacaccttgacataatttttgggatattttaagataaaacagggggttccaccacagggggcacacatttaggga

SEQ ID NO: 637603 - DNA, 300 bp, Homo sapiens
ggtgactctagcggatctcacgggagccttaaacctctaaaaggcagaatttctgggaaacaggtaacagacaaaaactaaagtgcatcagttaaatgaacatttatctactggcccgaatctctgtgttgacactaactactggtgtccaagtggagacacggcttaaattggactggaggactattaagattggtggctcctaaattaacacaggctccctctggtgatgttgaattaaggaaattggttgggtggtaaaagggaagattttggtccctggtggcccaaaaaggtcct

SEQ ID NO: 637604 - DNA, 149 bp, Homo sapiens
catatcaggactagagagtgaatatattaatactaaggtcattctgtcccacgggaaacctgtctgggaagtctcccaatttatactcagagagacaacccatcagatgtcaccacggaacaccacacgatgaccacttcccacatgtg

SEQ ID NO: 637605 - DNA, 429 bp, Homo sapiens
  misc_feature (9)..(9): n is a, c, g, or t
  misc_feature (15)..(15): n is a, c, g, or t
  misc_feature (79)..(79): n is a, c, g, or t
cgtagtgangcgaangtgccggcctggccagggtcagggaagggaccgtagtgaggcgaaggtgccagcctggccaggntcagggaagggaccgtagtgaggcgaaggcaactggcctggccagggtcagggaagggaccgtagtgaggcgaaggtgccggcctggccagggtcagggaagggaccgtagtgaggcaaaggtgctgtgtctgccagggccagcgaagggaccgtagtgaggcgaaggtgccagcctggccagggtcagggaagggtgtgccaggcagggcaccccagggtcacaggccagtacagggaagggcttggtgtgctgagcatggcggtgaggtcagcatagccagggctgaggtgagtgcgggcagctgaggtctcagaggtcagcagggcagggtagaacccagggagggc

SEQ ID NO: 637606 - DNA, 318 bp, Homo sapiens
agggaaaggaggggagaaagaaagagggaggagagaagggagaggaggaagaggagaaaagagagggaggagggcagaaggaggagggaagagggagggagagggagggagagaggaaagagagagaagaagggagagaaagagagagggaagagggaaagagggagagagaaaggaaagggaaaaaaggggggaagggagagagggagagcaggagtcactatgactggctctaactctctctctctatatatctactactactactactactactactactactactatatatatatatatatatataacacgtgc

SEQ ID NO: 637607 - DNA, 105 bp, Homo sapiens
  misc_feature (26)..(26): n is a, c, g, or t
aggatcccttcaatttctacacttanaaagtggttcaattcccctgttggcatatgattatttttactaaaattaatcatatgccaacttggtgttagaaattga

SEQ ID NO: 637608 - DNA, 1014 bp, Homo sapiens
gtgaaatcggtaaaggaggttttgcacttttctgtgaccagacgttgaggagactgaccaagctctcgcagccccggaggtctggcatcgtgcttgagaagcgggcgtccattagcactatgcgggggaagcagacatccgtatacagacacgtggcagacatgcagcgcagacaagaaggacgcgtgttgcccacacgcagacagccagccgccgtgatgacctgggagcatgctccgtgtgcatggacggtcgcgtgctcccgcggtggcctgcccctgtggacggcagtcacctgagtcgtggcgcggatcgcggcttcggcagggataggacccagctggcgcttgcagagtctgcactgtgctgtgctagttccgcggcgagcgagcactggaaggcacatgtgaggctgggaagccagtcatacaatcatggctacggggaagacggcacttccctgcaacaagcgcctgcagcagctcatggcccgagctagccgcggctgcgcactgacgttccaggagagctgcttcagaagctccgattgggcagccagatcttcatcgagcacgtggccgatgtggacaccttgttggagtgtgtgaattaagaaggtccccgtactgctgtctcggggcatggctcgcctggtggtcatcgactcggtggcagcgccattccgctgtgacttggacagccgggccgtccggccgcagggaccgggcaatctgcggtcccctgggggccacgctgcgtgagctgagcagtgcttccagagccctgtgctgtgctcaacagtgacagaggcatggaggagcagggcgcacacacgggccgcaggagtctggacgaaacgggttaccccagggcctggggcataacaggggcaacaaggtccggtagaacacgggaagaccgcacccggaagaacaggggacacagagccagcagaacccgcagcgacacggccaacagccccacaggcacagaacggaaggccaaacagaagcg

SEQ ID NO: 637609 - DNA, 204 bp, Homo sapiens
tgagatacccatgccccctagcggggggtaaaatagagacccagtaaaattgtaataagtagtgcttgaattatttggattcggttgtgggctattatactatggtgagctcaggccattgatactcctgatgcgagtaatacggatgtgtttaggagcgggacttctaggggatttagcggggtgatgcccgctagcggacat

SEQ ID NO: 637610 - DNA, 314 bp, Homo sapiens
ttctcctgcctcagactcctgtgtagctgggagtacaggcactgcaccatgcccggtaattttatatatttttagcagagacagtgttcatggttagtagatggtctcgattcctgacctcgtgatcgccgctcagcctcccaaagtgctgggattacaggcgtgcaccgcgcccacaaggcgggtcttgctgtgtttcccagactagactggtcttgaattccagggctcaagagatctcccacctcagcctcccacagtgctgggattacaggcgtgcgctcacacccagcctattcaaaatttttttttct

SEQ ID NO: 637611 - DNA, 245 bp, Homo sapiens
  misc_feature (156)..(156): n is a, c, g, or t
ggatccccagtgactatgattacatcttcactgaccgttttactgcgattttaacacgtatcatgagatctaccttcttagcagatttttaagcgggtgggggcttcccgttgactgcagttgccgtgttgtagggcagctctctagagcttattnctcttgctgcactgaaaccttgtgcccattgattggcaactccacattttcccccactgcagtccctgaccaccaccattccactcttc

SEQ ID NO: 637612 - DNA, 222 bp, Homo sapiens
gtcctctcttatacacggttttgctttccatagtttcggttacttgcagtcaaccgtggtccaaaaatatgcgatggaaaattccagaaataaatccttcataagttttaaattgtgcaccattctgagtagtgggatgaaatgcgtctttctgatccattgcctcctgcatgcgaatcatcatttgcccggagtccccacctgcccatcacttagtagcca

SEQ ID NO: 637613 - DNA, 111 bp, Homo sapiens
gcggccgcctactactactactactgctcgaattcaagcttctaacgatgtacggggacatgttttaaatgaatttgataatgaaattatactattatcattcttaaaaaa

SEQ ID NO: 637614 - DNA, 1372 bp, Homo sapiens
gttcctgcctggcaggtgcaggtgctggccatctgcaggtggaaggaggtgggaatcttggatttttggttattttttggtcttattttttatttggagaatgaagtctcgactctgacaccctaggctgggcagtgcaagaggagtgtcgatctcgagatcactggcaaactccagcattccggggttcaagtgggttctaccggccccaagactcccaagtaagctggggattaaccaggcatggcggccaaccagcgcatcagcagtgactataagggaatattacagctagagcacgtgggagttacaccagggtgggcacaagacggggtctcaaacctccgtgaccctcaaggtgatcggcacacgcacatgcggacctcccagaaggtgcgtggcgacttaacaggcgttgagacacaggtgaaacccggagggaactctgggacattcacatagacgggcaccatcagatatcgggcatccagaacggaacacctccgtgccctcgtacgcaaggaccggggagtcgccacgcccaacgacccagagagcccaggggccaagggtccccgtggcgctcctatcaccccaccccggtacggcactgggacaggtagaggcacaatcacagtactagagagaaacataatacccagctggatgcagacatggcacaacagtgataacagcggggactaggagaacccagaaatgggctgaggagccccggggtgcaccacggcaccacacaaaagaggagcaactgggaactgtggaaacaccacggctggcgtgactggaccacaggtggtgtcactcgattgatcacccgtcacagagcacaccccaacgacagggaccaaccgatggagcgacgcaccagcagggtagtaccagaggccaatggccctggggagaacaactcacaaagtaaacaccacccaaagggcagcacaacgaggactcacctccacgtacgaaggagcgacatatcgtggaaggaacgagggggccacaccggtgaaagacacagatgacagtacggggtacctagcgaaccaccaagtcgcccaggagggccaagagcggagcaagaacacaagagggtatcaaaacggggaggataaaccaccacagatcggcgactgccacggaccacccagcgggagaccacggtgaccagcacagtcagcaggtagcagcagcgacggaagcacgccgtcaagcaacgagtcacgcaccgaaccaactcgagaccagtgactagtagcagtgcaagccagggtggcacgtcacacatcagacaacaacgacgcaccagatcgcacaacgctaagaagcgaggagagacaccgcggtgagccac

SEQ ID NO: 637615 - DNA, 1206 bp, Homo sapiens
taaattagggcttatttggaaaaattctgagtttaattcaaatgtttgccaataccttccaaagttaagggtaatatccagaagaacagtgtgtgtggtgactcagaagtggcttaaagaaaattctcgtggaatattcacatttcgaagatcccttattaatgaagtgtcttgtgacttaaatctaaccaaaaatgtgcaaccatttatctctttgtgtaccattttccatttattattaggtgtcttaaccaaagcctttaggtgtgacaaaccacaattaaaactactataagccatatttgtgcgtcttaaacaaacaacaacaaaaaaaaaaagcaagacaaaaacacaacaaacaacaacaagaacacaacaacaacaagaacaacagacaaaaacaaagaaaataagaacacaaacaacaaacaaataacagaaacaacaacaaaaagaaaacataaaaaacaaaagaaacagctccgagaagagaggagagaggaaggcgaagaaaggcaagaggcaagcaccggcgggcagacacaccaccagcccaacaacggcagaacacacactgaaaggaagagagaaaggacacaagaacgagaacaacggagagcggggcctgcgtagaaaggaacgagaggcggcaggcccccccgctgaacctaacaccgaggacgcagacagagagacaacgaacaagaaagagagagaaaacgagccagcaaagacagacaaaggcaaacaaccaaaaacgaggagaggggacgcggaaacaccaaggacgcaccacgaccaggaaggcgcaaggacaaaaagacaacgagacaaaaagacgaaaaacgggcggagcggaaagcaagagaccagaaccaccgcgacctccgcgcaggaacagacccaccgacgagcgcgctacggggcagccacaacaaaataagacggcgacaagaacaaaaaaacaacagtcagccgaccgcagcgacgcacacagggcagactaacgaccgcaacaccctgagtgccgaacataagtaccgcgtgacccacctcacagtacaacacccctaacaaaaacacagcaccaataaccagcaacccaccccacatcccacaccaagagcccacaccaaaacacagcaaacccgaagcatccacaacaaaaatcgtgagccgcgaagtcacatcaaagcaagactaacg

SEQ ID NO: 637616 - DNA, 285 bp, Homo sapiens
  misc_feature (60)..(60): n is a, c, g, or t
  misc_feature (283)..(283): n is a, c, g, or t
gaaaaaaaaaaaaaaaaaagctttttccctagatcagcatatacaaaaaaacattcttcnaacatgaaggagaaataaagacattagctgacaaacagatttaactcaaagattacctcaaggcatttagtagtcaaactcccaaaggtcaagaatgaggaaaggatctgaaaagcagcaagaaaaaaaaaataacatacaatggagaaccaatacatctagcagcagagttttcagtggaaactcaaaagccagaagagagtgacatgacataaagagctgnca

SEQ ID NO: 637617 - DNA, 103 bp, Homo sapiens
tatcgatagcccgacagcaggacatgctttattctgagcaggctgggaccttcggccagcagctgagagcacagactgggtggggctgtacgtccacaaggtc

SEQ ID NO: 637618 - DNA, 983 bp, Homo sapiens
cccacgcgtatgcagccgggctgctgcccgagcccggggtggtggggtggcgtctccccgtgccctgtccctgtcccctgtgcctgggctgctgggctgtgatgtggaccaccctcccctgtgtgctccctggtggtgtgcctgcactcccatcacgactgtgcttcccatgccctgcctgctcatgtgtgcttgctctctgtgtgaagcatgataatgaacctgaggggaaccaggacagcaagcgaggtgaccgaatcggctgccagactgtagagggaccagagcagaacaaggataccgacgagagccagctagcagagaagcggagcaaccgcacggtacatacccgaggccactgcagcacgaccatagctgactgactagaggtagctgcgacgaactcatgcgtacaacacgcagccgatatgtgcaacgcacgcagtgacggagtccctgacactgatacaaactgggctaccacactgtgacgacggcgcgtgcacgacacgacggaacaccagccagagctagacaaaggaagacaagcacgcagatcgagtgacgacaggcaaacacaaacgtgcaaatgacagtcaacaaagcaaaccatgaacagcagagcgacttgcacaccatatgtaggcctgccgatgaagcagacctaggtgcccacccagatgagagcatggccaaagcccacgagaaccagttaccgagtaggactacatacaagagtgtcgatgaacgtagcctgacataagaataacccatccacgaattactatgaggcatggccaggctcatggagtagaggaagaaagaagagcatagactgacgaggagcgcacaaacgagtaacaagatgatttgagttggggacaagaaatatctggaaaaaatacaacgtgataaaacggaagaaaaggtagcgggaataatggacatgtaaaaatgagagaatagataggaataaagaaaaa

SEQ ID NO: 637619 - DNA, 409 bp, Homo sapiens
  misc_feature (77)..(77): n is a, c, g, or t
ccagttttgccccttttgtccccctgtaagtactcagaaccaggaggactagaaaaccccttttggccagataagantacgttttttattgcagcttttgaaccagagactgatgttgcccccctttttttccctttggcaggaatgggagtccagtgcccttaggccccgcaagtgccccaggaattttgaatccagatggttatcccccccactccaatgaatattttgtatataacccccccccggtccgtatgcgggcccttttaaaggttcagtttaatttccttcccctggggggaatgttgatattaaataacccaaagttttgtttttccaccaaaaaaataaccagggttggccttgtgaattttgtgattttttttgtaataaaaacgggcccggttta

SEQ ID NO: 637620 - DNA, 123 bp, Homo sapiens
caggatcgcttatctaaatgctgtactaaatggctgttacctaaatggctgtacctaaatggctgttacctaaatggctgtacctaaatggctgtacctgccatttaggtaacagccatttag

SEQ ID NO: 637621 - DNA, 347 bp, Homo sapiens
tagaacatggccagacgcggtggctcacgcctgtaatcccagcagtttgggaggccgaggaggctggatagcctgaagttgggagtttgagaccagcctgacctacatggagaaacctcatgtctactaaacatacaaaattagccaggcgtggtggcgcctgcctgtaaccacagctactcgggaggctgaggcaggagaatcgcttgaacccaggaggtagaggttgtgagctgagatcacgccgttgcactccagtctgggcaacaagagtgaaactccatctccaaaatatacataggaatgatatatacctcatggtgctatttgctagggtaagagggggt

SEQ ID NO: 637622 - DNA, 539 bp, Homo sapiens
tagaaataggagtgcaggtaaaggctaatcagcctcccaaagtgctggttattacaggcatgagccaccgcgcccagctgccagcgttgttcttagagcccagagatgggaggaaaattaaccagaggcaggtatttgaaggcagtgggacaggaagaggcttgttctggacttccaaatggcttcctttaaaaagaggcatttaaatttttccagttgctttttatagttgatctaggatagaaaaattatggccatcatggtttcctttcatattgttaaaaatgatcaaggggactttaagattttatgagaaaggcaaattaccattgttttattcctcagtgaacctggaggagccagacctttatcagtcgtgttgtgttccaaatataacagctatattctcaatacaaaagactctgatgagagcaacatgggagcaaaaaagagaatgtcctactttcattttttaaatatgtttcagaggactcattaacaggaagtatatctaaaatgcaaaaggtcaactttgtact

SEQ ID NO: 637623 - DNA, 153 bp, Homo sapiens
  misc_feature (7)..(7): n is a, c, g, or t
ggaattncggccgcatccgcactagaaagttcatgaccaaccgactacttcagaggaaacaaatggtattgatgtctcaccgggagcgacagtgcctagacagaatcggaaactagcaatgtacagacacacgatgtactgatgatcgactat

SEQ ID NO: 637624 - DNA, 170 bp, Homo sapiens
gggcccaccataattacccccatactccttacactatttcctcatcacccacctaaaattatttaaccacaaacttaccacctacctccctaaccacaagcccataaaattaaaaaatatataccacaccctgagacccaaatatgacgcgagatctctgttgcgttaca

SEQ ID NO: 637625 - DNA, 554 bp, Homo sapiens
  misc_feature (40)..(40): n is a, c, g, or t
  misc_feature (153)..(153): n is a, c, g, or t
  misc_feature (183)..(183): n is a, c, g, or t
  misc_feature (185)..(185): n is a, c, g, or t
  misc_feature (207)..(208): n is a, c, g, or t
  misc_feature (210)..(211): n is a, c, g, or t
  misc_feature (219)..(219): n is a, c, g, or t
  misc_feature (222)..(222): n is a, c, g, or t
  misc_feature (226)..(226): n is a, c, g, or t
  misc_feature (234)..(234): n is a, c, g, or t
  misc_feature (237)..(237): n is a, c, g, or t
  misc_feature (256)..(256): n is a, c, g, or t
  misc_feature (260)..(260): n is a, c, g, or t
  misc_feature (276)..(276): n is a, c, g, or t
  misc_feature (292)..(292): n is a, c, g, or t
  misc_feature (340)..(341): n is a, c, g, or t
  misc_feature (343)..(345): n is a, c, g, or t
  misc_feature (347)..(348): n is a, c, g, or t
  misc_feature (351)..(351): n is a, c, g, or t
  misc_feature (359)..(359): n is a, c, g, or t
  misc_feature (381)..(381): n is a, c, g, or t
  misc_feature (400)..(400): n is a, c, g, or t
  misc_feature (422)..(422): n is a, c, g, or t
  misc_feature (449)..(449): n is a, c, g, or t
  misc_feature (470)..(470): n is a, c, g, or t
  misc_feature (473)..(473): n is a, c, g, or t
  misc_feature (475)..(475): n is a, c, g, or t
  misc_feature (477)..(478): n is a, c, g, or t
  misc_feature (498)..(498): n is a, c, g, or t
  misc_feature (505)..(505): n is a, c, g, or t
  misc_feature (513)..(513): n is a, c, g, or t
  misc_feature (547)..(547): n is a, c, g, or t
  misc_feature (554)..(554): n is a, c, g, or t
ctttgcgatagatgaacaaaatggcccatatcatactganaaatccctttaaaataatagactataatttgaaagatgaaattttatcagtataacacacatttaaactaatattttaaaatttaaaatttgtaaaaagcctacatttgaganagctaattattcacaagtagggacattaanantcattccataatcatcattatnngnnccacaganagnctgntgcaaatnggnatatctaaattcaaaattnaggncatgcagatatgattncgacatctttctcttngggagcttgagtttacgtatttagataaacacaacacagtattatttnncnnnannccncccggccngacgcaggcttgccttcaagantccaatatgatgcaaagcntaacacatttctccagtctggnggtgctgctgctccctgagtgtaactntctctgtcatgtatttcctanagngncnntttgagagaagagagatgcnaaatgcnatcaattntgagagtgtcccacacttaaacctataccaaganattcagn

SEQ ID NO: 637626 - DNA, 233 bp, Homo sapiens
ggggagccaaaaagggtcatcatctctgcccccttctggctgatgcccccatgttcgtcgggggggtgaaccatgagaagtatgacaacagcctcaagatcatcagcaatgcctcctgcaccaccaattgcttagcaccccgggccaaggtcatccatgacaacttgggtatcgtggcagtgatggcatggccgggggtcatgagtcctgccacgataccaaggggggtaccg

SEQ ID NO: 637627 - DNA, 176 bp, Homo sapiens
  misc_feature (65)..(65): n is a, c, g, or t
  misc_feature (80)..(80): n is a, c, g, or t
ggacatcaccccattagagagacagcaagtggagctgtcccctactttgtgccagttggcctctnggactggacatctcnggctgcgtatcttgaacgtggccctcctttggaactactcgcacaaggacgatgctgggctggagagatcattcctcgcttccatcctgagtgacc

SEQ ID NO: 637628 - DNA, 493 bp, Homo sapiens
atctagaggtcccgtctggagcagctggggaaggcctcagaacctggacaatcagggcagagggggagggggagcaatgcaccttcttcgcagggcaggaagagagagagagagcaagggggggaggtgccacacacgtccaaacaactagatctcatgagacctcactaacacaggaacagcaagggggaaatcggcacccatgatcccatcacctcccaccaggtccctcccttaggagtgggggataacaatccagcatgagagtggggggggggacagggagccaaaccatatcaccaatgctcagtgtgatttttcagaatataagcagtacaaggaatggcaaatatggcaaaatatccaattgggtcatggcatctatgcagcctccaaaatactatgcacttgatacggggcatgtcaagaacacccactccagtcgtgtccctaggaatccaagccacaccaagggattgtttttcaaaggttc

SEQ ID NO: 637629 - DNA, 637 bp, Homo sapiens
cccaccaaattgaattgtgttaatagttcccataatccctacgtgttgtgggagggacccagtgggcagtaatttaatcatggtggtggttaccctcatgctgttcttgtgatggtgagttctcatgagatctgatgggtgtttttttttgttttgttttttgttttttgagatggagttttgctcttgttgcccagactggagtgcaatggcacacgatctcggctcaccgcaacctctgcctcctgggttcaagcgattctcctgcctcagcatctcgagtagctgggattacaggcatgcaccaccacgcccagctaatttggtatttttagtagagacggggtttctccatgttggttaggctggcctcaaactcccgacctcaggtgatccgcccgcctgggcctcccaaagtgctgggattacaggcgtgagccactgctcctggcccaagatctgatggtttcgtaagggaattttcccccttagcttggcacttcttcctgctgccatgtgaagaaggatgtgtaggcttccccttccaccatgatggtaagtttcatgaggcctccccagcctgtgggactgtgagtcaattaaacgtgttactttatacattaaccaaacacaccac

SEQ ID NO: 637630 - DNA, 294 bp, Homo sapiens
  misc_feature (206)..(206): n is a, c, g, or t
gaaagccctgtagaaaagtgatataaatggtaggctaaatttagctatccttagacccctggccttcatgccattataatagcacaaaaagaaacccgggactctttgaattatttacatcctcataattatggtgttaagggggatagttacaaagatggaggacagtttacctgccatcaagaagttcatagtcttacataggngacactcatataaataatgaaatcttgttccatagggacaaaaatataggggagcatatttggattctgctctggtgtataaagcagg

SEQ ID NO: 637631 - DNA, 164 bp, Homo sapiens
tccttcgaagcccgccaacgggtcccccactcacgcatggggccctggcgataaggacccccctccctccgggggccccggggcgcgtccccttagagccatgcccggctgccccgcccgccccggaggaccctagagaagcgtcgtgggggccatggcggccg

SEQ ID NO: 637632 - DNA, 117 bp, Homo sapiens
tcagctcggtacctgctgggcggcatccagggcggtgaagttctagtatccattgagacaagctctagtacagtagcatgcagtcccacaacttgtaccagcatcccccgccgtatg

SEQ ID NO: 637633 - DNA, 272 bp, Homo sapiens
tcctgcccggcaaattccaccaacctcagccctgggagactcagccctaagacctggggatgacaatagcctggggtccctgcttcccgctggcctgtacctctcagggcctggaactcaccccctccacacctgggactccaaggtgcggaatatccttcaggccaggacacctgggactatccaggtcgtcgggaccccagcttccaccaaaggggcatccaaggtcccctcggccagcccccttccctcagaagcgctcccactccctg

SEQ ID NO: 637634 - DNA, 114 bp, Homo sapiens
tgctccgcctctctggtacgttccctagcgtggttgcttgttagtgatagatagggtggcgtgcgtgagctctcacttgacatgagtccttgactgccagccaggctcgctgga

SEQ ID NO: 637635 - DNA, 468 bp, Homo sapiens
  misc_feature (3)..(3): n is a, c, g, or t
  misc_feature (43)..(43): n is a, c, g, or t
  misc_feature (156)..(156): n is a, c, g, or t
  misc_feature (166)..(166): n is a, c, g, or t
  misc_feature (208)..(208): n is a, c, g, or t
  misc_feature (234)..(234): n is a, c, g, or t
  misc_feature (404)..(404): n is a, c, g, or t
gcntcgtacctgtcaggttggaggcttcaccatccaggagacnagagatgctgagccgcatcgagaacagttcaacgccgcgccatggcccccagtgtctgagcacgcatcattcaaggattcaccaagcagaatacccggagcagccatccacangtgctgcagntcatgctgcggcgctgcgaatccagcatcgcatgcagcgcangttctttacgcctcaatgagtcgcgnccgctcatggactcatggatcgcccacgcctcgccttacctgccgctgcctgccattgacaatgttgctgggacctctgcctccccactgcagccctcgaacttcccaggcaccctcctttctgccccagaggaaggagctgtagtgtcctgctgcctctgggcgcccgnctctagcgcggttctgggaagtgtgcggcatccgttaataataaagtccacggtgtgttcaggg

SEQ ID NO: 637636 - DNA, 111 bp, Homo sapiens
caaggtatgctgttactgggacttcctcgtccatggggaatattgcaatccccgatgcatacaccacatgaaatatcctatcatctgtaggttcattcatttctctaacag

SEQ ID NO: 637637 - DNA, 854 bp, Homo sapiens
cagaagtaggcttcagaaggttgataataacaaacttatctgagctaaaggagcatgttctaacccatcgcaaggaagctaaaaaccttgaaaaaatattacacgaatggctaactagaattaccagtgtagagaagagcttaaatgacttgatggagctggaaagcacactacaagaacttcgcgaagcaaacacaagcttcaatagccgattcgatcaagcagaagaaaggatatcaatgatgaagatcaaattaatgaaataaagcgagaagacaagattagagaaaaaagagtgaaaagaaacgaacaaaacctccaagaaatatgggactacgtgaaaagaccaaatctacatttgactggtgtacctgaaagtgacagggagaatggaaccaagttagaaaacactcttcaggatattatgcaggagaacttccccaacctagcaaggcaggccaacattcaaattcaggaaatacagagaacaccacagagatactcctcaagaagagcaacccgagacacataattatcagattcaccaaggttgaaatgaacggacacaactggtctacgggagtgagagagaaaggtgggttacccacaaagggaaggcaatcagactaacagtggatctctctgagaaacctacaacagaaaaggtagggcaatatcacattcttaagcaagaatctcaactagaattctatcagcactaagtcctaggagggacattactgttcacgacaccatgcggagattggccccagccgctaagactggggggcacacggtgcacggtcccggcaacgctggactctgacacgcccggacaccacaagggccaactg

SEQ ID NO: 637638 - DNA, 401 bp, Homo sapiens
tgtgaatacaccagcggcgttactcataatagtcaaaaagtggcgacaacccaaatgtccatcaactgacaaacggagaaacattttcgtctaacaaacaaaacatagtacatccatgcaatgggaatatattcagtgataaaaaggaattaagcacctgaaacatgccacaacgtagatgaacctccaaaacattatgctaagtaaaagaagaaacaaaaggccacatatgattctatttatatgaaatgtccagaataggcaaatctagagacaggaagtaggttagcaggttgcctgggctggaggggttggggagaaatgaggagtgactactacaggtatggggtttctttttcgggtgaggaaaatattacagggtgggtgcgcggtgtattccg

SEQ ID NO: 637639 - DNA, 944 bp, Homo sapiens
  misc_feature (413)..(413): n is a, c, g, or t
ggcggggcggtgacggtgtgggaggtggtctcactctcgggaaaacggctgggcaccgtcgtcgcgctgacggtggttctgtacctgctccgagtgtgcttagcgatggactggaaatccgtgcggcgccagtcactcggagctaatccagaatctgcgcaaaaatggaatcagtcaatgcacagtataaaggatactgttgaaggtagactcgctgggctgacagaaccgtctcccactgagttgccaaaactgtaaaccatacatggattctccacaatcaattcggtttccaaagtcaagaatcgagatgctccacagcagtgacgaatgcatatgcgctagaatctgtactattggagtcaggttgcgactgaaggagcgaaagctctgggatgtagggaatctgtganatgtgagaatccttgtactgcattgttgttggcaacttggattggtgagcgagttgtacgtgggaaaagaggtcgatatggaatctggactcaacatttaatagagcgttacggtaagactgaagtcacgtaaaattaagttgtcaatcggaaggggtagagatcctagaacgaaattcgtggttcgtaatccaggcggaagaagtacacgttggttacgtatgcggggcgatcggaagaaactggcgatcattgccgaaggaaggcgccgatagtgatagccgaattccatgatgggacgctggagcgccgtgatatagtaaccgccagggcgtctaactagactccatgtaaacagccccggcacgggaaagaatacgctattcgacctggtggggtcccagctgggcgggagacgccaaactggtcgcggagcacacatgaccgaggtaccacagatgccagcaattgcaacgggaagcccactgcaatgggccgccaacatagtgccctgcacaacactcaacgaaa

SEQ ID NO: 637640 - DNA, 548 bp, Homo sapiens
atcgcttgaaccagggaggcagaggttgcagcaagccaaggtcgcgccattgtactccagcgaaactatgtctcaaaaaaaataaataaaagaaagaaaagaaaaagaaaaagaaaccacacaaagtatgttgtcaggacacaataaaattaaactagaaatcaataacagaaagctagctggaaaaaccccaaaatatctggagattaaacaacacatttcttttttgagacagtttcactcttgttgccagggtggagtgcatggcgcatctcggctcactgcaaccttcgcttccggtttcaagcgatctctgctcagctctcagtagctgggattacaggatgcgtcacatactcagctagttttgtattagtagaacgggttcacgtgtggtcagactggtcttgactctgactcaggaatcaccgctcagctccaagtgctgggatacaggtgtgagcactgcgcggcacacacgctttgagtacacatggcaagagaatccagaagtttaacatgtgtcatgattaatctatgaatgaatc

SEQ ID NO: 637641 - DNA, 567 bp, Homo sapiens
  misc_feature (12)..(12): n is a, c, g, or t
cgtcacagagcncagagagcgtcctgtaggaacgtcacagagcccagagggcgtcctgtaggaacgtcacagagcccagagagcgtcctgtaggaacgtcacagagcccagagaacgcctggggacggtcggggaggcagttcggggaggggacgattaagttccctcagagaggaagccgcgggccgactggagtcgttttcgtgctctccgcacccgcccgccgcgggtagcatcttctcagcgccccggcgcccaggaacgcccaggaaacccagtcctcctcctaagcaacctgcggcgcggggacgcccgccttttgctattattataaacgtgcgtgcgactaaaccttcggatttttagactttcttctcgcttcctctgacccaggctgagggagcccccgaggctactgcggggcggggccggggcggggtggggcgccctcgccgcctcaggcagcgccccggccgctggcgggaggcggcagcggcgcgggccgagcggcgcggggattggctgcggcgggcggagacgtcaggctcccgcggcccaagcggccgc

SEQ ID NO: 637642 - DNA, 402 bp, Homo sapiens
tcctaaatgagtcgctggatcctcatgcgtccttgcatagtttggtttactaaaacaacacattggctgggtgcagtggctcacatctgtaatcccagcactttgagaggccgaggcagggggatcacgaggtcaggagttcaagaccagcctggccgacatggtgaaaccccatctctactaaaaatacaaaaattagctgggcgtggtggcgcgtgcctgtagtcccagctactcgggaagctgagacaagagaatagcttgaacccgggaggcggaggttgtggtgagccgagatcacgccactgcactccagcctgggcgatagagggagactccatctcaaaaaataaataaataaataaataagaaataaaacaacacattacggtttatctttat

SEQ ID NO: 637643 - DNA, 477 bp, Homo sapiens
  misc_feature (12)..(12): n is a, c, g, or t
cgtcacagagcncagagagcgtcctgtaggaacgtcacagagcccagagggcgtcctgtaggaacgtcacagagcccagagagcgtcctgtaggaacgtcacagagcccagagaacgcctggggacggtcggggaggcagttcggggaggggacgattaagttccctcagagaggaagccgcgggccgactggagtcgttttcgtgctctccgcggggacgcccgccttttgctattattataaacgtgcgtgcgactaaaccttcggatttttagactttcttctcgcttcctctgacccaggctgagggagcccccgaggctactgcggggcggggccggggcggggtggggcgccctcgccgcctcaggcagcgccccggccgctggcgggaggcggcagcggcgcgggccgagcggcgcggggattggctgcggcgggcggagacgtcaggctcccgcggcccaagcggccgc

SEQ ID NO: 637644 - DNA, 240 bp, Homo sapiens
actctagaggattcccagtgagccgagatcgtgcactgtacccagcctgggggacaagagcgagacttcatctcaaaaaaaaaaaaaaatcagttggccttggtggtgcacttttatagtcccagcctatgtgggaggctgaaacaggaaaattgttttaccccaggagttcaaagttacagggagttaggatcacacaattgcactccagcctgggtgacagattgagcacactgtctc

SEQ ID NO: 637645 - DNA, 432 bp, Homo sapiens
tgagcaatcgaccggctcactgcagccattccaagaagtatcttgctcacggtaaatgcaaagtaaacaaaataccacactgcatatttgaaacaaacaaatgtgacgttgcctatactggcctcatgtgcagaaggaattttggtcagacaatgacaaaaaaaaaaaaaacagatggtgaaggggaataaaaagcacaattcttggtatcgggaaacgttccacgggcaacacaaacgtgtatgatacagacgtaaccgggaacagtagttatgtttctcttcctatccccaaagaagcacaatagaaaaaatagacgcaaaagggaggagggtgtggttaccagggtaattccacgtgcacgccgggggaaatgaatacacggggccacagtgagcagtgccctgggtggatatcccgggggatcctcaa

SEQ ID NO: 637646 - DNA, 657 bp, Homo sapiens
  misc_feature (548)..(548): n is a, c, g, or t
gcgccgtcttgatactttcagaaagaatgcattccctgtaaaaaaaaaaaaaaaaatacggagagagggagagagagagagaagaagagagagagacggagggagagcgaaacagagcgagcaacgcaatcggaccgagcaggtcgtacgccgccgcctcctcctcctctctgggtcttcgctacccagggtgacccgaggaggggactccgcctccgagcgggctggaggaccccgggtgcagaggagcctgggctcgcagaattggcagagtctgtcgcccctttttacaacctgggtcccgttttattctggccatacccagttttggggattttggtgtttcccctttcttctcttgggctaaacggacccctccaagataatgttttaaaaaaccttctcctttgggctcaccttgggctttcccagcctttccaatccccccaaccggaaagcaaatcattcaaggaccccggaacctccggaggcaggagcccccggacctccaagggggacaggcctccctccccggggcgcggggtcangggcccgggcgagagggcgcgagcaaagccgaggcatggaggtgacgggggacaagtcgagctgggtgagccaccaacaccccgcgggtgccaaggggagcaccgggaa

SEQ ID NO: 637647 - DNA, 175 bp, Homo sapiens
cctgggtggcccatctgctggctacagtaagtcttaacgagcaggtagagcatgtccgtttaattgggtggaacgttcatgcgctgtataaaataacagtaccctttcatttgaaagagctgctgtgtgcaacatactcatatttggtaactgtatatgacccttttaagctgga

SEQ ID NO: 637648 - DNA, 383 bp, Homo sapiens
  misc_feature (137)..(137): n is a, c, g, or t
tacagaaattagcagggcatgttggtatgcacccgtaatcccagcaaatcgcttgaacctgggaggtggaggttgcagtgagccgaggtggcgctactgtgctccaggcccgtgcaaacagaagcgaggacactgtnccaaaaaaaaaacaaacaaacaaaaaaaaaaacaaccaaatgggggagaaacatgtgggaacaaaattttaagccattttttggaaaaaacaaaaaacaaacaaaaaaaaaaaacttttgtgcgggcccgccgcgcccacaaaaaagtttcattcacaacacctcacttggtggggcgggggccccacaatagtgtaagggagaacagcgggccaaacagtgggtcccaagaaatctcggggccaa

SEQ ID NO: 637649 - DNA, 273 bp, Homo sapiens
  misc_feature (251)..(251): n is a, c, g, or t
ctggagcggttttctccatgtttgcccaggctggtctcgaatgcctagactcatggcgatctgcccgcctcggacctgcacaaagtgctggggttacaggcatgcagccactgtgcccggcctaaagtcttaaatatagctctgtggtctgagaaaaattaggctgaagtcattggtgcctacctattacggtagatcagacggctttcttaccaactcttttccctcccgttccccatccttcaaatatnattctaagttttagtctctgct

SEQ ID NO: 637650 - DNA, 355 bp, Homo sapiens
agagaactagtgttctgttatatacttttttttagatgctttccattacctattgattgaagcacaaagaagagaggctgattaaagaaatttatggtttatagaccgggtgttggctttacaccaacgtacaagaatagcagatgaataagctattgatctacattttctttctcttattctcatggaatgctgagatgctctttgtgatgttataagcctaaggtagctagactcgcagcagcaagttagttaccctcctcggcgaatcatggcttattatcgacagtcttgcgacacttctctaccttgtgcttcacgctcagcacgtgcactgtgtggcttgtttgtctgt

SEQ ID NO: 637651 - DNA, 225 bp, Homo sapiens
ctacggaggagcacagcaagtgccactcaggagtggctagagaagcaggcccacgctgagaaggagctcggtgctacgccctgcaggacaagaaatgccttgaagagaagaacgaaatccttcaggggaaaactttcacagctggaagaacacttctcccagctgcaggataacccagcccaggagaagggcgaggtgctgggtgatgtcttgcagctagaaagc

SEQ ID NO: 637652 - DNA, 144 bp, Homo sapiens
cacgaggcctgattgtgacgcaaacagtgccggtggctcggtcgtgccctctgagtgtctgaacgccatggaggagcacgaccatggtgccctgctgctgctctcatgcacgactcacccccatggacagtctgtcatcacggt

SEQ ID NO: 637653 - DNA, 272 bp, Homo sapiens
tggctgggaagttgggaaagaagagagccccagcgcgtgcattcaagagagtataaacctgagtgccattcaagcattggtgggtgcttggaggtccggtgcaggtctcttagaagtttaccctgaagacggctagaatggctagttctgtgaggctggttctccccagggatactcggctccgggttccctccctccagtccgggctcggggtaaaaggccaagtcagcaatcatccatctccccacctccttcgggccgggggtacggag

SEQ ID NO: 637654 - DNA, 899 bp, Homo sapiens
gttccccaacttttcctccgaccccctaacaacccccctcctaatactaactacctgatcctacccctcacaatcatggaagccaacgccattatccagtgaaccactatcactgaaaaaaatctacctctctatactaatctccctacaaatctccttaattataacattcacagccacagaacgtaatcatatttgatatcttcttcgaaagcaaattatcccaccttggtatcatcacccgatgaggcaaccagccagaacgcctgaacgcaggcacatacttcctattctacaccctagtaggtccccttcccctatcatcgcactgatttacactcacaaaagcctaggtcactaaaagttctactactcatctcactgccaagaactatcaaagtcctgagccaacaattaatatgactagctttagcacaaatagcttttatagttaaagatacctcttaacggactccacttatgactccctaaagcccatgttgaagcacccatcgctgggtccaaaagtacttgccgagtactcttaagacctaggcggtatggatcatacgcctcagactcatttctcaacccccctggagagaataagtaggcttacccctttccttgtacttatcccttattgaggcataatttgtaacaagtcatggtgcttacgaaaaaagagacctaaatcccgcctggatattcttacatcaggcaaatagcctcgatgtaaccagctttcaaccagacccctgagtcaccggcggaggtccctaatcgcagagacacactacaccgcggaacaatacagagagcaagcggtaaatcctcagggaaaacacccaatgttgggttgagcgacgctcacaatctggcttcacctcgaaccccga

SEQ ID NO: 637655 - DNA, 134 bp, Homo sapiens
  misc_feature (38)..(38): n is a, c, g, or t
gtgaattcgcgctctccttcccgacgccccggcttctnggagcgtcagagcaacggaagtacgtacaggaggaccgagagcagcagggaagtttggccggtgggctggggtcggcgcgaagattcccctgcccg

SEQ ID NO: 637656 - DNA, 452 bp, Homo sapiens
tatgtgtatatacacgtttttgcgttctgtgaatacgtcttggcgttgattacgtcttcatatgtatgtgttgtggatatgcttggttatgtattctgttctcagtcttccctagctttagtctccgtagaagatactcagggtggtacggccggggtgatagccccgggtgttctgtgggggcttttatttgttctggttggttttctgttttttttcgccggcctggttgtctttaaaacgcgtgggtacatatgggtttgtctgaggttctgtgtggtgtatcccgtatttcttcagtctctgatcttggtctgtattgtttatgtaaaggggtggggagaggggtaaaggggggttttgggttgggggggggggggcccccttccccaggccttcccttcccttgttgcaggggttttggagagaaacaataaagagtttcacaccca

SEQ ID NO: 637657 - DNA, 134 bp, Homo sapiens
cggcacctaatgtattggtgaactttgaaagctcgacagtcatctcagagtgtgagaccttgtccaggtagatgatgagggtcccctatcgagtgaaggctttgtccagctcatacttggaagaaagtccatta

SEQ ID NO: 637658 - DNA, 374 bp, Homo sapiens
  misc_feature (68)..(68): n is a, c, g, or t
  misc_feature (134)..(134): n is a, c, g, or t
  misc_feature (302)..(302): n is a, c, g, or t
  misc_feature (327)..(327): n is a, c, g, or t
  misc_feature (348)..(348): n is a, c, g, or t
cttaggctgtagtgcagtggtgtgatctcagctcactgactgcaacctcccacctcccgggttgaaancgttgctcctgcctcaatctcccaattagctgggattacaggtgtgctccatcatgcccggctaanttttctattattagtagagacagggttttaccatgttggccaggctggtctggaacccctgacctcaagtgatccgcctgcctcggcctcccaaagtgctgggattacaggcatgagccattgtgcctggccctacacgtggacacttctttagcatatggttagggncctttctagaaattccaaagacagnctttaagaagccccgtcgggnaaccttaggccaatgatgtggttaca

SEQ ID NO: 637659 - DNA, 113 bp, Homo sapiens
caccagggatgactgcagccatatggcgggaggacttcctgttattcagcatcaggcggatgaaggacacaaggcattcccatagtgccccctggcgctcgctgcggaacacg

SEQ ID NO: 637660 - DNA, 534 bp, Homo sapiens
tgattatggagtctttttctgtcgcccaggctggagcgcagtggcgcgatcttgggtcactgcaacctctgccttccgtgtttgagcaattctcctgcctcagcctcccgagtagctgggattacaggcatgcaccaccacgccaggctaatttttgtattttttttagtattaaaaaatcaccattttttagtatataaaatcaccatgttgttcagggtgttttcaaactcctgacctcgtgatctgcccaccttggcctcccaaagttctgggattacaggcttgagccaccactttctgtgtgtgtatatgcgtgtgtgtgtgagtgtgagtgtataattgggtgtgtataactgagtgcgtataatcgggagatatagattcaatatagatccatatatacatgcaggataaatgaatggcaaaacgtttttaaaagtcaggaaagatagactggtgaaggactcacgtaagggcctgggtatgggagaagagcagaaagtcacagaatgaggacgccatccaagggta

SEQ ID NO: 637661 - DNA, 323 bp, Homo sapiens
gcacggatccccttcttcgaaaaacaatggcattcttaagcatttgcttctgtgtatactcagagttcatatcctccattcccacttgttcttccctgcctattcttcctcttcctgccttctactgcaacatattggcacctcacgtgaggctctcaaaatgatccagagttatttgttgcacctcacgctcattccgaattctttgggccatttggcctcagcagagagctgtcatgtgccaaggctccgttggcattcttagctctgctttctgtagcactgagagttcattcctccatccctatcttgttcttcgagag

SEQ ID NO: 637662 - DNA, 294 bp, Homo sapiens
tattcgtgtacgcactcaagagtagcgatgtatgagccagaagacagtcagagaggtgtgacaggacagacgaatgtcgggacggagtctcgtgtgatgtcgatcaggtggacttggaaggatggtgctggggggtgcccccagcaaaagcacctcatgtgcctccttgtgcatcttctggcttgggggaaggaagtgttgagtgaaggtttgcgaagtgtggtattctgcgtggagcgaaaggcccgttgtggtgtcgggaatgctgggagggtgctcagtgagacctccttc

SEQ ID NO: 637663 - DNA, 750 bp, Homo sapiens
gatcgctgctgagctgggcgcctgcagcgtggagctgggagcctggatgctgcgatggctgcggcgctagagctgtgggctgctgcggtggcctgggctgagctgggaccagtgcgggagccatggacctgctaggtgccctggcctatgcccctgctgatgcctgcctggctgatgtgtgcccccatgctgttcctctgctgctggcatgttgcctgctgcatgggtgctgctgctctggcatgcgcctccctgggctcccggcaagtcgcctgccggagccccccagcccgcaggagatcctgatcaaggtgcaggtgtatgtgagctggggagctggtgcccctggcccgggcctcagtggatgtgtaggggaaccggactctgctggcagctggcaccacagactcagagggtgtggccaccctgcccctcagttatcgcttgggcacctgggtgctggtcactgctgcccgccctggcttcctcaccaactctgtgccctggcgtgttgacaagctgcccttgtatgcgtctgtcagcctctacctgctccctgagcggccggccacgctcatcctctatgaggacctggtgcacattctcctaggctctcccggtgccgatcccagcccttggtgcagttccagcgccgggctggccgcctgcctgtcagatccaactacagccagctctgggcgtcacttacgccttgcaggaccagcaggaaaatggggctatccttgccta

SEQ ID NO: 637664 - DNA, 174 bp, Homo sapiens
aaaatgaaacttgtaaatttttgtgtaattgtatgtaagtttactttttatggaggaaggattctagataatgacaaatgaagattatgacatgtatttaactcctgtgattaggttatacgaacatgggtaataactagaatgtagagacacatctagtgaagggtaggagag

SEQ ID NO: 637665 - DNA, 258 bp, Homo sapiens
  misc_feature (177)..(177): n is a, c, g, or t
  misc_feature (180)..(180): n is a, c, g, or t
tccggtctgctccacgctggttccaggcttccgttttagatgtaaaattctcactgggaggggtgaaaatcaaattcatccctacaggtttctgtttagccattttctatgttgtttcttaccgaatcaaaaccaaatcagagcagctttgaactctccctccaaagggaccgaagntcntcataggcctttgaaaaggaagcagtgggggagacttacagcttgcaaacccaaataaataaatcttcagaaaagaga

SEQ ID NO: 637666 - DNA, 126 bp, Homo sapiens
  misc_feature (35)..(35): n is a, c, g, or t
  misc_feature (95)..(95): n is a, c, g, or t
ggtttaaaaatattttattctttagaaaatacagnattcaaccatcccaaactgcagtgacccctgccccagtctttattgaccccagtttttgnggccaaaggtttctgggctgtgttgtgaccc

SEQ ID NO: 637667 - DNA, 3003 bp, Homo sapiens
ggggagcggggagcctaatcctgctggcaagaaaaagaagtatctcaaggccgctctgtacgtgggtgacttggacccagatgtcaccgaggacatgctctataagaagttcaggcctgctggccctctgcgattcacccgaatctgccgtgatccggtgacccgcagccccctgggctatgggtatgttaacttccgctttcccgcggatgcagagtgggccttgaacaccatgaattttgatttgattaatggaaaaccattccgccttatgtggtctcagccagatgaccgcttaagaaagtctggagtgggaaatatattcatcaaaaacctggacaaatccatagacaatagggccctgttttacttattttctgcttttgggaacattctgtcctgcaaagtcgtatgcgatgacaacggctctaagggttatgcctatgttcactttgacagcctggccgctgccaatagagccatctggcacatgaatggagtgcggctcaacaaccgccaggtgtatgttggcagattcaaattcccagaagagcgggcggctgaggtcagaaccagggatagagcaactttcaccaatgttttcgttaaaaacattggagacgacatagatgacgaaaaactgaaggaacttttctgtgaatatgggccaactgagagtgttaaagtaataagagatgccagtgggaaatctaaaggctttggatttgtgagatatgagacacacgaggctgcccaaaaggctgtgctagacttgcatggaaagtccatcgatggaaaagtcctctatgtagggcgagcacagaagaaaattgaacgcctggctgagttgaggcggagatttgaacggctgaggttaaaagaaaaaagtcggcccccaggggtgcctatctatattaagaacttggatgagacaatcaatgatgaaaaactgaaggaggaattttcttcctttgggtcaattagtcgggccaaagtgatgatggaagtggggcaaggcaaaggatttggtgtggtctgcttttcctcttttgaagaggctaccaaagcagtggatgagatgaatggccgcatagtgggctccaagcccctgcatgtcaccctgggccaggccaggcgcaggtgctgagaataagaatgctcagtttgtttcagccttagttggtgcctccttagtttgggctcctttgtgataaggggttattttatgctaattcacaagttttttttgaagtgaattcttttgaaaaaaaaatgcaaaactagaaaactttattcattttagaatagaacataatttctaactgtaaaattgtcattttgtactttttttgatgtaatatccttagaaatctgtagaataaagtgtattcctccacttttttttcctgaacagtcaaggtgaggcaattgattgagtatatttcccttcttatttcagtaatactctattttttttcatgaaaatgtcaacatggttcttctgaatctatcacagtgaaaagttctaacttgtttttgagaagtcagtacagcaggggaaaacatatgtgatgcaattaacatctgcataatttcacttaaaattattatgcaaaaatgaatgttttttcaaaaaatgtgaaatgtattttattttctttatttgtattcttgtttcattttttaatatgttgtgaacatgctacagatttgatagtacttttgactaaatgttgggagtggtcgtattaacttcttgcccaaagaagtaagcatattggtgttttctcaattagtcactgagaaaattaacactttaggcagtggctatttaaagtaggaattgcatcttaaaaacctttcctaagagatttggtatgtgaggatactttcagtaccactcctaccattcatttttctaaattccttagtacatatacttggatcatgttaaattaacaagaaagatgaataactgcgctgaattgcctttacctataaataatttaatattttaccttcgggttttatcaactgtcaatataaaaggcagtactccacagaatgatgttgaaaaacttcttcgaagaacaccttctattaaacttgttatctcttgtaaattattgtgtgtgtccttttgataatattcacaggtgtttcaaaggtaaggaataggttgtctcttggattaagtcatatgcctccagccattatatgagaactgtgaaaccaatatggttttctttatgtcttggctgcttgaaaattaaaaaaaaaaaaggtttgttcaatattgccgttacatttattagcctgtaatttctaaattggagattctctacatttcacttgcagtttcctgttctcctcattgcctgccttccattcatattacacttatttttctattttttgtattacctttttaaaaatatataccagttcaagtccttttaggaagaagaaaatacctaatttatgtaaaatttaaataattacttttttataatatgattcacttatgccacagattcaacattagaatatgttttatctctactgtcagttttattaccttatatacaaatcttcattttcatacatagtacaatgtaaatatataactttgttaacacttttgttagctctttgaccataaaataatgacaataagctgtttctatgtatttgtttatctacaaattacaggtttatccatttgcaaatattttcaaaatggaaatcactgtttatattgattataaacataagacatgctcattgtaaaaaatgtacacaaggcagaaggaagtaaaatttccacagttcagaaataccacaattaatattttcaatgtgtaaatatcttttcatattttttcctacgtatacacaaacattttgaccaaaaatccacactatatgtactgttctgtatttttaattttaaactgaacaataatcatcttttcctgacaataaatatcaatctctatcatc

SEQ ID NO: 637668 - DNA, 132 bp, Homo sapiens
gtatatagaggatcttagaagatataggagagggaggcggaaggaggatgtaggagagggagaggatgaggagagggagaggatgtcggagagggaggggatgtaggagagggaaggatgtcggagagggag

SEQ ID NO: 637669 - DNA, 168 bp, Homo sapiens
aaaaaaaaaaaaaaaaggaaggaaggaaaaggaaattcggggatagaactggggcgcatgaaacccataatagggggggtgggggatattccacaaaattaccatttcttcggggccctcaaaacacacggagtccacccttgtcaatctcaaagccttcaaccccaa

SEQ ID NO: 637670 - DNA, 2845 bp, Homo sapiens
  misc_feature (1)..(1): n is a, c, g, or t
  misc_feature (25)..(25): n is a, c, g, or t
nctagaggaagcgggagttacttancacggttccgggtttctcgcgccccgcctgtcccccctccctatcactgctactggctcttggtccctccgttgggctgtcctgcggagagaaaccccagcccatcggtctgcgctgggaccgcctgccgcgcatctgcccttcttcgctgactccgccccgcatctggccagacccgcctcgcgtcagagctgacccactcactgcgcgtttgccagtcaatctctccggacctgcctcgagcctcaggctgctgaaatcaccgcgcctcactcgcctggccgctgccaatagagccatctggcacatgaatggagtgcggctcaacaaccgccaggtgtatgttggcagattcaaattcccagaagagcgggcggctgaggtcagaaccagggatagagcaactttcaccaatgttttcgttaaaaacattggagacgacatagatgacgaaaaactgaaggaacttttctgtgaatatgggccaactgagagtgttaaagtaataagagatgccagtgggaaatctaaaggctttggatttgtgagatatgagacacacgaggctgcccaaaaggctgtgctagacttgcatggaaagtccatcgatggaaaagtcctctatgtagggcgagcacagaagaaaattgaacgcctggctgagttgaggcggagatttgaacggctgaggttaaaagaaaaaagtcggcccccaggggtgcctatctatattaagaacttggatgagacaatcaatgatgaaaaactgaaggaggaattttcttcctttgggtcaattagtcgggccaaagtgatgatggaagtggggcaaggcaaaggatttggtgtggtctgcttttcctcttttgaagaggctaccaaagcagtggatgagatgaatggccgcatagtgggctccaagcccctgcatgtcaccctgggccaggccaggcgcaggtgctgagaataagaatgctcagtttgtttcagccttagttggtgcctccttagtttgggctcctttgtgataaggggttattttatgctaattcacaagttttttttgaagtgaattcttttgaaaaaaaaatgcaaaactagaaaactttattcattttagaatagaacataatttctaactgtaaaattgtcattttgtactttttttgatgtaatatccttagaaatctgtagaataaagtgtattcctccacttttttttcctgaacagtcaaggtgaggcaattgattgagtatatttcccttcttatttcagtaatactctattttttttcatgaaaatgtcaacatggttcttctgaatctatcacagtgaaaagttctaacttgtttttgagaagtcagtacagcaggggaaaacatatgtgatgcaattaacatctgcataatttcacttaaaattattatgcaaaaatgaatgttttttcaaaaaatgtgaaatgtattttattttctttatttgtattcttgtttcattttttaatatgttgtgaacatgctacagatttgatagtacttttgactaaatgttgggagtggtcgtattaacttcttgcccaaagaagtaagcatattggtgttttctcaattagtcactgagaaaattaacactttaggcagtggctatttaaagtaggaattgcatcttaaaaacctttcctaagagatttggtatgtgaggatactttcagtaccactcctaccattcatttttctaaattccttagtacatatacttggatcatgttaaattaacaagaaagatgaataactgcgctgaattgcctttacctataaataatttaatattttaccttcgggttttatcaactgtcaatataaaaggcagtactccacagaatgatgttgaaaaacttcttcgaagaacaccttctattaaacttgttatctcttgtaaattattgtgtgtgtccttttgataatattcacaggtgtttcaaaggtaaggaataggttgtctcttggattaagtcatatgcctccagccattatatgagaactgtgaaaccaatatggttttctttatgtcttggctgcttgaaaattaaaaaaaaaaaaggtttgttcaatattgccgttacatttattagcctgtaatttctaaattggagattctctacatttcacttgcagtttcctgttctcctcattgcctgccttccattcatattacacttatttttctattttttgtattacctttttaaaaatatataccagttcaagtccttttaggaagaagaaaatacctaatttatgtaaaatttaaataattacttttttataatatgattcacttatgccacagattcaacattagaatatgttttatctctactgtcagttttattaccttatatacaaatcttcattttcatacatagtacaatgtaaatatataactttgttaacacttttgttagctctttgaccataaaataatgacaataagctgtttctatgtatttgtttatctacaaattacaggtttatccatttgcaaatattttcaaaatggaaatcactgtttatattgattataaacataagacatgctcattgtaaaaaatgtacacaaggcagaaggaagtaaaatttccacagttcagaaataccacaattaatattttcaatgtgtaaatatcttttcatattttttcctacgtatacacaaacattttgaccaaaaatccacactatatgtactgttctgtatttttaattttaaactgaacaataatcatcttttcctgacaataaatatcaatctctatcatc

SEQ ID NO: 637671 - DNA, 238 bp, Homo sapiens
ggttccacatttctgtgcatgtgttcagtaatatgggccaaaataatggaattgattatgttcctgtttggccatcacgtacacatgtaatctggaaaatcatacctgtgtcaattttaaacataactgttggcatttcccagatttatactatgaacattggggtaatacagtttattgcttcattgctatatgacagctaaggggcaaatgattcaagtatatgttaagtcagaag

SEQ ID NO: 637672 - DNA, 232 bp, Homo sapiens
tgctggtcgatctctagcaggatcccctacgtgccggttgcctgctactatgggtgttaaattcatttactctctctacaacggtttgttcctagtgtcccaagagctgtcctcttaggactaacagttcaattaacaaggcgatttagagggttctgtgggtcaatctccatgtttaaactacgattctatcttggggtaccgatgcacgtacatcgtgcatccttgtcat

SEQ ID NO: 637673 - DNA, 211 bp, Homo sapiens
  misc_feature (5)..(5): n is a, c, g, or t
ccccngattttttttcaaaggaatttttttccccaggggttgaatttttgggtcttttccgggttttttggcaaattaggggggcccggggctcaagtgggggaagggggggggcccaaggatcccagggctctccccccaggttttgggacagaactgaggggtgaattttggttttcttgaaataaacagaagaaaatgaaccctttta

SEQ ID NO: 637674 - DNA, 293 bp, Homo sapiens
gtcagcgcgatccttctttattgagctctcgggcgaggttcactggtccgcagggggagggccagggaagtctcgctgtgccaaaggtgcagcgcgcttttatggatgctgggtgaggagtggtcagggtaggggcagggtcggttgagtttcacgcttctgagtgtgacacgccctagtgggcatgtgcgttagtcggggtggcaggaacaggaaaggtgaacccggaaatgctgagtcagggtgtccgaggtggcgatcgccatcttggagtcttcaccggagtccaatca

SEQ ID NO: 637675 - DNA, 403 bp, Homo sapiens
acctattaccatcataagaaacaactgcattgactatgccagtgcacactgccatggtggtgaaccctagcaagcatgctttaacctctaagactgtctaacacgcgtgtcattctatgtctccacagactgcgtggcataaaaatcaccttataagttttagtttttaatctaaagatgttagacagatgctgagtgtgcgtatactcaaccgcttagaccttttactattttagtcggatttagtataggaattaagcttatgtatgaacactcagcagaaaagtacttacttcttgccagttatctattaaccaaaacctttgatttgtagttttaaagattaaccctcaaagttctcttcgtaactgccttgacattttgggttgttctgttctgttaa

SEQ ID NO: 637676 - DNA, 170 bp, Homo sapiens
cgaggcccgccaatgtccgagggccccagctggggttatcttgcccccagacctacgggtgagacgcttttcgaccctgtattcctaaactcagacttgactagtgggaccctccatctgggtatagttcatcggggcgggattcgatcaggccttccgcgctacactta

SEQ ID NO: 637677 - DNA, 679 bp, Homo sapiens
  misc_feature (184)..(184): n is a, c, g, or t
  misc_feature (187)..(187): n is a, c, g, or t
  misc_feature (190)..(190): n is a, c, g, or t
  misc_feature (214)..(214): n is a, c, g, or t
  misc_feature (217)..(218): n is a, c, g, or t
  misc_feature (225)..(225): n is a, c, g, or t
  misc_feature (231)..(231): n is a, c, g, or t
  misc_feature (240)..(240): n is a, c, g, or t
  misc_feature (249)..(249): n is a, c, g, or t
  misc_feature (256)..(256): n is a, c, g, or t
  misc_feature (269)..(269): n is a, c, g, or t
  misc_feature (287)..(287): n is a, c, g, or t
  misc_feature (319)..(319): n is a, c, g, or t
  misc_feature (370)..(370): n is a, c, g, or t
  misc_feature (390)..(390): n is a, c, g, or t
  misc_feature (393)..(393): n is a, c, g, or t
  misc_feature (397)..(397): n is a, c, g, or t
  misc_feature (413)..(413): n is a, c, g, or t
  misc_feature (425)..(425): n is a, c, g, or t
  misc_feature (429)..(429): n is a, c, g, or t
  misc_feature (438)..(439): n is a, c, g, or t
  misc_feature (453)..(453): n is a, c, g, or t
  misc_feature (458)..(458): n is a, c, g, or t
  misc_feature (460)..(460): n is a, c, g, or t
  misc_feature (465)..(465): n is a, c, g, or t
  misc_feature (508)..(508): n is a, c, g, or t
  misc_feature (526)..(526): n is a, c, g, or t
  misc_feature (548)..(548): n is a, c, g, or t
  misc_feature (591)..(591): n is a, c, g, or t
  misc_feature (620)..(620): n is a, c, g, or t
  misc_feature (667)..(667): n is a, c, g, or t
ctgcctgcctatcacaaggggcccctgcaaagacaacggtcggcccttacggttggggtacaggaatcccgaaggcagttcataactcctgggcctgccccagctttaatctgggtctccgggagacaataagtggagccccatctcttctccgtggcagaggaagatgaggtctccatcaagnagncanccaagcggtggtgaaggccatggnctnnatggggnaagtcncctttgatncaacaagtnggatggncagtttaagaagncagccagtaacagcaagntgaggacctacctgcccgacttccggttcacncccttaagcaggcggtgaaggagacctgtgcttggttccctgacaactccnagcaggcccggaagtgaagntgnaaancaggatcaggtgccancggaccatcggntggnagagcccannggcccccccccgtnaaccntnccagnagtgagggccccccccagcaacctgggcctgcattccatccgntttgcagccccaagcatntttccagtggggcccccattcncgttggtcctcagggaaaccagggtcccgggcaggcccggcgntttgctcccccccccagccccctgggggngtcccctttgatcctgcatccccctccctgggagccaataaagggcnttttcccaggca

SEQ ID NO: 637678 - DNA, 477 bp, Homo sapiens
  misc_feature (477)..(477): n is a, c, g, or t
ttgttacaaagaaaggtaaactggtgattatagactggcttcgaagacttgaggagaagctttctgaaacgcaacgaggaggcaccattaagttcataggggatgacaactgacccctaacaaaatctcggtcctacgatgttgtcattatgaccccagctgatgaaccacctctttaatagacgacgcaccagtagaatgacctattggggcatcgacctcctcaatacaaaaagacgaccgcatctcttatatatcatgtgtccaataatgcgcgccaaaatacatccgagtgtgcttttaaaaaaaaacatcgccatctgagggttgataagaaccctctccataatgcaagtcccagctgatcggaaagatctataaatacagtctcccccgggcacttcttaaaatttggacctcgttagagcagatcagtgcttttcgttggcccacaatacctgagagaagatcaggtgn

SEQ ID NO: 637679 - DNA, 258 bp, Homo sapiens
gagtcaatgcccaagatgctccctagaacaccagcggaagcctcctccactgggcagacaggtcctcagagtgctctgtaggagctgtagacttggaagagaggccaggcgtggtggctcactcctgtaatcccagcactttgggaagccaaggtgggctgatcacttgatcccaggagtttgagaccagcctgggcaccatggtgagactcgtctttaccaaaaatacaaaattagctgggtgtggtggtgcacagc

SEQ ID NO: 637680 - DNA, 364 bp, Homo sapiens
gatcgaccgacaatctactaaccaggacacattcacctacccatctaccccttcaccctggttaaatgagtcaacttgatgcaaatgttctgaaattttaggtttgttcttatgcttctgcttagatagatagatagatagatagatagatagatagatagatagattgattcattgacatttggctgcgcctacatcatgttgaagttctcaggtcagggatcaaatctgtgacacagcagtgacaatgtgaaatccttccctttgaggcaactcctacctctgctgtgttcttttcctgtttttcttatctttgctttttattacggccacacctggaacatgtggaagtccccaggccagg

SEQ ID NO: 637681 - DNA, 772 bp, Homo sapiens
  misc_feature (39)..(39): n is a, c, g, or t
  misc_feature (62)..(62): n is a, c, g, or t
  misc_feature (80)..(80): n is a, c, g, or t
  misc_feature (121)..(122): n is a, c, g, or t
  misc_feature (130)..(131): n is a, c, g, or t
  misc_feature (139)..(139): n is a, c, g, or t
  misc_feature (171)..(172): n is a, c, g, or t
  misc_feature (200)..(200): n is a, c, g, or t
  misc_feature (209)..(209): n is a, c, g, or t
  misc_feature (216)..(216): n is a, c, g, or t
  misc_feature (227)..(227): n is a, c, g, or t
  misc_feature (248)..(249): n is a, c, g, or t
  misc_feature (269)..(269): n is a, c, g, or t
  misc_feature (276)..(276): n is a, c, g, or t
  misc_feature (285)..(285): n is a, c, g, or t
  misc_feature (299)..(300): n is a, c, g, or t
  misc_feature (303)..(303): n is a, c, g, or t
  misc_feature (309)..(309): n is a, c, g, or t
  misc_feature (312)..(312): n is a, c, g, or t
  misc_feature (326)..(326): n is a, c, g, or t
  misc_feature (346)..(347): n is a, c, g, or t
  misc_feature (374)..(374): n is a, c, g, or t
  misc_feature (387)..(387): n is a, c, g, or t
  misc_feature (432)..(432): n is a, c, g, or t
  misc_feature (439)..(440): n is a, c, g, or t
  misc_feature (447)..(447): n is a, c, g, or t
  misc_feature (700)..(700): n is a, c, g, or t
  misc_feature (768)..(768): n is a, c, g, or t
tcgtggctaggtagggaggagaggccttaatatgcaggngggcggcaagggagcctagggtntggggaaagcagggtgtnggcagcgagatggctccgggggtttagacactgctggcttnngccccggnngccacctncctctcactccagctgcgagcagcttcacttnnggccctgggcctccgaatcctcctcgtngtttttttntattttnttctctttttnggtcgtggggtcctggtactnntggtactcggacaccaggtngtttatnttgtttttngtttcggtgaactnnatnttgttnatnttcttgttcgtgtnccagtgcaggaaggccttgnnccggaacatggccgtgaactgctcggngatgcgcttgaanagctcctggatggccgtgctgttcccgatgaaggtggaggacatnttgaggnngcggggngggatgtcacacacggccaccttcacgttgttggggatccactccacgaagtagctgctgttcttgctctggatggccagcatctgctcgtccacctccttcatggacatgcggccccggaacacggtggccaccgtcagtagcggccgtggcgcgggtcgcaggcggccatcatgttcttggcatcgaacatctgctgggtgagctcgggcacggtcagggcccggtactgctggctgccccgggctgttangggggcgaacggtgctatgaagaagtgcaggcgcgggaagggcacatgttgacggccagcttgcgcangtca

SEQ ID NO: 637682 - DNA, 320 bp, Homo sapiens
gcaagttatagctattcgtatttgacaatgactgacaacgataatacaaatatctgcagaagactctagtatgcatgaaacagtgacataataatagagtaacctctagcaacaagacttaacataaagacaacctctcccattccttcaaaccaatattgttgatcacgttatttctttttaatttttttgaatcagccattcctcatttaacctcgtgaacttgcatgttcctattcatttcctcagtcaggaccagtattattccatctagtaacttctccgcagtactaatagccttgcaaatggtcgttcaggag

SEQ ID NO: 637683 - DNA, 162 bp, Homo sapiens
tgccgaaggaagaggccagggaagaaggtgctccgcccagctttgtgaagagcaggaggctaagaagtggtaatccctgtttaagaaaggcctaagaattttggcattggcaggcatcaggcccaaaagagaccttacccgctttgtgaaatggccccctat

SEQ ID NO: 637684 - DNA, 378 bp, Homo sapiens
  misc_feature (182)..(182): n is a, c, g, or t
atcttttcttttttaagaacccaccaaattttattgtgattgcttatttaaaagagtaagctgtgtaaggtcagggactatgtctatctggcctacgtttgtatttcttttttttttttcttttgagacaaagtctccctctgtcacccaagctggagtgcagtggggccatttgggctcantgcaacctccacctcccgggttcaagtgattctcctgcctcagcctcctgagtagctgggactacaggggtgtgcccccacgcctggctaattttttttgtatttttattaaagactgggtttcatcatgttagccaggatggtttccatttcctgacctcgtgatccccccccccccccccaagaacagggttta

SEQ ID NO: 637685 - DNA, 703 bp, Homo sapiens
  misc_feature (544)..(544): n is a, c, g, or t
aagaaatacctttcataaggctatagctgccattgattcctctgatggacctaggtaaagtaaattgaaaaacttctggagaggattcagcattccagatgccattaagaacattcgtgattcatgggaggtcaaaatatcaatattaacaggattttggaagaagtggattctaaccctaatggatgattttgagggattcaagacttcaatggaggaagtaactgtagatgtggtggaaatagcaagagaactagaagtggaacctgaagatgtgactgaattgctgcaatctcataaaatttgaacagatgaggagttgcttcttatagataagcagagagagtggtttcttgagatagaatctactccttgtgaagatgctgtgaacactgttgaaatggcaacaaaggatttgaatattccataaacttagttgataaagcagaggcagggtttgagaaaactggattgactccaattttgaaaggtccactgtgggtaaaatattatcaaccagcatcacacgccatcaagaactctntcatgaaaacaagtcaatcaatatagcaaatgtcattggtgccttattttaaggaattgccacagccaacccaaaccttcagcagccaccatccagatcagtcaacagccattaacaaggagccaagaccttccaactggcaaagaatatgacttgctt

SEQ ID NO: 637686 - DNA, 161 bp, Homo sapiens
ccccgatgctcagccccccccggcaccatgtctggagaaaagcgtggaggcagcggccgagttgagcgccaaggacctgaaggagaagaaggagaaggtggaggagaaggcaagccggaaagagcgaaagaaagaagtggcggcggctcgtggctgggggg

SEQ ID NO: 637687 - DNA, 481 bp, Homo sapiens
agagcaggtcctaactcttttcaattctatgaaggctgaaaggtaaggaagctacagaagaaaaatttgaaactagcagagattgggtgttgaggtttaaggcaggaagtctccataacataaaagtgtgaggtaaggcagcaagttctgatggagaagctacagcacattatccagaagatctagcaaaaataattgatgaaggtggctgcactaaacaacaggttttcaatggagataaaacagccttctagtagaagaaaatgccatctaggactttcatagctagaaaagagaaatcagtacatgactttaaagggcaggctgactctcttgttaggagctaatgtaactggtgccttgaagttgaagccagtactcatttaccattcctaaattctagagctcttgagaattatgcagaatctactctgctgcattaacaaaacaacaaagcctagattacagaacaccgtcgaag

SEQ ID NO: 637688 - DNA, 206 bp, Homo sapiens
acagctcttacagaatctgaaattaccttgtttgtacatttatttacttgtttaaggtttctccttttgatggtaaactccatgtctctcttttgtgggaaggtcaggtcttgggttgcccttaccaaaaactacctttcttccatttcgtccttggctaaggcaaggcctcctttatctggcacttgtttaaaggggattttgtg

SEQ ID NO: 637689 - DNA, 553 bp, Homo sapiens
  misc_feature (4)..(4): n is a, c, g, or t
  misc_feature (65)..(65): n is a, c, g, or t
  misc_feature (69)..(69): n is a, c, g, or t
  misc_feature (73)..(73): n is a, c, g, or t
  misc_feature (75)..(76): n is a, c, g, or t
  misc_feature (78)..(78): n is a, c, g, or t
  misc_feature (80)..(80): n is a, c, g, or t
  misc_feature (82)..(84): n is a, c, g, or t
  misc_feature (94)..(94): n is a, c, g, or t
  misc_feature (100)..(100): n is a, c, g, or t
  misc_feature (118)..(118): n is a, c, g, or t
  misc_feature (129)..(129): n is a, c, g, or t
  misc_feature (137)..(137): n is a, c, g, or t
  misc_feature (149)..(149): n is a, c, g, or t
  misc_feature (176)..(176): n is a, c, g, or t
  misc_feature (270)..(270): n is a, c, g, or t
  misc_feature (289)..(289): n is a, c, g, or t
  misc_feature (296)..(296): n is a, c, g, or t
  misc_feature (311)..(311): n is a, c, g, or t
  misc_feature (331)..(331): n is a, c, g, or t
  misc_feature (342)..(342): n is a, c, g, or t
  misc_feature (347)..(347): n is a, c, g, or t
  misc_feature (384)..(384): n is a, c, g, or t
  misc_feature (386)..(386): n is a, c, g, or t
  misc_feature (389)..(389): n is a, c, g, or t
  misc_feature (391)..(391): n is a, c, g, or t
  misc_feature (553)..(553): n is a, c, g, or t
gggnggggaaagaaaaaacaaaaaacaaaacccagaaaacaaaacaaaaaaccacaaaaagaaangttncatnanntnanannnggtttctgantaaagnttctccttcccccttcantttctccacangtgaggantgaataaagagnggaggaaatcccgccccaaggaagtangaaaacaattccaaacaacaaaattttcaatgcaggaaatgagcgagtttaggttggagcatgggtgttacgtgggaggtgagaatggtaaacntggtttggttgtctagggngggagantcggtgacaggttcnagacactggagagtgttgcngctgcctgaantgcangagctcaaacacacaaactgggtaaggtagtaggatnanatngnttgggaagaggagagataggtggacacagggaaggggctgaagagaagcacaaaaggtttcatattgccattgggtagggggcttcaccttttcagacctttcaaaaaaacaaaacccaaacaccatgtcaaactaaaagagcaataatgtaagcatacggn

SEQ ID NO: 637690 - DNA, 595 bp, Homo sapiens
ggtatgcatataagctgcgtgctcgggctgcgcctccctgcgggggaccggtccggctcctggccgccctgttggggcaatgctccccggggccgctgggaatgagccagcgatcctgaactgtgttcctgcccacagtgactcgtgcctggtccgggcatggagacccatgtggcgggcatcgctgggttcggcggtgcaatgagcgtgcgtgccatttcgctccagtgaggcctacgtgtgaggccatgaatggaggacctggccgagtggctcaatgccttgtactggtcctgggtctccctgggtggtggcgatggcttcctgacagggctggcacgggcacgacctgtgccaacatgccaacgccgtgacctgatggctgcccgtgcattggcatgccgccgcccggcccgaggtgtggccttccaggcgcacagtgtagtgcctggtccttcatggcgcgcgaaacgtggccaccttcatcggctggtgccgcgtggagctgggtgtgcggaggtgctcatgtatgagacctgggacctggtgctgcgcaggaacgagaagagcggtggtgctgtgcctgctgggggtg

SEQ ID NO: 637691 - DNA, 119 bp, Homo sapiens
cgcaaagcaagtggcaccgcaaagcatgtgagcccaagtgtgtggaagggttgcctgagtggaatttcgatggctccagtactttacagtctgagggttccaacagtgacatgtatctc

SEQ ID NO: 637692 - DNA, 819 bp, Homo sapiens
  misc_feature (242)..(242): n is a, c, g, or t
  misc_feature (434)..(434): n is a, c, g, or t
  misc_feature (520)..(520): n is a, c, g, or t
  misc_feature (542)..(542): n is a, c, g, or t
  misc_feature (546)..(546): n is a, c, g, or t
ggaattagtccgagtgtacgagagcgagctgagctcggttgtgtgcgtcgcgttctcgagaaacatcgcgtgtatcctgtcttgctatctactgggcctgtacccacagcatgagcttgcaaggaggcacaattcgtcgagacattctcgataacgcaatgctgttatatcaactagtttgatcggaagcatgcgtgtatggcaatcgttataatcaaacaagatggaggtatgcagatacncgtgtagactgacggaatctatcttgagagcatgaatgttcccagacagcaatgcggacgtttatcgaggatcactgacttacattgaatgctaaatgtgacttgatggtagactgtgcagcaacgttgatctttccgctgaagatttactgcacgagatgcattgggcgaagaagacatacatgcaagagnacacaagcacgagatgtgagagctatagcatacattgaggacgatagcgcgattcactgacttggtgatttattagaatcaacatngggattggccagatagggactnattnattcagattgcctgtccagaaagcttttacgtccaattgctggattggatcatagacccattgtgccctgaacggaagtatataccaagaatgtacagagatgctttgaatcgtacactttgactcagggcgatacgtcaggaatattttgagtgcgctgaatggctcacccgtttaagctacttgacactcacggtttatggtaccagaaattgatttgaccagcagaacactgataagaccctttgttaccacgaacttgtgctatatcag

SEQ ID NO: 637693 - DNA, 791 bp, Homo sapiens
tttttggattctgccagctttatttttcagttgaaaactcaaaggaaaaagttacattcccaaaagaaagtaaaacacttccaatgatgtagcctggaggcctgagttcacaggtgcccctaccaaaacagaggccctccccagggtcccctaaagcattcagtcccagtgtgtctaccccaaagagagaagctgcctacctgggcttctgattaagaggcttggggccatcacttcccttcaaggaaactcctgcctgaaaagacccctggatcaggcagggaaagccagtaccaagcagctgaggacctggcttcgtgtcccccaccacgcagtcagcgttctgaagcagtggcttcccaaatggctgttgaataagtgaataaatctcttgggcatgaacaggggccaggtggagttttctctgcagagctggtacttgctggccgcactgtctcctggtttgcagtggaagtgtggaggaagggggagaattactcagaccagtgggagagtttcatgtcccccggaagtattttgagcccagtggcaatgagccctgcttccgtgcgtttgcagcacgtgcggttctgagtttcccggcattccatgctggttattctgtcccagccatgaatcttgccattgtcagggagctggaattgcagtagaaggtgaaggagtttgaagtctggcagcctagtgctggcatagacaaaatctcaaacacactgtggaggaggggccaggggtacgaatccacgggcacacaggtggatgtaggcggccgc

SEQ ID NO: 637694 - DNA, 877 bp, Homo sapiens
  misc_feature (471)..(471): n is a, c, g, or t
  misc_feature (474)..(474): n is a, c, g, or t
  misc_feature (480)..(481): n is a, c, g, or t
  misc_feature (483)..(483): n is a, c, g, or t
  misc_feature (490)..(490): n is a, c, g, or t
  misc_feature (492)..(492): n is a, c, g, or t
  misc_feature (540)..(540): n is a, c, g, or t
ccacaccagctaccactcccaggcagtgcatatccgccctgtttgcagaaatgcacgctgtactagcatctcctgggagctgaggcagaccctgtcagttgtatttgatgccttcatcacggggcagggaaagaaagactggtccctcttccggatgttctcccgaaccctcacggagccctgccccctggcttcagagagccgagtctatgtggacatcaccacctacaaccaggacaacgagacattagaggtgcacccacccccgaccactacatatcaggacgtcatcctaggcactcggaagacctatgccatctatgacttgcttgacaccgccatgatcaacaactctcgaaacctcaacatccagctcaagtggaagagacccccagagaatgaggcccccccagtgcccttcctgcatgcccagcggtacgtgagtggctatgggctgcagaagggggagcngancacacnncngtacaananccacccataccgggccttcccggtatgggtgggtgttgtacagcagtntgctcagctcccataccgggccttcccggtgctgctgctggacaccgtaccctggtatctgcggctgtatgtgcacaccctcaccatcacctccaagggcaaggagaacaaaccaagttacatccactaccagcctgcccaggaccggctgcaaccccacctcctggagatgctgattcagctgccggccaactcagtcaccaaggtttccatccagtttgagcgggcgctgctgaagtggaccgagtacacaccagatcctaaccatggcttctatgtcagcccatctgtcctcagcgcccttgtgcccagcatggtagcagccaagccagtggac

SEQ ID NO: 637695 - DNA, 146 bp, Homo sapiens
ttttgggaggccaaggtgggtggatcacatgaggccaaaagtttgagaccagcctggccaaacatggtgaaatcccatctcaacaaaaatacaaaaaaaaagtatctgagtgtggtggcacacgtatgtaatcccagctactcggg

SEQ ID NO: 637696 - DNA, 446 bp, Homo sapiens
  misc_feature (322)..(322): n is a, c, g, or t
aaattatcatctgcttgataagatcagcctccggaaaagaaaaatttgaccacaccagaaagagttggagaagtttgcacccctctccctccaaagctgtccagaggtgcaggaggcatgccaggaggaatgctggggggatttcctggtggtggagctcctccctttggtggggcttcctcagggccccccatttaaaaggttgattaaaccaaccaagtgtagatgtagcattgttccccccctttaaaacctttgaagggcctaaatttgtagcaaattttggggcagttttaaaaagttaagctgctatagtaagttnctgggccttttccaaacttgaatatggaacatatgcccaggggaaggaaaaaaccttgccctttataaaccctgtattgtaagtggaaaaagcaatgttttaaataaaactattttaaattgga

SEQ ID NO: 637697 - DNA, 506 bp, Homo sapiens
  misc_feature (19)..(19): n is a, c, g, or t
  misc_feature (151)..(151): n is a, c, g, or t
  misc_feature (423)..(423): n is a, c, g, or t
atactacctcgcctgagcntcgtgaacatctagcaccagaaaccagtatttctcccccaaggtgagtgagccatgtcaatctgtcagcaagtccatactgtgcatgattgaggaatggagagttaaatgactttcacggttcttggccttnacaatattttattcatttgttctatcttgctggggatgcttaattcaaggttttatatggctgtcacaacatgagcttaccttggagcatgtgtcaaagcatctgggaggtgagagttgtagagaatcaacaataacctccgtactttggatgggaatgtgtgtcagagtctccatggttcgatggaagaggactcacaggactctgcatatagtcagactgatttagtacagcgagaagatgcaaagcagaatcagcaaagcgaaaaggtnctgtggcaaagctggaggaagccaggctcaagcttcctagaatcctctcccagtggagtcacacaggacactcttaattcttc

SEQ ID NO: 637698 - DNA, 935 bp, Homo sapiens
  misc_feature (34)..(34): n is a, c, g, or t
  misc_feature (113)..(113): n is a, c, g, or t
  misc_feature (116)..(116): n is a, c, g, or t
  misc_feature (124)..(124): n is a, c, g, or t
  misc_feature (233)..(233): n is a, c, g, or t
  misc_feature (235)..(236): n is a, c, g, or t
  misc_feature (260)..(260): n is a, c, g, or t
  misc_feature (272)..(273): n is a, c, g, or t
  misc_feature (281)..(281): n is a, c, g, or t
  misc_feature (301)..(301): n is a, c, g, or t
  misc_feature (331)..(331): n is a, c, g, or t
  misc_feature (376)..(376): n is a, c, g, or t
  misc_feature (397)..(397): n is a, c, g, or t
  misc_feature (422)..(422): n is a, c, g, or t
  misc_feature (425)..(425): n is a, c, g, or t
  misc_feature (430)..(430): n is a, c, g, or t
  misc_feature (435)..(435): n is a, c, g, or t
  misc_feature (439)..(440): n is a, c, g, or t
  misc_feature (445)..(445): n is a, c, g, or t
  misc_feature (451)..(451): n is a, c, g, or t
  misc_feature (456)..(456): n is a, c, g, or t
  misc_feature (468)..(468): n is a, c, g, or t
  misc_feature (477)..(477): n is a, c, g, or t
  misc_feature (481)..(481): n is a, c, g, or t
  misc_feature (491)..(491): n is a, c, g, or t
  misc_feature (501)..(501): n is a, c, g, or t
  misc_feature (507)..(507): n is a, c, g, or t
  misc_feature (523)..(524): n is a, c, g, or t
  misc_feature (542)..(543): n is a, c, g, or t
  misc_feature (550)..(552): n is a, c, g, or t
  misc_feature (570)..(570): n is a, c, g, or t
  misc_feature (573)..(574): n is a, c, g, or t
  misc_feature (578)..(579): n is a, c, g, or t
  misc_feature (582)..(582): n is a, c, g, or t
  misc_feature (584)..(584): n is a, c, g, or t
agccctttttctctcacgccatacgtgaaaactnaattctgcatggaatcagcgtcagcgacagacatccatgggggcctgtgtgcaccatcttaggtggagaaatgagcagnaanaatggatngaatggaccctgggctagatagaatctggcagtctatgtggcagaaatcagcaaaaacacgattgtaaaagcaaacaagtaattagagaaatcacgtgctgtcaggtcntnnaatcaattagaaagagatgactanccagatggaatnncagcccantcatgtgaacacgcaaaccncaaaaaataaataaaattaccaataaatanatgaaaaattataatgttgttagtagttaaaatgcgaattaaaanacatgctgttttccctaccanacaagcaaagagtaaattaaaatantancccangcttncctnncagtngcaggnaggtntggctcccaggnccttagagnttcncatcaggctncccaccccantcactnccacaccctccccccnnagtgtccccccccccacnngaacccnnnccccccccagaggaaccnganncaanngcngnatatccatctggtggagcactgctgtgtgtctgttaaaaaagaaaccataggtttttagggatatgtaatgatatttagaaagggtttaagagacagtaaagcttggcagaataaaccgtgtatacagaatggatgtttgcttgcataaataaatttatataaatatgtctgggggataaaaataagtatatcacaatgctaagacaggcatatggggaatttaagcttttctttatacttgtccatagtttccaatttttaaatttgtaattttttatcagaaaaataaatgtgtaaatatagtggaatctttattaaaacattcacttttatttgctatttcaaaaaaa

SEQ ID NO: 637699 - DNA, 857 bp, Homo sapiens
  misc_feature (34)..(34): n is a, c, g, or t
  misc_feature (113)..(113): n is a, c, g, or t
  misc_feature (116)..(116): n is a, c, g, or t
  misc_feature (124)..(124): n is a, c, g, or t
  misc_feature (233)..(233): n is a, c, g, or t
  misc_feature (235)..(236): n is a, c, g, or t
  misc_feature (260)..(260): n is a, c, g, or t
  misc_feature (272)..(273): n is a, c, g, or t
  misc_feature (281)..(281): n is a, c, g, or t
  misc_feature (301)..(301): n is a, c, g, or t
  misc_feature (331)..(331): n is a, c, g, or t
  misc_feature (376)..(376): n is a, c, g, or t
  misc_feature (397)..(397): n is a, c, g, or t
  misc_feature (422)..(422): n is a, c, g, or t
  misc_feature (425)..(425): n is a, c, g, or t
  misc_feature (430)..(430): n is a, c, g, or t
  misc_feature (435)..(435): n is a, c, g, or t
  misc_feature (439)..(440): n is a, c, g, or t
  misc_feature (445)..(445): n is a, c, g, or t
  misc_feature (451)..(451): n is a, c, g, or t
  misc_feature (456)..(456): n is a, c, g, or t
  misc_feature (468)..(468): n is a, c, g, or t
  misc_feature (477)..(477): n is a, c, g, or t
  misc_feature (481)..(481): n is a, c, g, or t
  misc_feature (491)..(491): n is a, c, g, or t
  misc_feature (501)..(501): n is a, c, g, or t
  misc_feature (507)..(507): n is a, c, g, or t
  misc_feature (523)..(524): n is a, c, g, or t
  misc_feature (542)..(543): n is a, c, g, or t
  misc_feature (550)..(552): n is a, c, g, or t
  misc_feature (570)..(570): n is a, c, g, or t
  misc_feature (573)..(574): n is a, c, g, or t
  misc_feature (578)..(579): n is a, c, g, or t
  misc_feature (582)..(582): n is a, c, g, or t
  misc_feature (584)..(584): n is a, c, g, or t
  misc_feature (797)..(797): n is a, c, g, or t
  misc_feature (836)..(836): n is a, c, g, or t
agccctttttctctcacgccatacgtgaaaactnaattctgcatggaatcagcgtcagcgacagacatccatgggggcctgtgtgcaccatcttaggtggagaaatgagcagnaanaatggatngaatggaccctgggctagatagaatctggcagtctatgtggcagaaatcagcaaaaacacgattgtaaaagcaaacaagtaattagagaaatcacgtgctgtcaggtcntnnaatcaattagaaagagatgactanccagatggaatnncagcccantcatgtgaacacgcaaaccncaaaaaataaataaaattaccaataaatanatgaaaaattataatgttgttagtagttaaaatgcgaattaaaanacatgctgttttccctaccanacaagcaaagagtaaattaaaatantancccangcttncctnncagtngcaggnaggtntggctcccaggnccttagagnttcncatcaggctncccaccccantcactnccacaccctccccccnnagtgtccccccccccacnngaacccnnnccccccccagaggaaccnganncaanngcngnatatccatctggtggagcactgctgtgtgtctgttaaaaaagaaaccataggtttttagggatatgtaatgatatttagaaagggtttaagagacagtaaagcttggcagaataaaccgtgtatacagaatggatgtttgcttgcataaataaatttatataaatatgtctgggggataaaaataagtatatcacaatgctaagacagggagngggggaagggagggcggggggggggggggggcgcgattnggggcgggggggggggggggg

SEQ ID NO: 637700 - DNA, 450 bp, Homo sapiens
  misc_feature (158)..(158): n is a, c, g, or t
  misc_feature (169)..(169): n is a, c, g, or t
cctcccacctgagtgttcctcccggcactggaagccactggccgtccagaggaacgtgattgaattgctgtatatccatctggtggagcactgctgtgtgtctgttaaaaaagaaaccataggtttttagggatatgtaatgatatttaattttgggngaaatttttantttaaagagaaagggtttaagagacagtaaagcttggcagaataaaccgtgtatacagaatggatgtttgcttgcataaataaatttatataaatatgtctgggggataaaaataagtatatcacaatgctaagacaggcatatggggaatttaagcttttctttatacttgtccatagtttccaatttttaaatttgtaattttttatcagaaaaataaatgtgtaaatatagtggaatctttattaaaacattcacttttatttgctatttcaaaaaaa

SEQ ID NO: 637701 - DNA, 141 bp, Homo sapiens
tacaggaaccccaaacatggctttggtctctgaaatatcattatacttttaaaccaggccacataattatcaacttcatgagaacattatcatctgtggttcacgtattttagtctttacttctgaacactgacgagggag

SEQ ID NO: 637702 - DNA, 1609 bp, Homo sapiens
gctacactgcacagcgatcgatctcacgcgccacagcacatggacgggactgtggtacgtgcggcggctagctgtgtggaaactatgctgcgtctctgaacttctcagcgtcagctgccgagccttgagatgctgtctctgagtggtattaagcaattagcagaatcgaccaacgtacagtcatcgactgaccgagcgcagtggctcataagtagatggcgccccttcaagctgagagagacagacgctgtggctttgtgagagcacgatggtgaactgtccaacacttcttccgcatcacactcccatgcatgcgaaaacatagacgaaccttcgcccattgtaagacacctaagaacacatgcatgcccatatccccagagggaaatcacctgacttgcctgaatcacaccctgtaaccactaacattgcagggaccaacccataggtaaacaacgactgaaacaacacgaacaactgaccccaacaggacagaccttgaaagataagagtaccccgcacactctgcaccaccaacgcatgcaaaaacacaaacatagacaccacaacacacaaaccaccaaactacatcctccaccaacacataaaactaaagccactaaaacaaaaccacaacaaaaaataaacataacacacaaaacaaccaaaagaattagacaacctcactcaaccttgtccatacaaccacttcaatatcacactcaacaaaaatgcacccatataacacacacaatacaccacaacataacaaaacaacacacaccaccaagacccacaaaaaacaattagaaaacaccaaagcaagacacacaatctaacaaaaaacaaacaaatacctaatccaccaccaacaatacaaataacaacaaacacacaatcacaaaaaacacaaccaaaccccaaaaaaaccaatatagaaaacactacacatcaacacaccaaaacccaaacaaaacaacacaacccagaaaaatactattacacctacgatctacattcaacacatacaccgcaccacacacacacaacaataaaacaccacaaacacactaacacaaatcaaaacttcaccaccacacaaacacaacacatcaaaaaagaacaacacacacacacaacacaaacacaaccccacacgacatactcagacacaatacaccacaacataatacaaagacacacacacaacccccctatacatcacaaaaaacacaaacaacaaaaaaaaaacacaaaaaaaaataccaaacaacacgcaaaccaccacatacgcacaccacacacaacaaaccacaaaaacatcaacaaccaaacaaaaacacaacacaccctagcacaaatccaatcaaaaaaaaaaaaaaacaaataaaaacacacaaaataactaacaacacacacatcaaaactgaaacatcatcaacaacagcatcacacacaaacaacaaacaaataaaacaaacaaacccaacacacaccacccctcatcaaccactcaatatcacccacaaacataaccaaaaaacatacacatttatcctcaataaatataaaccaagacaaaacacataaaactcaaacaaccacacac

SEQ ID NO: 637703 - DNA, 123 bp, Homo sapiens
cccccagtgtatgagtcgttgttaatgaaacatgttcatcctggcatatcatgcttgcttttttagtggatatcaaagtattgcagagtgcttagaagccatcctgacatgccccactggggt

SEQ ID NO: 637704 - DNA, 308 bp, Homo sapiens
aaaaaaggctttggggggggggaaaaaggggggggttttttttttttaaaaagaaaaaaaaagggggccccccccccccggggggtttgggaaatttagccggggggtaaacttttggggggggccggggggggcccccaaattttccttggggattttcccgaaagggatttttttttgggggccacacaaggaagccccttcgggtttttggaaattcaagggccttaaaagcccctttccctttgggttgggaaaggggttaaagggggggggtggttaaaaaaaggctttttttacccttttta

SEQ ID NO: 637705 - DNA, 336 bp, Homo sapiens
ccccctacaagggtcgctgtgatgttattcgcatccttaagtccaacaacccctgcgataaccactgcctgaatgcctgaatggcgcttgagcaggtgtatgggagcgtttgtgagctctaatggatgcccagatcaaatttctgaacacttatcagaaccctgggagaaaaattgtctgcttatgtcattctgtctggagcctctgctacaagaatggtggtagagaagggtgtgccattgataaagataatgtgaaccagtgcccgcctagagcatgtgtcattgacggggccaaacacatgtgtgccatcctgaatggcatgctgttgtctta

SEQ ID NO: 637706 - DNA, 136 bp, Homo sapiens
gctacctcttcacatggaggatggggcaggtggactgttgagtcaggagtttgataccagccagcccaacacacagggcaggcgggcttggacgtaaccgcaggaaaccactcccagatgagcaggtacggcggtg

SEQ ID NO: 637707 - DNA, 501 bp, Homo sapiens
gataatgggtatgattgtggacacagctatggttaagaggtaccaagaagtagctgaaattttttacgggagattgagtgtgaatctgagaattagggaagccacaattcgatttatggatattgttggtgcgttagttggccttaccttctttgctgtgccgatgttaatcattggtatgtttgttaaaaaagacggtggtgaggttttttttaagcagaatcgtattggtctaaatggcaagcattttgtgatgtggaaaattcggtcgatggtggtcgatgcggaagaaattcgacaagagttaattgcccagagcgatgttgagggtatgtttaagatgaaggatgatccgcgtattacaccaattggcaagtttattcgtaacattcaattgatgaatccacaattttggacgtcttaaaggcgatatgtcactagttggccaagccagcattagagagagtatgacggataacgagagaaaagagcggttaagta

SEQ ID NO: 637708 - DNA, 1144 bp, Homo sapiens
ttttttttttttcagttaatatttaattttaataatactggtatatgttggaacagtcagcaatgcccaaagaaaaaatcttcagtgcatatgttttcccacccaggtgtgtgacacacttgctttaaattagcaggtggaaggaaggaggggtgaattcacgagttaacaaagctaaaaaaaaatatcctgtttttcaatttaccacacaacccttattaaacaactttttcctcttgaaatgtgccattaaatttaaccacttttaacacctccccctacccaccaaacgtggtccagcctttatccccacgtgcaaatcaccgcgagtgacgctcgagcgtggcacccaccagaaggatattttctataagagaaaaaagaaatagcacccagcctatgggcaccacccaatatcctacccaacaccccacccctctctccacccgagaacgaacaaccacgagatcccctctgtgccgtgtggcccccttggtgactccgcattaagagcccccagagagacaacaaatgccccctgtggcgacggctgtcgcgactcgcactctgtgggagagggccccaatttctgtccccccacacacacgacgaggggactcatcccaactgtgcctcctcccccaactcttattaacagatctacacctccagtgggaggtatggggctcttagacaaagacgtgtgacttttcacaaaacgccacaaaggctattaccccccttctacaacaccaccatatagacatatataaacaactacgtcagcaaaattatcacttatctccactcctacataccgccgcaacacaccaaacccccccaaagaaacatcttgacacatactaataaatcctactcacctcctaaactcccccctccgctaaccacccctttctctgcactacaccaacacaaccacgtcctaaaaccagcgagcacccgtatgcaactcacacgcgtgggtctactaccccgtccaaacaacctatcctgacggcctatcacaaaacattacttgcacagacacttttgccgcccgcaactatagcagccgcattttagagaacacaacgccaccccataagggcgcacacaacaacagaggacaccatattaggagcac

SEQ ID NO: 637709 - DNA, 144 bp, Homo sapiens
agcaagcacaccatctcaccagcacattcagccatctggcacagctcaatcctcccaagccaagcaagtgtgttcactatgcccactctcaagtgcaacagcaaatggtgcccaatcattcaccaccagccaagtcttccagct

SEQ ID NO: 637710 - DNA, 1133 bp, Homo sapiens
tcaggacacacctggaggagaagccgcacgtgtgccagttctgcatgcctgtggcttccgagatgaagggctcactggatgcggacacagtgcagactaccacacatgtgcgacgaatgccgttcaagtgctacaagtgcggcctgtggcttcgccgagcacggcacgctgaacctggcacctgctgcaccaaagggcggctgcctgcttgtgagagtgcgcaggcagttgctaggtgtctgaggacagccccgcggcagtcatctacgtcctcacgcgaagacccagccaccacagtgttggtcggagttctcgtccgtggtagctgacacccaggagtatatcatcgaggccactgcgagacgatcgcggcagaccagatgaggcccacggagatcatcgcagggcacccagacagaggtggcaccagccacatcatgaagtgtggtgacagcagatctgtgcaccaggctagacgccggcccaccagtatcatcgttgcaccaacgtcaccatggaccgaggagacggcgctaggagcccccagatggctggcatgccagaccgacacccatcacccatcaggcccaccccgagacagcctgacaagagcagcgtggcacacttgacgcttggcctcggccatcagcgcagggcacatgctgcttggccgcccagggcaggtacaaagtgccaaatgaagcagggccaactgtgaccatgatgtcaatccagagcgcactcgaacatcctgcagcatgccagcgacactggcacatagacgtgccggcagggccgacgatagactgttgtataacggtcatactgcatagacattaaagctacgcgagagaaccttgggcaaggaaaggacaagagcacgataggcgcctctcgaagacgcccagagctattgcctaggcttaggcctggcgatacaagaaacattcaaagaggcatttgcagggcccgcagtaaggaaacggtaactaccgacatcatagcggcgctgaacagaagcaattacaacaaggcaatcaacaacactagatagcagtatgaagcactcgaaagggcaaacgactagaacagagttgcacaagtggcacttacagggatatgcaagaccagta

SEQ ID NO: 637711 - DNA, 451 bp, Homo sapiens
gagttctcgtagggttcttagagctgatcttaaccgctctatcagctaaatggtcaaggggcggtaatgggttccgagagcaaatttaaagtcgaaccaagattagatgtccctcataccagcaatcaccgtggctccgtaggcaagtcgcctctacttataactatctcatctaaggtgctacatagtgagtgtgtgctagattacaagtctcagagtagctcgtagccattgaccggtaaatgagcggcatgtcccgcagaccatgtttaaagttaatgcctcatgcaggtggcatactagtagtcacgtgagacactatgtgcgctcacgatggacaatctcagccaacacgccctatgttgagtgcgacagagtgcctcaatgatggctaatactgtccatggatctatagtgtaacagagattgtaggatagatagatgaattaag

SEQ ID NO: 637712 - DNA, 110 bp, Homo sapiens
atatatgcttgctctgcagatgaaaagtacagatctatatacccaactacttactcaccccgaatatataagtcggtcttacatgaaaatacacagggtagcaagtaaca

SEQ ID NO: 637713 - DNA, 578 bp, Homo sapiens
tgggagacgggggtctcattcaaagagaaatacaaataaagcaacgctgagattctggtttctttccaaccatcagacgggcacagctccaaaaattggataccatattctacgggcaaatttggtggaaaagaaggtgctcttctccagggccagagggcatgtgaactgcaacagcccctctgaagggcaattgggcaagatctgtcaaaatcatagatgccggcaggggggccctagcatggcctcctcgggtaactaaatctcacagatacatctgggggagtgtgaggtgactaggggaaaagtcgattggcgcagcaacacgggggacagcgagggcaggaagaaccaaaaggccctccaatagggacagggtcaaatatgtaagggtccgtccacatgagggagggcggggaagacactctcttatatatctgtatcgcggtgggcagggagagtctaaaaaatactctgaaatgggccaggcgtggcggctcatgcttgttatcccaacattttaggagacaaaggggggaggtctggttgaggacaggagtttgaaaccattctgtgca

SEQ ID NO: 637714 - DNA, 139 bp, Homo sapiens
cttcacgccgttcctctgggctcccgactcagtggcagctcactgagggcttcactgcatggcagtcctgcctagagccctgtggcccctctccatccggtgcttgccgtgatacgggagctcggtgttgtcgcggtag

SEQ ID NO: 637715 - DNA, 115 bp, Homo sapiens
  misc_feature (88)..(88): n is a, c, g, or t
ggtagcatatgcttgtctcaagagttaagccacatgcatgttctatagtacgcacgaccgagatacagttgaaaacttgtcgaatttngctcattaaattcagttatgggttgcc

SEQ ID NO: 637716 - DNA, 184 bp, Homo sapiens
taaacctcatctgtcccagaacatcatctactgacctgtggtgcctactaactcgccgaggccctgcctttcgctcgctgcgtccctgctcaggctaagcttgtacaataactgcatctgcgacgtgggagccgagagcttggctcgtgtgcttccggacatggtgtccctccgggtgatagga

SEQ ID NO: 637717 - DNA, 301 bp, Homo sapiens
tgcccagccatgcttcatccaagagcccagggtacccccatgagggccctggcttccctgcccctcatcactgaccccagggtctctcctctcccaaaccggacaactgagtgcagcaggccaggcctaggagggccttcaagccggccaaggggcacgcggcagtcaggctacacacacccacccacagcctgggtagcagggcgcgcccgtttccctcctcagtggaaagggaccagacccgagggccagccccagcccagtcagcagccccctcggaggcaggcatgcaggcggccgc

SEQ ID NO: 637718 - DNA, 125 bp, Homo sapiens
gtataagagtcagctcccccaagatagagctagcagcccccagagagagctctagcacgtcaccaagtaaccaggcccagcctccaggccccaaactccgcccagccctactccccgctctagga

SEQ ID NO: 637719 - DNA, 418 bp, Homo sapiens
tcgctatcatcggcacctaattagcgaggcgtgctgacgcagtgagaaacacaacttcagagtgtaagggtatggaccatttgggtttttcatctgcgtaatggttcaggaacgcccacagtctaccagggcatcgctcttggattcccactccagcagtccataggagctgcgctcacttctgcctgagaatactttcacagaagatggccgcttctctcccagctcatcgcagatctcagagaagttctcctcggtctcctccagcgcggcgttgaacacgtgccgcccgttgcgcgggtgctggatgcggttcttggctgcctgctctgtggtggcgacccgatcgttccgggattcactgacctctttgttcctgccctacccgtcttccatccctgtatcatcgaccgggcat

SEQ ID NO: 637720 - DNA, 569 bp, Homo sapiens
  misc_feature (17)..(17): n is a, c, g, or t
  misc_feature (195)..(197): n is a, c, g, or t
  misc_feature (249)..(249): n is a, c, g, or t
  misc_feature (295)..(295): n is a, c, g, or t
  misc_feature (329)..(329): n is a, c, g, or t
  misc_feature (382)..(382): n is a, c, g, or t
  misc_feature (411)..(411): n is a, c, g, or t
  misc_feature (532)..(532): n is a, c, g, or t
  misc_feature (540)..(540): n is a, c, g, or t
tgtgggggggggggggntcttctttttcctcttttttaaaaaaaaaaccccctctgcgcggttgtttttttttttccccctggggggggggggcccccccccgggggggggggggggtttttcttttatctacccccccccttcttttcttttttttttcgcgcgcccccgccgacaataaaagggagggtggtnnnttcttgtctcccccccctttctcttttttttttggcgcgccccccaccaaanaatttaatttttttttttttttttggggtgggtgaagaaaacaaanaaaccccgcccccgccgccccccgcgtgcggggncgggtgtgtttttttttttttttctttccccccctcccatttttcttcttttntttttaagggggggggggggcggcggccnccgcccccgctatgaatttacttgttgggcgggggtcgggctgtctgtttttttattttatataattacgtctgtccccccccctccccccccctctttgtttttgttttgtgtttgtttngtgcgtgntttttactcgacccccccccccttccggg

SEQ ID NO: 637721 - DNA, 174 bp, Homo sapiens
tggctggctgcacattttcagacaaatgtcagtcgtgagtaggacaacttgttcagtgaggaaaaaacattcagacaaatgttcagtgaggaaaaaaaaggggaagttggggataggcagatgttgacttgatggagttaagtgtgatctatggggcgagatacattcttatag

SEQ ID NO: 637722 - DNA, 240 bp, Homo sapiens
ggcctttattaaggaaacactttaatcttgagttggggacaaccctggtccggctattgttaaacccatgaactctacgtaaaaaatacagaagattagaccagatgtggtggtgtgcgcctgtagatcccagctactcgtggtggctgaggcactagaatcacttgagcctaggaggcagaggtggcagtgagccgagatcacaccactgcactgcagcctgggacgacaagcactgtc

SEQ ID NO: 637723 - DNA, 369 bp, Homo sapiens
  misc_feature (206)..(206): n is a, c, g, or t
ccctttttttgggggggggggcccccccccaaaaatttttttgggttggcccagggcctttttttaggggccggggcccccccttggggttttgccccccgtttaactttttccggaaatttttgggggggggccccgccctttttaaaacccgggttttttttccccccaaaaaaaccattttttttggggggtttggggccggnagagggggccccttaaaattttttaaaacttttgggggggggggcgccaaaaaggggtgggtttccaaaaaaccccccccttttccccctttttttttgtccctttttttttttcccccccccccccccttttttttttaaaaaaaaagccttgggggtgtta

SEQ ID NO: 637724 - DNA, 976 bp, Homo sapiens
gctccaccccctcgcgtttgtcctgggaagggtttggcggggggccggccctccggccctctgctgcccgagggttcctcgcaggctggagctgacggcgctggagcgcgtggtacgaatctcagccaagcccaccaagcggctgcaggaggcgctgcagcccattctggagaagcacggcttgagcccgctagaggtggtgctgcaccggccaggcgagaaacagcctctggatctggggaagctagtgagctcggtggcggcccagagactggttttggacactcttccaggtgtgaagatctccaaagcccgtgacaaatctccctgccgcagccagggctgcccacctagaactcaggataaggccacccatccccctccagcgtcccccagttctctggtgaaggtgcccagtagtgccactggaaagcggcagacctgtgacatcgaaggcctggtggagctgctgaaccgggtgcagagcagcggggcccacgaccagaggggccttctgaggaaagaggacctggtacttccagaatttctgcagctgcccgcccaagggcccagctccgaggagaccccaccacagaccaaatcagcagcccagcccatcgggggatccttgaactccaccaccgactcagccctctgacagctacccaacagtccaggacagctgcatggcacccggcgggccgagcatgccatgggtccgctctgcatgccctgtctgtgccatgagtgtccctggccccttcctgccatgggcaggcccgcaggaagagccggtaggggtggaaaggggactcagatgagacacaccccacagctgccaccgccttgtccctcaacaagctcaccccaatcccttgcagcaggcacatgggggggtgagtcagccctggaaaaagctgccacatgaggaggcgtggaggccactccactggcagttcaagggagaggggggggc

SEQ ID NO: 637725 - DNA, 758 bp, Homo sapiens
tggtggtagccatgtgcaccttgcattggcgattaagtacctccctttaacccctgccaccccaggatccaactacccccatgcacttaggtttccctactcagtggctgcagttcccactgtaagttccagcctacagacaagagcacttggacatcttcaaggatgctcgggctccccttaaaaatttgtttctcacatggtgacaggtgtgtcctctggaccctcccagagtagatgaacaggtatcacaagataaatcccctccaacagtacaattctttggataccttcctctgcagagtacccaggcagttctggcatttcaacttcatttagtgtaggccaccttttggtccatgtttagccaaccagccaaccaatactgttagagccctttctaacccctccagcagcaatatcaaattcagaatctctgcttagtgggcccataccaatcaattcagcctgatccaacttttgtgtcttccacgctttatcatacacccttgatatccatatcaatgtatagtctttagattggtctgaataattaaactgaatcgtgcgttctttggtgtacacacatctcatgggtcattctttgtactcacttttgggagctgctttgattaagtcagtatatgtctaaaggaaagaaggggggaggcatagggcttagggaaggcgggccggagggaagtgctccggagccggggggctcgggaagggggtacttccaaggggaagggggccag

SEQ ID NO: 637726 - DNA, 810 bp, Homo sapiens
gccgggcggaggcctgtaccgcgggctgctgacctctccccacagccaggcgagaaacagcctctggatctggggaagctagtgagctcggtggcggcccagagactggttttggacactcttccaggtgtgaagatctccaaagcccgtgacaaatctccctgccgcagccagggctgcccacctagaactcaggataaggccacccatccccctccagcgtcccccagttctctggtgaaggtgcccagtagtgccactggaaagcggcagacctgtgacatcgaaggcctggtggagctgctgaaccgggtgcagagcagcggggcccacgaccagaggggccttctgaggaaagaggacctggtacttccagaatttctgcagctgcccgcccaagggcccagctccgaggagaccccaccacagaccaaatcagcagcccagcccatcgggggatccttgaactccaccaccgactcagccctctgacagctacccaacagtccaggacagctgcatggcacccggcgggccgagcatgccatgggtccgctctgcatgccctgtctgtgccatgagtgtccctggccccttcctgccatgggcaggcccgcaggaagagccggtaggggtggaaaggggactcagatgagacacaccccacagctgccaccgccttgtccctcaacaagctcaccccaatcccttgcagcaggcacatgggggggtgagtcagccctggaaaaagctgccacatgaggaggcgtggaggccactccactggcagttcaagggagaggggggggc

SEQ ID NO: 637727 - DNA, 613 bp, Homo sapiens
ctatgtaaccaagacacagatattcagaaaaggacgtctcttcaataagtgtgctgggagaacggatatccatgtgcagaaaaataaaactggaaccctatctctcactacatacgtaaagcaaatcaaaatggattacagacttatatctaagacctcaaattatgaaactactaaaagaaaacattgagaaactctccaggatgtagggctgggcaaatatttcttgagtagtaccccaaaagcacaggcaaccagggcaaaaatggacaaatgtgatcacatcaaattgaaaagctttggcacagggcaggaaacaatcagcagagtgaagagacagcccacagagggggagaaaatattggcaaggtatccagggacaaaggattaataaccagaatatataatatcaatggtcatcagaaaaaatgcacattgaactacagtgggctattaccttaccccagttaaaatggcttttatccaagacaggcaatagcgaatgttggcgaggatgtgcagaaaggggagcccttgaaaactgtaggtgggaattagtacaaccactataaagaacggtttgcaaggtcctcaggaaactataattaagagc

SEQ ID NO: 637728 - DNA, 234 bp, Homo sapiens
gaatatctacatttccacctggtggataccaaggctataatatggcaagacaatgaaaatttatcacatcaccggggcatatgctaaaacaagggataatttacaaacaagtcttttaaatcaagaacattatgtaaaatacacactctggtaaacattctgagttcatccatcctaaaatttagaccttaggaggcaaaaaaagaaaaaaacattctcaaatagtttaaccac

SEQ ID NO: 637729 - DNA, 2210 bp, Homo sapiens
tttctatagagacacttcctgtggcagagaaaagaggtagtgagcggtgtttcaggatgtgagggcccgcaggagccgagtcaggctctctccactgcctgcccgccaccgtgcaagctctggccggcgctgcccacagtccccatggtgggcagcccccgcggcggggacccctgatcggcagcggcatgccagggaagcccaagcacctgggcgtccccaacgggcgcatggttctggctgtgtcagatggagagctgagcagcacgacggggccccagggccagggcgagggccgcggcagctctctcagcatccacagcctccccagtggtcccagcagccccttcccaaccgaggagcagcctgtggccagctgggccctgtccttcgagcggctgttgcaggacccgctgggcctggcttacttcactgagttcctgaagaaggagttcagcgcggaaaacgtgactttctggaaggcctgcgagcgcttccagcagatcccggccagcgatacccagcagctagctcaggaggcccgcaacatctaccaggagttcctgtccagccaggcgctgagcccagtgaacatcgaccgtcaggcctggcttggcgaggaggtgctggccgagccccggccggacatgtttcgggcacagcagcttcagatcttcaacttgatgaagttcgacagctatgcgcgcttcgtcaagtccccgctgtaccgcgagtgcctgctagccgaagccgagggacgccctctgcgggaacctggctcctcgcgcctcggcagccctgacgccacgaggaagaagccgaagctgaagcccgggaagtcgctgccgctgggtgtggaggagttggggcagctgccacccgttgagggtcctgggggccgccctctccgcaagtccttccgccgggagctgggcgggactgcaaacgccgccttgcgccgagagtctcagggctccctcaactcctccgccagcctggaccttggcttcctagccttcgtcagcagcaaatctgagagccaccggaagagccttgggagcacggagggtgaaagtgaaagccggccagggaagtactgctgtgtgtacctgcccgatggcacagcctccttggccctggccagacctggcctcaccatccgagacatgctggcagggatctgtgagaaacgaggcctctctctacctgacatcaaggtctacctggtgggcaatgaacagaaggccctggtcctggatcaggactgcaccgtgctggcggatcaggaagtgcggctggaaaacaggatcaccttcgagctggagctgacggcgctggagcgcgtggtacgaatctcagccaagcccaccaagcggctgcaggaggcgctgcagcccattctggagaagcacggcttgagcccgctagaggtggtgctgcaccggccaggcgagaaacagcctctggatctggggaagctagtgagctcggtggcggcccagagactggttttggacactcttccaggtgtgaagatctccaaagcccgtgacaaatctccctgccgcagccagggctgcccacctagaactcaggataaggccacccatccccctccagcgtcccccagttctctggtgaaggtgcccagtagtgccactggaaagcggcagacctgtgacatcgaaggcctggtggagctgctgaaccgggtgcagagcagcggggcccacgaccagaggggccttctgaggaaagaggacctggtacttccagaatttctgcagctgcccgcccaagggcccagctccgaggagaccccaccacagaccaaatcagcagcccagcccatcgggggatccttgaactccaccaccgactcagccctctgacagctacccaacagtccaggacagctgcatggcacccggcgggccgagcatgccatgggtccgctctgcatgccctgtctgtgccatgagtgtccctggccccttcctgccatgggcaggcccgcaggaagagccggtaggggtggaaaggggactcagatgagacacaccccacagctgccaccgccttgtccctcaacaagctcaccccaatcccttgcagcaggcacatgggggggtgagtcagccctggaaaaagctgccacatgaggaggcgtggaggccactccactggcagttcaagggagaggggggggc

SEQ ID NO: 637730 - DNA, 289 bp, Homo sapiens
tgccacaccaatgtcaagcccatgccataccttgtcaagacttgtcaaagtggttgtggttagtgtcacaattggttatgtttctgatggttaggaagacgcaggtcagccctcagatcacctgtcccgggacagctgaccccctagaagcctggctctgcccatttagtagtggatcctacatactctgcccacatttgggtctgttctctcccattaacacataggttttgtctcgatgcatgcaggagtttctccttaaaaaatactgttgtacgaaaaaatgaag

SEQ ID NO: 637731 - DNA, 2057 bp, Homo sapiens
cagagtggggtcctctgtcagcttcctcatctagccttcctgcagcaccctcttcctcttctcccagctgggaacttttcttccttctccctgtccttgtctctgcctctcattttctctccctgtcttcagatcggtctggctccgtctgtctgtctggccctgtctgtctggcttggtctcttggccctgtctctgtacccaatctttttgatcacatcccccagttcggtctctgtgtctctgagtctctgcctgcctccccctccttcccctcccaggagttcctgaagaaggagttcagcgcggaaaacgtgactttctggaaggcctgcgagcgcttccagcagatcccggccagcgatacccagcagctagctcaggaggcccgcaacatctaccaggagttcctgtccagccaggcgctgagcccagtgaacatcgaccgtcaggcctggcttggcgaggaggtgctggccgagccccggccggacatgtttcgggcacagcagcttcagatcttcaacttgatgaagttcgacagctatgcgcgcttcgtcaagtccccgctgtaccgcgagtgcctgctagccgaagccgagggacgccctctgcgggaacctggctcctcgcgcctcggcagccctgacgccacgaggaagaagccgaagctgaagcccgggaagtcgctgccgctgggtgtggaggagttggggcagctgccacccgttgagggtcctgggggccgccctctccgcaagtccttccgccgggagctgggcgggactgcaaacgccgccttgcgccgagagtctcagggctccctcaactcctccgccagcctggaccttggcttcctagccttcgtcagcagcaaatctgagagccaccggaagagccttgggagcacggagggtgaaagtgaaagccggccagggaagtactgctgtgtgtacctgcccgatggcacagcctccttggccctggccagacctggcctcaccatccgagacatgctggcagggatctgtgagaaacgaggcctctctctacctgacatcaaggtctacctggtgggcaatgaacagaaggccctggtcctggatcaggactgcaccgtgctggcggatcaggaagtgcggctggaaaacaggatcaccttcgagctggagctgacggcgctggagcgcgtggtacgaatctcagccaagcccaccaagcggctgcaggaggcgctgcagcccattctggagaagcacggcttgagcccgctagaggtggtgctgcaccggccaggcgagaaacagcctctggatctggggaagctagtgagctcggtggcggcccagagactggttttggacactcttccaggtgtgaagatctccaaagcccgtgacaaatctccctgccgcagccagggctgcccacctagaactcaggataaggccacccatccccctccagcgtcccccagttctctggtgaaggtgcccagtagtgccactggaaagcggcagacctgtgacatcgaaggcctggtggagctgctgaaccgggtgcagagcagcggggcccacgaccagaggggccttctgaggaaagaggacctggtacttccagaatttctgcagctgcccgcccaagggcccagctccgaggagaccccaccacagaccaaatcagcagcccagcccatcgggggatccttgaactccaccaccgactcagccctctgacagctacccaacagtccaggacagctgcatggcacccggcgggccgagcatgccatgggtccgctctgcatgccctgtctgtgccatgagtgtccctggccccttcctgccatgggcaggcccgcaggaagagccggtaggggtggaaaggggactcagatgagacacaccccacagctgccaccgccttgtccctcaacaagctcaccccaatcccttgcagcaggcacatgggggggtgagtcagccctggaaaaagctgccacatgaggaggcgtggaggccactccactggcagttcaagggagaggggggggc

SEQ ID NO: 637732 - DNA, 403 bp, Homo sapiens
  misc_feature (9)..(9): n is a, c, g, or t
  misc_feature (47)..(47): n is a, c, g, or t
  misc_feature (52)..(52): n is a, c, g, or t
  misc_feature (395)..(395): n is a, c, g, or t
  misc_feature (397)..(399): n is a, c, g, or t
aactccctnacccccagtatttgaaaggcctgggaaattccatcaanacccnattccagggactgttcaaaacgtcattttcctgagacgctttaccctaataatccttctgtaaaaaatatccttcttgggctgaatgccaggtgcacgccagtaacccctacactttgggaggctgaggcaggaggattccttgaggcccaggaattggagaccagtctgggcaacataatgagaccctgtctctacaaacaataaaaaagttagctggcatggtggtatgcctgtagtcccatttactcgggatgctgaatccagaggattggttgagcctgggaggtcaaggctgcagtgagctatgactgcaactcttgcctgggcaagagagtgagacntnnntctt

SEQ ID NO: 637733 - DNA, 1396 bp, Homo sapiens
tttctatagagacacttcctgtggcagagaaaagaggtagtgagcggtgtttcaggatgtgagggcccgcaggagccgagtcaggctctctccactgcctgcccgccaccgtgcaagctctggccggcgctgcccacagtccccatggtgggcagcccccgcggcggggacccctgatcggcagcggcatgccagggaagcccaagcacctgggcgtccccaacgggcgcatggttctggctgtgtcagatggagagctgagcagcacgacggggccccagggccagggcgagggccgcggcagctctctcagcatccacagcctccccagtggtcccagcagccccttcccaaccgaggagcagcctgtggccagctgggccctgtccttcgagcggctgttgcaggacccgctgggcctggcttacttcactgagttcctgaagaaggagttcagcgcggaaaacgtgactttctggaaggcctgcgagcgcttccagcagatcccggccagcgatacccagcagctagctcaggaggcccgcaacatctaccaggagttcctgtccagccaggcgctgagcccagtgaacatcgaccgtcaggcctggcttggcgaggaggtgctggccgagccccggccggacatgtttcgggcacagcagcttcagatcttcaacttgatgaagttcgacagctatgcgcgcttcgtcaagtccccgctgtaccgcgagtgcctgctagccgaagccgagggacgccctctgcgggaacctggctcctcgcgcctcggcagccctgacgccacgaggaagaagccgaagctgaagcccgggaagtcgctgccgctgggtgtggaggagttggggcagctgccacccgttgagggtcctgggggccgccctctccgcaagtccttccgccgggagctgggcgggactgcaaacgccgccttgcgccgagagtctcagggctccctcaactcctccgccagcctggaccttggcttcctagccttcgtcagcagcaaatctgagagccaccggaagagccttgggagcacggagggtgaaagtgaaagccggccagggaagtactgctgtgtgtacctgcccgatggcacagcctccttggccctggccagacctggcctcaccatccgagacatgctggcagggatctgtgagaaacgaggcctctctctacctgacatcaaggtctacctggtgggcaatgaacaggtgggaacgtgacctggctccaactctaacctccttcctgatcctgaccccaactccatttctgtctctgctcagtcatggctccaaccccaattcaagttctaaacccaactccaaagcaccctcagcaccaactttcactcactcagacatcc

SEQ ID NO: 637734 - DNA, 2495 bp, Homo sapiens
tttctatagagacacttcctgtggcagagaaaagaggtagtgagcggtgtttcaggatgtgagggcccgcaggagccgagtcaggctctctccactgcctgcccgccaccgtgcaagctctggccggcgctgcccacagtccccatggtgggcagcccccgcggcggggacccctgatcggcagcggcatgccagggaagcccaagcacctgggcgtccccaacgggcgcatggttctggctgtgtcagatggagagctgagcagcacgacggggccccagggccagggcgagggccgcggcagctctctcagcatccacagcctccccagtggtcccagcagccccttcccaaccgaggagcagcctgtggccagctgggccctgtccttcgagcggctgttgcaggacccgctgggcctggcttacttcactgagttcctgaagaaggagttcagcgcggaaaacgtgactttctggaaggcctgcgagcgcttccagcagatcccggccagcgatacccagcagctagctcaggaggcccgcaacatctaccaggagttcctgtccagccaggcgctgagcccagtgaacatcgaccgtcaggcctggcttggcgaggaggtgctggccgagccccggccggacatgtttcgggcacagcagcttcagatcttcaacttgatgaagttcgacagctatgcgcgcttcgtcaagtccccgctgtaccgcgagtgcctgctagccgaagccgagggacgccctctgcgggaacctggctcctcgcgcctcggcagccctgacgccacgaggaagaagccgaagctgaagcccgggaagtcgctgccgctgggtgtggaggagttggggcagctgccacccgttgagggtcctgggggccgccctctccgcaagtccttccgccgggagctgggcgggactgcaaacgccgccttgcgccgagagtctcagggctccctcaactcctccgccagcctggaccttggcttcctagccttcgtcagcagcaaatctgagagccaccggaagagccttgggagcacggagggtgaaagtgaaagccggccagggaagtactgctgtgtgtacctgcccgatggcacagcctccttggccctggccagacctggcctcaccatccgagacatgctggcagggatctgtgagaaacgaggcctctctctacctgacatcaaggtctacctggtgggcaatgaacagaaggccctggtcctggatcaggactgcaccgtgctggcggatcaggaagtgcggctggaaaacaggatcaccttcgagctggagctgacggcgctggagcgcgtggtacgaatctcagccaagcccaccaagcggctgcaggaggcgctgcagcccattctggagaagcacggcttgagcccgctagaggtggtgctgcaccggccaggcgagaaacagcctctggatctggggaagctagtgagctcggtggcggcccagagactggttttggacactcttccaggtgtgaagatctccaaagcccgtgacaaatctccctgccgcagccagggctgcccacctagaactcaggataaggccacccatccccctccagcgtcccccagttctctggtgaaggtgcccagtagtgccactggaaagcggcagacctgtgacatcgaaggtacatggtggatgagctggggatcagaaagactagggcagtggggttggggaccattcagggtggcatcagagagccttgagctaaggcagggggctgggtgccactgggcgtggaacaggaaggatgggggttggggggtcaaaggggctggaacatgggggccgcaggccattggtgctggggccaggtaggcagtggccacagtaaggcagtgggactatcgtgggctggcatataggcaggtctgctggggggacccctcatgctgtggcttgcctccaggcctggtggagctgctgaaccgggtgcagagcagcggggcccacgaccagaggggccttctgaggaaagaggacctggtacttccagaatttctgcagctgcccgcccaagggcccagctccgaggagaccccaccacagaccaaatcagcagcccagcccatcgggggatccttgaactccaccaccgactcagccctctgacagctacccaacagtccaggacagctgcatggcacccggcgggccgagcatgccatgggtccgctctgcatgccctgtctgtgccatgagtgtccctggccccttcctgccatgggcaggcccgcaggaagagccggtaggggtggaaaggggactcagatgagacacaccccacagctgccaccgccttgtccctcaacaagctcaccccaatcccttgcagcaggcacatgggggggtgagtcagccctggaaaaagctgccacatgaggaggcgtggaggccactccactggcagttcaagggagaggggggggc

SEQ ID NO: 637735 - DNA, 750 bp, Homo sapiens
cccaggtcagcgccttacgaccaacgcttgcagttgctcagccagagacccaaaggacgtgcgacgtgcaggcgagcagctgtttgaccactggcccactcagacgctggagccacaatcgcagcgtgtccagtgagaaaagcagacgagaggccgcttcaggccagcggagtgtcccgatgcttctcccaactatcattctctgtgaggaattcaccccaaaatgggccccatttatcccattagacagttgtcaccacccaacattccgcacaggttgtcgcaccctaatggagcgaagtcatcacccaacgggcagcagaagttgtaacgcttccccaacccgcccttttaacgccaaaaatctccgtgcgccaataggatcctcatattccccgcctgttggcaagagtggggggcacagatcccccagaaagcattgctcccctattggccaacaacgcgaggatcgcattgccactacaaaacagactttcgtactgttccacaacgcggacatacgttccaacacgcacatttacacacacattaggagcccacccacctaaacggcgagcaaccactgttggacccagaacattagaggaggaactagcacaccaaatcccatatatacaaaggagacagcgacacccgcatgagcatagcagggctagagaccatggcgaagagctattcaggcgacgcaccaaaacatatagaggacaggatgactgtctaacacgcacg

SEQ ID NO: 637736 - DNA, 2095 bp, Homo sapiens
tttctatagagacacttcctgtggcagagaaaagaggtagtgagcggtgtttcaggatgtgagggcccgcaggagccgagtcaggctctctccactgcctgcccgccaccgtgcaagctctggccggcgctgcccacagtccccatggtgggcagcccccgcggcggggacccctgatcggcagcggcatgccagggaagcccaagcacctgggcgtccccaacgggcgcatggttctggctgtgtcagatggagagctgagcagcacgacggggccccagggccagggcgagggccgcggcagctctctcagcatccacagcctccccagtggtcccagcagccccttcccaaccgaggagcagcctgtggccagctgggccctgtccttcgagcggctgttgcaggacccgctgggcctggcttacttcactgagttcctgaagaaggagttcagcgcggaaaacgtgactttctggaaggcctgcgagcgcttccagcagatcccggccagcgatacccagcagctagctcaggaggcccgcaacatctaccaggagttcctgtccagccaggcgctgagcccagtgaacatcgaccgtcaggcctggcttggcgaggaggtgctggccgagccccggccggacatgtttcgggcacagcagcttcagatcttcaacttgatgaagttcgacagctatgcgcgcttcgtcaagtccccgctgtaccgcgagtgcctgctagccgaagccgagggacgccctctgcgggaacctggctcctcgcgcctcggcagccctgacgccacgaggaagaagccgaagctgaagcccgggaagtcgctgccgctgggtgtggaggagttggggcagctgccacccgttgagggtcctgggggccgccctctccgcaagtccttccgccgggagctgggcgggactgcaaacgccgccttgcgccgagagtctcagggctccctcaactcctccgccagcctggaccttggcttcctagccttcgtcagcagcaaatctgagagccaccggaagagccttgggagcacggagggtgaaagtgaaagccggccagggaagtactgctgtgtgtacctgcccgatggcacagcctccttggccctggccagacctggcctcaccatccgagacatgctggcagggatctgtgagaaacgaggcctctctctacctgacatcaaggtctacctggtgggcaatgaacagaaggccctggtcctggatcaggactgcaccgtgctggcggatcaggaagtgcggctggaaaacaggatcaccttcgagctggagctgacggcgctggagcgcgtggtacgaatctcagccaagcccaccaagcggctgcaggaggcgctgcagcccattctggagaagcacggcttgagcccgctagaggtggtgctgcaccggccaggcgagaaacagcctctggatctggggaagctagtgagctcggtggcggcccagagactggttttggacactcttccaggtgtgaagatctccaaagcccgtgacaaatctccctgccgcagccaggcctggtggagctgctgaaccgggtgcagagcagcggggcccacgaccagaggggccttctgaggaaagaggacctggtacttccagaatttctgcagctgcccgcccaagggcccagctccgaggagaccccaccacagaccaaatcagcagcccagcccatcgggggatccttgaactccaccaccgactcagccctctgacagctacccaacagtccaggacagctgcatggcacccggcgggccgagcatgccatgggtccgctctgcatgccctgtctgtgccatgagtgtccctggccccttcctgccatgggcaggcccgcaggaagagccggtaggggtggaaaggggactcagatgagacacaccccacagctgccaccgccttgtccctcaacaagctcaccccaatcccttgcagcaggcacatgggggggtgagtcagccctggaaaaagctgccacatgaggaggcgtggaggccactccactggcagttcaagggagaggggggggc

SEQ ID NO: 637737 - DNA, 364 bp, Homo sapiens
tagtcatgtaacacaagcggagacaggacagcatgagagaagcatgtgagaggtcgaagccaagatagccatcccagaaatcaagaggccccaatgggttctaacttgtttctcgcagtctgaagaggcagccatgaaaactccaagcgccccttggcataagacggagatgccccagactctccacgtccagaaactaggtagggatctggctcactggggaggggcaagagacgagacataataaggacttcaggtgagcccaaaggggctgagggaacagacccagctaactgaacaccctgcggaatgagactcctatgagaagtggggagcacggggccttcaggactccgatagacta

SEQ ID NO: 637738 - DNA, 1626 bp, Homo sapiens
ggccagccccaaggacccggcctgggtgcaggcagcccagcgcccccaccccagccccggctcacctgttccggggtcgccccgcagatcttcaacttgatgaagttcgacagctatgcgcgcttcgtcaagtccccgctgtaccgcgagtgcctgctagccgaagccgagggacgccctctgcgggaacctggctcctcgcgcctcggcagccctgacgccacgaggaagaagccgaagctgaagcccgggaagtcgctgccgctgggtgtggaggagttggggcagctgccacccgttgagggtcctgggggccgccctctccgcaagtccttccgccgggagctgggcgggactgcaaacgccgccttgcgccgagagtctcagggctccctcaactcctccgccagcctggaccttggcttcctagccttcgtcagcagcaaatctgagagccaccggaagagccttgggagcacggagggtgaaagtgaaagccggccagggaagtactgctgtgtgtacctgcccgatggcacagcctccttggccctggccagacctggcctcaccatccgagacatgctggcagggatctgtgagaaacgaggcctctctctacctgacatcaaggtctacctggtgggcaatgaacagaaggccctggtcctggatcaggactgcaccgtgctggcggatcaggaagtgcggctggaaaacaggatcaccttcgagctggagctgacggcgctggagcgcgtggtacgaatctcagccaagcccaccaagcggctgcaggaggcgctgcagcccattctggagaagcacggcttgagcccgctagaggtggtgctgcaccggccaggcgagaaacagcctctggatctggggaagctagtgagctcggtggcggcccagagactggttttggacactcttccaggtgtgaagatctccaaagcccgtgacaaatctccctgccgcagccagggctgcccacctagaactcaggataaggccacccatccccctccagcgtcccccagttctctggtgaaggtgcccagtagtgccactggaaagcggcagacctgtgacatcgaaggcctggtggagctgctgaaccgggtgcagagcagcggggcccacgaccagaggggccttctgaggaaagaggacctggtacttccagaatttctgcagctgcccgcccaagggcccagctccgaggagaccccaccacagaccaaatcagcagcccagcccatcgggggatccttgaactccaccaccgactcagccctctgacagctacccaacagtccaggacagctgcatggcacccggcgggccgagcatgccatgggtccgctctgcatgccctgtctgtgccatgagtgtccctggccccttcctgccatgggcaggcccgcaggaagagccggtaggggtggaaaggggactcagatgagacacaccccacagctgccaccgccttgtccctcaacaagctcaccccaatcccttgcagcaggcacatgggggggtgagtcagccctggaaaaagctgccacatgaggaggcgtggaggccactccactggcagttcaagggagaggggggggc

SEQ ID NO: 637739 - DNA, 193 bp, Homo sapiens
  misc_feature (128)..(128): n is a, c, g, or t
caagcagttaatacatgactcaattttaaaaaattattactctgtggctgactcttaattcctatttcaatatgtgtttccgttgaagaatccaggatacaacttctgtgtgtatagacagctttccnttcacacactaattttggtggggtgtgtatattatctgattgagggaagaatttgagaaaacaca

SEQ ID NO: 637740 - DNA, 1514 bp, Homo sapiens
ggccagccccaaggacccggcctgggtgcaggcagcccagcgcccccaccccagccccggctcacctgttccggggtcgccccgcagatcttcaacttgatgaagttcgacagctatgcgcgcttcgtcaagtccccgctgtaccgcgagtgcctgctagccgaagccgagggacgccctctgcgggaacctggctcctcgcgcctcggcagccctgacgccacgaggaagagctgggcgggactgcaaacgccgccttgcgccgagagtctcagggctccctcaactcctccgccagcctggaccttggcttcctagccttcgtcagcagcaaatctgagagccaccggaagagccttgggagcacggagggtgaaagtgaaagccggccagggaagtactgctgtgtgtacctgcccgatggcacagcctccttggccctggccagacctggcctcaccatccgagacatgctggcagggatctgtgagaaacgaggcctctctctacctgacatcaaggtctacctggtgggcaatgaacagaaggccctggtcctggatcaggactgcaccgtgctggcggatcaggaagtgcggctggaaaacaggatcaccttcgagctggagctgacggcgctggagcgcgtggtacgaatctcagccaagcccaccaagcggctgcaggaggcgctgcagcccattctggagaagcacggcttgagcccgctagaggtggtgctgcaccggccaggcgagaaacagcctctggatctggggaagctagtgagctcggtggcggcccagagactggttttggacactcttccaggtgtgaagatctccaaagcccgtgacaaatctccctgccgcagccagggctgcccacctagaactcaggataaggccacccatccccctccagcgtcccccagttctctggtgaaggtgcccagtagtgccactggaaagcggcagacctgtgacatcgaaggcctggtggagctgctgaaccgggtgcagagcagcggggcccacgaccagaggggccttctgaggaaagaggacctggtacttccagaatttctgcagctgcccgcccaagggcccagctccgaggagaccccaccacagaccaaatcagcagcccagcccatcgggggatccttgaactccaccaccgactcagccctctgacagctacccaacagtccaggacagctgcatggcacccggcgggccgagcatgccatgggtccgctctgcatgccctgtctgtgccatgagtgtccctggccccttcctgccatgggcaggcccgcaggaagagccggtaggggtggaaaggggactcagatgagacacaccccacagctgccaccgccttgtccctcaacaagctcaccccaatcccttgcagcaggcacatgggggggtgagtcagccctggaaaaagctgccacatgaggaggcgtggaggccactccactggcagttcaagggagaggggggggc

SEQ ID NO: 637741 - DNA, 1580 bp, Homo sapiens
cacgaggagtttggttaaatttggggagtgcccccttcctcctacgtggcccacagtctgtaagtctgtgaaaattgaaacccaggtcccagtgaccaccacactcccctgggtggttcgggtcttgggctagacctcagacgtttggaaatctccaacggtggtgtcgctcccagggatttacacctgggcccctgcaggatggctccaaacaaggcccaccagtggggaacaggcttccgcagaggatgggtgagggcggggggctgttcgcgttcatcgctccctcttcactagagctgggcgggactgcaaacgccgccttgcgccgagagtctcagggctccctcaactcctccgccagcctggaccttggcttcctagccttcgtcagcagcaaatctgagagccaccggaagagccttgggagcacggagggtgaaagtgaaagccggccagggaagtactgctgtgtgtacctgcccgatggcacagcctccttggccctggccagacctggcctcaccatccgagacatgctggcagggatctgtgagaaacgaggcctctctctacctgacatcaaggtctacctggtgggcaatgaacagaaggccctggtcctggatcaggactgcaccgtgctggcggatcaggaagtgcggctggaaaacaggatcaccttcgagctggagctgacggcgctggagcgcgtggtacgaatctcagccaagcccaccaagcggctgcaggaggcgctgcagcccattctggagaagcacggcttgagcccgctagaggtggtgctgcaccggccaggcgagaaacagcctctggatctggggaagctagtgagctcggtggcggcccagagactggttttggacactcttccaggtgtgaagatctccaaagcccgtgacaaatctccctgccgcagccagggctgcccacctagaactcaggataaggccacccatccccctccagcgtcccccagttctctggtgaaggtgcccagtagtgccactggaaagcggcagacctgtgacatcgaaggcctggtggagctgctgaaccgggtgcagagcagcggggcccacgaccagaggggccttctgaggaaagaggacctggtacttccagaatttctgcagctgcccgcccaagggcccagctccgaggagaccccaccacagaccaaatcagcagcccagcccatcgggggatccttgaactccaccaccgactcagccctctgacagctacccaacagtccaggacagctgcatggcacccggcgggccgagcatgccatgggtccgctctgcatgccctgtctgtgccatgagtgtccctggccccttcctgccatgggcaggcccgcaggaagagccggtaggggtggaaaggggactcagatgagacacaccccacagctgccaccgccttgtccctcaacaagctcaccccaatcccttgcagcaggcacatgggggggtgagtcagccctggaaaaagctgccacatgaggaggcgtggaggccactccactggcagttcaagggagaggggggggc

SEQ ID NO: 637742 - DNA, 137 bp, Homo sapiens
gaaatcactacttaaaggatagcttctcattgcctgtaccacactacacttaaaatttgtatgggttaacaagtatgtgattctatccagtaagacgatacttttctataacagttagatacaagataaagaacaat

SEQ ID NO: 637743 - DNA, 626 bp, Homo sapiens
gaggatcagctgtcaagtgctgtgcgtccgactctcgcaatacagtagatcatggtcagttcatctttcctgatatgaaaccagcgcatcggcggcgatgcgcagcggcgccagcagccgatacagcgcaaccaaggtcagcgcggtgccggccagcgtggccagcaatgccacgatcaccaccgaccacagcgggcgcccgtccagttcgctctgcgatgccaaccaggcgatcaacaacagcaacggcagatggatgcccaggaaggtcaccgccagcagtttggcgctgaaggagcggggaaacacgcgcgagagcccggcgtacaagcgcatccaacactccggcaaaagagcgcttagtgtcgccgagagcgtgtggagccaacgcgacggaagtctcagacctcgctggttgtacccatgtgcggcaccggttcgcctcaacaagcgatcccgtgcacgcggtgggcgagcgccagcgcacgctaagcgcgccgacaccagccggctcaaacgccctgcttagatcttgtagccggagtggatcgccacgatgccgccggtgatgttcttgaaggtggcacgcgcaaacccgggcttgccatcatgtccttgagcgattc

SEQ ID NO: 637744 - DNA, 1261 bp, Homo sapiens
cctgatccacgcagtgctgcacctggagcaggtgctcaccactggaggtggctggcaggaccaagtaggtggcctaatgcctggcatcaaggtggggcgctcccgggctcagctgccactgaaggtggaggtagaagaggtcacggtgcctgagggctttgtccagaagctcaatgaccacctgctcttggtgtacactggcaagacccgcctggctcggaacctgctgcaggatgtgctgaggagctggtatgcccgacttcctgctgtggtgcagaatgcccacagcctggtacggcaaactgaggagtgtgctgaaggcttccgccaaggaagcctgcctctgctgggccagtgcctgacctcgtactgggagcagaagaagctcatggctccaggctgtgagcccctgactgtgcggcgtatgatggatgtcctggccccccacgtgcatggccagagcctggctggggcaggcggtggaggctttctctatctgttgaccaaggagccacagcaaaaggaggccttggaggcggtgctggccaagaccgagggccttgggaattacagcatccacctggttgaagtggacactcagggcctgagcctgaagctgctggggaccgaggcctcaacctgttgccctttcccatgaagctggcttctctctgcaacaggagaaaacctggagctacagtgtcccccaccttccttgccccatgggaacctccacctcctactccccacccacctctgcgaatctgctcccaaaggaagctgaccagagcaagatctgggcaagcagagagtgcctgggacaggactgtgacctggtggacaggggcctagatgtagcctctgttcctcctggacataggaaggtcccaagcttagtatcccacgtggcctttacaaatcctatggctggccttctcattccacaagggccctggaaagggttgacagccagccttggcatatggctgggagtcccttagcaaggccaaccctgaagaggccctttgaggcattccctatggcttagagttgtagacttacactcaaccctcatgtgagcgtgggagtgagggtggcggtcccttgccaagttggtagcagtgacccagtgattcactgccatcccaggccttaactagcaaaactacggagcgtgccaagtgacctggtgcctgtgggaagtgggttctcaggactggcattcttggaataaattcactctgtccttgcaaaaaaaaaa

SEQ ID NO: 637745 - DNA, 832 bp, Homo sapiens
gttgctccttcggtactccccatcagaactgagacatctgtgaacgaactgtggtgatgccaacaacctcatgttcatccccagtgtggggcctggctacatagacaccagcatgcggccctggaacaaccacaatacgcgcaagagggtcaatggcaagtactatgagacgggcctgcaaggcgtgcctgacagtgatggccgcgagatcgtttccattacctccttcaatgagtggcacggagggcacccagattgagaaggttcattcccaagaagagacgcaccgactgtattgggactacctggctcaccgagctccagcgctgtagcctggagctgacactggccgctgggctggggcacttcaatcgagacaggagaacggagcagttggctcatgatgaggggccgtgtaacatgggccgtgaggtgcctgaatgtcctctgaccgtaggcgtggaagatgtacaacatgtggcggctccagcatgaggtattgtacgaccaatcagtcgtccccaggctcagaggtcagcagatgggtgtttctgggtgggccgtcaggcatgggcctgtgcaaacacagagcccgttcctcgaggcgagtggctgctgaggttgctctgctggtgatgggaacggtcagaggcgtggcgaggttgactagaagcgttagccccagggcagctcccagatcctgaggaacactttcatgtaaccccttctagtttggaagtctgacagcaggctggtgcagtgtagtggcctacccagtcagcgaaccttgggaagggtgtccgggtctgggctctgcatgaaccctgttccc

SEQ ID NO: 637746 - DNA, 231 bp, Homo sapiens
gggggggggcccccaaaatttttttttggggggggggttcctaaaacccccaaaaaaaatccctttggggggtttattgggggggtcccccccccccctttccccccaaagggggggggggggtttttcccccccctttcccccccccccaaggaaccccgggggggggggcccctttcccccgggggggggggccttttttaaaaaaaaaaaaaaaaattttttttttta

SEQ ID NO: 637747 - DNA, 166 bp, Homo sapiens
cccggttatgtcttacggcagctaggaatatgcaataggaccgcggttctatatatgttggcttttcggaactgaggccataattacacagggacggccgcgggtgcattcgtacttgcgccgcctagagcctgaacattcttgagaccgggcgcacagactggac

SEQ ID NO: 637748 - DNA, 394 bp, Homo sapiens
aggtaagcactcaacaaaatcgtttttcccagtaaccctaacaagaaagaagaaactttataggaataattggaatagcaggcatagtatttaaaaatggtaagcatttctaggccgggtgcagtggctcacacctgtaatcccagcattttgggaggccgaggcagaccaatcacttgagctcatgagttcaagaccagtttgggcaacatggtgaaaccctgtctctactaaaaatacaaaaatcagccaggcgtggcggcgggtgcctgtaatcccagctacttaggaggctgaggcaggagaatcacttgaaccagggaggcagaggttgcagtgagccaagatcatgccactgcactccagcctgggtgatagagcaagactccgtctc

SEQ ID NO: 637749 - DNA, 618 bp, Homo sapiens
gtgtacacagagaccagttctctaccctatgctgcaattactaatctaacttactgtctctatggacttgcctattctggtcctttcttataaagtggaacgacgcaacatgcagcccatgttttctggctgctttcactgagcataatattttcaagattcacccatgttgtaacacatatcagtgcttcattcctttttatggctgaataatactccattgcatggacagaccatatttgtgttatctgttcatcactgacagacatttgggtttgttccattttttggctgtcatgaataatgctgtcagcatgtatgtatgtacgcggtttccttagtttttatctaatgtcattttcctgttccaggatccccttcaagataccacattatgtttagctgtcatgtttctaggctcccttggctgtgacatttctcaggttttcattgtttttactgaccttgacagttttgagttctggtcaagtatttcatgaaaactccctcaattatggtttatctgatgttttcctcatgattaagctgggttatgtatttctgggaggaagaccagagaggtaaagtgccaccgtcatcacatcatgtcaggagtac

SEQ ID NO: 637750 - DNA, 226 bp, Homo sapiens
cacaatgcgcctgtagctcatcattagctattccaatatggatcgctgctagtccacacattactgctactattagtatagaatgaataattcacttcctctagtcccagttgccagcgctttcaggtgctctattggccacatgtggcccagtggtcttcatattggagaacacagattaaatacattttcatcacagtataaaattctttttttttagagactg

SEQ ID NO: 637751 - DNA, 171 bp, Homo sapiens
ctccgtctgcggtgtgtgggtggaagatggtaggatggagatctgaccacggcttggggtgtctccagtgttcgccattccagatttcactttgcgtcctccgaggggactctggggcagccaccatggtccggcttgtctggcaggcccttggcagatctaggtattggg

SEQ ID NO: 637752 - DNA, 293 bp, Homo sapiens
ctagaggacccgtgatgtatcgccaacaaagaaagcagtcacatgaatgttttggttcccaatgcatataaaagtatgtttacactatactgtagaccagcaagagtgcaatagcattgtctaataaaacaatatacatacctaaatttaaaaatactttattgctaaaaaatgctgattatcaatctgagccttcggcgagtcgtactctttttgctggtggagggtcttgcctcgaggttgatggttgctgactggtcagggtggtggctgctgagtgttggggataacat

SEQ ID NO: 637753 - DNA, 1261 bp, Homo sapiens
  misc_feature (535)..(535): n is a, c, g, or t
gcctgggtctgacagcgagcagcctgtgggcaccgacggccgatatcttggacgcgcggcagagcgggtcgttgtccgcgccgcccgtgcctctcgctccagtgggcctcctgttcggacccggattcgccggcgctcgctctgcccgtcctattgctgcgcctcaaccgcgccgttgatgcgtgcttgagctacgtggcaggtcgatcgcctggttcttggccgctggattttcccggcgcggctgacccagcgtcgcttacatgttcggagaactgccctgggcttccagcatggttggaggagcagtttgcgggcggagaccgtgcccgggcttttgcccgggagcttcgccgcccaccgcaatgaagtcgggggctctgtcagtggcctggcttgaagcggacgactgcggtcagtaggtgctggaggtctacacgtcatgagctctctcccggtagaattgcccttctccagagtgagtatccagcgactgcgcatattactggtgtcgaggacaccaatgtagtacggnctttacctggggagccccgacgttgctgccagcaccgagatcagcgttgtagctcacctgtgccctgttggttcttgagttcttacctaacgagcctaggctgtggcgcgcttgctgctaggtctctggattgcccatttccgtgtgggcatgactctcttgggccgaaagcatagtcgtctccatggtagcagaacattgacgttctgggcgctgattggcttgcgttggagagccgtacacgatcgtcactgtcacttggcattgcgacttgctccacttgaatggccaaacttgtgtgcccttcagggcaggccgtgtggccctcgtgaagacttagaccagtggatttttcgtgcaccaaagcgtctccaatgttggcccctggggaggcgctttcacctgtggcaacttgtgcccacacctgtgtgacccgtggtcaaggtctcgttctcgaaccccttttgcctccacaagggcgggcgtcgttgtgcgccgccttagggcgcagaggttcgccccacaggcacagtagccacactgggtctgtcggcccgcactagcaggccggaacacccaggcgcactgctgtcttgcagcgctccgcctgcccagcagtcagttgagtcctttggtcagctaggggtggcctcccaccgctgttaagactcaggcacagcttgtgtgcgtccgagcgcggcgctgcctaccacccagccgactggc

SEQ ID NO: 637754 - DNA, 494 bp, Homo sapiens
  misc_feature (15)..(15): n is a, c, g, or t
  misc_feature (75)..(75): n is a, c, g, or t
  misc_feature (136)..(136): n is a, c, g, or t
  misc_feature (145)..(145): n is a, c, g, or t
  misc_feature (226)..(226): n is a, c, g, or t
  misc_feature (235)..(235): n is a, c, g, or t
  misc_feature (237)..(239): n is a, c, g, or t
  misc_feature (248)..(248): n is a, c, g, or t
  misc_feature (268)..(268): n is a, c, g, or t
  misc_feature (283)..(283): n is a, c, g, or t
  misc_feature (288)..(288): n is a, c, g, or t
  misc_feature (335)..(335): n is a, c, g, or t
  misc_feature (369)..(369): n is a, c, g, or t
  misc_feature (383)..(383): n is a, c, g, or t
  misc_feature (431)..(431): n is a, c, g, or t
  misc_feature (433)..(433): n is a, c, g, or t
  misc_feature (493)..(493): n is a, c, g, or t
ggggccccccggagnggccggcccaaccccatccagctgggcgaggacacgggcggaagggcaggccaccaaganggggaactgcacatgcacgggagggaaacgggggcccgccgggaggcgaagcaggacggangaggagccngaaaccaggggcaggaatgcacaggccagggcgggtactagaagcatatcggggattaaacagcaggccttgagtcacagnacgggcagngnnntttttctgnggcacactgcaaagggaaanttcgggataccaccnagggnaccaacgggaggccaaggtggggcagagggagacacacgcagagccngcagcaaagcgtcgagggggtgcctcagcagggnggagggcggcgtcncctcaaacgggagggccatcaccaccttcagggacttcggcaggggcncngagggcctgagccagggaccgcagggcccacgaagggccccggcttatcaacaaacttcng

SEQ ID NO: 637755 - DNA, 314 bp, Homo sapiens
gataattagtagcatactgtatatatcaaagtatgatgaaaagcaatagatatatattcttttatatatgtaaataatgatatgcatggtataatcggcaaaatgtggagtgtatgttcttttcacagtaatatatgcctttagtaacttcactaggttattttattgtaaatgagtacaaaattcttaatttaagagattgtatgtcagtatatatttcattaatttctttccctgtttacgtaaattttcaaagtggccgtaggaaccagtttgtgggttaaggattttagtgtagtggcttgtacccaaga

SEQ ID NO: 637756 - DNA, 106 bp, Homo sapiens
atcggactccgtctctgccaccgtgtctccagccccgctttcatgctcagctgggactgcagctcaatctccaggccttggagcgtgcgcctgagctccgtgatct

SEQ ID NO: 637757 - DNA, 204 bp, Homo sapiens
ggggttcccaaaaggggggggggccccccccccggccccttttttggccctgggggccgggggaacccgttttgcccccccccccctggggtttttttcctttcccccgggggggcccccctttccccccccccggccccccgtttttcccccattttcgctcggtgcccccaaccccaacatcattaccgggttttcctctta

SEQ ID NO: 637758 - DNA, 168 bp, Homo sapiens
  misc_feature (26)..(26): n is a, c, g, or t
  misc_feature (51)..(51): n is a, c, g, or t
  misc_feature (100)..(100): n is a, c, g, or t
  misc_feature (117)..(117): n is a, c, g, or t
  misc_feature (123)..(123): n is a, c, g, or t
atcccttcctgatttttttcattttnacttggggcccccttcctaggactntccccccccaaactccaacctgtatcaaatgcagcccccaagcccttanactttaagcccagttancaaggngccgggtccccctgcaggttcccataaaaacgatttgcagccaga

SEQ ID NO: 637759 - DNA, 159 bp, Homo sapiens
gctcttacattagccacgcaagtgaccaagccacacgtactaaaggttgaactcaaagatatgtacacggctatcaaacaaataccacggggaacagctcaactatcaatacacaggtcaaacatcagacaacaagcttctacaactccagatgctgac

SEQ ID NO: 637760 - DNA, 199 bp, Homo sapiens
tcgtgacccaatgagctcagaaccttgttctcccagaccaaggttgctggaggcatgtcccagacctctctcttctatctgggcactgaaaaaaccaaggtgaagatggttggaaagtctccgatggggaggggagcagcatttttttacggggaaagggtgtctccctcttgtcccccgggctacattgcctggggtc

SEQ ID NO: 637761 - DNA, 473 bp, Homo sapiens
cgtggtggtgggtgcctgtagtcccagctactcaggaggctgaggcaggagaacggtgtgaacccgagaggcggagcttgcagtgagcagagatcacaccactgcactccagcctgggcaacagagcgagagtctgtctcaaaaaaaaaaaaaaaaaaaaaaaaaaaaaatttttgtggggcgggctttgggccttaagaaaaggttttataaaacatttggttgggggggggggcccagtgttggtaacggggacacgtgggcaaaaggggggtcccaaagaaaaacccggggaaaggagaaaaggggcggtgggttcccacaccatattaaaagacggccggggggcgaaccgcggggcgttctgtgaaacacatcccagagaggggaggtcgggggggcacaaacgaggggatctcacaaccggggggccaaggggagtccagaactaaaattaccggaacgggggcaac

SEQ ID NO: 637762 - DNA, 240 bp, Homo sapiens
gggggtttctttttttaaaaaaatatttccacgggtttcttggggactcgtctaaacactttcatcgaaactagaagactgaattatgaggaaactattgggattaggggccagaaacgagtgaactcttatagatctttggacagtttctcggtattagggggagcctagacggatatcaagtttcttcatatcaaagctctcgtggggtgacctcattggctttacaagttgaccagc

SEQ ID NO: 637763 - DNA, 983 bp, Homo sapiens
tctgggtgaggctgaggtagctgctgagctagggcccactggctgcctcactggaggcagcagagcagcctggatgagctgcactgggccccagagctaggagtctttgcagactttgtggaaccacacaaaagcatgtacatgctgaagcccagtgccccctcagtgggctacgttctgtgtgtggtgggtctggccccaacctcaactgcagtatgtagatgctcttgtgctatgtacagtctttttccctatgcttgctgcgactagctggaccccacctacatccctgccttagggcccctgctaggtacatatctaagcctgagatgcctgccatctactgtgagccccgtttgtgtttactgctcccttgcttgcctccatgctccttttatgtgctcagctgcacattcagatgccatgatcctctctcctactggctggggtgctgtgtggctcaactgtcaactacctggctttgtgtgagacttccatcactattgggcatctggccggtgtcctcaccagtgctctgtggcttgccagtatctcctacggctgacgctccgttgccttctgttggtatggccatgtattggctgccagtaccatggctacagcgcttctctttgtggccgcagtactcggtgatcctgtcactggcgcgacgccccttgcgcttgccggcgccttttcccccggccctggacccacgccctcgccatcaccctgcccccattgtcctcgcacgactacctggctcgtcccgtcaccgccacgcgcagtccatctccccttccttgccagctcatgggctcttggcagcggacatcacgcgctcctaggcgcatccggctcccatgtccctttggactccgcgctgatttacggcgattcttcgcttcctctacgcgtggctccctgctgtcattccgctactttcccttggcggaccgcgctcccgtcgctacttctcctgg

SEQ ID NO: 637764 - DNA, 1478 bp, Homo sapiens
  misc_feature (132)..(132): n is a, c, g, or t
  misc_feature (846)..(846): n is a, c, g, or t
  misc_feature (866)..(866): n is a, c, g, or t
  misc_feature (870)..(870): n is a, c, g, or t
  misc_feature (885)..(885): n is a, c, g, or t
  misc_feature (888)..(888): n is a, c, g, or t
  misc_feature (915)..(915): n is a, c, g, or t
aagaccagcacaagccatgtttccatatccaagacaacccacaccacaccagtcaccagaaactgtcatccccggtgcacctggacaaagtggttcgacgtggacttcccgtcccccggaccccatggtggngacaaggaaacctacaacaacatcatcaggagtggggaaaaaatctgccgccgtactgaggagatcaccaggctccagtgccgagccgagagccacccggaggtgagcatcgaacacctgggccaggtggtgcagtgcagccgggaagagggcctggtgtgccggaaccaggaccagcagggacccttcaagatgtgcctcaactacgaggtgcgtgtgctctgctgcgagacccccaaaggctgccccgtgacctccacacctgtgacagctcctagcacccctagtgggagagccaccagcccaactcagagcacctcctcttggcagaaatccaggacaaccactttggtgacaaccagcacaacctccactccacagaccagcacaacctctgcccctacaaccagcacaatccctgcttctacacccagcacaacctctgcccctacaaccagcacaacctctgctcctacaaccagcatatcctctgcccctacaagcagcacaacctcggctcctacaagcagcacaatctctgctcgtacaaccagcataatctctgcccctacaaccagcacaacctctttccctacaaccagcacaacctctgctactacaaccagcacaacctctgcccctacaagcagcacaacctccactccacagaccagcaaaacctcagctgtcctacaaccagcacaacctctggtnctggaactactcccagcccngttnccaccaccagcacanccnctgtttcaaagaccagcacaagccatntttctgtatccaagacaacccactcccaaccagtcaccagtgactgtcatcctctgtgcgcctggacaaagtggttcgacgtggacttcccatcccctggaccccacggcggggacaaggaaacctacaacaacatcatcaggagtggggaaaaaatctgccgccgacctgaggagatcaccaggctccagtgccgagccgagagccacccggaggtgaacattgaacacctgggtcaggtggtgcagtgcagccgtgaagagggcctggtgtgccggaaccaggaccagcagggacccttcaagatgtgcctcaactacgaggtgcgcgtgctctgctgcgagacccccagaggctgcccggtgacctccacatctgtgacagctcctagcacccctagtgggagagccaccagcccaactcagagcacctcctcttggcagaaatccaggacaaccactttggtgacaagcagcataacctccactacacagaccagcacaacctctgcccctacaagtagcacaacccagcttcaatacccagcacatccgactggcccg

SEQ ID NO: 637765 - DNA, 149 bp, Homo sapiens
ttttttccccccggatttttttttgggggcttcccaaaattgggggttttggctttttttaaacccccccccgggctttttttaatttttttaaaaaaaaaaaaatttggggggggggttaaaatttaaaagttccttttcccctttta

SEQ ID NO: 637766 - DNA, 9400 bp, Homo sapiens
  misc_feature (195)..(195): n is a, c, g, or t
  misc_feature (586)..(586): n is a, c, g, or t
  misc_feature (816)..(816): n is a, c, g, or t
  misc_feature (1099)..(1099): n is a, c, g, or t
  misc_feature (1327)..(1327): n is a, c, g, or t
  misc_feature (2495)..(2495): n is a, c, g, or t
  misc_feature (2499)..(2499): n is a, c, g, or t
  misc_feature (2560)..(2560): n is a, c, g, or t
  misc_feature (2651)..(2651): n is a, c, g, or t
  misc_feature (2828)..(2828): n is a, c, g, or t
  misc_feature (2844)..(2844): n is a, c, g, or t
  misc_feature (2955)..(2955): n is a, c, g, or t
  misc_feature (2978)..(2978): n is a, c, g, or t
  misc_feature (5341)..(5341): n is a, c, g, or t
  misc_feature (5765)..(5765): n is a, c, g, or t
  misc_feature (5785)..(5785): n is a, c, g, or t
  misc_feature (5789)..(5789): n is a, c, g, or t
  misc_feature (5804)..(5804): n is a, c, g, or t
  misc_feature (5807)..(5807): n is a, c, g, or t
  misc_feature (5834)..(5834): n is a, c, g, or t
ctcagaggctgctgagggacagggcactcttccccgccgtccacacaatgagtgttggccggaggaagctggccctgctctgggccctggctctcgctctggcctgcacccggcatacagccatgcccaggatggctcctccgaatccagctacaagcaccaccctgccctctctcctatcgcccgggggcccancggggtcccgctccgtggggcgactgtcttcccatctctgaggaccatccctgtggtacgagcctccaacccggcgcacaacgggcgggtgtgcagcacctggggcagcttccactacaagaccttcgacggcgacgtcttccgcttccccggcctctgcaactacgtgttctccgagcactgcggtgccgcctacgaggattttaacatccagctacgccgcagccaggagtcagcggcccccacgctgagcagggtcctcatgaaggtggatggcgtggtcatccagctgaccaagggctccgtcctggtcaacggccacccggtcctgctgcccttcagccagtctggggtcctcattcagcagagcagcagctacaccaaggtggangccaggctgggccttgtcctcatgtggaaccacgatgacagcctgctgctggagctggacaccaaatacgccaacaagacctgtgggctctgtggggacttcaacgggatgcccgtggtcagcgagctcctctcccacaacaccaagctgacacccatggaattcgggaacctgcagaagatggacgaccccacggagcagtgtcaggaccctgtccctgaacccccgangaactgctccactggctttggcatctgtgaggagctcctgcacggccagctgttctctggctgcgtggccctggtggacgtcggcagctacctggaggcttgcaggcaagacctctgcttctgtgaagacaccgacctgctcagctgcgtctgccacacccttgccgagtactcccggcagtgcacccatgcaggggggttgccccaggactggcggggccctgacttctgcccccagaagtgccccaacaacatgcagtaccacgagtgccgctccccctgngcagacacctgctccaaccaggagcactcccgggcctgtgaggaccactgtgtggccggctgcttctgccctgaggggacggtgcttgacgacatcggccagaccggctgtgtccctgtgtcaaagtgtgcctgcgtctacaacggggctgcctatgccccaggggccacctactccacagactgcaccaactgcacctgctccggaggccggtggagctgccaggangttccatgcccgggtacctgctctgtgcttggaggtgcccacttctcaacgtttgacgggaagcaatacacggtgcacggcgactgcagctatgtgctgaccaagccctgtgacagcagtgccttcactgtactggctgagctgcgcaggtgcgggctgacggacagcgagacctgcctgaagagcgtgacactgagcctggatggggcgcagacggtggtggtgatcaaggccagtggggaagtgttcctgaaccagatctacacccagctgcccatctctgcagccaacgtcaccatcttcagaccctcaaccttcttcatcatcgcccagaccagcctgggcctgcagctgaacctgcagctggtgcccaccatgcagctgttcatgcagctggcgcccaagctccgtgggcagacctgcggtctctgtgggaacttcaacagcatccaggccgatgacttccggaccctcagtggggtggtggaggccaccgctgcggccttcttcaacaccttcaagacccaggccgcctgccccaacatcaggaacagcttcgaggacccctgctctctgagcgtggagaatgagaagtatgctcagcactggtgctcgcagctgaccgatgccgacggccccttcggccggtgccatgctgccgtgaagccgggaacctactactcgaactgcatgtttgacacctgcaactgtgagcggagcgaggactgcctgtgcgccgcgctgtcctcctacgtgcacgcctgtgccgccaagggcgtgcagctcggcggctggagggacggcgtctgcacgaagcctatgaccacttgccccaagtcaatgacgtaccactaccatgtcagcacctgccagcccacctgccgctccctgagcgagggggacatcacctgcagtgttggcttcatccccgtggatggctgcatctgtcccaagggcaccttcctggacgacacgggcaagtgtgtgcaggccagcaactgtccctgctaccacagaggctccatgatccccaatggggagtcggtgcacgacagcggggctatctgcacctgcacacatgggaagctgagctgcatcggaggccaagcccccgccccagtgtgtgctgcgcccatggtgttctttgactgccgaaatgccacgcccngggncacaggggctggctgtcagaagagctgccacacactggacatgacctgttacagcccccantgtgtgcctggctgcgtgtgccccgacgggctggtggcggacggcgagggcggctgcatcactgcggaggactgcccctgcgtgcacaatnaggccagctaccgggccggccagaccatccgggtgggctgcaacacctgcacctgtgacagcaggatgtggcggtgcacagatgacccctgcctggccacctgcgccgtgtacggggacggccactacctcaccttcgacggacagagctacagcttcaacggagactgcgagtacncgctggtgcagaaccnctgtggcgggaaagacagcacccaggactcctttcgtgttgtcaccgagaacgtcccctgcggcaccacagggaccacctgctccaaggccatcaagattttcctgggggncttcgagctgaagctaagccatnggaaggtggaggtgatcgggacggacgagagccaggaggtgccatacaccatccggcagatgggcatctacctggtggtggacaccgacattggcctggtgctgctgtgggacaagaagaccagcatcttcatcaacctcagccccgagttcaagggcagggtctgcggcctgtgtgggaacttcgacgacatcgccgttaatgactttgccacgcggagccggtctgtggtgggggacgtgctggagtttgggaacagctggaagctctccccctcctgcccagatgccctggcgcccaaggacccctgcacggccaaccccttccgcaagtcctgggcccagaagcagtgcagcatcctccacggccccaccttcgccgcctgccacgcacacgtggagccggccaggtactacgaggcctgcgtgaacgacgcgtgcgcctgcgactccgggggtgactgcgagtgcttctgcacggctgtggcccgctacgcccaggcctgccatgaagtaggcacctgtgtgtgtctgcggaccccaagcatctgccctctgttctgcgactactacaaccccgaaggccagtgcgagtggcactaccagccctgcggggtgccctgcctgcgcacctgccggaacccccgtggagactgcctgcgggacgtccggggcctggaaggctgctaccccaagtgcccaccagaggctcccatctttgatgaggacaagatgcagtgtgtggccacctgcccaaccccgcctctgccaccacggtgccacgtccatgggaagtcctaccggccaggtgcagtggtgccctcggacaagaactgccagtcctgcctttgtacggagcgcggcgtggagtgcacctacaaagctgaggcctgtgtctgcacctacaatggacagcgcttccacccaggggacgtcatctaccacacgacggatggcacgggtggctgcatctccgcccgctgcggggccaacggcaccattgagaggagggtctacccctgcagccccaccacccctgtccccccaaccaccttctccttctccacacccccgcttgtcgtgagctccacgcacacccccagcaatggcccaagcagcgcgcacacaggccctccgagcagcgcctggcccaccacagcaggcacttctcccaggacgaggctgcccacagcctctgcctcgctgccgccggtctgtggggaaaagtgcctgtggtcgccatggatggatgtcagccgccctggacggggcacggacagcggtgacttcgacacactggagaacctccgcgcccatgggtaccgggtgtgcgaatcacccaggtcggtggagtgccgagccgaggacgcccccggagtgccgctccgagccctggggcagcgtgtgcagtgcagcccggatgtggggctgacctgtcgtaacagggagcaggcatcggggctctgctacaactaccagatcagggtccagtgctgcacgcccctagcctgctccacctctagcagtccagcccagaccactcctccaactacctccaagaccactgaaacccgggcctcaggctcctcagctcccagcagcacacctggcaccgtgtctctctctacagccaggacgacacctgccccaggtaccgctacctctgtcaaaaaaactttctcaactcccagccctccgccagtgccggcaacatcaacatcatccatgtcgaccacggccccggggacctctgtggtctccagcaagcccacccccacggagcccagcacatcctcctgcctgcaggagctttgcacctggaccgagtggatcgatggcagctaccctgctcctggaataaatggtggagattttgacacatttcaaaatttgagagacgaaggatacacattctgtgaaagtcctcgaagcgtgcagtgccgggcagagagcttccccaacacgccgctggcagacctggggcaggacgtcatctgcagccacacagaggggctgatttgcctgaacaagaaccagctcccacccatctgctacaactatgagatccgcatccagtgttgcgagacggtgaacgtgtgcagagacatcaccagactgccaaagaccgtcgcaacgacacggccgactccacatccaaccggagctcagacccagaccaccttcaccacacacatgccctcggcctccacagagcaacccacggcaacctccaggggtgggcccacagcaaccagcgtcacacagggcacccacaccacaccagtcaccagaaactgtcatccccggtgcacctggacaaagtggttcgacgtggacttcccgtcccccggaccccatggtggngacaaggaaacctacaacaacatcatcaggagtggggaaaaaatctgccgccgtactgaggagatcaccaggctccagtgccgagccgagagccacccggaggtgagcatcgaacacctgggccaggtggtgcagtgcagccgggaagagggcctggtgtgccggaaccaggaccagcagggacccttcaagatgtgcctcaactacgaggtgcgtgtgctctgctgcgagacccccaaaggctgccccgtgacctccacacctgtgacagctcctagcacccctagtgggagagccaccagcccaactcagagcacctcctcttggcagaaatccaggacaaccactttggtgacaaccagcacaacctccactccacagaccagcacaacctctgctcctacaaccagcacaacctctggtnctggaactactcccagcccngttnccaccaccagcacanccnctgtttcaaagaccagcacaagccatntttctgtatccaagacaacccactcccaaccagtcaccagtgactgtcatcctctgtgcgcctggacaaagtggttcgacgtggacttcccatcccctggaccccacggcggggacaaggaaacctacaacaacatcatcaggagtggggaaaaaatctgccgccgacctgaggagatcaccaggctccagtgccgagccgagagccacccggaggtgaacattgaacacctgggtcaggtggtgcagtgcagccgtgaagagggcctggtgtgccggaaccaggaccagcagggacccttcaagatgtgcctcaactacgaggtgcgcgtgctctgctgcgagacccccagaggctgcccggtgacctctgtgaccccatatgggacttctcctaccaatgctctgtatccttccctgtctacttccatggtatccgcctccgtggcatccacctctgtggcatccagctctgtggcatccagctctgtggcttactccacccaaacctgcttctgcaacgtggctgaccggctctaccctgcaggatccaccatataccgccacagagacctcgctggccattgctattatgccctgtgtagccaggactgccaagtggtcagaggggttgacagtgactgtccgtccaccacgctgcctcctgccccagccacgtccccttcaatatccacctccgagcccgtcactgagctgggatgcccaaatgcggttccccccagaaagaaaggtgagacctgggccacacccaactgctccgaggccacctgtgagggcaacaacgtcatctccctgagcccgcgcacgtgcccgagggtggagaagcccacttgtgccaacggctacccggctgtgaaggtggctgaccaagatggctgctgccatcactaccagtgccagtgtgtgtgcagcggctggggtgacccccactacatcaccttcgacggcacctactacaccttcctggacaactgcacgtacgtgctggtgcagcagattgtgcccgtgtatggccacttccgcgtgctcgtcgacaactacttctgcggtgcggaggacgggctctcctgcccgaggtccatcatcctggagtaccaccaggaccgcgtggtgctgacccgcaagccagtccacggggtgatgacaaacgagatcatcttcaacaacaaggtggtcagccccggcttccggaaaaacggcatcgtggtctcgcgcatcggcgtcaagatgtacgcgaccatcccggagctgggagtccaggtcatgttctccggcctcatcttctccgtggaggtgcccttcagcaagtttgccaacaacaccgagggccagtgcggcacttgcaccaacgacaggaaggatgagtgccgcacgcctagggggacggtggtcgcttcctgctccgagatgtccggcctctggaacgtgagcatccctgaccagccagcctgccaccggcctcacccgacgcccaccacggtcgggcccaccacagttgggtctaccacggtcgggcccaccacagttgggtctaccaccgtcgggcccaccacaccgcctgctccgtgcctgccatcacccatctgccacctgattctgagcaaggtctttgagccgtgccacactgtgatccccccactgctgttctatgagggctgcgtctttgaccggtgccacatgacggacctggatgtggtgtgctccagcctggagctgtacgcggcactctgcgcgtcccacgacatctgcatcgattggagaggccggaccggccacatgtgcccattcacctgcccagccgacaaggtgtaccagccctgcggcccgagcaacccctcctactgctacgggaatgacagcgccagcctcggggctctccgggaggccggccccatcaccgaaggctgcttctgtccggagggcatgaccctcttcagcaccagtgcccaagtctgcgtgcccacgggctgccccaggtgtctggggccccacggagagccggtgaaggtgggccacaccgtcggcatggactgccaggagtgcacgtgtgaggcggccacgtggacgctgacctgccgacccaagctctgcccgctgccccctgcctgccccctgcccggcttcgtgcctgtgcctgcagccccacaggccggccagtgctgcccccagtacagctgcgcctgcaacaccagccgctgccccgcgcccgtgggctgtcctgagggcgcccgcgcgatcccgacctaccaggagggggcctgctgcccagtccaaaactgcagctggacagtgtgcagcatcaacgggaccctgtaccagcccggcgccgtggtctcctcgagcctgtgcgaaacctgcaggtgtgagctgccgggtggccccccatcggacgcgtttgtggtcagctgtgagacccagatctgcaacacacactgccctgtgggcttcgagtaccaggagcagagcgggcagtgctgtggcacctgtgtgcaggtcgcctgtgtcaccaacaccagcaagagccccgcccacctcttctaccctggcgagacctggtcagacgcagggaaccactgtgtgacccaccagtgtgagaagcaccaggatgggctcgtggtggtcaccacgaagaaggcgtgccccccgctcagctgttctctggacgaggcccgcatgagcaaggacggctgctgccgcttctgcccgctgcccccgcccccgtaccagaaccagtcgacctgtgctgtgtaccataggagcctgatcatccagcagcagggctgcagctcctcggagcccgtgcgcctggcttactgccgggggaactgtggggacagctcttccatgtactcgctcgagggcaacacggtggagcacaggtgccagtgctgccaggagctgcggacctcgctgaggaatgtgaccctgcactgcaccgacggctccagccgggccttcagctacaccgaggtggaagagtgcggctgcatgggccggcgctgccctgcgccgggcgacacccagcactcggaggaggcggaacccgagcccagccaggaggcagagagtgggagctgggagagaggcgtcccagtgtcccccatgcactgaccagcactgccgccctcctgacctccaaggagaacctcccatatgtcctctgagctcggcttccaaggccagtggaacttgtgcccctgtccaggcggctgcagctttgaacacactgtccacgcccgctttcttgtggagggtgtgggctatgggtcacctgctgcctggaggaggggcccttacccaccccgcctgcagccacctctcaggaccagccccggggctggccgagctcctctggccatgcatccagcctgctgttctggggacgtgagcatcacctgagggtctcaggaatgacgcttggacatggtgatcagctgcctggtggctgcaggaggaagaacctcactcctacctcagccctcagcctgcgctcccctcctcagtacacggccaatctgttgcataaatacacttgagcattttgca

SEQ ID NO: 637767 - DNA, 178 bp, Homo sapiens
gatccttaggtgcttgtgggtacggtgacataggttatcaacaccagtgagacctctgtgggctagactgatgacacaccaagtgagtctttgtggtcgtcgaaattcagagcaaagagcttttgccacggagaggcacccacaggtaaataattggcatcccatcaggcttggtttc

SEQ ID NO: 637768 - DNA, 277 bp, Homo sapiens
tctgcgtgcttccagcgtacttgggttcagccacaatatctgggctcagatggccttgttgataagccagaacagagtcggcacgatactgagagttcgcagggtccttcagtttacctgtgactgtgctttcgggacctgagtgggattgaagtccatggcgtacaggtccgactccaccacctcccatgctttcttcttcagagccgctggagtgagcctcttcgaccgtacccttccaggcaggattcttagtgaccaaaagaggtgcaggatg

SEQ ID NO: 637769 - DNA, 9690 bp, Homo sapiens
  misc_feature (195)..(195): n is a, c, g, or t
  misc_feature (586)..(586): n is a, c, g, or t
  misc_feature (816)..(816): n is a, c, g, or t
  misc_feature (1099)..(1099): n is a, c, g, or t
  misc_feature (1327)..(1327): n is a, c, g, or t
  misc_feature (2495)..(2495): n is a, c, g, or t
  misc_feature (2499)..(2499): n is a, c, g, or t
  misc_feature (2560)..(2560): n is a, c, g, or t
  misc_feature (2651)..(2651): n is a, c, g, or t
  misc_feature (2828)..(2828): n is a, c, g, or t
  misc_feature (2844)..(2844): n is a, c, g, or t
  misc_feature (2955)..(2955): n is a, c, g, or t
  misc_feature (2978)..(2978): n is a, c, g, or t
  misc_feature (5341)..(5341): n is a, c, g, or t
  misc_feature (6055)..(6055): n is a, c, g, or t
  misc_feature (6075)..(6075): n is a, c, g, or t
  misc_feature (6079)..(6079): n is a, c, g, or t
  misc_feature (6094)..(6094): n is a, c, g, or t
  misc_feature (6097)..(6097): n is a, c, g, or t
  misc_feature (6124)..(6124): n is a, c, g, or t
ctcagaggctgctgagggacagggcactcttccccgccgtccacacaatgagtgttggccggaggaagctggccctgctctgggccctggctctcgctctggcctgcacccggcatacagccatgcccaggatggctcctccgaatccagctacaagcaccaccctgccctctctcctatcgcccgggggcccancggggtcccgctccgtggggcgactgtcttcccatctctgaggaccatccctgtggtacgagcctccaacccggcgcacaacgggcgggtgtgcagcacctggggcagcttccactacaagaccttcgacggcgacgtcttccgcttccccggcctctgcaactacgtgttctccgagcactgcggtgccgcctacgaggattttaacatccagctacgccgcagccaggagtcagcggcccccacgctgagcagggtcctcatgaaggtggatggcgtggtcatccagctgaccaagggctccgtcctggtcaacggccacccggtcctgctgcccttcagccagtctggggtcctcattcagcagagcagcagctacaccaaggtggangccaggctgggccttgtcctcatgtggaaccacgatgacagcctgctgctggagctggacaccaaatacgccaacaagacctgtgggctctgtggggacttcaacgggatgcccgtggtcagcgagctcctctcccacaacaccaagctgacacccatggaattcgggaacctgcagaagatggacgaccccacggagcagtgtcaggaccctgtccctgaacccccgangaactgctccactggctttggcatctgtgaggagctcctgcacggccagctgttctctggctgcgtggccctggtggacgtcggcagctacctggaggcttgcaggcaagacctctgcttctgtgaagacaccgacctgctcagctgcgtctgccacacccttgccgagtactcccggcagtgcacccatgcaggggggttgccccaggactggcggggccctgacttctgcccccagaagtgccccaacaacatgcagtaccacgagtgccgctccccctgngcagacacctgctccaaccaggagcactcccgggcctgtgaggaccactgtgtggccggctgcttctgccctgaggggacggtgcttgacgacatcggccagaccggctgtgtccctgtgtcaaagtgtgcctgcgtctacaacggggctgcctatgccccaggggccacctactccacagactgcaccaactgcacctgctccggaggccggtggagctgccaggangttccatgcccgggtacctgctctgtgcttggaggtgcccacttctcaacgtttgacgggaagcaatacacggtgcacggcgactgcagctatgtgctgaccaagccctgtgacagcagtgccttcactgtactggctgagctgcgcaggtgcgggctgacggacagcgagacctgcctgaagagcgtgacactgagcctggatggggcgcagacggtggtggtgatcaaggccagtggggaagtgttcctgaaccagatctacacccagctgcccatctctgcagccaacgtcaccatcttcagaccctcaaccttcttcatcatcgcccagaccagcctgggcctgcagctgaacctgcagctggtgcccaccatgcagctgttcatgcagctggcgcccaagctccgtgggcagacctgcggtctctgtgggaacttcaacagcatccaggccgatgacttccggaccctcagtggggtggtggaggccaccgctgcggccttcttcaacaccttcaagacccaggccgcctgccccaacatcaggaacagcttcgaggacccctgctctctgagcgtggagaatgagaagtatgctcagcactggtgctcgcagctgaccgatgccgacggccccttcggccggtgccatgctgccgtgaagccgggaacctactactcgaactgcatgtttgacacctgcaactgtgagcggagcgaggactgcctgtgcgccgcgctgtcctcctacgtgcacgcctgtgccgccaagggcgtgcagctcggcggctggagggacggcgtctgcacgaagcctatgaccacttgccccaagtcaatgacgtaccactaccatgtcagcacctgccagcccacctgccgctccctgagcgagggggacatcacctgcagtgttggcttcatccccgtggatggctgcatctgtcccaagggcaccttcctggacgacacgggcaagtgtgtgcaggccagcaactgtccctgctaccacagaggctccatgatccccaatggggagtcggtgcacgacagcggggctatctgcacctgcacacatgggaagctgagctgcatcggaggccaagcccccgccccagtgtgtgctgcgcccatggtgttctttgactgccgaaatgccacgcccngggncacaggggctggctgtcagaagagctgccacacactggacatgacctgttacagcccccantgtgtgcctggctgcgtgtgccccgacgggctggtggcggacggcgagggcggctgcatcactgcggaggactgcccctgcgtgcacaatnaggccagctaccgggccggccagaccatccgggtgggctgcaacacctgcacctgtgacagcaggatgtggcggtgcacagatgacccctgcctggccacctgcgccgtgtacggggacggccactacctcaccttcgacggacagagctacagcttcaacggagactgcgagtacncgctggtgcagaaccnctgtggcgggaaagacagcacccaggactcctttcgtgttgtcaccgagaacgtcccctgcggcaccacagggaccacctgctccaaggccatcaagattttcctgggggncttcgagctgaagctaagccatnggaaggtggaggtgatcgggacggacgagagccaggaggtgccatacaccatccggcagatgggcatctacctggtggtggacaccgacattggcctggtgctgctgtgggacaagaagaccagcatcttcatcaacctcagccccgagttcaagggcagggtctgcggcctgtgtgggaacttcgacgacatcgccgttaatgactttgccacgcggagccggtctgtggtgggggacgtgctggagtttgggaacagctggaagctctccccctcctgcccagatgccctggcgcccaaggacccctgcacggccaaccccttccgcaagtcctgggcccagaagcagtgcagcatcctccacggccccaccttcgccgcctgccacgcacacgtggagccggccaggtactacgaggcctgcgtgaacgacgcgtgcgcctgcgactccgggggtgactgcgagtgcttctgcacggctgtggcccgctacgcccaggcctgccatgaagtaggcacctgtgtgtgtctgcggaccccaagcatctgccctctgttctgcgactactacaaccccgaaggccagtgcgagtggcactaccagccctgcggggtgccctgcctgcgcacctgccggaacccccgtggagactgcctgcgggacgtccggggcctggaaggctgctaccccaagtgcccaccagaggctcccatctttgatgaggacaagatgcagtgtgtggccacctgcccaaccccgcctctgccaccacggtgccacgtccatgggaagtcctaccggccaggtgcagtggtgccctcggacaagaactgccagtcctgcctttgtacggagcgcggcgtggagtgcacctacaaagctgaggcctgtgtctgcacctacaatggacagcgcttccacccaggggacgtcatctaccacacgacggatggcacgggtggctgcatctccgcccgctgcggggccaacggcaccattgagaggagggtctacccctgcagccccaccacccctgtccccccaaccaccttctccttctccacacccccgcttgtcgtgagctccacgcacacccccagcaatggcccaagcagcgcgcacacaggccctccgagcagcgcctggcccaccacagcaggcacttctcccaggacgaggctgcccacagcctctgcctcgctgccgccggtctgtggggaaaagtgcctgtggtcgccatggatggatgtcagccgccctggacggggcacggacagcggtgacttcgacacactggagaacctccgcgcccatgggtaccgggtgtgcgaatcacccaggtcggtggagtgccgagccgaggacgcccccggagtgccgctccgagccctggggcagcgtgtgcagtgcagcccggatgtggggctgacctgtcgtaacagggagcaggcatcggggctctgctacaactaccagatcagggtccagtgctgcacgcccctagcctgctccacctctagcagtccagcccagaccactcctccaactacctccaagaccactgaaacccgggcctcaggctcctcagctcccagcagcacacctggcaccgtgtctctctctacagccaggacgacacctgccccaggtaccgctacctctgtcaaaaaaactttctcaactcccagccctccgccagtgccggcaacatcaacatcatccatgtcgaccacggccccggggacctctgtggtctccagcaagcccacccccacggagcccagcacatcctcctgcctgcaggagctttgcacctggaccgagtggatcgatggcagctaccctgctcctggaataaatggtggagattttgacacatttcaaaatttgagagacgaaggatacacattctgtgaaagtcctcgaagcgtgcagtgccgggcagagagcttccccaacacgccgctggcagacctggggcaggacgtcatctgcagccacacagaggggctgatttgcctgaacaagaaccagctcccacccatctgctacaactatgagatccgcatccagtgttgcgagacggtgaacgtgtgcagagacatcaccagactgccaaagaccgtcgcaacgacacggccgactccacatccaaccggagctcagacccagaccaccttcaccacacacatgccctcggcctccacagagcaacccacggcaacctccaggggtgggcccacagcaaccagcgtcacacagggcacccacaccacaccagtcaccagaaactgtcatccccggtgcacctggacaaagtggttcgacgtggacttcccgtcccccggaccccatggtggngacaaggaaacctacaacaacatcatcaggagtggggaaaaaatctgccgccgtactgaggagatcaccaggctccagtgccgagccgagagccacccggaggtgagcatcgaacacctgggccaggtggtgcagtgcagccgggaagagggcctggtgtgccggaaccaggaccagcagggacccttcaagatgtgcctcaactacgaggtgcgtgtgctctgctgcgagacccccaaaggctgccccgtgacctccacacctgtgacagctcctagcacccctagtgggagagccaccagcccaactcagagcacctcctcttggcagaaatccaggacaaccactttggtgacaaccagcacaacctccactccacagaccagcacaacctctgcccctacaaccagcacaatccctgcttctacacccagcacaacctctgcccctacaaccagcacaacctctgctcctacaaccagcatatcctctgcccctacaagcagcacaacctcggctcctacaagcagcacaatctctgctcgtacaaccagcataatctctgcccctacaaccagcacaacctctttccctacaaccagcacaacctctgctactacaaccagcacaacctctgcccctacaagcagcacaacctccactccacagaccagcaaaacctcagctgtcctacaaccagcacaacctctggtnctggaactactcccagcccngttnccaccaccagcacanccnctgtttcaaagaccagcacaagccatntttctgtatccaagacaacccactcccaaccagtcaccagtgactgtcatcctctgtgcgcctggacaaagtggttcgacgtggacttcccatcccctggaccccacggcggggacaaggaaacctacaacaacatcatcaggagtggggaaaaaatctgccgccgacctgaggagatcaccaggctccagtgccgagccgagagccacccggaggtgaacattgaacacctgggtcaggtggtgcagtgcagccgtgaagagggcctggtgtgccggaaccaggaccagcagggacccttcaagatgtgcctcaactacgaggtgcgcgtgctctgctgcgagacccccagaggctgcccggtgacctctgtgaccccatatgggacttctcctaccaatgctctgtatccttccctgtctacttccatggtatccgcctccgtggcatccacctctgtggcatccagctctgtggcatccagctctgtggcttactccacccaaacctgcttctgcaacgtggctgaccggctctaccctgcaggatccaccatataccgccacagagacctcgctggccattgctattatgccctgtgtagccaggactgccaagtggtcagaggggttgacagtgactgtccgtccaccacgctgcctcctgccccagccacgtccccttcaatatccacctccgagcccgtcactgagctgggatgcccaaatgcggttccccccagaaagaaaggtgagacctgggccacacccaactgctccgaggccacctgtgagggcaacaacgtcatctccctgagcccgcgcacgtgcccgagggtggagaagcccacttgtgccaacggctacccggctgtgaaggtggctgaccaagatggctgctgccatcactaccagtgccagtgtgtgtgcagcggctggggtgacccccactacatcaccttcgacggcacctactacaccttcctggacaactgcacgtacgtgctggtgcagcagattgtgcccgtgtatggccacttccgcgtgctcgtcgacaactacttctgcggtgcggaggacgggctctcctgcccgaggtccatcatcctggagtaccaccaggaccgcgtggtgctgacccgcaagccagtccacggggtgatgacaaacgagatcatcttcaacaacaaggtggtcagccccggcttccggaaaaacggcatcgtggtctcgcgcatcggcgtcaagatgtacgcgaccatcccggagctgggagtccaggtcatgttctccggcctcatcttctccgtggaggtgcccttcagcaagtttgccaacaacaccgagggccagtgcggcacttgcaccaacgacaggaaggatgagtgccgcacgcctagggggacggtggtcgcttcctgctccgagatgtccggcctctggaacgtgagcatccctgaccagccagcctgccaccggcctcacccgacgcccaccacggtcgggcccaccacagttgggtctaccacggtcgggcccaccacagttgggtctaccaccgtcgggcccaccacaccgcctgctccgtgcctgccatcacccatctgccacctgattctgagcaaggtctttgagccgtgccacactgtgatccccccactgctgttctatgagggctgcgtctttgaccggtgccacatgacggacctggatgtggtgtgctccagcctggagctgtacgcggcactctgcgcgtcccacgacatctgcatcgattggagaggccggaccggccacatgtgcccattcacctgcccagccgacaaggtgtaccagccctgcggcccgagcaacccctcctactgctacgggaatgacagcgccagcctcggggctctccgggaggccggccccatcaccgaaggctgcttctgtccggagggcatgaccctcttcagcaccagtgcccaagtctgcgtgcccacgggctgccccaggtgtctggggccccacggagagccggtgaaggtgggccacaccgtcggcatggactgccaggagtgcacgtgtgaggcggccacgtggacgctgacctgccgacccaagctctgcccgctgccccctgcctgccccctgcccggcttcgtgcctgtgcctgcagccccacaggccggccagtgctgcccccagtacagctgcgcctgcaacaccagccgctgccccgcgcccgtgggctgtcctgagggcgcccgcgcgatcccgacctaccaggagggggcctgctgcccagtccaaaactgcagctggacagtgtgcagcatcaacgggaccctgtaccagcccggcgccgtggtctcctcgagcctgtgcgaaacctgcaggtgtgagctgccgggtggccccccatcggacgcgtttgtggtcagctgtgagacccagatctgcaacacacactgccctgtgggcttcgagtaccaggagcagagcgggcagtgctgtggcacctgtgtgcaggtcgcctgtgtcaccaacaccagcaagagccccgcccacctcttctaccctggcgagacctggtcagacgcagggaaccactgtgtgacccaccagtgtgagaagcaccaggatgggctcgtggtggtcaccacgaagaaggcgtgccccccgctcagctgttctctggacgaggcccgcatgagcaaggacggctgctgccgcttctgcccgctgcccccgcccccgtaccagaaccagtcgacctgtgctgtgtaccataggagcctgatcatccagcagcagggctgcagctcctcggagcccgtgcgcctggcttactgccgggggaactgtggggacagctcttccatgtactcgctcgagggcaacacggtggagcacaggtgccagtgctgccaggagctgcggacctcgctgaggaatgtgaccctgcactgcaccgacggctccagccgggccttcagctacaccgaggtggaagagtgcggctgcatgggccggcgctgccctgcgccgggcgacacccagcactcggaggaggcggaacccgagcccagccaggaggcagagagtgggagctgggagagaggcgtcccagtgtcccccatgcactgaccagcactgccgccctcctgacctccaaggagaacctcccatatgtcctctgagctcggcttccaaggccagtggaacttgtgcccctgtccaggcggctgcagctttgaacacactgtccacgcccgctttcttgtggagggtgtgggctatgggtcacctgctgcctggaggaggggcccttacccaccccgcctgcagccacctctcaggaccagccccggggctggccgagctcctctggccatgcatccagcctgctgttctggggacgtgagcatcacctgagggtctcaggaatgacgcttggacatggtgatcagctgcctggtggctgcaggaggaagaacctcactcctacctcagccctcagcctgcgctcccctcctcagtacacggccaatctgttgcataaatacacttgagcattttgca

SEQ ID NO: 637770 - DNA, 9730 bp, Homo sapiens
  misc_feature (195)..(195): n is a, c, g, or t
  misc_feature (586)..(586): n is a, c, g, or t
  misc_feature (816)..(816): n is a, c, g, or t
  misc_feature (1099)..(1099): n is a, c, g, or t
  misc_feature (1327)..(1327): n is a, c, g, or t
  misc_feature (2495)..(2495): n is a, c, g, or t
  misc_feature (2499)..(2499): n is a, c, g, or t
  misc_feature (2560)..(2560): n is a, c, g, or t
  misc_feature (2651)..(2651): n is a, c, g, or t
  misc_feature (2828)..(2828): n is a, c, g, or t
  misc_feature (2844)..(2844): n is a, c, g, or t
  misc_feature (2955)..(2955): n is a, c, g, or t
  misc_feature (2978)..(2978): n is a, c, g, or t
  misc_feature (5341)..(5341): n is a, c, g, or t
  misc_feature (6055)..(6055): n is a, c, g, or t
  misc_feature (6075)..(6075): n is a, c, g, or t
  misc_feature (6079)..(6079): n is a, c, g, or t
  misc_feature (6094)..(6094): n is a, c, g, or t
  misc_feature (6097)..(6097): n is a, c, g, or t
  misc_feature (6124)..(6124): n is a, c, g, or t
ctcagaggctgctgagggacagggcactcttccccgccgtccacacaatgagtgttggccggaggaagctggccctgctctgggccctggctctcgctctggcctgcacccggcatacagccatgcccaggatggctcctccgaatccagctacaagcaccaccctgccctctctcctatcgcccgggggcccancggggtcccgctccgtggggcgactgtcttcccatctctgaggaccatccctgtggtacgagcctccaacccggcgcacaacgggcgggtgtgcagcacctggggcagcttccactacaagaccttcgacggcgacgtcttccgcttccccggcctctgcaactacgtgttctccgagcactgcggtgccgcctacgaggattttaacatccagctacgccgcagccaggagtcagcggcccccacgctgagcagggtcctcatgaaggtggatggcgtggtcatccagctgaccaagggctccgtcctggtcaacggccacccggtcctgctgcccttcagccagtctggggtcctcattcagcagagcagcagctacaccaaggtggangccaggctgggccttgtcctcatgtggaaccacgatgacagcctgctgctggagctggacaccaaatacgccaacaagacctgtgggctctgtggggacttcaacgggatgcccgtggtcagcgagctcctctcccacaacaccaagctgacacccatggaattcgggaacctgcagaagatggacgaccccacggagcagtgtcaggaccctgtccctgaacccccgangaactgctccactggctttggcatctgtgaggagctcctgcacggccagctgttctctggctgcgtggccctggtggacgtcggcagctacctggaggcttgcaggcaagacctctgcttctgtgaagacaccgacctgctcagctgcgtctgccacacccttgccgagtactcccggcagtgcacccatgcaggggggttgccccaggactggcggggccctgacttctgcccccagaagtgccccaacaacatgcagtaccacgagtgccgctccccctgngcagacacctgctccaaccaggagcactcccgggcctgtgaggaccactgtgtggccggctgcttctgccctgaggggacggtgcttgacgacatcggccagaccggctgtgtccctgtgtcaaagtgtgcctgcgtctacaacggggctgcctatgccccaggggccacctactccacagactgcaccaactgcacctgctccggaggccggtggagctgccaggangttccatgcccgggtacctgctctgtgcttggaggtgcccacttctcaacgtttgacgggaagcaatacacggtgcacggcgactgcagctatgtgctgaccaagccctgtgacagcagtgccttcactgtactggctgagctgcgcaggtgcgggctgacggacagcgagacctgcctgaagagcgtgacactgagcctggatggggcgcagacggtggtggtgatcaaggccagtggggaagtgttcctgaaccagatctacacccagctgcccatctctgcagccaacgtcaccatcttcagaccctcaaccttcttcatcatcgcccagaccagcctgggcctgcagctgaacctgcagctggtgcccaccatgcagctgttcatgcagctggcgcccaagctccgtgggcagacctgcggtctctgtgggaacttcaacagcatccaggccgatgacttccggaccctcagtggggtggtggaggccaccgctgcggccttcttcaacaccttcaagacccaggccgcctgccccaacatcaggaacagcttcgaggacccctgctctctgagcgtggagaatgagaagtatgctcagcactggtgctcgcagctgaccgatgccgacggccccttcggccggtgccatgctgccgtgaagccgggaacctactactcgaactgcatgtttgacacctgcaactgtgagcggagcgaggactgcctgtgcgccgcgctgtcctcctacgtgcacgcctgtgccgccaagggcgtgcagctcggcggctggagggacggcgtctgcacgaagcctatgaccacttgccccaagtcaatgacgtaccactaccatgtcagcacctgccagcccacctgccgctccctgagcgagggggacatcacctgcagtgttggcttcatccccgtggatggctgcatctgtcccaagggcaccttcctggacgacacgggcaagtgtgtgcaggccagcaactgtccctgctaccacagaggctccatgatccccaatggggagtcggtgcacgacagcggggctatctgcacctgcacacatgggaagctgagctgcatcggaggccaagcccccgccccagtgtgtgctgcgcccatggtgttctttgactgccgaaatgccacgcccngggncacaggggctggctgtcagaagagctgccacacactggacatgacctgttacagcccccantgtgtgcctggctgcgtgtgccccgacgggctggtggcggacggcgagggcggctgcatcactgcggaggactgcccctgcgtgcacaatnaggccagctaccgggccggccagaccatccgggtgggctgcaacacctgcacctgtgacagcaggatgtggcggtgcacagatgacccctgcctggccacctgcgccgtgtacggggacggccactacctcaccttcgacggacagagctacagcttcaacggagactgcgagtacncgctggtgcagaaccnctgtggcgggaaagacagcacccaggactcctttcgtgttgtcaccgagaacgtcccctgcggcaccacagggaccacctgctccaaggccatcaagattttcctgggggncttcgagctgaagctaagccatnggaaggtggaggtgatcgggacggacgagagccaggaggtgccatacaccatccggcagatgggcatctacctggtggtggacaccgacattggcctggtgctgctgtgggacaagaagaccagcatcttcatcaacctcagccccgagttcaagggcagggtctgcggcctgtgtgggaacttcgacgacatcgccgttaatgactttgccacgcggagccggtctgtggtgggggacgtgctggagtttgggaacagctggaagctctccccctcctgcccagatgccctggcgcccaaggacccctgcacggccaaccccttccgcaagtcctgggcccagaagcagtgcagcatcctccacggccccaccttcgccgcctgccacgcacacgtggagccggccaggtactacgaggcctgcgtgaacgacgcgtgcgcctgcgactccgggggtgactgcgagtgcttctgcacggctgtggcccgctacgcccaggcctgccatgaagtaggcacctgtgtgtgtctgcggaccccaagcatctgccctctgttctgcgactactacaaccccgaaggccagtgcgagtggcactaccagccctgcggggtgccctgcctgcgcacctgccggaacccccgtggagactgcctgcgggacgtccggggcctggaaggctgctaccccaagtgcccaccagaggctcccatctttgatgaggacaagatgcagtgtgtggccacctgcccaaccccgcctctgccaccacggtgccacgtccatgggaagtcctaccggccaggtgcagtggtgccctcggacaagaactgccagtcctgcctttgtacggagcgcggcgtggagtgcacctacaaagctgaggcctgtgtctgcacctacaatggacagcgcttccacccaggggacgtcatctaccacacgacggatggcacgggtggctgcatctccgcccgctgcggggccaacggcaccattgagaggagggtctacccctgcagccccaccacccctgtccccccaaccaccttctccttctccacacccccgcttgtcgtgagctccacgcacacccccagcaatggcccaagcagcgcgcacacaggccctccgagcagcgcctggcccaccacagcaggcacttctcccaggacgaggctgcccacagcctctgcctcgctgccgccggtctgtggggaaaagtgcctgtggtcgccatggatggatgtcagccgccctggacggggcacggacagcggtgacttcgacacactggagaacctccgcgcccatgggtaccgggtgtgcgaatcacccaggtcggtggagtgccgagccgaggacgcccccggagtgccgctccgagccctggggcagcgtgtgcagtgcagcccggatgtggggctgacctgtcgtaacagggagcaggcatcggggctctgctacaactaccagatcagggtccagtgctgcacgcccctagcctgctccacctctagcagtccagcccagaccactcctccaactacctccaagaccactgaaacccgggcctcaggctcctcagctcccagcagcacacctggcaccgtgtctctctctacagccaggacgacacctgccccaggtaccgctacctctgtcaaaaaaactttctcaactcccagccctccgccagtgccggcaacatcaacatcatccatgtcgaccacggccccggggacctctgtggtctccagcaagcccacccccacggagcccagcacatcctcctgcctgcaggagctttgcacctggaccgagtggatcgatggcagctaccctgctcctggaataaatggtggagattttgacacatttcaaaatttgagagacgaaggatacacattctgtgaaagtcctcgaagcgtgcagtgccgggcagagagcttccccaacacgccgctggcagacctggggcaggacgtcatctgcagccacacagaggggctgatttgcctgaacaagaaccagctcccacccatctgctacaactatgagatccgcatccagtgttgcgagacggtgaacgtgtgcagagacatcaccagactgccaaagaccgtcgcaacgacacggccgactccacatccaaccggagctcagacccagaccaccttcaccacacacatgccctcggcctccacagagcaacccacggcaacctccaggggtgggcccacagcaaccagcgtcacacagggcacccacaccacaccagtcaccagaaactgtcatccccggtgcacctggacaaagtggttcgacgtggacttcccgtcccccggaccccatggtggngacaaggaaacctacaacaacatcatcaggagtggggaaaaaatctgccgccgtactgaggagatcaccaggctccagtgccgagccgagagccacccggaggtgagcatcgaacacctgggccaggtggtgcagtgcagccgggaagagggcctggtgtgccggaaccaggaccagcagggacccttcaagatgtgcctcaactacgaggtgcgtgtgctctgctgcgagacccccaaaggctgccccgtgacctccacacctgtgacagctcctagcacccctagtgggagagccaccagcccaactcagagcacctcctcttggcagaaatccaggacaaccactttggtgacaaccagcacaacctccactccacagaccagcacaacctctgcccctacaaccagcacaatccctgcttctacacccagcacaacctctgcccctacaaccagcacaacctctgctcctacaaccagcatatcctctgcccctacaagcagcacaacctcggctcctacaagcagcacaatctctgctcgtacaaccagcataatctctgcccctacaaccagcacaacctctttccctacaaccagcacaacctctgctactacaaccagcacaacctctgcccctacaagcagcacaacctccactccacagaccagcaaaacctcagctgtcctacaaccagcacaacctctggtnctggaactactcccagcccngttnccaccaccagcacanccnctgtttcaaagaccagcacaagccatntttctgtatccaagacaacccactcccaaccagtcaccagtgactgtcatcctctgtgcgcctggacaaagtggttcgacgtggacttcccatcccctggaccccacggcggggacaaggaaacctacaacaacatcatcaggagtggggaaaaaatctgccgccgacctgaggagatcaccaggctccagtgccgagccgagagccacccggaggtgaacattgaacacctgggtcaggtggtgcagtgcagccgtgaagagggcctggtgtgccggaaccaggaccagcagggacccttcaagatgtgcctcaactacgaggtgcgcgtgctctgctgcgagacccccagaggctgcccggtgacctctgtgaccccatatgggacttctcctaccaatgctctgtatccttccctgtctacttccatggtatccgcctccgtggcatccacctctgtggcatccagctctgtggcatccagctctgtggcttactccacccaaacctgcttctgcaacgtggctgaccggctctaccctgcaggatccaccatataccgccacagagacctcgctggccattgctattatgccctgtgtagccaggactgccaagtggtcagaggggttgacagtgactgtccgtccaccacgctgcctcctgccccagccacgtccccttcaatatccacctccgagcccgtcactgagctgggatgcccaaatgcggttccccccagaaagaaaggtgagacctgggccacacccaactgctccgaggccacctgtgagggcaacaacgtcatctccctgagcccgcgcacgtgcccgagggtggagaagcccacttgtgccaacggctacccggctgtgaaggtggctgaccaagatggctgctgccatcactaccagtgccagtgtgtgtgcagcggctggggtgacccccactacatcaccttcgacggcacctactacaccttcctggacaactgcacgtacgtgctggtgcagcagattgtgcccgtgtatggccacttccgcgtgctcgtcgacaactacttctgcggtgcggaggacgggctctcctgcccgaggtccatcatcctggagtaccaccaggaccgcgtggtgctgacccgcaagccagtccacggggtgatgacaaacgagatcatcttcaacaacaaggtggtcagccccggcttccggaaaaacggcatcgtggtctcgcgcatcggcgtcaagatgtacgcgaccatcccggagctgggagtccaggtcatgttctccggcctcatcttctccgtggaggtgcccttcagcaagtttgccaacaacaccgagggccagtgcggcacttgcaccaacgacaggaaggatgagtgccgcacgcctagggggacggtggtcgcttcctgctccgagatgtccggcctctggaacgtgagcatccctgaccagccagcctgccaccggcctcacccgacgcccaccacggtcgggcccaccacagttgggtctaccacggtcgggcccaccacagttgggtctaccaccgtcgggcccaccacaccgcctgctccgtgcctgccatcacccatctgccacctgattctgagcaaggtctttgagccgtgccacactgtgatccccccactgctgttctatgagggctgcgtctttgaccggtgccacatgacggacctggatgtggtgtgctccagcctggagctgtacgcggcactctgcgcgtcccacgacatctgcatcgattggagaggccggaccggccacatgtgcccattcacctgcccagccgacaaggtgtaccagccctgcggcccgagcaacccctcctactgctacgggaatgacagcgccagcctcggggctctccgggaggccggccccatcaccgaaggctgcttctgtccggagggcatgaccctcttcagcaccagtgcccaagtctgcgtgcccacgggctgccccaggtgtctggggccccacggagagccggtgaaggtgggccacaccgtcggcatggactgccaggagtgcacgtgtgaggcggccacgtggacgctgacctgccgacccaagctctgcccgctgccccctgcctgccccctgcccggcttcgtgcctgtgcctgcagccccacaggccggccagtgctgcccccagtacagctgcgcctgcaacaccagccgctgccccgcgcccgtgggctgtcctgagggcgcccgcgcgatcccgacctaccaggagggggcctgctgcccagtccaaaactgcagctggacagtgtgcagcatcaacgggaccctgtaccagcccggcgccgtggtctcctcgagcctgtgcgaaacctgcaggtgtgagctgccgggtggccccccatcggacgcgtttgtggtcagctgtgagacccagatctgcaacacacactgccctgtgggcttcgagtaccaggagcagagcgggcagtgctgtggcacctgtgtgcaggtcgcctgtgtcaccaacaccagcaagagccccgcccacctcttctaccctggcgagacctggtcagacgcagggaaccactgtgtgacccaccagtgtgagaagcaccaggatgggctcgtggtggtcaccacgaagaaggcgtgccccccgctcagctgttctctggacgaggcccgcatgagcaaggacggctgctgccgcttctgcccgctgcccccgcccccgtaccagaaccagtcgacctgtgctgtgtaccataggagcctgatcatccagcagcagggctgcagctcctcggagcccgtgcgcctggcttactgccgggggaactgtggggacagctcttccatgtactcgctcgagggcaacacggtggagcacaggtgccagtgctgccaggagctgcggacctcgctgaggaatgtgaccctgcactgcaccgacggctccagccgggccttcagctacaccgaggtggaagagtgcggctgcatgggccggcgctgccctgcgccgggcgacacccagcactcggaggaggcggaacccgagcccagccaggaggcagagagtgggagctgggagagaggcgtcccagtgtcccccatgcactgaccagcactgccgccctcctgacctccaaggagaacctcccatatgtcctctgagctcggcttccaaggccagtggaacttgtgcccctgtccaggcggctgcagctttgaacacactgtccacgcccgctttcttgtggagggtgtgggctatgggtcacctgctgcctggaggaggggcccttacccaccccgcctgcagccacctctcaggaccagccccggggctggccgagctcctctggccatgcatccagcctgctgttctggggacgtgagcatcacctgagggtctcaggaatgacgcttggacatggtgatcagctgcctggtggctgcaggaggaagaacctcactcctacctcagccctcagcctgcgctcccctcctcagtacacggccaatctgttgcataaatacacttgagcattttgcaaaagcaaaatacaaacaaaaaaaaataaagaaaagagaag

SEQ ID NO: 637771 - DNA, 495 bp, Homo sapiens
ctacggttccgtgctagtacgtagactgagaataaaggtagtatgcgtgatgccaaggaaacaactcctccttaggcagcgggcaatctcacaacctcgatgatacctgagctaggccaaattatatctcaagagcttctaagtagtggctaagaactgtgcgcagaggaaaaagagaggtgactttggaaccaagcagatcagcaacttgcttcctagctgtgtgaccctgggcaaataacagagccatcagagccttggtttccacattcttaagtgggggtaatacccacatcccaaaataatggtagggagtcaaaaattatatatatatgaatcagtaggacagcaccgccccccaggtgaaaaaaaattaatgatttcttatcatgtattattcgtctaaatagctaggccaggatacatctttgcctcactctgatggtgatgaagaaaagagccacagccagcatggcatctgaactgaaggtagag

SEQ ID NO: 637772 - DNA, 133 bp, Homo sapiens
ccgggattgaggagatctgaagtgtactggatcagatgatctgcctgataaactttagttcacgctgacagacagtcttctcagatatttcatgactgtgaaggtgtgaaaatggaacgcatccttagaatag

SEQ ID NO: 637773 - DNA, 9571 bp, Homo sapiens
  misc_feature (195)..(195): n is a, c, g, or t
  misc_feature (586)..(586): n is a, c, g, or t
  misc_feature (816)..(816): n is a, c, g, or t
  misc_feature (1099)..(1099): n is a, c, g, or t
  misc_feature (1327)..(1327): n is a, c, g, or t
  misc_feature (2495)..(2495): n is a, c, g, or t
  misc_feature (2499)..(2499): n is a, c, g, or t
  misc_feature (2560)..(2560): n is a, c, g, or t
  misc_feature (2651)..(2651): n is a, c, g, or t
  misc_feature (2828)..(2828): n is a, c, g, or t
  misc_feature (2844)..(2844): n is a, c, g, or t
  misc_feature (2955)..(2955): n is a, c, g, or t
  misc_feature (2978)..(2978): n is a, c, g, or t
  misc_feature (5341)..(5341): n is a, c, g, or t
  misc_feature (6055)..(6055): n is a, c, g, or t
  misc_feature (6075)..(6075): n is a, c, g, or t
  misc_feature (6079)..(6079): n is a, c, g, or t
  misc_feature (6094)..(6094): n is a, c, g, or t
  misc_feature (6097)..(6097): n is a, c, g, or t
  misc_feature (6124)..(6124): n is a, c, g, or t
ctcagaggctgctgagggacagggcactcttccccgccgtccacacaatgagtgttggccggaggaagctggccctgctctgggccctggctctcgctctggcctgcacccggcatacagccatgcccaggatggctcctccgaatccagctacaagcaccaccctgccctctctcctatcgcccgggggcccancggggtcccgctccgtggggcgactgtcttcccatctctgaggaccatccctgtggtacgagcctccaacccggcgcacaacgggcgggtgtgcagcacctggggcagcttccactacaagaccttcgacggcgacgtcttccgcttccccggcctctgcaactacgtgttctccgagcactgcggtgccgcctacgaggattttaacatccagctacgccgcagccaggagtcagcggcccccacgctgagcagggtcctcatgaaggtggatggcgtggtcatccagctgaccaagggctccgtcctggtcaacggccacccggtcctgctgcccttcagccagtctggggtcctcattcagcagagcagcagctacaccaaggtggangccaggctgggccttgtcctcatgtggaaccacgatgacagcctgctgctggagctggacaccaaatacgccaacaagacctgtgggctctgtggggacttcaacgggatgcccgtggtcagcgagctcctctcccacaacaccaagctgacacccatggaattcgggaacctgcagaagatggacgaccccacggagcagtgtcaggaccctgtccctgaacccccgangaactgctccactggctttggcatctgtgaggagctcctgcacggccagctgttctctggctgcgtggccctggtggacgtcggcagctacctggaggcttgcaggcaagacctctgcttctgtgaagacaccgacctgctcagctgcgtctgccacacccttgccgagtactcccggcagtgcacccatgcaggggggttgccccaggactggcggggccctgacttctgcccccagaagtgccccaacaacatgcagtaccacgagtgccgctccccctgngcagacacctgctccaaccaggagcactcccgggcctgtgaggaccactgtgtggccggctgcttctgccctgaggggacggtgcttgacgacatcggccagaccggctgtgtccctgtgtcaaagtgtgcctgcgtctacaacggggctgcctatgccccaggggccacctactccacagactgcaccaactgcacctgctccggaggccggtggagctgccaggangttccatgcccgggtacctgctctgtgcttggaggtgcccacttctcaacgtttgacgggaagcaatacacggtgcacggcgactgcagctatgtgctgaccaagccctgtgacagcagtgccttcactgtactggctgagctgcgcaggtgcgggctgacggacagcgagacctgcctgaagagcgtgacactgagcctggatggggcgcagacggtggtggtgatcaaggccagtggggaagtgttcctgaaccagatctacacccagctgcccatctctgcagccaacgtcaccatcttcagaccctcaaccttcttcatcatcgcccagaccagcctgggcctgcagctgaacctgcagctggtgcccaccatgcagctgttcatgcagctggcgcccaagctccgtgggcagacctgcggtctctgtgggaacttcaacagcatccaggccgatgacttccggaccctcagtggggtggtggaggccaccgctgcggccttcttcaacaccttcaagacccaggccgcctgccccaacatcaggaacagcttcgaggacccctgctctctgagcgtggagaatgagaagtatgctcagcactggtgctcgcagctgaccgatgccgacggccccttcggccggtgccatgctgccgtgaagccgggaacctactactcgaactgcatgtttgacacctgcaactgtgagcggagcgaggactgcctgtgcgccgcgctgtcctcctacgtgcacgcctgtgccgccaagggcgtgcagctcggcggctggagggacggcgtctgcacgaagcctatgaccacttgccccaagtcaatgacgtaccactaccatgtcagcacctgccagcccacctgccgctccctgagcgagggggacatcacctgcagtgttggcttcatccccgtggatggctgcatctgtcccaagggcaccttcctggacgacacgggcaagtgtgtgcaggccagcaactgtccctgctaccacagaggctccatgatccccaatggggagtcggtgcacgacagcggggctatctgcacctgcacacatgggaagctgagctgcatcggaggccaagcccccgccccagtgtgtgctgcgcccatggtgttctttgactgccgaaatgccacgcccngggncacaggggctggctgtcagaagagctgccacacactggacatgacctgttacagcccccantgtgtgcctggctgcgtgtgccccgacgggctggtggcggacggcgagggcggctgcatcactgcggaggactgcccctgcgtgcacaatnaggccagctaccgggccggccagaccatccgggtgggctgcaacacctgcacctgtgacagcaggatgtggcggtgcacagatgacccctgcctggccacctgcgccgtgtacggggacggccactacctcaccttcgacggacagagctacagcttcaacggagactgcgagtacncgctggtgcagaaccnctgtggcgggaaagacagcacccaggactcctttcgtgttgtcaccgagaacgtcccctgcggcaccacagggaccacctgctccaaggccatcaagattttcctgggggncttcgagctgaagctaagccatnggaaggtggaggtgatcgggacggacgagagccaggaggtgccatacaccatccggcagatgggcatctacctggtggtggacaccgacattggcctggtgctgctgtgggacaagaagaccagcatcttcatcaacctcagccccgagttcaagggcagggtctgcggcctgtgtgggaacttcgacgacatcgccgttaatgactttgccacgcggagccggtctgtggtgggggacgtgctggagtttgggaacagctggaagctctccccctcctgcccagatgccctggcgcccaaggacccctgcacggccaaccccttccgcaagtcctgggcccagaagcagtgcagcatcctccacggccccaccttcgccgcctgccacgcacacgtggagccggccaggtactacgaggcctgcgtgaacgacgcgtgcgcctgcgactccgggggtgactgcgagtgcttctgcacggctgtggcccgctacgcccaggcctgccatgaagtaggcacctgtgtgtgtctgcggaccccaagcatctgccctctgttctgcgactactacaaccccgaaggccagtgcgagtggcactaccagccctgcggggtgccctgcctgcgcacctgccggaacccccgtggagactgcctgcgggacgtccggggcctggaaggctgctaccccaagtgcccaccagaggctcccatctttgatgaggacaagatgcagtgtgtggccacctgcccaaccccgcctctgccaccacggtgccacgtccatgggaagtcctaccggccaggtgcagtggtgccctcggacaagaactgccagtcctgcctttgtacggagcgcggcgtggagtgcacctacaaagctgaggcctgtgtctgcacctacaatggacagcgcttccacccaggggacgtcatctaccacacgacggatggcacgggtggctgcatctccgcccgctgcggggccaacggcaccattgagaggagggtctacccctgcagccccaccacccctgtccccccaaccaccttctccttctccacacccccgcttgtcgtgagctccacgcacacccccagcaatggcccaagcagcgcgcacacaggccctccgagcagcgcctggcccaccacagcaggcacttctcccaggacgaggctgcccacagcctctgcctcgctgccgccggtctgtggggaaaagtgcctgtggtcgccatggatggatgtcagccgccctggacggggcacggacagcggtgacttcgacacactggagaacctccgcgcccatgggtaccgggtgtgcgaatcacccaggtcggtggagtgccgagccgaggacgcccccggagtgccgctccgagccctggggcagcgtgtgcagtgcagcccggatgtggggctgacctgtcgtaacagggagcaggcatcggggctctgctacaactaccagatcagggtccagtgctgcacgcccctagcctgctccacctctagcagtccagcccagaccactcctccaactacctccaagaccactgaaacccgggcctcaggctcctcagctcccagcagcacacctggcaccgtgtctctctctacagccaggacgacacctgccccaggtaccgctacctctgtcaaaaaaactttctcaactcccagccctccgccagtgccggcaacatcaacatcatccatgtcgaccacggccccggggacctctgtggtctccagcaagcccacccccacggagcccagcacatcctcctgcctgcaggagctttgcacctggaccgagtggatcgatggcagctaccctgctcctggaataaatggtggagattttgacacatttcaaaatttgagagacgaaggatacacattctgtgaaagtcctcgaagcgtgcagtgccgggcagagagcttccccaacacgccgctggcagacctggggcaggacgtcatctgcagccacacagaggggctgatttgcctgaacaagaaccagctcccacccatctgctacaactatgagatccgcatccagtgttgcgagacggtgaacgtgtgcagagacatcaccagactgccaaagaccgtcgcaacgacacggccgactccacatccaaccggagctcagacccagaccaccttcaccacacacatgccctcggcctccacagagcaacccacggcaacctccaggggtgggcccacagcaaccagcgtcacacagggcacccacaccacaccagtcaccagaaactgtcatccccggtgcacctggacaaagtggttcgacgtggacttcccgtcccccggaccccatggtggngacaaggaaacctacaacaacatcatcaggagtggggaaaaaatctgccgccgtactgaggagatcaccaggctccagtgccgagccgagagccacccggaggtgagcatcgaacacctgggccaggtggtgcagtgcagccgggaagagggcctggtgtgccggaaccaggaccagcagggacccttcaagatgtgcctcaactacgaggtgcgtgtgctctgctgcgagacccccaaaggctgccccgtgacctccacacctgtgacagctcctagcacccctagtgggagagccaccagcccaactcagagcacctcctcttggcagaaatccaggacaaccactttggtgacaaccagcacaacctccactccacagaccagcacaacctctgcccctacaaccagcacaatccctgcttctacacccagcacaacctctgcccctacaaccagcacaacctctgctcctacaaccagcatatcctctgcccctacaagcagcacaacctcggctcctacaagcagcacaatctctgctcgtacaaccagcataatctctgcccctacaaccagcacaacctctttccctacaaccagcacaacctctgctactacaaccagcacaacctctgcccctacaagcagcacaacctccactccacagaccagcaaaacctcagctgtcctacaaccagcacaacctctggtnctggaactactcccagcccngttnccaccaccagcacanccnctgtttcaaagaccagcacaagccatntttctgtatccaagacaacccactcccaaccagtcaccagtgactgtcatcctctgtgcgcctggacaaagtggttcgacgtggacttcccatcccctggaccccacggcggggacaaggaaacctacaacaacatcatcaggagtggggaaaaaatctgccgccgacctgaggagatcaccaggctccagtgccgagccgagagccacccggaggtgaacattgaacacctgggtcaggtggtgcagtgcagccgtgaagagggcctggtgtgccggaaccaggaccagcagggacccttcaagatgtgcctcaactacgaggtgcgcgtgctctgctgcgagacccccagaggctgcccggtgacctctgtgaccccatatgggacttctcctaccaatgctctgtatccttccctgtctacttccatggtatccgcctccgtggcatccacctctgtggcatccagctctgtggcatccagctctgtggcttactccacccaaacctgcttctgcaacgtggctgaccggctctaccctgcaggatccaccatataccgccacagagacctcgctggccattgctattatgccctgtgtagccaggactgccaagtggtcagaggggttgacagtgactgtccgtccaccacgctgcctcctgccccagccacgtccccttcaatatccacctccgagcccgtcactgagctgggatgcccaaatgcggttccccccagaaagaaaggtgagacctgggccacacccaactgctccgaggccacctgtgagggcaacaacgtcatctccctgagcccgcgcacgtgcccgagggtggagaagcccacttgtgccaacggctacccggctgtgaaggtggctgaccaagatggctgctgccatcactaccagtgccagtgtgtgtgcagcggctggggtgacccccactacatcaccttcgacggcacctactacaccttcctggacaactgcacgtacgtgctggtgcagcagattgtgcccgtgtatggccacttccgcgtgctcgtcgacaactacttctgcggtgcggaggacgggctctcctgcccgaggtccatcatcctggagtaccaccaggaccgcgtggtgctgacccgcaagccagtccacggggtgatgacaaacgagatcatcttcaacaacaaggtggtcagccccggcttccggaaaaacggcatcgtggtctcgcgcatcggcgtcaagatgtacgcgaccatcccggagctgggagtccaggtcatgttctccggcctcatcttctccgtggaggtgcccttcagcaagtttgccaacaacaccgagggccagtgcggcacttgcaccaacgacaggaaggatgagtgccgcacgcctagggggacggtggtcgcttcctgctccgagatgtccggcctctggaacgtgagcatccctgaccagccagcctgccaccggcctcacccgacgcccaccacggtcgggcccaccacagttgggtctaccacggtcgggcccaccacagttgggtctaccaccgtcgggcccaccacaccgcctgctccgtgcctgccatcacccatctgccacctgattctgagcaaggtctttgagccgtgccacactgtgatccccccactgctgttctatgagggctgcgtctttgaccggtgccacatgacggacctggatgtggtgtgctccagcctggagctgtacgcggcactctgcgcgtcccacgacatctgcatcgattggagaggccggaccggccacatgtgcccattcacctgcccagccgacaaggtgtaccagccctgcggcccgagcaacccctcctactgctacgggaatgacagcgccagcctcggggctctccgggaggccggccccatcaccgaaggctgcttctgtccggagggcatgaccctcttcagcaccagtgcccaagtctgcgtgcccacgggctgccccaggtgtctggggccccacggagagccggtgaaggtgggccacaccgtcggcatggactgccaggagtgcacgtgtgaggcggccacgtggacgctgacctgccgacccaagctctgcccgctgccccctgcctgccccctgcccggcttcgtgcctgtgcctgcagccccacaggccggccagtgctgcccccagtacagctgcgcctgcaacaccagccgctgccccgcgcccgtgggctgtcctgagggcgcccgcgcgatcccgacctaccaggagggggcctgctgcccagtccaaaactgcagctggacagtgtgcagcatcaacgggaccctgtaccagcccggcgccgtggtctcctcgagcctgtgcgaaacctgcaggtgtgagctgccgggtggccccccatcggacgcgtttgtggtcagctgtgagacccagatctgcaacacacactgccctgtgggcttcgagtaccaggagcagagcgggcagtgctgtggcacctgtgtgcaggtcgcctgtgtcaccaacaccagcaagagccccgcccacctcttctaccctggcgagacctggtcagacgcagggaaccactgtgtgacccaccagtgtgagaagcaccaggatgggctcgtggtggtcaccacgaagaaggcgtgccccccgctcagctgttctctggacgaggcccgcatgagcaaggacggctgctgccgcttctgcccgctgcccccgcccccgtaccagaaccagtcgacctgtgctgtgtaccataggagcctgatcatccagcagcagggctgcagctcctcggagcccgtgcgcctggcttactgccgggggaactgtggggacagctcttccatgtactcgctcgagggcaacacggtggagcacaggtgccagtgctgccaggagctgcggacctcgctgaggaatgtgaccctgcactgcaccgacggctccagccgggccttcagctacaccgaggtggaagagtgcggctgcatgggccggcgctgccctgcgccgggcgacacccagcactcggaggaggcggaacccgagcccagccaggaggcagagagtgggagctgggagagaggcgtcccagtgtcccccatgcactgaccagcactgccgccctcctgacctccaaggagaacctcccatatgtcctctgagctcggcttccaaggccagtggaacttgtgcccctctcaggaccagccccggggctggccgagctcctctggccatgcatccagcctgctgttctggggacgtgagcatcacctgagggtctcaggaatgacgcttggacatggtgatcagctgcctggtggctgcaggaggaagaacctcactcctacctcagccctcagcctgcgctcccctcctcagtacacggccaatctgttgcataaatacacttgagcattttgca

SEQ ID NO: 637774 - DNA, 7760 bp, Homo sapiens
  misc_feature (195)..(195): n is a, c, g, or t
  misc_feature (586)..(586): n is a, c, g, or t
  misc_feature (816)..(816): n is a, c, g, or t
  misc_feature (1099)..(1099): n is a, c, g, or t
  misc_feature (1327)..(1327): n is a, c, g, or t
  misc_feature (2495)..(2495): n is a, c, g, or t
  misc_feature (2499)..(2499): n is a, c, g, or t
  misc_feature (2560)..(2560): n is a, c, g, or t
  misc_feature (2651)..(2651): n is a, c, g, or t
  misc_feature (2828)..(2828): n is a, c, g, or t
  misc_feature (2844)..(2844): n is a, c, g, or t
  misc_feature (2955)..(2955): n is a, c, g, or t
  misc_feature (2978)..(2978): n is a, c, g, or t
  misc_feature (5341)..(5341): n is a, c, g, or t
  misc_feature (6055)..(6055): n is a, c, g, or t
  misc_feature (6075)..(6075): n is a, c, g, or t
  misc_feature (6079)..(6079): n is a, c, g, or t
  misc_feature (6094)..(6094): n is a, c, g, or t
  misc_feature (6097)..(6097): n is a, c, g, or t
  misc_feature (6124)..(6124): n is a, c, g, or t
ctcagaggctgctgagggacagggcactcttccccgccgtccacacaatgagtgttggccggaggaagctggccctgctctgggccctggctctcgctctggcctgcacccggcatacagccatgcccaggatggctcctccgaatccagctacaagcaccaccctgccctctctcctatcgcccgggggcccancggggtcccgctccgtggggcgactgtcttcccatctctgaggaccatccctgtggtacgagcctccaacccggcgcacaacgggcgggtgtgcagcacctggggcagcttccactacaagaccttcgacggcgacgtcttccgcttccccggcctctgcaactacgtgttctccgagcactgcggtgccgcctacgaggattttaacatccagctacgccgcagccaggagtcagcggcccccacgctgagcagggtcctcatgaaggtggatggcgtggtcatccagctgaccaagggctccgtcctggtcaacggccacccggtcctgctgcccttcagccagtctggggtcctcattcagcagagcagcagctacaccaaggtggangccaggctgggccttgtcctcatgtggaaccacgatgacagcctgctgctggagctggacaccaaatacgccaacaagacctgtgggctctgtggggacttcaacgggatgcccgtggtcagcgagctcctctcccacaacaccaagctgacacccatggaattcgggaacctgcagaagatggacgaccccacggagcagtgtcaggaccctgtccctgaacccccgangaactgctccactggctttggcatctgtgaggagctcctgcacggccagctgttctctggctgcgtggccctggtggacgtcggcagctacctggaggcttgcaggcaagacctctgcttctgtgaagacaccgacctgctcagctgcgtctgccacacccttgccgagtactcccggcagtgcacccatgcaggggggttgccccaggactggcggggccctgacttctgcccccagaagtgccccaacaacatgcagtaccacgagtgccgctccccctgngcagacacctgctccaaccaggagcactcccgggcctgtgaggaccactgtgtggccggctgcttctgccctgaggggacggtgcttgacgacatcggccagaccggctgtgtccctgtgtcaaagtgtgcctgcgtctacaacggggctgcctatgccccaggggccacctactccacagactgcaccaactgcacctgctccggaggccggtggagctgccaggangttccatgcccgggtacctgctctgtgcttggaggtgcccacttctcaacgtttgacgggaagcaatacacggtgcacggcgactgcagctatgtgctgaccaagccctgtgacagcagtgccttcactgtactggctgagctgcgcaggtgcgggctgacggacagcgagacctgcctgaagagcgtgacactgagcctggatggggcgcagacggtggtggtgatcaaggccagtggggaagtgttcctgaaccagatctacacccagctgcccatctctgcagccaacgtcaccatcttcagaccctcaaccttcttcatcatcgcccagaccagcctgggcctgcagctgaacctgcagctggtgcccaccatgcagctgttcatgcagctggcgcccaagctccgtgggcagacctgcggtctctgtgggaacttcaacagcatccaggccgatgacttccggaccctcagtggggtggtggaggccaccgctgcggccttcttcaacaccttcaagacccaggccgcctgccccaacatcaggaacagcttcgaggacccctgctctctgagcgtggagaatgagaagtatgctcagcactggtgctcgcagctgaccgatgccgacggccccttcggccggtgccatgctgccgtgaagccgggaacctactactcgaactgcatgtttgacacctgcaactgtgagcggagcgaggactgcctgtgcgccgcgctgtcctcctacgtgcacgcctgtgccgccaagggcgtgcagctcggcggctggagggacggcgtctgcacgaagcctatgaccacttgccccaagtcaatgacgtaccactaccatgtcagcacctgccagcccacctgccgctccctgagcgagggggacatcacctgcagtgttggcttcatccccgtggatggctgcatctgtcccaagggcaccttcctggacgacacgggcaagtgtgtgcaggccagcaactgtccctgctaccacagaggctccatgatccccaatggggagtcggtgcacgacagcggggctatctgcacctgcacacatgggaagctgagctgcatcggaggccaagcccccgccccagtgtgtgctgcgcccatggtgttctttgactgccgaaatgccacgcccngggncacaggggctggctgtcagaagagctgccacacactggacatgacctgttacagcccccantgtgtgcctggctgcgtgtgccccgacgggctggtggcggacggcgagggcggctgcatcactgcggaggactgcccctgcgtgcacaatnaggccagctaccgggccggccagaccatccgggtgggctgcaacacctgcacctgtgacagcaggatgtggcggtgcacagatgacccctgcctggccacctgcgccgtgtacggggacggccactacctcaccttcgacggacagagctacagcttcaacggagactgcgagtacncgctggtgcagaaccnctgtggcgggaaagacagcacccaggactcctttcgtgttgtcaccgagaacgtcccctgcggcaccacagggaccacctgctccaaggccatcaagattttcctgggggncttcgagctgaagctaagccatnggaaggtggaggtgatcgggacggacgagagccaggaggtgccatacaccatccggcagatgggcatctacctggtggtggacaccgacattggcctggtgctgctgtgggacaagaagaccagcatcttcatcaacctcagccccgagttcaagggcagggtctgcggcctgtgtgggaacttcgacgacatcgccgttaatgactttgccacgcggagccggtctgtggtgggggacgtgctggagtttgggaacagctggaagctctccccctcctgcccagatgccctggcgcccaaggacccctgcacggccaaccccttccgcaagtcctgggcccagaagcagtgcagcatcctccacggccccaccttcgccgcctgccacgcacacgtggagccggccaggtactacgaggcctgcgtgaacgacgcgtgcgcctgcgactccgggggtgactgcgagtgcttctgcacggctgtggcccgctacgcccaggcctgccatgaagtaggcacctgtgtgtgtctgcggaccccaagcatctgccctctgttctgcgactactacaaccccgaaggccagtgcgagtggcactaccagccctgcggggtgccctgcctgcgcacctgccggaacccccgtggagactgcctgcgggacgtccggggcctggaaggctgctaccccaagtgcccaccagaggctcccatctttgatgaggacaagatgcagtgtgtggccacctgcccaaccccgcctctgccaccacggtgccacgtccatgggaagtcctaccggccaggtgcagtggtgccctcggacaagaactgccagtcctgcctttgtacggagcgcggcgtggagtgcacctacaaagctgaggcctgtgtctgcacctacaatggacagcgcttccacccaggggacgtcatctaccacacgacggatggcacgggtggctgcatctccgcccgctgcggggccaacggcaccattgagaggagggtctacccctgcagccccaccacccctgtccccccaaccaccttctccttctccacacccccgcttgtcgtgagctccacgcacacccccagcaatggcccaagcagcgcgcacacaggccctccgagcagcgcctggcccaccacagcaggcacttctcccaggacgaggctgcccacagcctctgcctcgctgccgccggtctgtggggaaaagtgcctgtggtcgccatggatggatgtcagccgccctggacggggcacggacagcggtgacttcgacacactggagaacctccgcgcccatgggtaccgggtgtgcgaatcacccaggtcggtggagtgccgagccgaggacgcccccggagtgccgctccgagccctggggcagcgtgtgcagtgcagcccggatgtggggctgacctgtcgtaacagggagcaggcatcggggctctgctacaactaccagatcagggtccagtgctgcacgcccctagcctgctccacctctagcagtccagcccagaccactcctccaactacctccaagaccactgaaacccgggcctcaggctcctcagctcccagcagcacacctggcaccgtgtctctctctacagccaggacgacacctgccccaggtaccgctacctctgtcaaaaaaactttctcaactcccagccctccgccagtgccggcaacatcaacatcatccatgtcgaccacggccccggggacctctgtggtctccagcaagcccacccccacggagcccagcacatcctcctgcctgcaggagctttgcacctggaccgagtggatcgatggcagctaccctgctcctggaataaatggtggagattttgacacatttcaaaatttgagagacgaaggatacacattctgtgaaagtcctcgaagcgtgcagtgccgggcagagagcttccccaacacgccgctggcagacctggggcaggacgtcatctgcagccacacagaggggctgatttgcctgaacaagaaccagctcccacccatctgctacaactatgagatccgcatccagtgttgcgagacggtgaacgtgtgcagagacatcaccagactgccaaagaccgtcgcaacgacacggccgactccacatccaaccggagctcagacccagaccaccttcaccacacacatgccctcggcctccacagagcaacccacggcaacctccaggggtgggcccacagcaaccagcgtcacacagggcacccacaccacaccagtcaccagaaactgtcatccccggtgcacctggacaaagtggttcgacgtggacttcccgtcccccggaccccatggtggngacaaggaaacctacaacaacatcatcaggagtggggaaaaaatctgccgccgtactgaggagatcaccaggctccagtgccgagccgagagccacccggaggtgagcatcgaacacctgggccaggtggtgcagtgcagccgggaagagggcctggtgtgccggaaccaggaccagcagggacccttcaagatgtgcctcaactacgaggtgcgtgtgctctgctgcgagacccccaaaggctgccccgtgacctccacacctgtgacagctcctagcacccctagtgggagagccaccagcccaactcagagcacctcctcttggcagaaatccaggacaaccactttggtgacaaccagcacaacctccactccacagaccagcacaacctctgcccctacaaccagcacaatccctgcttctacacccagcacaacctctgcccctacaaccagcacaacctctgctcctacaaccagcatatcctctgcccctacaagcagcacaacctcggctcctacaagcagcacaatctctgctcgtacaaccagcataatctctgcccctacaaccagcacaacctctttccctacaaccagcacaacctctgctactacaaccagcacaacctctgcccctacaagcagcacaacctccactccacagaccagcaaaacctcagctgtcctacaaccagcacaacctctggtnctggaactactcccagcccngttnccaccaccagcacanccnctgtttcaaagaccagcacaagccatntttctgtatccaagacaacccactcccaaccagtcaccagtgactgtcatcctctgtgcgcctggacaaagtggttcgacgtggacttcccatcccctggaccccacggcggggacaaggaaacctacaacaacatcatcaggagtggggaaaaaatctgccgccgacctgaggagatcaccaggctccagtgccgagccgagagccacccggaggtgaacattgaacacctgggtcaggtggtgcagtgcagccgtgaagagggcctggtgtgccggaaccaggaccagcagggacccttcaagatgtgcctcaactacgaggtgcgcgtgctctgctgcgagacccccagaggctgcccggtgacctctgtgaccccatatgggacttctcctaccaatgctctgtatccttccctgtctacttccatggtatccgcctccgtggcatccacctctgtggcatccagctctgtggcatccagctctgtggcttactccacccaaacctgcttctgcaacgtggctgaccggctctaccctgcaggatccaccatataccgccacagagacctcgctggccattgctattatgccctgtgtagccaggactgccaagtggtcagaggggttgacagtgactgtccgtccaccacgctgcctcctgccccagccacgtccccttcaatatccacctccgagcccgtcactgagctgggatgcccaaatgcggttccccccagaaagaaaggtgagacctgggccacacccaactgctccgaggccacctgtgagggcaacaacgtcatctccctgagcccgcgcacgtgcccgagggtggagaagcccacttgtgccaacggctacccggctgtgaaggtggctgaccaagatggctgctgccatcactaccagtgccagtgtgtgtgcagcggctggggtgacccccactacatcaccttcgacggcacctactacaccttcctggacaactgcacgtacgtgctggtgcagcagattgtgcccgtgtatggccacttccgcgtgctcgtcgacaactacttctgcggtgcggaggacgggctctcctgcccgaggtccatcatcctggagtaccaccaggaccgcgtggtgctgacccgcaagccagtccacggggtgatgacaaacgagatcatcttcaacaacaaggtggtcagccccggcttccggaaaaacggcatcgtggtctcgcgcatcggcgtcaagatgtacgcgaccatcccggagctgggagtccaggtcatgttctccggcctcatcttctccgtggaggtgcccttcagcaagtttgccaacaacaccgagggccagtgcggcacttgcaccaacgacaggaaggatgagtgccgcacgcctagggggacggtggtcgcttcctgctccgagatgtccggcctctggaacgtgagcatccctgaccagccagcctgccaccggcctcacccgacgcccaccacggtcgggcccaccacagttgggtctaccacggtcgggcccaccacagttgggtctaccaccgtcgggcccaccacagttggctctaccaccgtcgggcccaccacaccgcctgctccgtgcctgccagctgctcagca

SEQ ID NO: 637775 - DNA, 386 bp, Homo sapiens
taagtttgaaggaaattaaaaatgctactccagatgaacacatcaatgataagaaagtgaaacagccttactgctaatgtggagacagtctgagtggtctggatagaagagcacaccagctagaacattccctaagccacagcctaattcagagcaagagcgcaactcttttcaattctgttcacggctgagcagcaggtgcatgaatccgcagaagcaaacagttggtatagctagcaggagttggttcatgcaggtttaaggcaaagaagctgtctccataacacatacaagtgcaaggtgaaacagcaaggactgatcagagagctgcagcaagttatcccacaaaatctaagcagcaaaagatggggtgtgctttcacggga

SEQ ID NO: 637776 - DNA, 6687 bp, Homo sapiens
  misc_feature (195)..(195): n is a, c, g, or t
  misc_feature (586)..(586): n is a, c, g, or t
  misc_feature (816)..(816): n is a, c, g, or t
  misc_feature (1099)..(1099): n is a, c, g, or t
  misc_feature (1327)..(1327): n is a, c, g, or t
  misc_feature (2495)..(2495): n is a, c, g, or t
  misc_feature (2499)..(2499): n is a, c, g, or t
  misc_feature (2560)..(2560): n is a, c, g, or t
  misc_feature (2651)..(2651): n is a, c, g, or t
  misc_feature (2828)..(2828): n is a, c, g, or t
  misc_feature (2844)..(2844): n is a, c, g, or t
  misc_feature (2955)..(2955): n is a, c, g, or t
  misc_feature (2978)..(2978): n is a, c, g, or t
  misc_feature (5341)..(5341): n is a, c, g, or t
  misc_feature (6055)..(6055): n is a, c, g, or t
  misc_feature (6075)..(6075): n is a, c, g, or t
  misc_feature (6079)..(6079): n is a, c, g, or t
  misc_feature (6094)..(6094): n is a, c, g, or t
  misc_feature (6097)..(6097): n is a, c, g, or t
  misc_feature (6124)..(6124): n is a, c, g, or t
ctcagaggctgctgagggacagggcactcttccccgccgtccacacaatgagtgttggccggaggaagctggccctgctctgggccctggctctcgctctggcctgcacccggcatacagccatgcccaggatggctcctccgaatccagctacaagcaccaccctgccctctctcctatcgcccgggggcccancggggtcccgctccgtggggcgactgtcttcccatctctgaggaccatccctgtggtacgagcctccaacccggcgcacaacgggcgggtgtgcagcacctggggcagcttccactacaagaccttcgacggcgacgtcttccgcttccccggcctctgcaactacgtgttctccgagcactgcggtgccgcctacgaggattttaacatccagctacgccgcagccaggagtcagcggcccccacgctgagcagggtcctcatgaaggtggatggcgtggtcatccagctgaccaagggctccgtcctggtcaacggccacccggtcctgctgcccttcagccagtctggggtcctcattcagcagagcagcagctacaccaaggtggangccaggctgggccttgtcctcatgtggaaccacgatgacagcctgctgctggagctggacaccaaatacgccaacaagacctgtgggctctgtggggacttcaacgggatgcccgtggtcagcgagctcctctcccacaacaccaagctgacacccatggaattcgggaacctgcagaagatggacgaccccacggagcagtgtcaggaccctgtccctgaacccccgangaactgctccactggctttggcatctgtgaggagctcctgcacggccagctgttctctggctgcgtggccctggtggacgtcggcagctacctggaggcttgcaggcaagacctctgcttctgtgaagacaccgacctgctcagctgcgtctgccacacccttgccgagtactcccggcagtgcacccatgcaggggggttgccccaggactggcggggccctgacttctgcccccagaagtgccccaacaacatgcagtaccacgagtgccgctccccctgngcagacacctgctccaaccaggagcactcccgggcctgtgaggaccactgtgtggccggctgcttctgccctgaggggacggtgcttgacgacatcggccagaccggctgtgtccctgtgtcaaagtgtgcctgcgtctacaacggggctgcctatgccccaggggccacctactccacagactgcaccaactgcacctgctccggaggccggtggagctgccaggangttccatgcccgggtacctgctctgtgcttggaggtgcccacttctcaacgtttgacgggaagcaatacacggtgcacggcgactgcagctatgtgctgaccaagccctgtgacagcagtgccttcactgtactggctgagctgcgcaggtgcgggctgacggacagcgagacctgcctgaagagcgtgacactgagcctggatggggcgcagacggtggtggtgatcaaggccagtggggaagtgttcctgaaccagatctacacccagctgcccatctctgcagccaacgtcaccatcttcagaccctcaaccttcttcatcatcgcccagaccagcctgggcctgcagctgaacctgcagctggtgcccaccatgcagctgttcatgcagctggcgcccaagctccgtgggcagacctgcggtctctgtgggaacttcaacagcatccaggccgatgacttccggaccctcagtggggtggtggaggccaccgctgcggccttcttcaacaccttcaagacccaggccgcctgccccaacatcaggaacagcttcgaggacccctgctctctgagcgtggagaatgagaagtatgctcagcactggtgctcgcagctgaccgatgccgacggccccttcggccggtgccatgctgccgtgaagccgggaacctactactcgaactgcatgtttgacacctgcaactgtgagcggagcgaggactgcctgtgcgccgcgctgtcctcctacgtgcacgcctgtgccgccaagggcgtgcagctcggcggctggagggacggcgtctgcacgaagcctatgaccacttgccccaagtcaatgacgtaccactaccatgtcagcacctgccagcccacctgccgctccctgagcgagggggacatcacctgcagtgttggcttcatccccgtggatggctgcatctgtcccaagggcaccttcctggacgacacgggcaagtgtgtgcaggccagcaactgtccctgctaccacagaggctccatgatccccaatggggagtcggtgcacgacagcggggctatctgcacctgcacacatgggaagctgagctgcatcggaggccaagcccccgccccagtgtgtgctgcgcccatggtgttctttgactgccgaaatgccacgcccngggncacaggggctggctgtcagaagagctgccacacactggacatgacctgttacagcccccantgtgtgcctggctgcgtgtgccccgacgggctggtggcggacggcgagggcggctgcatcactgcggaggactgcccctgcgtgcacaatnaggccagctaccgggccggccagaccatccgggtgggctgcaacacctgcacctgtgacagcaggatgtggcggtgcacagatgacccctgcctggccacctgcgccgtgtacggggacggccactacctcaccttcgacggacagagctacagcttcaacggagactgcgagtacncgctggtgcagaaccnctgtggcgggaaagacagcacccaggactcctttcgtgttgtcaccgagaacgtcccctgcggcaccacagggaccacctgctccaaggccatcaagattttcctgggggncttcgagctgaagctaagccatnggaaggtggaggtgatcgggacggacgagagccaggaggtgccatacaccatccggcagatgggcatctacctggtggtggacaccgacattggcctggtgctgctgtgggacaagaagaccagcatcttcatcaacctcagccccgagttcaagggcagggtctgcggcctgtgtgggaacttcgacgacatcgccgttaatgactttgccacgcggagccggtctgtggtgggggacgtgctggagtttgggaacagctggaagctctccccctcctgcccagatgccctggcgcccaaggacccctgcacggccaaccccttccgcaagtcctgggcccagaagcagtgcagcatcctccacggccccaccttcgccgcctgccacgcacacgtggagccggccaggtactacgaggcctgcgtgaacgacgcgtgcgcctgcgactccgggggtgactgcgagtgcttctgcacggctgtggcccgctacgcccaggcctgccatgaagtaggcacctgtgtgtgtctgcggaccccaagcatctgccctctgttctgcgactactacaaccccgaaggccagtgcgagtggcactaccagccctgcggggtgccctgcctgcgcacctgccggaacccccgtggagactgcctgcgggacgtccggggcctggaaggctgctaccccaagtgcccaccagaggctcccatctttgatgaggacaagatgcagtgtgtggccacctgcccaaccccgcctctgccaccacggtgccacgtccatgggaagtcctaccggccaggtgcagtggtgccctcggacaagaactgccagtcctgcctttgtacggagcgcggcgtggagtgcacctacaaagctgaggcctgtgtctgcacctacaatggacagcgcttccacccaggggacgtcatctaccacacgacggatggcacgggtggctgcatctccgcccgctgcggggccaacggcaccattgagaggagggtctacccctgcagccccaccacccctgtccccccaaccaccttctccttctccacacccccgcttgtcgtgagctccacgcacacccccagcaatggcccaagcagcgcgcacacaggccctccgagcagcgcctggcccaccacagcaggcacttctcccaggacgaggctgcccacagcctctgcctcgctgccgccggtctgtggggaaaagtgcctgtggtcgccatggatggatgtcagccgccctggacggggcacggacagcggtgacttcgacacactggagaacctccgcgcccatgggtaccgggtgtgcgaatcacccaggtcggtggagtgccgagccgaggacgcccccggagtgccgctccgagccctggggcagcgtgtgcagtgcagcccggatgtggggctgacctgtcgtaacagggagcaggcatcggggctctgctacaactaccagatcagggtccagtgctgcacgcccctagcctgctccacctctagcagtccagcccagaccactcctccaactacctccaagaccactgaaacccgggcctcaggctcctcagctcccagcagcacacctggcaccgtgtctctctctacagccaggacgacacctgccccaggtaccgctacctctgtcaaaaaaactttctcaactcccagccctccgccagtgccggcaacatcaacatcatccatgtcgaccacggccccggggacctctgtggtctccagcaagcccacccccacggagcccagcacatcctcctgcctgcaggagctttgcacctggaccgagtggatcgatggcagctaccctgctcctggaataaatggtggagattttgacacatttcaaaatttgagagacgaaggatacacattctgtgaaagtcctcgaagcgtgcagtgccgggcagagagcttccccaacacgccgctggcagacctggggcaggacgtcatctgcagccacacagaggggctgatttgcctgaacaagaaccagctcccacccatctgctacaactatgagatccgcatccagtgttgcgagacggtgaacgtgtgcagagacatcaccagactgccaaagaccgtcgcaacgacacggccgactccacatccaaccggagctcagacccagaccaccttcaccacacacatgccctcggcctccacagagcaacccacggcaacctccaggggtgggcccacagcaaccagcgtcacacagggcacccacaccacaccagtcaccagaaactgtcatccccggtgcacctggacaaagtggttcgacgtggacttcccgtcccccggaccccatggtggngacaaggaaacctacaacaacatcatcaggagtggggaaaaaatctgccgccgtactgaggagatcaccaggctccagtgccgagccgagagccacccggaggtgagcatcgaacacctgggccaggtggtgcagtgcagccgggaagagggcctggtgtgccggaaccaggaccagcagggacccttcaagatgtgcctcaactacgaggtgcgtgtgctctgctgcgagacccccaaaggctgccccgtgacctccacacctgtgacagctcctagcacccctagtgggagagccaccagcccaactcagagcacctcctcttggcagaaatccaggacaaccactttggtgacaaccagcacaacctccactccacagaccagcacaacctctgcccctacaaccagcacaatccctgcttctacacccagcacaacctctgcccctacaaccagcacaacctctgctcctacaaccagcatatcctctgcccctacaagcagcacaacctcggctcctacaagcagcacaatctctgctcgtacaaccagcataatctctgcccctacaaccagcacaacctctttccctacaaccagcacaacctctgctactacaaccagcacaacctctgcccctacaagcagcacaacctccactccacagaccagcaaaacctcagctgtcctacaaccagcacaacctctggtnctggaactactcccagcccngttnccaccaccagcacanccnctgtttcaaagaccagcacaagccatntttctgtatccaagacaacccactcccaaccagtcaccagtgactgtcatcctctgtgcgcctggacaaagtggttcgacgtggacttcccatcccctggaccccacggcggggacaaggaaacctacaacaacatcatcaggagtggggaaaaaatctgccgccgacctgaggagatcaccaggctccagtgccgagccgagagccacccggaggtgaacattgaacacctgggtcaggtggtgcagtgcagccgtgaagagggcctggtgtgccggaaccaggaccagcagggacccttcaagatgtgcctcaactacgaggtgcgcgtgctctgctgcgagacccccagaggctgcccggtgacctccacatctgtgacagctcctagcacccctagtgggagagccaccagcccaactcagagcacctcctcttggcagaaatccaggacaaccactttggtgacaagcagcataacctccactacacagaccagcacaacctctgcccctacaagtagcacaacccagcttcaatacccagcacatccgactggcccg

SEQ ID NO: 637777 - DNA, 175 bp, Homo sapiens
  misc_feature (114)..(115): n is a, c, g, or t
gcggccgcctactactactactgctcgaattcaagcttctaacgatgtacggggacatgttaaacctcaaataaatgcttccttatgtgattgcttttcgtgcgtcaggtactnnacatagctcttgtaaaaaatgtaatttaaaataagcaataattaaggcacaaaaaaaaaa

SEQ ID NO: 637778 - DNA, 6178 bp, Homo sapiens
  misc_feature (195)..(195): n is a, c, g, or t
  misc_feature (586)..(586): n is a, c, g, or t
  misc_feature (816)..(816): n is a, c, g, or t
  misc_feature (1099)..(1099): n is a, c, g, or t
  misc_feature (1327)..(1327): n is a, c, g, or t
  misc_feature (2495)..(2495): n is a, c, g, or t
  misc_feature (2499)..(2499): n is a, c, g, or t
  misc_feature (2560)..(2560): n is a, c, g, or t
  misc_feature (2651)..(2651): n is a, c, g, or t
  misc_feature (2828)..(2828): n is a, c, g, or t
  misc_feature (2844)..(2844): n is a, c, g, or t
  misc_feature (2955)..(2955): n is a, c, g, or t
  misc_feature (2978)..(2978): n is a, c, g, or t
  misc_feature (5341)..(5341): n is a, c, g, or t
ctcagaggctgctgagggacagggcactcttccccgccgtccacacaatgagtgttggccggaggaagctggccctgctctgggccctggctctcgctctggcctgcacccggcatacagccatgcccaggatggctcctccgaatccagctacaagcaccaccctgccctctctcctatcgcccgggggcccancggggtcccgctccgtggggcgactgtcttcccatctctgaggaccatccctgtggtacgagcctccaacccggcgcacaacgggcgggtgtgcagcacctggggcagcttccactacaagaccttcgacggcgacgtcttccgcttccccggcctctgcaactacgtgttctccgagcactgcggtgccgcctacgaggattttaacatccagctacgccgcagccaggagtcagcggcccccacgctgagcagggtcctcatgaaggtggatggcgtggtcatccagctgaccaagggctccgtcctggtcaacggccacccggtcctgctgcccttcagccagtctggggtcctcattcagcagagcagcagctacaccaaggtggangccaggctgggccttgtcctcatgtggaaccacgatgacagcctgctgctggagctggacaccaaatacgccaacaagacctgtgggctctgtggggacttcaacgggatgcccgtggtcagcgagctcctctcccacaacaccaagctgacacccatggaattcgggaacctgcagaagatggacgaccccacggagcagtgtcaggaccctgtccctgaacccccgangaactgctccactggctttggcatctgtgaggagctcctgcacggccagctgttctctggctgcgtggccctggtggacgtcggcagctacctggaggcttgcaggcaagacctctgcttctgtgaagacaccgacctgctcagctgcgtctgccacacccttgccgagtactcccggcagtgcacccatgcaggggggttgccccaggactggcggggccctgacttctgcccccagaagtgccccaacaacatgcagtaccacgagtgccgctccccctgngcagacacctgctccaaccaggagcactcccgggcctgtgaggaccactgtgtggccggctgcttctgccctgaggggacggtgcttgacgacatcggccagaccggctgtgtccctgtgtcaaagtgtgcctgcgtctacaacggggctgcctatgccccaggggccacctactccacagactgcaccaactgcacctgctccggaggccggtggagctgccaggangttccatgcccgggtacctgctctgtgcttggaggtgcccacttctcaacgtttgacgggaagcaatacacggtgcacggcgactgcagctatgtgctgaccaagccctgtgacagcagtgccttcactgtactggctgagctgcgcaggtgcgggctgacggacagcgagacctgcctgaagagcgtgacactgagcctggatggggcgcagacggtggtggtgatcaaggccagtggggaagtgttcctgaaccagatctacacccagctgcccatctctgcagccaacgtcaccatcttcagaccctcaaccttcttcatcatcgcccagaccagcctgggcctgcagctgaacctgcagctggtgcccaccatgcagctgttcatgcagctggcgcccaagctccgtgggcagacctgcggtctctgtgggaacttcaacagcatccaggccgatgacttccggaccctcagtggggtggtggaggccaccgctgcggccttcttcaacaccttcaagacccaggccgcctgccccaacatcaggaacagcttcgaggacccctgctctctgagcgtggagaatgagaagtatgctcagcactggtgctcgcagctgaccgatgccgacggccccttcggccggtgccatgctgccgtgaagccgggaacctactactcgaactgcatgtttgacacctgcaactgtgagcggagcgaggactgcctgtgcgccgcgctgtcctcctacgtgcacgcctgtgccgccaagggcgtgcagctcggcggctggagggacggcgtctgcacgaagcctatgaccacttgccccaagtcaatgacgtaccactaccatgtcagcacctgccagcccacctgccgctccctgagcgagggggacatcacctgcagtgttggcttcatccccgtggatggctgcatctgtcccaagggcaccttcctggacgacacgggcaagtgtgtgcaggccagcaactgtccctgctaccacagaggctccatgatccccaatggggagtcggtgcacgacagcggggctatctgcacctgcacacatgggaagctgagctgcatcggaggccaagcccccgccccagtgtgtgctgcgcccatggtgttctttgactgccgaaatgccacgcccngggncacaggggctggctgtcagaagagctgccacacactggacatgacctgttacagcccccantgtgtgcctggctgcgtgtgccccgacgggctggtggcggacggcgagggcggctgcatcactgcggaggactgcccctgcgtgcacaatnaggccagctaccgggccggccagaccatccgggtgggctgcaacacctgcacctgtgacagcaggatgtggcggtgcacagatgacccctgcctggccacctgcgccgtgtacggggacggccactacctcaccttcgacggacagagctacagcttcaacggagactgcgagtacncgctggtgcagaaccnctgtggcgggaaagacagcacccaggactcctttcgtgttgtcaccgagaacgtcccctgcggcaccacagggaccacctgctccaaggccatcaagattttcctgggggncttcgagctgaagctaagccatnggaaggtggaggtgatcgggacggacgagagccaggaggtgccatacaccatccggcagatgggcatctacctggtggtggacaccgacattggcctggtgctgctgtgggacaagaagaccagcatcttcatcaacctcagccccgagttcaagggcagggtctgcggcctgtgtgggaacttcgacgacatcgccgttaatgactttgccacgcggagccggtctgtggtgggggacgtgctggagtttgggaacagctggaagctctccccctcctgcccagatgccctggcgcccaaggacccctgcacggccaaccccttccgcaagtcctgggcccagaagcagtgcagcatcctccacggccccaccttcgccgcctgccacgcacacgtggagccggccaggtactacgaggcctgcgtgaacgacgcgtgcgcctgcgactccgggggtgactgcgagtgcttctgcacggctgtggcccgctacgcccaggcctgccatgaagtaggcacctgtgtgtgtctgcggaccccaagcatctgccctctgttctgcgactactacaaccccgaaggccagtgcgagtggcactaccagccctgcggggtgccctgcctgcgcacctgccggaacccccgtggagactgcctgcgggacgtccggggcctggaaggctgctaccccaagtgcccaccagaggctcccatctttgatgaggacaagatgcagtgtgtggccacctgcccaaccccgcctctgccaccacggtgccacgtccatgggaagtcctaccggccaggtgcagtggtgccctcggacaagaactgccagtcctgcctttgtacggagcgcggcgtggagtgcacctacaaagctgaggcctgtgtctgcacctacaatggacagcgcttccacccaggggacgtcatctaccacacgacggatggcacgggtggctgcatctccgcccgctgcggggccaacggcaccattgagaggagggtctacccctgcagccccaccacccctgtccccccaaccaccttctccttctccacacccccgcttgtcgtgagctccacgcacacccccagcaatggcccaagcagcgcgcacacaggccctccgagcagcgcctggcccaccacagcaggcacttctcccaggacgaggctgcccacagcctctgcctcgctgccgccggtctgtggggaaaagtgcctgtggtcgccatggatggatgtcagccgccctggacggggcacggacagcggtgacttcgacacactggagaacctccgcgcccatgggtaccgggtgtgcgaatcacccaggtcggtggagtgccgagccgaggacgcccccggagtgccgctccgagccctggggcagcgtgtgcagtgcagcccggatgtggggctgacctgtcgtaacagggagcaggcatcggggctctgctacaactaccagatcagggtccagtgctgcacgcccctagcctgctccacctctagcagtccagcccagaccactcctccaactacctccaagaccactgaaacccgggcctcaggctcctcagctcccagcagcacacctggcaccgtgtctctctctacagccaggacgacacctgccccaggtaccgctacctctgtcaaaaaaactttctcaactcccagccctccgccagtgccggcaacatcaacatcatccatgtcgaccacggccccggggacctctgtggtctccagcaagcccacccccacggagcccagcacatcctcctgcctgcaggagctttgcacctggaccgagtggatcgatggcagctaccctgctcctggaataaatggtggagattttgacacatttcaaaatttgagagacgaaggatacacattctgtgaaagtcctcgaagcgtgcagtgccgggcagagagcttccccaacacgccgctggcagacctggggcaggacgtcatctgcagccacacagaggggctgatttgcctgaacaagaaccagctcccacccatctgctacaactatgagatccgcatccagtgttgcgagacggtgaacgtgtgcagagacatcaccagactgccaaagaccgtcgcaacgacacggccgactccacatccaaccggagctcagacccagaccaccttcaccacacacatgccctcggcctccacagagcaacccacggcaacctccaggggtgggcccacagcaaccagcgtcacacagggcacccacaccacaccagtcaccagaaactgtcatccccggtgcacctggacaaagtggttcgacgtggacttcccgtcccccggaccccatggtggngacaaggaaacctacaacaacatcatcaggagtggggaaaaaatctgccgccgtactgaggagatcaccaggctccagtgccgagccgagagccacccggaggtgagcatcgaacacctgggccaggtggtgcagtgcagccgggaagagggcctggtgtgccggaaccaggaccagcagggacccttcaagatgtgcctcaactacgaggtgcgtgtgctctgctgcgagacccccaaaggctgccccgtgacctccacacctgtgacagctcctagcacccctagtgggagagccaccagcccaactcagagcacctcctcttggcagaaatccaggacaaccactttggtgacaaccagcacaacctccactccacagaccagcacaacctctgcccctacaaccagcacaatccctgcttctacacccagcacacgcgactggtgtgctacaagagggattattagtctctgcagctggtcatcccgtcatctactctgccctgtaagtccactgaatatcctctgtcatcctctcttctaccctgtgctgagtctggggattttataaacctcacaggcgagaaatgtgcctgcggactgttccatagacagccatgggtgggtccagaagaggcagaacaagtccccagctattgatatcagagcaggcaccaggagctgagaggaggccaggaagtgaaaagcagacaacccctatgcctgcagtaattacgggtgaggttcctttctggggccccaaaggttgcagtctacaggttgaagaaactgccctaggtccttcacctggaaggatggctgcaaccaaacctgg

SEQ ID NO: 637779 - DNA, 178 bp, Homo sapiens
ctaagaacagcatcgtgtaatgtgagacttgtttatgtgcggagatttgtggtgaacatgttatctgtaattttgtagcctgactaacgtgcttcatcggatgcatgacatgtgctacatgagcaactactgtgcttcttgtgctttggcggcttgactagtgctctatctacagttg

SEQ ID NO: 637780 - DNA, 5828 bp, Homo sapiens
  misc_feature (195)..(195): n is a, c, g, or t
  misc_feature (586)..(586): n is a, c, g, or t
  misc_feature (816)..(816): n is a, c, g, or t
  misc_feature (1099)..(1099): n is a, c, g, or t
  misc_feature (1327)..(1327): n is a, c, g, or t
  misc_feature (2495)..(2495): n is a, c, g, or t
  misc_feature (2499)..(2499): n is a, c, g, or t
  misc_feature (2560)..(2560): n is a, c, g, or t
  misc_feature (2651)..(2651): n is a, c, g, or t
  misc_feature (2828)..(2828): n is a, c, g, or t
  misc_feature (2844)..(2844): n is a, c, g, or t
  misc_feature (2955)..(2955): n is a, c, g, or t
  misc_feature (2978)..(2978): n is a, c, g, or t
  misc_feature (5341)..(5341): n is a, c, g, or t
ctcagaggctgctgagggacagggcactcttccccgccgtccacacaatgagtgttggccggaggaagctggccctgctctgggccctggctctcgctctggcctgcacccggcatacagccatgcccaggatggctcctccgaatccagctacaagcaccaccctgccctctctcctatcgcccgggggcccancggggtcccgctccgtggggcgactgtcttcccatctctgaggaccatccctgtggtacgagcctccaacccggcgcacaacgggcgggtgtgcagcacctggggcagcttccactacaagaccttcgacggcgacgtcttccgcttccccggcctctgcaactacgtgttctccgagcactgcggtgccgcctacgaggattttaacatccagctacgccgcagccaggagtcagcggcccccacgctgagcagggtcctcatgaaggtggatggcgtggtcatccagctgaccaagggctccgtcctggtcaacggccacccggtcctgctgcccttcagccagtctggggtcctcattcagcagagcagcagctacaccaaggtggangccaggctgggccttgtcctcatgtggaaccacgatgacagcctgctgctggagctggacaccaaatacgccaacaagacctgtgggctctgtggggacttcaacgggatgcccgtggtcagcgagctcctctcccacaacaccaagctgacacccatggaattcgggaacctgcagaagatggacgaccccacggagcagtgtcaggaccctgtccctgaacccccgangaactgctccactggctttggcatctgtgaggagctcctgcacggccagctgttctctggctgcgtggccctggtggacgtcggcagctacctggaggcttgcaggcaagacctctgcttctgtgaagacaccgacctgctcagctgcgtctgccacacccttgccgagtactcccggcagtgcacccatgcaggggggttgccccaggactggcggggccctgacttctgcccccagaagtgccccaacaacatgcagtaccacgagtgccgctccccctgngcagacacctgctccaaccaggagcactcccgggcctgtgaggaccactgtgtggccggctgcttctgccctgaggggacggtgcttgacgacatcggccagaccggctgtgtccctgtgtcaaagtgtgcctgcgtctacaacggggctgcctatgccccaggggccacctactccacagactgcaccaactgcacctgctccggaggccggtggagctgccaggangttccatgcccgggtacctgctctgtgcttggaggtgcccacttctcaacgtttgacgggaagcaatacacggtgcacggcgactgcagctatgtgctgaccaagccctgtgacagcagtgccttcactgtactggctgagctgcgcaggtgcgggctgacggacagcgagacctgcctgaagagcgtgacactgagcctggatggggcgcagacggtggtggtgatcaaggccagtggggaagtgttcctgaaccagatctacacccagctgcccatctctgcagccaacgtcaccatcttcagaccctcaaccttcttcatcatcgcccagaccagcctgggcctgcagctgaacctgcagctggtgcccaccatgcagctgttcatgcagctggcgcccaagctccgtgggcagacctgcggtctctgtgggaacttcaacagcatccaggccgatgacttccggaccctcagtggggtggtggaggccaccgctgcggccttcttcaacaccttcaagacccaggccgcctgccccaacatcaggaacagcttcgaggacccctgctctctgagcgtggagaatgagaagtatgctcagcactggtgctcgcagctgaccgatgccgacggccccttcggccggtgccatgctgccgtgaagccgggaacctactactcgaactgcatgtttgacacctgcaactgtgagcggagcgaggactgcctgtgcgccgcgctgtcctcctacgtgcacgcctgtgccgccaagggcgtgcagctcggcggctggagggacggcgtctgcacgaagcctatgaccacttgccccaagtcaatgacgtaccactaccatgtcagcacctgccagcccacctgccgctccctgagcgagggggacatcacctgcagtgttggcttcatccccgtggatggctgcatctgtcccaagggcaccttcctggacgacacgggcaagtgtgtgcaggccagcaactgtccctgctaccacagaggctccatgatccccaatggggagtcggtgcacgacagcggggctatctgcacctgcacacatgggaagctgagctgcatcggaggccaagcccccgccccagtgtgtgctgcgcccatggtgttctttgactgccgaaatgccacgcccngggncacaggggctggctgtcagaagagctgccacacactggacatgacctgttacagcccccantgtgtgcctggctgcgtgtgccccgacgggctggtggcggacggcgagggcggctgcatcactgcggaggactgcccctgcgtgcacaatnaggccagctaccgggccggccagaccatccgggtgggctgcaacacctgcacctgtgacagcaggatgtggcggtgcacagatgacccctgcctggccacctgcgccgtgtacggggacggccactacctcaccttcgacggacagagctacagcttcaacggagactgcgagtacncgctggtgcagaaccnctgtggcgggaaagacagcacccaggactcctttcgtgttgtcaccgagaacgtcccctgcggcaccacagggaccacctgctccaaggccatcaagattttcctgggggncttcgagctgaagctaagccatnggaaggtggaggtgatcgggacggacgagagccaggaggtgccatacaccatccggcagatgggcatctacctggtggtggacaccgacattggcctggtgctgctgtgggacaagaagaccagcatcttcatcaacctcagccccgagttcaagggcagggtctgcggcctgtgtgggaacttcgacgacatcgccgttaatgactttgccacgcggagccggtctgtggtgggggacgtgctggagtttgggaacagctggaagctctccccctcctgcccagatgccctggcgcccaaggacccctgcacggccaaccccttccgcaagtcctgggcccagaagcagtgcagcatcctccacggccccaccttcgccgcctgccacgcacacgtggagccggccaggtactacgaggcctgcgtgaacgacgcgtgcgcctgcgactccgggggtgactgcgagtgcttctgcacggctgtggcccgctacgcccaggcctgccatgaagtaggcacctgtgtgtgtctgcggaccccaagcatctgccctctgttctgcgactactacaaccccgaaggccagtgcgagtggcactaccagccctgcggggtgccctgcctgcgcacctgccggaacccccgtggagactgcctgcgggacgtccggggcctggaaggctgctaccccaagtgcccaccagaggctcccatctttgatgaggacaagatgcagtgtgtggccacctgcccaaccccgcctctgccaccacggtgccacgtccatgggaagtcctaccggccaggtgcagtggtgccctcggacaagaactgccagtcctgcctttgtacggagcgcggcgtggagtgcacctacaaagctgaggcctgtgtctgcacctacaatggacagcgcttccacccaggggacgtcatctaccacacgacggatggcacgggtggctgcatctccgcccgctgcggggccaacggcaccattgagaggagggtctacccctgcagccccaccacccctgtccccccaaccaccttctccttctccacacccccgcttgtcgtgagctccacgcacacccccagcaatggcccaagcagcgcgcacacaggccctccgagcagcgcctggcccaccacagcaggcacttctcccaggacgaggctgcccacagcctctgcctcgctgccgccggtctgtggggaaaagtgcctgtggtcgccatggatggatgtcagccgccctggacggggcacggacagcggtgacttcgacacactggagaacctccgcgcccatgggtaccgggtgtgcgaatcacccaggtcggtggagtgccgagccgaggacgcccccggagtgccgctccgagccctggggcagcgtgtgcagtgcagcccggatgtggggctgacctgtcgtaacagggagcaggcatcggggctctgctacaactaccagatcagggtccagtgctgcacgcccctagcctgctccacctctagcagtccagcccagaccactcctccaactacctccaagaccactgaaacccgggcctcaggctcctcagctcccagcagcacacctggcaccgtgtctctctctacagccaggacgacacctgccccaggtaccgctacctctgtcaaaaaaactttctcaactcccagccctccgccagtgccggcaacatcaacatcatccatgtcgaccacggccccggggacctctgtggtctccagcaagcccacccccacggagcccagcacatcctcctgcctgcaggagctttgcacctggaccgagtggatcgatggcagctaccctgctcctggaataaatggtggagattttgacacatttcaaaatttgagagacgaaggatacacattctgtgaaagtcctcgaagcgtgcagtgccgggcagagagcttccccaacacgccgctggcagacctggggcaggacgtcatctgcagccacacagaggggctgatttgcctgaacaagaaccagctcccacccatctgctacaactatgagatccgcatccagtgttgcgagacggtgaacgtgtgcagagacatcaccagactgccaaagaccgtcgcaacgacacggccgactccacatccaaccggagctcagacccagaccaccttcaccacacacatgccctcggcctccacagagcaacccacggcaacctccaggggtgggcccacagcaaccagcgtcacacagggcacccacaccacaccagtcaccagaaactgtcatccccggtgcacctggacaaagtggttcgacgtggacttcccgtcccccggaccccatggtggngacaaggaaacctacaacaacatcatcaggagtggggaaaaaatctgccgccgtactgaggagatcaccaggctccagtgccgagccgagagccacccggaggtgagcatcgaacacctgggccaggtggtgcagtgcagccgggaagagggcctggtgtgccggaaccaggaccagcagggacccttcaagatgtgcctcaactacgaggtgcgtgtgctctgctgcgagacccccaaaggctgccccgtgacctccacacctgtgacagctcctagcacccctagtgggagagccaccagcccaactcagagcacctcctcttggcagaaatccaggacaaccactttggtgacaaccagcacaacctccactccacagaccagcacaacctctgcagctgctacaagcagcacaacctccagttctggactacgcctgcctgttaccaccaccagcacagcctctgtttcaagaccagtacgcg

SEQ ID NO: 637781 - DNA, 5858 bp, Homo sapiens
  misc_feature (195)..(195): n is a, c, g, or t
  misc_feature (586)..(586): n is a, c, g, or t
  misc_feature (816)..(816): n is a, c, g, or t
  misc_feature (1099)..(1099): n is a, c, g, or t
  misc_feature (1327)..(1327): n is a, c, g, or t
  misc_feature (2495)..(2495): n is a, c, g, or t
  misc_feature (2499)..(2499): n is a, c, g, or t
  misc_feature (2560)..(2560): n is a, c, g, or t
  misc_feature (2651)..(2651): n is a, c, g, or t
  misc_feature (2828)..(2828): n is a, c, g, or t
  misc_feature (2844)..(2844): n is a, c, g, or t
  misc_feature (2955)..(2955): n is a, c, g, or t
  misc_feature (2978)..(2978): n is a, c, g, or t
  misc_feature (5341)..(5341): n is a, c, g, or t
ctcagaggctgctgagggacagggcactcttccccgccgtccacacaatgagtgttggccggaggaagctggccctgctctgggccctggctctcgctctggcctgcacccggcatacagccatgcccaggatggctcctccgaatccagctacaagcaccaccctgccctctctcctatcgcccgggggcccancggggtcccgctccgtggggcgactgtcttcccatctctgaggaccatccctgtggtacgagcctccaacccggcgcacaacgggcgggtgtgcagcacctggggcagcttccactacaagaccttcgacggcgacgtcttccgcttccccggcctctgcaactacgtgttctccgagcactgcggtgccgcctacgaggattttaacatccagctacgccgcagccaggagtcagcggcccccacgctgagcagggtcctcatgaaggtggatggcgtggtcatccagctgaccaagggctccgtcctggtcaacggccacccggtcctgctgcccttcagccagtctggggtcctcattcagcagagcagcagctacaccaaggtggangccaggctgggccttgtcctcatgtggaaccacgatgacagcctgctgctggagctggacaccaaatacgccaacaagacctgtgggctctgtggggacttcaacgggatgcccgtggtcagcgagctcctctcccacaacaccaagctgacacccatggaattcgggaacctgcagaagatggacgaccccacggagcagtgtcaggaccctgtccctgaacccccgangaactgctccactggctttggcatctgtgaggagctcctgcacggccagctgttctctggctgcgtggccctggtggacgtcggcagctacctggaggcttgcaggcaagacctctgcttctgtgaagacaccgacctgctcagctgcgtctgccacacccttgccgagtactcccggcagtgcacccatgcaggggggttgccccaggactggcggggccctgacttctgcccccagaagtgccccaacaacatgcagtaccacgagtgccgctccccctgngcagacacctgctccaaccaggagcactcccgggcctgtgaggaccactgtgtggccggctgcttctgccctgaggggacggtgcttgacgacatcggccagaccggctgtgtccctgtgtcaaagtgtgcctgcgtctacaacggggctgcctatgccccaggggccacctactccacagactgcaccaactgcacctgctccggaggccggtggagctgccaggangttccatgcccgggtacctgctctgtgcttggaggtgcccacttctcaacgtttgacgggaagcaatacacggtgcacggcgactgcagctatgtgctgaccaagccctgtgacagcagtgccttcactgtactggctgagctgcgcaggtgcgggctgacggacagcgagacctgcctgaagagcgtgacactgagcctggatggggcgcagacggtggtggtgatcaaggccagtggggaagtgttcctgaaccagatctacacccagctgcccatctctgcagccaacgtcaccatcttcagaccctcaaccttcttcatcatcgcccagaccagcctgggcctgcagctgaacctgcagctggtgcccaccatgcagctgttcatgcagctggcgcccaagctccgtgggcagacctgcggtctctgtgggaacttcaacagcatccaggccgatgacttccggaccctcagtggggtggtggaggccaccgctgcggccttcttcaacaccttcaagacccaggccgcctgccccaacatcaggaacagcttcgaggacccctgctctctgagcgtggagaatgagaagtatgctcagcactggtgctcgcagctgaccgatgccgacggccccttcggccggtgccatgctgccgtgaagccgggaacctactactcgaactgcatgtttgacacctgcaactgtgagcggagcgaggactgcctgtgcgccgcgctgtcctcctacgtgcacgcctgtgccgccaagggcgtgcagctcggcggctggagggacggcgtctgcacgaagcctatgaccacttgccccaagtcaatgacgtaccactaccatgtcagcacctgccagcccacctgccgctccctgagcgagggggacatcacctgcagtgttggcttcatccccgtggatggctgcatctgtcccaagggcaccttcctggacgacacgggcaagtgtgtgcaggccagcaactgtccctgctaccacagaggctccatgatccccaatggggagtcggtgcacgacagcggggctatctgcacctgcacacatgggaagctgagctgcatcggaggccaagcccccgccccagtgtgtgctgcgcccatggtgttctttgactgccgaaatgccacgcccngggncacaggggctggctgtcagaagagctgccacacactggacatgacctgttacagcccccantgtgtgcctggctgcgtgtgccccgacgggctggtggcggacggcgagggcggctgcatcactgcggaggactgcccctgcgtgcacaatnaggccagctaccgggccggccagaccatccgggtgggctgcaacacctgcacctgtgacagcaggatgtggcggtgcacagatgacccctgcctggccacctgcgccgtgtacggggacggccactacctcaccttcgacggacagagctacagcttcaacggagactgcgagtacncgctggtgcagaaccnctgtggcgggaaagacagcacccaggactcctttcgtgttgtcaccgagaacgtcccctgcggcaccacagggaccacctgctccaaggccatcaagattttcctgggggncttcgagctgaagctaagccatnggaaggtggaggtgatcgggacggacgagagccaggaggtgccatacaccatccggcagatgggcatctacctggtggtggacaccgacattggcctggtgctgctgtgggacaagaagaccagcatcttcatcaacctcagccccgagttcaagggcagggtctgcggcctgtgtgggaacttcgacgacatcgccgttaatgactttgccacgcggagccggtctgtggtgggggacgtgctggagtttgggaacagctggaagctctccccctcctgcccagatgccctggcgcccaaggacccctgcacggccaaccccttccgcaagtcctgggcccagaagcagtgcagcatcctccacggccccaccttcgccgcctgccacgcacacgtggagccggccaggtactacgaggcctgcgtgaacgacgcgtgcgcctgcgactccgggggtgactgcgagtgcttctgcacggctgtggcccgctacgcccaggcctgccatgaagtaggcacctgtgtgtgtctgcggaccccaagcatctgccctctgttctgcgactactacaaccccgaaggccagtgcgagtggcactaccagccctgcggggtgccctgcctgcgcacctgccggaacccccgtggagactgcctgcgggacgtccggggcctggaaggctgctaccccaagtgcccaccagaggctcccatctttgatgaggacaagatgcagtgtgtggccacctgcccaaccccgcctctgccaccacggtgccacgtccatgggaagtcctaccggccaggtgcagtggtgccctcggacaagaactgccagtcctgcctttgtacggagcgcggcgtggagtgcacctacaaagctgaggcctgtgtctgcacctacaatggacagcgcttccacccaggggacgtcatctaccacacgacggatggcacgggtggctgcatctccgcccgctgcggggccaacggcaccattgagaggagggtctacccctgcagccccaccacccctgtccccccaaccaccttctccttctccacacccccgcttgtcgtgagctccacgcacacccccagcaatggcccaagcagcgcgcacacaggccctccgagcagcgcctggcccaccacagcaggcacttctcccaggacgaggctgcccacagcctctgcctcgctgccgccggtctgtggggaaaagtgcctgtggtcgccatggatggatgtcagccgccctggacggggcacggacagcggtgacttcgacacactggagaacctccgcgcccatgggtaccgggtgtgcgaatcacccaggtcggtggagtgccgagccgaggacgcccccggagtgccgctccgagccctggggcagcgtgtgcagtgcagcccggatgtggggctgacctgtcgtaacagggagcaggcatcggggctctgctacaactaccagatcagggtccagtgctgcacgcccctagcctgctccacctctagcagtccagcccagaccactcctccaactacctccaagaccactgaaacccgggcctcaggctcctcagctcccagcagcacacctggcaccgtgtctctctctacagccaggacgacacctgccccaggtaccgctacctctgtcaaaaaaactttctcaactcccagccctccgccagtgccggcaacatcaacatcatccatgtcgaccacggccccggggacctctgtggtctccagcaagcccacccccacggagcccagcacatcctcctgcctgcaggagctttgcacctggaccgagtggatcgatggcagctaccctgctcctggaataaatggtggagattttgacacatttcaaaatttgagagacgaaggatacacattctgtgaaagtcctcgaagcgtgcagtgccgggcagagagcttccccaacacgccgctggcagacctggggcaggacgtcatctgcagccacacagaggggctgatttgcctgaacaagaaccagctcccacccatctgctacaactatgagatccgcatccagtgttgcgagacggtgaacgtgtgcagagacatcaccagactgccaaagaccgtcgcaacgacacggccgactccacatccaaccggagctcagacccagaccaccttcaccacacacatgccctcggcctccacagagcaacccacggcaacctccaggggtgggcccacagcaaccagcgtcacacagggcacccacaccacaccagtcaccagaaactgtcatccccggtgcacctggacaaagtggttcgacgtggacttcccgtcccccggaccccatggtggngacaaggaaacctacaacaacatcatcaggagtggggaaaaaatctgccgccgtactgaggagatcaccaggctccagtgccgagccgagagccacccggaggtgagcatcgaacacctgggccaggtggtgcagtgcagccgggaagagggcctggtgtgccggaaccaggaccagcagggacccttcaagatgtgcctcaactacgaggtgcgtgtgctctgctgcgagacccccaaaggctgccccgtgacctccacacctgtgacagctcctagcacccctagtgggagagccaccagcccaactcagagcacctcctcttggcagaaatccaggacaaccactttggtgacaaccagcacaacctccactccacagaccagcacaacctctgcatgaccatacaaccagcacaacctctgctcctacagccagaacaacctctgctcctacaaccagaacaacttctgcctctccagccagcacaacctctggtcctggaaatactcccacc

SEQ ID NO: 637782 - DNA, 104 bp, Homo sapiens
cggcacactgtttctatatttaaggacaccttcagttgttcataaataaaggagacacaatcactctcatttgcttatgtaaatgaaagtgattgttccccgct

SEQ ID NO: 637783 - DNA, 943 bp, Homo sapiens
  misc_feature (697)..(697): n is a, c, g, or t
gagatctggtgagcccgagcgctgactgggccgcggagaaagccagtgggaacccagaaccataggagagccgtgtccttccgctcggcctgggcgggccccgcgctatggagttcctctgggcccctctgttgggtgtgtgctgtggtctggccgatgttgatcgacacaccgtcttgctggaacagttcaaatcccaagtatccgggaagtgacggactatcatcaatacaatgtgcatgtctgtaatgatcataccgatggagcatcgatcggtccggacatactcgaaagatcagcatctgtggatggacagctggcccatgggagcaaggtaccattatctgtaacccctgtgtggaagcatgaaggacgtatccatgatggtgccagacctcaggtccagaggaccacatgtgtccgctggtcagtgcaaccggcctcagtggcaacgccattgggccggagaatgcttgtctgatgaatgttcctaggcggcttcacaccctgtcgaccgcatgggcaaggagttcgactgaaggtggacaagagtattacttacgatcattccgagagctcatccgatcacgacattgggagaggcgctgctttgagggttggacaggttgcacctgctcatgggggcaagtatcacttcgacagtgccctccaggtcccatggccaaggccagcaggnaagaatgagacttcgcagcagggatggagacctacgaggttgcgggtttcgtactagttagcactcggttccacaggtgctggcgccattgccatcttggacaaatttgtccgtggaacttgtgctggatccctttaccactttcttgcgtgcttggaagccccgtggaggtggggtgccacaacctgggcttaaagaggggacggggccggaaaagagcggagggctggcaagaaccgatggggc

SEQ ID NO: 637784 - DNA, 561 bp, Homo sapiens
agtcaacttcgggccgtaatagtacatctacgagatgtcaccccgaaatcaaagaatatacattttattgcagcaccacaccacacctattccaaacttgaccacatactggggaagtaaagctctcctcagcaaatgtaaaagaacagaaattatagcaaactatctctcagaccacagtgcaatcaaactagaactcaggattaagaatctcactcaaaaccgctcaactacatggaaactgaacaacctgctcctgaatgactactgggtatataacaaaatgaaggcaaaaataaagatgttctttgaaaccaccgagaacaaagacacaacataccagaatctctgggacacattcaaagcagtgtgtagagggaaatctatggccctaaatgcccacaagagaacgcaggacatatcgaacctggacacactaacatcacaattagaagaactcgaaaagcaagagcaaactcattcaaaagctagcagaaggcacgacataactaaaatcagagcagaccggaaggtgcagtacagtacggggtaccgagctcg

SEQ ID NO: 637785 - DNA, 218 bp, Homo sapiens
actatgtactattgtaacttctagttccctaagaggtaccggtcttcagtacaagggggtcctgagttcggtgcaggtggaagagctaccagagaactaccagagttcggtgcaggtcgagtcccattgcgtatgggaccggtgtgcacctgagaactcttacttgagacatcaaaaagaagcagcaggagctcctgggacagagacagcgagcggta

SEQ ID NO: 637786 - DNA, 178 bp, Homo sapiens
gaatacacagcgattacttgaggatccccgtgtatacgagatagccgttaagtaccagcattctgtatcaggccactatctgaacggccgaagatgcccattccagatctgcccatttgatcgaagagcagaagcctggaacagattcaaggcaagaaagtcctccgcacattcgtta

SEQ ID NO: 637787 - DNA, 321 bp, Homo sapiens
tcgagctcggtaccttactcgggagtctagccgcacgagctctcattctaacctgaatcggaggagaaccagtagactaccctgtgagcatcctggacaagtcgcatccgtagtatacgtcacaacaagcctaatcctgaatagcaagtatctccctaatggaaaacaaaatactcgaatgggcctaaggacaaagaagcatatggaggacgacaaaaaaaaggagccaacgaaaacgcgtacgtcgcgaaacgaggacatgtacagagctcgagaagtactagtggccacgtgggccgtgcacccttaagcttggcactg

SEQ ID NO: 637788 - DNA, 225 bp, Homo sapiens
ggacttccaggcgctgtaggaggtcggcgggtaccatatgtctcctttggacctcatgccgggaaattggtcgcgattgtagattttatgatcagaacagggctttggtcgatggacctagacactgaagtgaggagagaggccatgcctttcaagtgcatgcagctcactgatttcatcctcaagtatccggacagtgcccaccagaagtatgtccgacacgcc

SEQ ID NO: 637789 - DNA, 702 bp, Homo sapiens
  misc_feature (241)..(241): n is a, c, g, or t
  misc_feature (246)..(246): n is a, c, g, or t
  misc_feature (260)..(260): n is a, c, g, or t
  misc_feature (262)..(263): n is a, c, g, or t
  misc_feature (266)..(266): n is a, c, g, or t
  misc_feature (270)..(270): n is a, c, g, or t
  misc_feature (274)..(274): n is a, c, g, or t
  misc_feature (295)..(295): n is a, c, g, or t
  misc_feature (297)..(297): n is a, c, g, or t
  misc_feature (301)..(301): n is a, c, g, or t
  misc_feature (389)..(389): n is a, c, g, or t
  misc_feature (408)..(409): n is a, c, g, or t
gcctcgtgccgaattcggcacgaggattgaggcagaatttacatgaaataggtgagcggtgtgttgaagaactcaagcatttcattgcagagtatgatacttccactcaagattttggagagcctttttagatttttctgctcaggctaaaaaaaaaaaaaaacagtttctaaaaattttttttccgggatggtgtaaatccttaatatatggaattttggtgatgcagagaaatactttntgatngtggacacatttcngnnttnaatnaacntctaaaatagtcggtttaacntngttnggattcaaattttggtatttttggtagagatggggttcaccatgtgggccaggctagtctctaactccgggcctcaagtgatctgccnggcctcagcctctcaaagnngttgagattacagggcgtgagccaccgttccctgcccaacacatattaccatctgaaaattgttagaattctgagtgggtgatttatggactgtgtggctggcttatactaaggcttggtaactggtcactatgttaacaaggggtactatcctaataaacggaatacttgggtatctacagagaatattgggcttggagagtaattctcattcaaggatacaacatagagcacttaaatctctgagagatacctcagaaaaaaatccgtattccaaaaaaacaaaacacaag

SEQ ID NO: 637790 - DNA, 149 bp, Homo sapiens
aatagaagagacgagatgaagaagtagagatgctggtggcagggcatacagcaatggttgtatcaactatgaagagctcgtccgcgattatgctgatattggtgaggacgcttcctctgtctccccatcagttccgtgtcgcttgccct

SEQ ID NO: 637791 - DNA, 152 bp, Homo sapiens
gaaagatgggccttggggcccccccttcccccttttttgtccccccactttaaaggtatgaaggcttttggtttccctgggggggggggggggcacccaggggtttcctgtcccctgattttggacccgttgaataaaagggccccccttta

SEQ ID NO: 637792 - DNA, 174 bp, Homo sapiens
gcggtcccagtctcgtccatcaggtgatatgttgtgatcgatatgaaaaatttatgctaatatgcctgaacaaatagaatcacagaagacaaaactatacaatcaaaaattaggacaattttcaagaaaatgtatcttagcttgtttgcaaatttcacattgatttacaaaatg

SEQ ID NO: 637793 - DNA, 741 bp, Homo sapiens
ggagagagagaatgagagagagactgtgtgtgtgtgtgtgtgtgtgtgtactctgtgtgtgtatgagagagagagagaaatgctaaccttgtagcatgtgaagaatgtcgtgtaccttgatacgatagttacataatcagtatattgggtttctagatcacgtgtgcttattggtttcaatctctgactaaaaatacttaaatgtgggtggttaattcttattttagaaattataatttgagtttatattaattgcgggttatagcttacgtgaagaaatctttccagttagaagggaggttctaatattcacatgttctaatactgttgtgttagtgtaaaagcagctaaatggggagatacgtaaagccgtgttttctgcctgtgtggtacagctactttccatgtggtattacacagtcaaatttacatttatctattaaaagtcgccattttattaaacattttcatgcacagtagattcaagtggtgtctgaaaatatctcgttgtgcttttggattgggctgactttaaaaggatttaatcctggggcagacattatgttaacagaacaggctgtgttcaactatatttttggaacctgtgtggggacaaaacatagcgtggttaaacttgaaggtgactgttgtccagggtgtggtgcacatgttcaaaatcctatgggaggagaatttctaagtggggaaattcaaggagggggggggggcccaaattccggc

SEQ ID NO: 637794 - DNA, 141 bp, Homo sapiens
gttccttgcattttgggacagaatggaatctcagacctttgtgaaggtgactctgacttctgaggaagaggccccttttaagaagagtccagatacactttggggggatccaaaagggcgctgcaattttaaaggtcttct

SEQ ID NO: 637795 - DNA, 346 bp, Homo sapiens
  misc_feature (75)..(75): n is a, c, g, or t
ccgtggcaggaatttagtggggcccctggtccggggtctcaggatgggtctggggggcttggtgttcatcaaganacccctttgcccagctcaccacattttcatcacaagcaaaggccgggattgggttcccccatcctcagaattcacaagccattgttccccagttggggaacccaccctcccccctgcctgggttggtgacagagggggtgggacagggggggggggttccccctgtacataccctgccataccaaccccaggtattaattctcgcgggtttggtttttattttaatttttttgttttgatttttttaataagaattttcattttaagccca

SEQ ID NO: 637796 - DNA, 246 bp, Homo sapiens
gagctctccgatataaaatattaggtgcatgtattcatgattagcttgacacttccagcaagagcgaagatggcgataacaacaggaacttcttacaagataagagaaagacccacgtccctccagagtttctgttggaacaggactcttctgtttggcttatatacagttaagttcgtttagtgtctgatccagtgtctgatgtaggcccacgttctcttctttggcctgggcaagtttctcttc

SEQ ID NO: 637797 - DNA, 427 bp, Homo sapiens
gcgtcgacggcaggtgtgagtgcatctgcatgcaaagtcaggtgaagacttttgcaggatggcctggtgtcaagaagggcagcaaagaagccacttctgtccaggaaaaacatcagggacagactggtattctgcaaaaggtacagggattggactgctgaggactgaggtaaagtcattttctctgatgaatcccctttccgattgtttggggcatctggaaaaaacttgtccggagaagataaggtgagcgctaccatcagtcctgtgtcatgccaacagtaaagcatcatgagaccattcatgtgtgaaaaaaacttctcaaccaagagagtgggctgactcacaattttgcctaagaacacagccatgaataaagaatggtaccaacacattctccgaggtcgacgcggccgcgaatttagta

SEQ ID NO: 637798 - DNA, 716 bp, Homo sapiens
  misc_feature (148)..(148): n is a, c, g, or t
  misc_feature (152)..(152): n is a, c, g, or t
  misc_feature (169)..(169): n is a, c, g, or t
  misc_feature (173)..(173): n is a, c, g, or t
  misc_feature (179)..(179): n is a, c, g, or t
  misc_feature (475)..(475): n is a, c, g, or t
  misc_feature (490)..(490): n is a, c, g, or t
  misc_feature (556)..(557): n is a, c, g, or t
  misc_feature (563)..(563): n is a, c, g, or t
  misc_feature (567)..(568): n is a, c, g, or t
  misc_feature (571)..(571): n is a, c, g, or t
  misc_feature (594)..(594): n is a, c, g, or t
  misc_feature (639)..(639): n is a, c, g, or t
gaattgctttcttaatttcttgtttcagctagtttactatcaatatatagaaatgctactgatttttgtatgttgatttatatcctgcaactttattaatttcatgtatcaccctaagaagcttttggtagagtcttatttttttccntgtntaagacaattgtcttanacanggacantttgactgtctcctttccaattcagatgtcctttatttctttctctcacctaattgtcctggctaagactttcactatgtgaaatatgattggtgagaataggcatccttttcttgttccagtaaaatctttttcttgttcacagtaaaatctttcaccttttccacactcagtatgatcttagctgtagatttgtcctttatgtccttctgtgttaaggcatatattttctatactaaattgttgagaggttttttgtcatgtaagaatatttaattttgccaaacgcttttatngtgtttattaatttnatcatatggttttcagtatatatccaaaggaaagaaaatcagtatatcaaagagttacctgcaccnncatgtntatnncancactattcacaatagccaagatntggaatcaacaaaagtgtccatcaacagatgaatggataaagaantgtgacatacatatataatggaatattatttagtcataataaagaacaaaatcctgttattcgtggcaacaagaatg

SEQ ID NO: 637799 - DNA, 930 bp, Homo sapiens
gggcctacaaggctctcatcgctgctcagtacagcggggctcaggtccgcgtgctctccgacaccaccccacttccatattaggccaaaccaaccgcaccccgtgaatttctccgctaaatttcctgcccggcaaggtcccagcatttgagggtgatgatggattctgtgtgttcgcagcagcacacgcccattgcctcactcatgtgcagcccatgcaggcagctgcgagggcaagtcactcccagcaggccagcagcccaaggtggtgccagtggggtgcagcttaggctgattccgcatatcagtgcccccagaccagtaccatgggtgttccccaccttgggcatcatgcaccacaacaaacaggccactgcagaatgcaccggcggaagtgaggcgcaattctggggctgctggatgctatacttgcacgcacgaggactatttctggtgggctgaacgcagtgcaattggctgacatcacagttgtctgcaccctgatagtggctctataagccggttctagagccttctttccgacaggcctttcccaataccaaccgctggttcctcacctgcattaccagccccagttccgggctgtcttgggggacagtgaccctggtgtgagaagcatggccagtttgatcgttccaaagtttgcacgagacccaagctacccaggacacaccacggacagcgaagggcacacggcgccgacgagcagcagccccgagctgaacaaacggacggcgacccaaggcagcatgcccagtggttccgacgacagcacatgggcatgaaatgacaacgagcgatggaaaggtgaagccaagggcacaggacccctacggaacccggcccagaatccattcggcgaccaacataaggccagacaccacagcggcccacaccgagagacaaccaa

SEQ ID NO: 637800 - DNA, 975 bp, Homo sapiens
tggacatgcagaacctaccatttccttcccctgtttgcaattttgtggggaggggaggatgttagtatttacaaaagatgattttaagaacttccaagagatgagtttaagaattccatagagtattagttgttcactgtgtaattaatccttccggagagtctttttatttttttctttttaaagaaactttggggtgggttctggttttttattagttaccctaggggttttgttacccgtggggctatgaagggaggtgaagataacggaggggggagaaacaaaaaaagaagaaaaagaggagcctaaaagggggaatatttgaattggaccagggggtgtgaggctggtccctcagttccccattccaaacggaggatagaagactgtgtatttatgtgacctggcagatctctggggccataacactgaaagttgaaagaccctggtgggcagctatcttgggctacgtgataaccagcagaaatgtcggtaatccggatttcctcaattggaaagggatcagctacccggttaaactttgggaaagccattacctagttccatcaagtacactaggttccgaaataggggttcaacgcacctccctttttcaaattgtccaaatagcattctcataaggtcctaaagtaagatttggccacatatgatcctggggtagaatggcgcacttaagaaactagccaacagttgcgcactttcattgtaacaccatttttcagaacttgggtccaggacaatgggcttttcacctggaatatttcaagaagtgtttattgtgaacccctggattttaaatggagaagtcccatgttacggtctctgacaggccttttgggcgggttcctaataactctgacgatgtgtgttgtcaccaattagggccttgggaatcttaagaccttattgttaaagtgttccccttctctttaaacccggttcaaaatccct

SEQ ID NO: 637801 - DNA, 261 bp, Homo sapiens
acgactcgacatgcatagatgagtagataaatgggcattgggtgcgtgggaaaaaaagcccaccttacttaaagactacatgtgcatgaagacttggcatatatttttttatttctacatttcctctttttcgccacatcttatgcaccatggtagcacacagcctgcgaactaaagcaaaatacacgcggtcagaagtccccctgatggaatccagggcagaaatttcacaaagacatggagcgatacaggacaaactcc

SEQ ID NO: 637802 - DNA, 1077 bp, Homo sapiens
agcagagacagcaggaagaggggagtggaggcagcccattcacctggggcaaatgacctgggttgtcgatggacggtggcggagactcccaagggggacgtgtgacccgttctacttatgactatgagaccgttcgcaatgggggcctgatcttcgctggtactggccttcactcagtgtgcgtgctccatctatccttcttctcagtcagaagagttccgacgtgatgagcgtggcacattacagaagcgcagtgctaaatctacatgacagatgtaggccgctaacatgcctaggccatcgagcgtgtgccaccacactgcactggcggccaggctgggaagccacagtcatggccctgccatctggcgtccgtccccttcttccctgggcgtttagacctttgatccccgtcagtgccagcgcttgggctgactggaagctccaggactcaattgtgatccccctagggtggcattcgcgcaactgcctggctcgtgccacccttcagtgcttatacataaacgcctggcgtcaggagcaccgtcgtgctgtccctcaaacagaaagggatacacggagacccttggacaggatacaccgtgggggagctctcaaagttaagagtcccctgggggggctctgatgttggctgttccaggcgagttcattttcgagccagggctgggttgccctcttgtgtgcgtgtgctcctattggagacgtgtcgagtcgagcgccggctcggctttatacctacctggggtccttgtgcgcgtggacactacaggcgcccttctggcgtgccctctcttggctcgagcgatggcagctgctggctgcggtgggtgagccccatttggtttcgtgggtagggcccaactctcttgacggggactttcaggccggctacgggcgggtcccctgattgtgcctgtgtgcccccagtcgccagatgctctgagcggagagcccccctccgtttctttggtggatctcctggtccgttgagacccggatttgggcttgctcgcgggctttctggttttctgctggaacgtccttttattgcacggc

SEQ ID NO: 637803 - DNA, 258 bp, Homo sapiens
tgctctagagatcccccgaagccactgaacatggggaaaccccacggctaatttttgtattttttaggagagactggatttcaccatgttggccaggctggtctcgaacccctgacctaaaatgatctgcccgccttagactccggaagtgctgggattacaggcgggagccaccgcgcccagcccagttcatattcttaacaagcaaatgagaaagagctgtcaagtgacagaattactgaaaaaaatgaagctctg

SEQ ID NO: 637804 - DNA, 461 bp, Homo sapiens
  misc_feature (24)..(24): n is a, c, g, or t
  misc_feature (140)..(140): n is a, c, g, or t
  misc_feature (145)..(145): n is a, c, g, or t
  misc_feature (282)..(282): n is a, c, g, or t
  misc_feature (314)..(314): n is a, c, g, or t
  misc_feature (321)..(321): n is a, c, g, or t
  misc_feature (328)..(328): n is a, c, g, or t
  misc_feature (410)..(410): n is a, c, g, or t
taccagccaggtgtttacccgtgnctattgataaaaacaaattctgatatcagaggcacatgaaagtgcaactttcccacctggccattttgtaaaactgcaagtatcttggaccttttaaacacaaaatttaaactcanacaanctgtataagtggaatggttactgtttatactgtggtatgtttttgattacagcagataatgctttcttttccagtcgtctttgagaataaaggaaaaaatcttcagatgcaatggttttgtgtagcattcttgtctnatcatgttttgtaaatgactggagaagctttngaccaantttgacnttagagaatggaaatgtaactgttgcttaccagaaaatgtgctattaaacgtgcctgcttaaggtgggttctaatgtttctnggtgaagcacagctaaaaagcgaaaagagtaaagtgtgaatgaaaagtgta

SEQ ID NO: 637805 - DNA, 945 bp, Homo sapiens
cgcccgccatctcctcctccccgacctggcgggcgaaggtatggtgcgctcggccctgcttagaccggaagccggcgcgggctgtgcgcgcctctcggccagggaaggtccgcaccgctgcgaggggtcacggtccgcgagctgcgcgcgtccgggcccatgggtctccatggcgacggcgggagcccggcagccggagcggggccgtggcgctccggggccctccgcggcagcgtggccgtgttcgcctccgtggctgccgtgttcaccctcacgctgccccgctcgctgctgggggagactcgggtaaagtactcgcaggccgcctcctccccgcgccctgctccgggtgcctgcgctcggtgtcccggccccgcgtccctcgctggactcccgtgccggttctgattccaaacagttctctttccggttctggatctggtctctgtgtatctcgagctgctcagccgatgaaatttaagcactgtccactttgcccggatcgtgttacctgtatcacctgtcgtgcccttacagtgtcacagacaaaaaaatagattgacagtagtaaacaaatagcatggagcgttctacatgtgtgtagagacgacacaacgggttattaactaaacaaccttttacagctaggtggtgagttacgagggccactagcggagcaacgtggttgccactggtaaatgccagtaaattcctccgaaaggtcgggaaagccaaccctgaaggtgtaatagcaacaccccggagtgtaagaggacccgcacggcccaaattcaacgggaacccccaccggaagacccgtgtgatcacccccccgcatgtaaaagataacccgttccatatgactaggtcatgtccatgggacatcaaaacacacgaagagggtgcacacacacaggagagagaatacccacacaggtaacagcg

SEQ ID NO: 637806 - DNA, 101 bp, Homo sapiens
gcgcgtgttgtttacgaagcgacacaagccttatcaagagcagccacaaagccagcgtcattgttgaatgcagacattaccagggcattgtattatttaga

SEQ ID NO: 637807 - DNA, 254 bp, Homo sapiens
tgagcgccggaccggaaaggtagctgtactggccatatagactcgtgcaatgagccaggcaagtggccttgagtcttggagataaaatcaacttgtcacagaagaaaactagtatataaaataaacaagaaagtccttgaagctttacagttcatttaggtatgggcttactggactccaacatcttttgtactctttcatgcttatatagaatctgagttcagtgctgcaatacttttcagccaagtaaattt

SEQ ID NO: 637808 - DNA, 831 bp, Homo sapiens
ggactcccattacgcccactgtgcctacgcccggggttgtgcttccttgcgcgcaaccacacaaggctgtgttggttggcctcccaccataggacggctggtcatctttttatgtcgtcttacacttcgtcgtggttaatttatggacgctcgttccatcgcagagagagtgacctttctctcttgccgggagtagagctatctagggtctgccccgctgtggcgtctacgtgcgcaggctacacacctcgcagcactctcgctggattcgcgggagtagtctatccccctcttcaacacgcccctaccactcatcgtgtggagccaggggcacgtcaccaaccctcactgtgtgcaggcacccattgtgtggtgtggggcgatgcggcgattttctcccccccgtgtgagcgcacacgctttgcacactgtcttgccaggaaattctccaccctcacactccttctgcttccgagaaacttgttgtgtcatctactatatcgcccccctcgcgcgcgctcgctttgtgcttagaggtcagagagataggtcctcccacagaagctactgggtgttatctcaccacacacaggaggggttctcccacagagaggtactacatctatctctccgacgggaacggccacaaggaggcacacttgtggagtccgcccggcatacaatgagaggggatctccaccgcaccccaggccgctttgccagcgaaccaaccacccaaggatcccaaggatcggaacccccgggagtaacaccggcccaatcgccccggctgccactcaggagcccagcgcaccccccgaaaacataaca

SEQ ID NO: 637809 - DNA, 420 bp, Homo sapiens
atattttctcatagaatatttttagcacctctctcaaaaatcactatggacatatctagtatcatctagtattttgccatatatctactctatattcattgatctgtgtatgtccccccaggtggtaaatatattgtcttgattactataactatattaataagctttgaaatcaggtacactgatagaagaggccccttaattttctttttccaaattgtttctagggaaaactaagttcctatagtcttttcagataaattttaggcttacctttttctgtatctagaaaaaaattcttggtggtgatatttgataggaattggctcaaatcttcggaagaattgaccttccttaactgtggtatgagtctatcccatctatagaacctgggtatgtttccccctttttgtttaccac

SEQ ID NO: 637810 - DNA, 791 bp, Homo sapiens
tgaagcagtgtgtcttcatggagaatccaaataaaaaccaggcacaggtcttataaatgtaagtggtgacgcagtggttttggttcgtgaatctgacttagaagtggtgtcatctcagcaatcctacattacgcaatgccgagtcatcatgtactgaaggcgaagttacagaccgtgaggaaaattaggaaaaaagagctcaagtaagtgaaattcatcaatctcgtgtattagtcatgaatttatcttcttagacttaaaattctggaacttgtatctgtaatacatcttaattcttgtaaacagaagacataatttatcgatagctggtgtcctttcagtcgaaagttgtaatactgtcgtctaaggagggaggaaaagattatgatataagttttataagctggcaaccatttgagtagtattgatttgtctaaaagaggcttgacttcaagtgggatgaaaatgtcagggaagtgagttaaagtagtacaaaatgctgttgacttagtaggaaccatacaattatgtcctaataagataatatttgattcctacaaataaggaggatttagtaatatctgagggaatggttgatggtgaagtaagactgtattgggcatagaattgtgtaaattgtactgtgaatggtacatatggctgcgaaaatgtcgattgtatacatagaaacggactttttctgttggagccaaagtggccgttgtaaacgtgaacttaaaatattaacattgcctgcgttggaacaaaatatttctttatcacatttatgg

SEQ ID NO: 637811 - DNA, 733 bp, Homo sapiens
cccacgcgtccggaaaagggaacacttctgcactactggtgggaatgtaaactagtacagccactatgaaaaacagtgtggacactccttaaagagctaaaagtagaactatcatttgatccagcaatcccactgctgggtatctacccggaggaaaagaagtcattgtacgaaaaagatacttgcacagacatgcttatggaagcacaattcgcaattgcaaaatcggggaactaacccaaatgtccatcaatcaatgagtagataaacgaaattgtggtatggaatactattcagccataacattgaaacaatggcatttgcagtaacctgggtggaattggagaccattattctaagtggagtaactcagtaatggaaaaccaaacattgtatgttctcactcataattgggagctaagctatgagaatgcaaaggtatatgaacgatgcaatggattttggggacttgggggaaagggtgggaagtgagtgaggaataaaagactacaaattgagtacagtacagtgtacactgcttaggtgatgggtgcaccaaaatctcacaaattaccactaaaaaacatactcatgtaaccaaacaccaccattccccaaaaacctatggaacatcagaaataacgtgaacttaatcagttttcaaaaactcaattcaagatggattacagacttaaacgttagacctaaaaccataaaaaccctagaagacaac

SEQ ID NO: 637812 - DNA, 275 bp, Homo sapiens
gaccttaaacttacccttatgaaggagcagggactcagcacagaattcactttaaacggggctgaaggagtgtccctcctctatgtgaaaagaaaatagttttattcttcattctgactttctaactgtatggctcacttgcagttcgcttgaatgaaagtactagatatgtactctgggatgaagaggtgaggaatgcgcagctcttatcatcgggacatgtaacatgcatggcctccgaatggacatcattgacattaactaccttctgagat

SEQ ID NO: 637813 - DNA, 884 bp, Homo sapiens
tctcaaagggaacaaaggcagctgccttaatggggggccaggggttgggctgattccagttaaagggccacacttttgtattcttggaatgtccccgtcagtgtgccatgtatttaatggcctcccaggttgagggggtggggaaatcttgattttctgttatccctattctgggcagttttgacggtccagtgttggcgcctgggtccgaagggtggatggcaccctcttctagcaacatcttcccgggtctgggaaggggaaaaacagcctcccgctggctcgtgccccccaggccccgcctgcctcttcgctggttggccccacagatgggttgtgggctgtaccccgtgggcgctgttagaaccgcagatggtgttgagaatgtgcgcagcgcagcaggtgtttgtgtcgtgctgtgttctattgcgcccagtgttccaggcaacaaatgtcttcttaagatgtacaggaagccaactcttctgctctacgcaatctgcagaagggccctcctcccagggtttggatcatccagtggttggctgggcaaccaagaaccaacaagccatgtattgattcccaggagtgattgtccccggggacagtgcgcccacagtgtgtcaaaaagacgggggaaatttacccccccaaaaattttgagcagattgaaggggaaaccacgggttcgtttttcgggaagattgggaaaaatgtggcttaactcctgaggatagaacgggggtcttatccctttgttggggggggtcaaaaaacactacatgggggggtaattattaatcgttacgaaggcgtgcccccaaaatacgcgcgtgttcgtgtagtttgcctcaacgtgctaattgggaccgcagttgtttggt

SEQ ID NO: 637814 - DNA, 339 bp, Homo sapiens
gtcgacattacaggtgtaagcccctgtgcctagccagcaatttcttctagaaagtcccagcagaggctggtgatggtgaatcacacctgtaatcctagcattttgggaggccgaggtgggtggatcccttgagcccagcagtttgagaacagcctggaacagcctgggcaacatagggagggacctcatctctatttaaaaagaaaaaaaagaggccgagtgcggtggctcacacctgtaatcctagcactttgggaggctgaggcgggtggatcacctgcgatcaggagtttgagcagcctggccaacatggtgaaaccctgtctctactaaaaatac

SEQ ID NO: 637815 - DNA, 528 bp, Homo sapiens
gcggcgctcagagatcccgggttgcacaaaggatgcattctgagggtagctgcccaggaccacctccaatgaaatattcatctgaaagtatgattgttgtttcagcagcaccttttgcagggccttggtacacttttccagaaccacttttcaggtcaatagctgggagaaataggaagaaaccaatgtgtatctttttctctccaacaaaatgagggtaaaataaaccaagtaaaatgcagacatttctatagtttccatgttaatgtggcacttattctacacatattctatctatcaattatacattatctgtcatttagaaaaaaagcaaaatatagaaatacaagaatacagaaatttgaggtaaagaagtggaacttccagttctgtagtggctcaggtcatggtctgcaaccaccaccatcaccttgagtttatagacacctatcagatcacagctaatcttatttcagaagtgaagaaagagattgtattcattttctcttagtggcagaattcattacc

SEQ ID NO: 637816 - DNA, 1120 bp, Homo sapiens
gccgtgtgcagcggggggtgcccggggtgccctggtggccctgggatggggaaccgcggtggcttccgctggaggtttcggcatgtggcatcctggtggcctgtgggtctgctggcctgtggacggggccggggccgaggccgcggacgcctcgcggagcgcaaggccgacggcactacaggagctggcatgccctgtcaccacagttgggccgccttgcgtcaaggcacatgaacgctcaatgttcccttgcgacgcgacgcactcctactcctcttctcctcccttgcccctactcacagcgacactcacgcacgccactccactcgcactctcccatctcctgggggtggccatcatcgtcagaggactgacggctttctgaacagaattagtggccagggtgtcaggaaggcaggaccccgctgcccgcgccccacgtccgcctccctcacgcgcttctcacccgcggccacctccccgctccggccctcctaccgcgcgcgcatcctacccccctgcgcccccccgctccgcgcctccctgcccgctgcctccccccgctgccctcccaccaccgcccgcgcctggcccccatctcggccccactccccgcctgcgcgcggccccactcccacttcccctgtgcccccacacgcctctcctcccccactcgcgctcccccccctgctttcgcccgtctcctcacctgcgcgctactccttcgcccgcgcgcacccccacaccgcacttccgcccccacccgtctccctccactcacccttgctactcccccttctgctcacccgcgctcgcacccccgcggccccggcctgcggcgcgcgtcctccctcccctgtgctcttcccccccccttcccgctcccccctggccctccccccaccgccggccccccggccccccttccgcctccttccctgcccccccggcctcctccctctcgccccccgcccctgccctccacctgccctgccgctcccgcgcctcctcccgccctccacctgcgccctccccctcttcccgcccccccgccccccctcaacccctgcccccccccccatgtccccctccccctcccccccaccgcccctcccccctc

SEQ ID NO: 637817 - DNA, 830 bp, Homo sapiens
gggtgcttcttttggcaaagtactatgaacgtctcgaagcagtattctaggtgatgaagaattcttaacatagccggaagcgcccgcacgtgtgttgcccatgttaggtgcccctttgctgtgtgaaaaatctgttctggtagctccacaagagatgatgatactggagcttttttaaatgttcttctacaatgagtctgtgattctcatgaatatggctctactataatggtccgtcaaatagaattctgccatctgaagccatggagcataagcagatattatattgtgaggtaaattataatagttaaagtgttaaaaatagttgggtgatttagaccaaaagattcaaagtctcctcgttggggaaatcctcgatctgcattttgattgtgtggattattgtggatggtgtccccgccgttagatgggtggtaaggtgtagtttgacatcgtttgatacgaggtaaatgctgatttgcaaaaatcatgaagagtttttaaggagtatcgactaagattttgtccgccctggcaactcgaggctgtgtgtccgtcatcccatcccccggttgtggagcctgctcgtttgagaatccgctgcgcaacatcaaggaggtatatggtcttcgttctgtggagtcagaccgggagtgactgggagtcccgatccaaggcggtgcggggcacacaaccggtgtgttgtgggaatgggccccaccatttccttgccaccccacaggaaaaggaagctgtgtctttacaactggggattgttttcaaacgccgggacgcattgggaaaacagtcagttttggcctacaaaaaat

SEQ ID NO: 637818 - DNA, 472 bp, Homo sapiens
gaccgtactcgctcgcaaacactctcctcaggaaaatgagcattgtaaacttaaaagtttcttaaaaaaatgcataccttgatttacacatattttggtaaaaaacctgtacaaatggaacttccaggacaaacaccaacactatcagatttctttctttttttttttggggaaacttagtctcatttggtcaccaggcgggagtgcagtggtgcgatctcggctcactggcaacctcggcctcccaggtggaagtgattctctggcctcagcctcccaagcaagggggcatacggggcaccaccaggcccagttaattttggctatttttaagtaaagagagggggtccaccatggtgggccagggagggtctggatcactggacctcgggatccggccggcagggcctcccaaaggggcggggataacagggcgtgaaccacggggccgggccagggatcataaacctcg

SEQ ID NO: 637819 - DNA, 854 bp, Homo sapiens
agcgggctcctcctccgctccgccagtgtccgtgccgcgggccggccttagtgactggtggcggcgtggccccggtggccgcgtggtgggtgcgggcagtgcggactgccggccgagggctgctgttcgtacggcgtcaccaagcttctcccgggatgctgagcagaccgcccgcgaagcctgccgatgagagcactccatcgcccgcgctccccggccgggcggcacgcacagactgaattgtgcagaaagcgtgcatggcctgaccgatcgaggcgacagacagaaagggcgcccccctgggaagagacggtgggagcgcccatcggttcccgggactcagccttatcacaggacacaggactgccagacttcagcatttttggacaccgagtagtgactgggtcatcacaagtggctcaagaacagacacaggcggacgcggcctctgctgtggcataaccaactggaggacgagaacctacagagaagaaccgcatgaggctttacaccacatgggcgacaggtaacaccggaagattctggatcattgcaagagaagatatcgctgtgcaggacgaacgagcgtgcaacacgtgcaggttaccagcaggaagttcgggaaggcaatttagataaaaggagactacagtggttatagccagttggaaaccagggttcactttgacaagggcgaaacgaccagaaattgggcgtgaaccttggacaacagcaagcaaagggaaataacacacgcgaagggcgtggttggtgagcagcattttgggaaatggccattgtactcccagggcatggagacggtctatctcaggatgaactgtggtgaggagaca

SEQ ID NO: 637820 - DNA, 793 bp, Homo sapiens
actagttctagatcgcgagcggcgcccttttttgtttttttggaaatggagtctcacccttgccacccaggcagtagtagcacgatctcgactcaccgcaacctccgcctccggggttcaggcagttctccgtgcttacagcctcccaagcagttgaaaccacaggcgcccaccatcacgcccggccaatttgggtattttatagtagagacggggtttcaccagttgcttggccaggagttcaagaaaagttttttaaaaataataaacctctaaaggtgttaccctaacggggtaccttacagctgatatggtgacttctctagtcactccacattatccagtggatggcacctagataataagtgcaccaaaagaaaagtaaagaatggcagacttctagaagcaatggatgaaatataatctctcagtggcacgaacatgatgatcggggtcattatgcaaagttgctttcctgccggtttttcttccaagttctgggcatggagcccaacacatccgatagcatggaagtggaagttaacactcccgatgaataattttgatacaaagttataaagcaaacccaatctattaacctttgttgtgcaaatgccactttaaacttctagacggtggatagtaccgcattagcgactataatccccttggcggtgctgcttgctcggaacttacgcaatgaccacgggtatcaccggtgattgcactattcccttacaccgcttttgccaacagaagcttccaaattttccagctcaggcttaccccaacg

SEQ ID NO: 637821 - DNA, 655 bp, Homo sapiens
tattgtataaattagtattttaaattttttaaagattcctccctttgtctgggaggcttaggagggcagatcacaaggtcaggagaccgagaccatcctggctaaacacggtgaacacccgcctctactaaaaaaaaccaaaaacatttgcaaataggtaaaggatgtaaaataagcaaagggcttgaatagatatttctccatatacaaatggccaaaaagcacatgaaaagaagttcaacatcactaatcatcagagaaatgcaaatcaaaactattatgagataccaccttatacccattaggataactactatcaaaacacagaaaatatgctctctacaggtgctgatttacccagtaaactcaaacaaatttttcgaaaagaaagatattgtcaattctaaatttttccttttgaaatgtataaatgtttcaggcaaatatttttataagtcttgtcctctttgtatcattcaggataattttcttcaaaaaatatttttacaagccaaaactcatctaataagatcctaattatgattacgttgaacattttaccagatgtagatgttacaattataggctttctcaatttaatttgaatagtgcgcaaataataatttggtggattaaaataaaggtctagatgttg

SEQ ID NO: 637822 - DNA, 797 bp, Homo sapiens
tactctctctacaaggttttttcctagtgtgcaaagagctgttcctcttcggactaacagttaagtattacaatggggatttagagggtctctgtgggccatcatgtctagagcttgaaactgaagcattcgtatctctggcaccaagccgagcgtatctacccactgctggtgtcgctagcaggtctgcgcgccgttatcaccaaggaatgcacatcgaagacaaacagatcgttgagaccttatctcctacttccacagtcaactcaggacgtcgatcaacttagcttgacaatcgggctagtctagacaccataccgaaccacctgtagcattccatgcgacatcgttgtcaccccacggccggttcttctcaaacagcgcaatacgtattatatcgtagctccgcggtccaatcaatccaacaaacattgaacaagtgaactaattataattcgacatgggatcatgggaggtacatacatcaaaagaacataagcatcttcacatttacaggcgttccacatacaactcattcgggcaagttcgcataaggcaatttaagtcaaggaagatatcctttttccatcgacaaggtttttctacatgcccaaaaggagtcatcattcattcgaaaactcggcaagacaattattcagtactacgagtaactgccatggaaggccgttaagttctattgaacgtgtaccattcggcttggcattacctggaggaaaggcggcccgtataggcacatccgagattcattccttgctccagacacttattgcacatta

SEQ ID NO: 637823 - DNA, 311 bp, Homo sapiens
gtgtttttactacagataacctcttacacttttgacgggcgacgccgcatctaccattagcagtgaggccagcgtttgctactatagtcagtatccttacttagtgtatgccactggttgtgaggttgtcccacgagtctgagtaaggaccccaagagctattcctgccctctctgtgacgtgtaaagagaagttttgtcctatgggaaggcttagggctggagcttgagtttgttccttccagtgcccagacttcagggttgattccctcctcaagcaggggacaacaaatgggtaacttgtttcccata

SEQ ID NO: 637824 - DNA, 109 bp, Homo sapiens
cgttactccgtgactcaacacgtccagaccacggctttgggggggggctcacggtctgggacgtgacgacacgggcacgggcccatcccatcaccccacgtactggaca

SEQ ID NO: 637825 - DNA, 304 bp, Homo sapiens
ttctacatgggtgcatatatattacaactgtatgccctctggtgaactgacccctttctcattatttaatgaccttctttatctctttttacagtttttgatttaaagacgattttgattgatataaatatagatactcctggtctctgttggtgtctatttgcaatgagtatctttttccataccttcagtttcagtctgtatgtgtcctcactagtagagtgagtctcttgtaggcagcatatggttctttaaaaagaaaatttattcagctgtcctgagtctcttggatgtagaaccgact

SEQ ID NO: 637826 - DNA, 333 bp, Homo sapiens
gaagaaaagaaggggaagaagatcaaaacccaccatgccccaggctcaacggcgcgctgatggaagtggaagagcgcgaagtcttacaggactcactggatagacgttattcgactccgtaaatgtactttgaactacctgacttattccagcactacagaagtgtgttttacttacccgaggcacagcacataaggttcgacctttacgtgaacaataggttttagattttgacggtgacaggtctccacctggtgttgaaaatgggagccatgttcccgtgataggtatcctttaacattaccagagatgtgattaatgtaactaggcctt

SEQ ID NO: 637827 - DNA, 409 bp, Homo sapiens
aactcactgaaggggagaagtagaaaaatgctacgacttatttatgcagaagacggtgatgatagaatttggttctgtatagatgatgggagagttaatagaagagactctatggccacatatacatttaatttagatcattcccactgtgccataaagagtagatttaagacgggacaaaactatatccacagagtaagctactacagttgtccatgtgaaaaataatgcagcatctgaaagcaggggaggaaaacagcaagagttcaaaaatatttaagaggtcaaagtaggcagaactagtaatgcattagatgcaaggtacagcagggaaatggagtgtttgaatttcacagggtcccagagagcaaacataggtgtttcctttcatcgatcggggtccgagctc

SEQ ID NO: 637828 - DNA, 235 bp, Homo sapiens
ttgaggatccgccctggtatcccacctggtcctcttccttcaagggaccatgaggactctattcttctccgtactgaggttctctcaacagaaagaagtcgcaagtgggactcctcatgccaccctcatccccaataggcaacaattaggccaggccttcgactgtcacctgagcgagcgggaccacagcacgccctcgtgaggaacagctaggacaaacaccctagcgcaggct

SEQ ID NO: 637829 - DNA, 839 bp, Homo sapiens
  misc_feature (839)..(839): n is a, c, g, or t
tctgctgccaacagtctctcctggcctcggagcttaacttctgtctttggaagttactactacacccctgaccttcagccagaatggaaggcaagatggggacacagaacgggtttatcatgacgacaaatacatatttaaacaagggaggagggcctggtttatacctctccttatccattcaactaaaaataaagtagttaattctgtctttgtgtcacattctttagaactttctatataaaatgaccccttatggttttattttcattcatttatcccttttgttgtctctttaataatcttctagattcttaaataataatattatgacagaccctggtctcctgcctctatttacacacctaccgcaatcaatcaacgcacactagatacacacaaccgcatactctccgtcttcccctcaccaactcccccaacttcaccctcctccaacccaacccacccactcacattatacccccataatccccactccccccaataaattacttccaatccaatttataacacttactctctccaccctttccaaccaagcctctcccccaccccacgtttttactttctaccaaccgcccccatctccgtcctccccgacctctacctcccatatatataactacttctcacctaatcctctctcattgatacttctcctcgcatcccgattctaccaaatcttttccaccctatactcccacttctataactcataattttaactaccccaacatcgacctaaagatcatattcatacattgcatatattataactacctattacctaatatatcttacctccacactccctcatn

SEQ ID NO: 637830 - DNA, 214 bp, Homo sapiens
attagtgcatactctaggcctggttctgctgctggttgctggtccatcagcgccgcttcactcttgacgtccaggactgttctgacctggtggagcacttgccagaggttgctcttccccaggagggatgggccctgtgtctcaggagtggggttgggggacagccttcagcagcagctcacacgctaccttccccagacttgcactggggtgg

SEQ ID NO: 637831 - DNA, 545 bp, Homo sapiens
  misc_feature (545)..(545): n is a, c, g, or t
ggtacgccgagtgacagagacgctcaggcggtgttctcaggatgagcgagtgggagacagcagcaccagcggtggtagagaccccagacgatcaacgctacttgggaagtggagcaccgatgatgtgcatcatcaatgacatttccctgcaggattgacatggcgagtgaaggagaagtatgccagagtacctgcctcacagggcagggcggtatgccggcaaacgcgttccgcgagaagctcagtgtcccgatcgtggagcgcctcactaatctccatgatgagtgcacggtccagcacacaatcggcatagaagctcatgactgtgcgctatcgtcaatgcatgcgcttcgaggatcagtacaccatgcatcactaggcggagaacgcctcatgcaaggtcctgagtgaagcgccagtcatcaagcatgtggtgccccgcggaggtactccatgacggcatttggcgctgcgcacggagactgtcgagaacgaacagagactcgtggattgtggtcacgcaccctggcagccagtgatgaacn

SEQ ID NO: 637832 - DNA, 242 bp, Homo sapiens
aaaaaaacaaaaaacaaaaaacaaaccacattttttttagagacaagggttttgctatgttacccaggctgaactttttaagtagaggtatactcaacataacaatgaaaaggtataatatagtaaacagtaaaccacagtaacatagtaattttttgtcattataagtagagtattatgtagtgtacataattgttctatatttggatatgactgtcacatactaggttgtttataccagc

SEQ ID NO: 637833 - DNA, 117 bp, Homo sapiens
tgcgcgttccaaaactgatggaagcaatctgtttaacaatctcagacaggactgtgcaagtcacatgagtcgcttgtggggggctcatcttggaaaggatccccacgtctttagaac

SEQ ID NO: 637834 - DNA, 441 bp, Homo sapiens
gggtgttcacggccggctagacattctgtgctcgtgcaggaggagggctgctaccatcagggacgtgcacgatttcccgcgaggcgataaccgaaggattggcgaggaagtactataatagcaagagttgagatggatacgtgctgggtactgaaaggagagaaagggagcggcggcacaccacggctagcgcgctcgcagacgcaacaaacaggaccaggtgcacgtctaagggccggacaggaaagaagggcaaggtgagaaggagcggtcgggactgacgaccaggaggcgatcccacgaatcatgaaagcaaagagagcgaaccggaactgaacagaggcccgtgctgagaggagatcgaagctaggtcccgagcgaggcaggagcacttgcgccgtactacaactgtagagacagaagagacagagagctggccac

SEQ ID NO: 637835 - DNA, 220 bp, Homo sapiens
atttaagggggggtcctcctcaggacagtctggaaagtccatggcctgatgcaggttctctgtagcttttccccttggtttataaattggaaagcaacttgaggaggaaataagggacaataaaaaggagccatcaaaagagggtagtaattttctcgaacggggaaggaaaacacgggagtaataggagaaattatagcttgctttggtcaaggatttt

SEQ ID NO: 637836 - DNA, 108 bp, Homo sapiens
aggggagcgtaacaacccacccggcgggcctaatgcgccccttcaggggcggtctgtagcgggttttttccttccccactgggcgggttttacacgccaaatcgataa

SEQ ID NO: 637837 - DNA, 204 bp, Homo sapiens
ctactacagaagtacatgctgttgtcttcgtgtatgatatgaccaacatggctagttttcatagcctaccatcttggatagaagaatgcaaacaacatttgctagccaatgatataccacggattcttgttggaaataaatgtgacttgagaagtgccatacaggtacccacagacttggcacaaaaatttgctgagtccacta

SEQ ID NO: 637838 - DNA, 577 bp, Homo sapiens
cctctacggctccgactacagcgtctacactcacagctacctgtgctttggacgggaccagatgctgagcaggctcctcgtggggctggtgcagagccgcccggctgccctgctccgtcacccgtgctacctcagcggctaccagaccacactggccctgggcccgctgtatgagtcaccctgtgtccacgccacgcccccgctgagcctcccccagaacctcacagttgaagggacaggcaaccctggagcctgcgtctcagccatccgggaacttttcaacttctccagctgccagggccaggaggactgcgcctttgacggggtctaccagcccccgctgcggggccagttctatgccttctccaacttctactacaccttccacttcctgaacctcacctccaggcagcccctgagcacggtcaacgccaccatctgggagttttgccagaggccctggaaactggtggaggccagctaccctgggcaggaccgctggctgcgggactactgtgcctcaggcctgtacatcctcaccctcctgcacgagggctacgggttcagcgaggagacc

SEQ ID NO: 637839 - DNA, 166 bp, Homo sapiens
cccccagacctgagatcaagaagacccgtgtgaagctgccctccggcaccaaggaaggttatctccctcaggccaacagagctgttgttcgtgttctggcttgtaaatagccttgtggacaaacccatcttgaaggctggccgggcgtaccacaaatataaggcag

SEQ ID NO: 637840 - DNA, 359 bp, Homo sapiens
gccatttttgtgttgctataaatacccgagactgggtcatttataaaggaggtttaattggctcttggttctgcaggctgtacaagcatggcaccagcatcttggctgggcttctcaggggcctcagggagctttgcaagcacatcacatggcgagagggggagcaaggtgcggggaggtgccctacaattttaaataaccagatctcgtaagaacttactcattatcacaaagtcgacaccaagacatgatggatctgcccccatgacctgagcacctcccagccggccccacctccaaccttggtgattacatttcaacatgagatttggggaggacatatcctcatatctggtggt

SEQ ID NO: 637841 - DNA, 117 bp, Homo sapiens
tcaaaacctgatcgctattaacctgtctggtttgtgtctgtagtgatgaatgatctcgagctgtggtgagggaggtgcacttggtgtatcagtgcttttgaaggtgaatttccttgt

SEQ ID NO: 637842 - DNA, 1114 bp, Homo sapiens
  misc_feature (241)..(241): n is a, c, g, or t
  misc_feature (472)..(472): n is a, c, g, or t
  misc_feature (705)..(705): n is a, c, g, or t
  misc_feature (997)..(997): n is a, c, g, or t
ccatactgtctccttgttttcggaagagcgtagataggaaggtggagctctcccaagttgtctagtgcgtagctgagtggggtactaggtagtacttgtgcatacatagtgcagtacggcacactaacacagctagaggaccctcgtgctcggtgcataccgtcacatacggacacgtgtgatgatgaggcgctccaagtaaagggcatcttgtctatgcgaaatagattgctcccatganaatattcctaagcgtgcagaagtagctacttcgatgctttcttggtcttcagcaggcgttgaggattactaagacgcatcgagacaacgaggactaagacgtttcagtatctcagtagatagagacactagacactactacatagcgggaagagcgcgcgagctcatctcgtaatcgggattaaatccccgtccgagtgcgtgtggcccctcatcgctctatcacgggttntatctcaccgcggtgtcctctatgtgttcgcatatggtgtgtgtggagctcccactatattgctgtacaggatcccgagctaccctcctgtgaccgattatctataattgggtaccctccgtcgggccgcagatagcgatctattctgctcacagacaaaaaggccatgctgtcatggtaaagcatccgctgcgggaaacagcttataccctaagggaccacatctgacacantgtgcaggagagaaccagccgctacttaagcaagcagaaaagaagtgggttgaacaaccccgtgtttacgctataccacgtgatgtgtggtgttagcataagctaagatgtcaatatgggtgggagtaactataagaaatacttatgactcgcgttaatctggcgagtggacactctattgaaaagtcgcgcataacgcgtcaggacggtggatatttcgaaactattgtataggcgcatatgtcgatttaaaatgcgggttaggatgaaaatagggtggaaaccgattaanggcggacttataactaagcaggatggcaactctgactattggcaactgttgcacgagggattgttatgggaagaaaacgcctttatttgggccaatacagtcgttagtggacaaata

SEQ ID NO: 637843 - DNA, 437 bp, Homo sapiens
gtttccactagcatattaagtgaatgcttagcaaggtttgactgtatgctggtttatgtcagaaggtgatattgaataatgcttgatgcagaaccgaaacttctcatttatctgtatattatgttaacttctaacggatatatgcacaaatgggcacatttttcgtttaaagtgaactacagctgtactgtgaagagagttctatataaagcctgtaggtccttttaactttggtttaaaatgtaagataggaacatgttggatatttcaggccacgcttcatatatttctattgcagtatccttttagatgcagataaaaaaaatgcatagctataacagttttcctcatataaagtccttactaatatgataacgagcacggtgtaaggtgcttgaacacaacagcgggaggcttataggggtaccgagcgcgaa

SEQ ID NO: 637844 - DNA, 884 bp, Homo sapiens
ttcattgccccacaaacctagagcctacccgccggaggtagctgatcattctatttccccctctattgatccccacctccaaatatctcatcgacaaccgactaagtcacccaaccaagcaagtgactaatcaaactaacctcaaaataaatgataaccatatcatcagacgatctaataggaccgaacctgagtctcttatactagtatccttaactcattcttattgctcaccaagcttaagcctcctcggagtcctgcctcactcatttatcgaagccaagccactccaactatctattaacctagtccatggcatccccttatgagcgggcgcagagattataggcgtttcgctctaagagttaacaaatgccctagcccacttcgttaccacaaggcaacacctacaccccttatccccatactagttattatcgaaaccatcagcctactcattcaaccaatagccctggccgtacgcctaaccgctaacattactgcaggccacctactcatgcacctaattggaagcgccaccctagcaatatcaaccattaaagcttccctctacacttatcatcttcaccgattctaattctactgactatcccttaaaaatcgctgctcgccttaattcccaaggccctacggtttttcacccactttctagttaagccctctaactgtcacgaacaacccataaatgaacccaacccattcacattgcctaatcaaatatttaaaaaaccaaacccattgaaccccttaacaaggggcccttctcagacctccctaatgaactccgcctaacaatgtgattcacttcacatccacaaagcctcaaatagccactaacaacctacattcccacaatgcgcgta

SEQ ID NO: 637845 - DNA, 325 bp, Homo sapiens
ttttataaattacccagtctcgggtagttctttatagaagtgcaaggatggactaatacaaaccactatctttcatgaacataaatgcaaaaattcttaacaaaatattcacaaattctaacaatgtataaaaaggattttaaattgtaattgcaaccaagtgggatttattccagatatgcaagtctggttccacactcaaaaatcaatttatacaatatattgcatcaaaaggctaaagaagaaaaattatattattatgtcagtagatgcggcaacgtacctgcataattcaatactcattcatgataaaaaaaaaaagtcg

SEQ ID NO: 637846 - DNA, 630 bp, Homo sapiens
aaccgcattcttatgggcaaaaaacccgtgtccaaagaatcaagggagttaaaaggccagcttctcaatgggtcccaattgttgcatgtgagggaaaggcaacctcctctcctctattttttttacgatggcacacactcagggggtgggcctgtttcgtggcccaaactgtggcatttcctttgtcactctggattccagtgtggagacttctcccttatagggtgcacgctccacaggggtaggtgtgcaagtccgatctcgcggctttatacgtttgtaaatatattcagcagatggttttcgaggaataagcttcacatctcctgcagtgacactgaacactccgtcttcatataccactttgcctcttgaaatagtcacaaggggcaccccgtgcaaaaccatgccctcgaaaatgttgaagtcaacagcttgatgatgagtttttgccagcatagaccttgcgctattagggtcgcacataccggtgctagcatgggctggcacagatattctacctaagagcgcatatcaatgaaacatgttgcaatgcgtttgtgtatgtacactccacagaaaacagatctcattcatgttggctacatgcaaaaataattcccagttgtc

SEQ ID NO: 637847 - DNA, 977 bp, Homo sapiens
gctcagataccccaagcaatacctgcaatggaggattcttcccggggtagaccgctagccccatcggtcatggctcacgagttgtgaactgcaaaatccagcctgtagaaacggtggttgtgtacatcaagcccacctgcccgtactgcaggaggtgcccgagatgatcctcagtcaattgcccatcagacaagggcttctggaattgtcgatatcacagaccaccaaccaaactaacgagattcatgattatttgcaacagctcacggtagcaagaacggtgcctcgagtctttatcggtagagattgtataggcgggatgcctgtgatctagtctcttttgtcaatcagacggggggcgaacctgactggagcgctggactagaaagccaggattgtgagctctgacgagataatccaccaggatctctatgagtgaagatgttcaccaattctgtgaaaggtctgaggacccacattggagaacatctatttgaaaagcctaagtgggttctctggtgtcatatggatctagaggcaacaagtgcctgaaggctgtgtgtcatgcggaaatactctgttatgttagagatggctatccaggatcatcctgatcactgtggatcaatgtcatttaagactaccagcaatgattagtgcctgcattgtactccgtctgatttaatcgttacaggcccctacactaggaggtgtctctgttgacgagagtccttagcttgtgaacacttcaagaatcctttatcatggaagttggcgggtctagaattggggattgttatcttcagccctaggacaagactaagggtttccattaaaaaccataacggtcgtgttggcatcttccggtccagaataggagttgcgaacacaaggggttgcgccacaaaaacgcggggccgcggcaaaagaaaagggcccgaaaatggcggaagattcttggacaccactggatccgc

SEQ ID NO: 637848 - DNA, 689 bp, Homo sapiens
aaacacaaaaaactaagttgctttctttttttcaacactgttactacatttcaactctgcagaattgctgcagagcacgatattgaaagtttcaatgtcgtttagagggagggatgtgaattatgaactcgtatgtgacaataaatgaccaccaagtactacctgacggggggcacttttcactttgatgtctgagaatcagctcaaggcatatgcacagttggcagagaaactgagagaaaagggatggagaagagaatactcatttatgtccagcgtttttctttttaagatgaacttttaaagaaccttgcgagttgcgcataatgacgttataacctgtgtgatattcctgcaccgtttatccaataacattgtgggcaaggtttgggggactgaacgagcctaaataaatgtagcaaaatttctttttaaacttgctaaactctatggcatttataagcgtatgttcccttcgaaattaaatttgggctttctaccacatgtgtcaccggcccgtcattgccggctcttagagaccctcagaaatttctttagagttcatgccagagagtgccctaaagacacttatatatgtgagcgagagtttttttaaacaataccttattaatcgccccattaaagggattttacaaaggccttttttttctatttcaccaccgacttgg

SEQ ID NO: 637849 - DNA, 860 bp, Homo sapiens
actcctgtggtccgcggcattgtgcgcccgtggttcgcctggggcctggatctatgttcccccgcgcccatgtccgtctcccctttgcagggattccccggggtctttagagcgacccaatttccccgagcggggccaaatcggggtatcccgtacctggtgtagccgccctgggtgcgggtaacccccgcgctggttgccctcccggggacccctggggcatctatgtattggacagttcccggcattccggggcagcccactttctctgggcgccgctacccccccgttgtgcgattgtcagagagtcggagggcccccatctccccgaatctcgggcatggcccttcttgctgtgacacctatccggcaaccagtcctattgggggccctccacctataaagcgttccatctgggggctccccccccagccctcttggcatacagggcgtgatctccgagcttgttccttcccctggtaaggacagcatcaccctgttggaaactgtcacttcgacacactccacgcccttgttccccatacctccatcacgttgactgcggcggctgtgtcccacccgagggtcggcccctcttggtctcccaccgctttgaggaagagaggtgtgtacatctgagcaccagagtgcggtcaattttatgattggcctcctccccaacacaggtcgaaacaactcgcctctgacaaaacaccctggggggccgaagatcatgtgaaccagggaaccattatacggtaaatgccagtattgcacacatccatcgtcgtagttttccacgagcccccccgcctttttggaaaaccccccttgaaaacgtttttcccaccacaaaaaca

SEQ ID NO: 637850 - DNA, 952 bp, Homo sapiens
gaatcgatgtatatagtattgaaggacgaacaagggcaggatgctggcgggctcctgcgggagtggtatatgatcatctctcgagagatgtaaccctatgtatgccttgtccgtacctcactggtgatcgagtcacctaaaccatcaatccatcttcccactgcaaacccaaccacctcagctacttcaagttgtcggaccgcatgtggccaaagctgtatatgacaaccgtcttctggagtgctacctttactcgatccttttacaaacacatcttgggccacgtcacgtcagatctaccagactctgcgagaggtgacgcattaccacttactaccaaggttcttggtttatctgctgccaccaatgatggtcctccaaactttcgggcttatgaccctcaacctattcaacgcacggtccaggtccacacgaggatggacgctacggcgaagtacggagaccctcaaaacccaagggggcccaacaatccttggccaaccagagggagaacataagcaccggaggtaatgcacgccccgggatactgcccgaatgacgacctgcccgcacgccataccggaaggcgaggagagcgggctcttacaccgcgccctatgcactcaatccgaacagacactaaacgcaatcacaacatgacacacgagatagaggtgccaaaaataggcaggccaccaaagacggaaggcaggcagtcgcacagggaaacccaaagcacgacacaacaaacaggacaaggggggaagactggccaacgcctgagcagacggcacacaccaagacggcaacaacgaacggaaggaagagcagaagaggagacacagaatagagcaaaacaacaaacggaaaaaacaacacaacaacgaaaaaagaacaaattcatacacgatcagtgaccaggagacagcaagagggagacaagaacagacag

SEQ ID NO: 637851 - DNA, 769 bp, Homo sapiens
  misc_feature (485)..(485): n is a, c, g, or t
cgccccttccccaggcccaccatcaccaccgccgtctggccaaacaccccatcttccacctgtgccctcaccaccacactacacagcacaccagccgctgcagggctcccatgggctgagtggggagcagttttcgccctggcctcagttcccgagctccaccccgcgcagccagcgtcgatagcgacaaatggcgctactctggacaaggctaaaatggcacttagccgctccctgcaccgtgtctgtgtacccaactgcctcttgtctggtggggacagtcgctctctgggcttgaggtctgtggtgggctgcccttctcgtgctctcttcgactggtatgcccctctgtgattccctatagtggggcctggcgaggtggttcgccctggccttgtacaggtgggcccagagcctcgtagtctcatctcgtgggcacgcgcgcataggtctactgtcgctggcagcagagggtgtggccaacnggagggtggggtgactggcctcccaggattccccccagcacaaaactgtctttgtacaccacgtggggctcacttattcatccattccccaagttccctagatccccgtactaggttggacagcccccttcggtacaggaaggcaggaggggtgagtccctactcacctcttcatgtggcaaagccccttggcctcgactgggatctgagtacttattgtggtgaggagatgagcattaatggccagggagccgaagagcctggtggcggcactgaagggggtg

SEQ ID NO: 637852 - DNA, 219 bp, Homo sapiens
actatacgacggctgggaatggggaaaggaaggagaaggagagactatgttaaaggatataaaattccagctagagaggaggaataagttttacagtctacagcactgtgggatgactataggtatttaataacattcatatggctgggcatggtggctctttctcaatacagtataaaggcttccctgagtctctcagacaggcctgttgaagcatct

SEQ ID NO: 637853 - DNA, 102 bp, Homo sapiens
gtgtgtctctagaggatccgtagcgtcagccaggacatgcacacttcccaggtttcatgaacttgcccatttctggcatgcaaccaccctgggcctacatgc

SEQ ID NO: 637854 - DNA, 533 bp, Homo sapiens
ctgaagcaagcagatcacttgaggtcaggagtttgagaccagcctggccaacatggtgaaaccctgtctctactaaaaatacaaaaagtagccagccgtgatgacaggcacctgtaatcccagctactcgggaggctgaggcatgagaattgcttggacccgggaggcggaggttgcagtgagcctggatcgtgccactgcactccaacctgggcagcagagcaagactctgtctcaaaaggggaaaaaaaaaaatggctgatgtgacccatgaaggggaactcattttcctcgtaattttggactggccacacattggtgtacctttaggttctctgacaggcccacggtttttatcatttaagacctattggtacagctagtagaagctatcaggtacgaggtccatgaaaccttcggtaaccacagggactacaagtcgtactttctctatggaactcataggtccagaatagaagatgtcatggtacactttattcccctacacacgtggtattgccctggatggtgca

SEQ ID NO: 637855 - DNA, 363 bp, Homo sapiens
ttaataggcagtaaaaaaggttatggtttattaatggctggacacccgtgggaaaacaaataagcaattggcaccaccaaattcttattacattcaagataaaagatttattcacaccacaaaaggataatcacaacaaaatatacgctaacttaaaaaacaaatgattattgtgacataaaagggtatattctctttttaagtgggtaaaaggattctgcttgcttatacataaatctttattcatgagagaataacggatattaaaatacggtgatagtttgcatttgttctatagaatgaacatagacataaccctgaagctttaagattacagggagtttccatgaggccacaaactaa

SEQ ID NO: 637856 - DNA, 192 bp, Homo sapiens
tcgagctcgttacctgtgcagacggggtctcatggagagggtttgtggcgtaaggagagactggcagtcatcacctagagtggtactctgaagcctcaagaggagacaagatcacatggaacgccacggacagaaccatgtggagcaccattctcatctaggtaggagtccgcaaagaaggttaaaaagaaa

SEQ ID NO: 637857 - DNA, 1825 bp, Homo sapiens
taaccccgccgtccacctgggaacacccgcgctcggtgccttgtcggtgacgctgcagcgccgagcaccagggccgaaaggggtccacagagcagccgcggacccccgaaaccccattgcgcccggccccagagacccaccaccaggtcccactgtgccgagcttcccgctcgcccggccccgcgggtagcgaaagcgacaatgttcccctgaggccacgacagagccggcgtgccgagatgcccaaaccccgcgcgggggccagcgactctcgcgccagtaggcccttgacttggatcaagacgggggacgggggactcccaggacgcgagcagagtgaacgaggacaaggtgatgctccacgcgcttctacttcaagtctggtccggttcggcctggtctgggccagccgaacagccacccaaacactatcacagcttgcccttccgcttgctctggctgcctgcagacttggagccattttaaggagaaaccacctggccacgccccctagagaacccgagaagccaatccacgctcggccacgcccatctccgcgcgctgcgagagcgccaacggtcgcgcggggggttagggcggggcgtgcttccgcgtctagccggagaaacttgagccggctgccccgcccacggtgcccgaagccccaaaggctggaattaggggctagaagtctggcacccaccgcctggccaggtgttcgggacgcgaccaggtgggcggtcgccccgccccgggagcgcggcttaatagctgagagcccgggggccaggccgcggctgcggcccaggcaacgccctgagggtggccacgctgccaggtgttccactcccccgggactatgggcaagggcccggggcggggagggcggcaggtgctgacactggagctgcgccggaggtcggggaactcggcctcctaagactgaggacactcgcctgctgggccggtcgagctgtgcggtgccctccgggacgcagggggcgctgcagccacgctgggtcaggctccgcagggccctcccaacccggggactaacggcgccggtgacgacttcgccgcgcgttggtcagccatggccaccgctctcgcgctacgtagcttgtaccgagcgcgaccctcgctgcgctgtccgcccgttgagcttccctgggccccgcggcgagggcatcggctctcgccggcggatgacgagctgtatcagcggacgcgcatctctctgctgcaacgcgaggccgctcaggcaatgtacatcgacagctacaacagccgcggcttcatgataaacggaaaccgcgtgctcggcccctgcgctctgctcccgcactcggtggtgcagtggaacgtgggatcccaccaggacatcaccgaagacagcttttccctcttctggttgctggagccccggatagagatcgtggtggtggggactggagaccggaccgagaggctgcagtcccaggtgcttcaagccatgaggcagcggggcattgctgtggaagtgcaggacacgcccaatgcctgtgccaccttcaacttcctgtgtcatgaaggccgagtaactggagctgctctcatccctccaccaggagggacttcacttacatctttgggccaagctgctcaatgaaccgccaggaactgacctgctgactgcactctgccaggcttcccaatgctttcactcttatctaccctttggcacttatcttgcttatcaacataataatttatacacttctcccaaaaaaaaaaaccacaacaccaacaccccgggggcctctacccggggccgcgcaccacaccg

SEQ ID NO: 637858 - DNA, 2167 bp, Homo sapiens
  misc_feature (1975)..(1976): n is a, c, g, or t
taaccccgccgtccacctgggaacacccgcgctcggtgccttgtcggtgacgctgcagcgccgagcaccagggccgaaaggggtccacagagcagccgcggacccccgaaaccccattgcgcccggccccagagacccaccaccaggtcccactgtgccgagcttcccgctcgcccggccccgcgggtagcgaaagcgacaatgttcccctgaggccacgacagagccggcgtgccgagatgcccaaaccccgcgcgggggccagcgactctcgcgccagtaggcccttgacttggatcaagacgggggacgggggactcccaggacgcgagcagagtgaacgaggacaaggtgatgctccacgcgcttctacttcaagtctggtccggttcggcctggtctgggccagccgaacagccacccaaacactatcacagcttgcccttccgcttgctctggctgcctgcagacttggagccattttaaggagaaaccacctggccacgccccctagagaacccgagaagccaatccacgctcggccacgcccatctccgcgcgctgcgagagcgccaacggtcgcgcggggggttagggcggggcgtgcttccgcgtctagccggagaaacttgagccggctgccccgcccacggtgcccgaagccccaaaggctggaattaggggctagaagtctggcacccaccgcctggccaggtgttcgggacgcgaccaggtgggcggtcgccccgccccgggagcgcggcttaatagctgagagcccgggggccaggccgcggctgcggcccaggcaacgccctgagggtggccacgctgccaggtgttccactcccccgggactatgggcaagggcccggggcggggagggcggcaggtgctgacactggagctgcgccggaggtcggggaactcggcctcctaagactgaggacactcgcctgctgggccggtcgagctgtgcggtgccctccgggacgcagggggcgctgcagccacgctgggtcaggctccgcagggccctcccaacccggggactaacggcgccggtgacgacttcgccgcgcgttggtcagccatggccaccgctctcgcgctacgtagcttgtaccgagcgcgaccctcgctgcgctgtccgcccgttgagcttccctgggccccgcggcgagggcatcggctctcgccggcggatgacgagctgtatcagcggacgcgcatctctctgctgcaacgcgaggccgctcaggcaatgtacatcgacagctacaacagccgcggcttcatgataaacggaaaccgcgtgctcggcccctgcgctctgctcccgcactcggtggtgcagtggaacgtgggatcccaccaggacatcaccgaagacagcttttccctcttctggttgctggagccccggatagagatcgtggtggtggggactggagaccggaccgagaggctgcagtcccaggtgcttcaagccatgaggcagcggggcattgctgtggaagtgcaggacacgcccaatgcctgtgccaccttcaacttcctgtgtcatgaaggccgagtaactggagctgctctcatccctccaccaggagggacttcacttacatctttgggccaagctgctcaatgaaccgccaggaactgacctgctgactgcactctgccaggcttcccaatgctttcactcttatctaccctttggcacttatcttgcttatcaacataataatttatacacttctcccattttgtatcaggtgtgttgctggccaggagctgatggctcactgggctcttggaggggaatgtgaagaaaccaaggagtcactttttcatctagattacttaggattccttgacttttcagaagtcgggaagcagtatgtttgcctgttgtagacctacttgctcacatgcagatttgagaggacctcaacggcttttctcacaaaaaaanngattgtttctcttctcccgcgatggagtctcgctgtcgcccgggctgcagtgccctgccggtgatcttggcccactacaaactccacctcctggattcaagcgattctcgcgcatcagcccggccaaggggtcccgagcccgaatccgtactctgtctagcccctctcccacgccccccccccgccccccc

SEQ ID NO: 637859 - DNA, 584 bp, Homo sapiens
agatgctgcagagtacccagaggatgcagagaacccacagctaatttttggtatttttagtagagacgggctctactaaatgttagctaggctgggacttctgacttcaggtgatccacctgcctcagcctctcaaagtgctgggattacaggggtgagctgccgtgcctggctccaacttttcttctgcatcttcctcacctctctcagccttcatagaatggaagaaaactggggccgggttctcgattaggcttcagtttaagggaatgtggtggctggttggatctaatcagaccactcatactttccacatatcaccaataaggatgtttcactttctttccctccctccctcttttttggagactatggcccaggtgggagtgcaggggtatgatcatggctcacggcaacctcggcctccggggtgcaagcaattctctggcctcaacctcccgagtagcggggataacaggtgtgcagcatgtgtccagctaattttggtattattagtagaggtaaggtttcaccatgttgaccaggctggtctcgaactcctggactcaagtgatccggccgcc

SEQ ID NO: 637860 - DNA, 259 bp, Homo sapiens
agagttcccaggcgcagatcgtcacgccattctctacctctagcctcccgagcagccgggacacaggtaccgcaacacgcctggctaattttttgtatttttatgtagagacaggtttgcaccatgttaaccaggctgatctcgctcctcctgccctcatgatccgcccgcctcggcttcccaaagtgctggcattacaggcgtgagccacagcgctcagccagaaagtctatttctttcctgatggttctccaaggac

SEQ ID NO: 637861 - DNA, 972 bp, Homo sapiens
ggcggccatggcagcatcttccctgacggtgcaccttaggagtcgggtggcgtccgcgtgcagccacagacatcctgactaccttcggggccctggatacagacctccctttggtctgcttctcgaaagttcacattcggcaatgcagccacattcttatatctaccaggatatgttacctaagacatccctgagttcaccatcctttgtaccaagtaagtagtactgcccagacccagttgaggagacccaggacaccatgccaagaaggtcgtgaagaaggtgaatgtagatgatcgtcaccggggcagtatgggccaggtctcttttgtccgttgggtgcaacttagccgagaccgactagtggataggttgacctcttgtaagacctgatcttaccacttggaaatgaacgtagaccttgcgtgtggcgagagaattcgactggagaacggtcctgctgatagggtgcacgacaatttcatgctgccttggaaagacactcctcgggaggatggatcttgtcgagtagaagccacagtcattgaaaagaccgaatcatggcaagaatcattatgagatccaccgacaaggacccctgccgaagaaaagaatcgtccgaacccgcagactgtcctcggataacgaccattgagatggctccgggtcgcggattaccgagttatgacttacacagggttaggataacttctgcttcccaggacggacaacgggacacacaaaaaacttgggcgggcctcggccaaggaactctacaaaccactgtgtgggcggcgggccccgtgaaagcgacactggcacttgtgccgacctcgtgtcagattgtgggtgccccaaaaaagctcgggacagtgttgacacccacggtgggctggtcacaagacgcgctagcccccgccgagggcaggtcatgggaacacgcttatccctcccaccgcgtgcgcttccgcc

SEQ ID NO: 637862 - DNA, 2051 bp, Homo sapiens
taaccccgccgtccacctgggaacacccgcgctcggtgccttgtcggtgacgctgcagcgccgagcaccagggccgaaaggggtccacagagcagccgcggacccccgaaaccccattgcgcccggccccagagacccaccaccaggtcccactgtgccgagcttcccgctcgcccggccccgcgggtagcgaaagcgacaatgttcccctgaggccacgacagagccggcgtgccgagatgcccaaaccccgcgcgggggccagcgactctcgcgccagtaggcccttgacttggatcaagacgggggacgggggactcccaggacgcgagcagagtgaacgaggacaaggtgatgctccacgcgcttctacttcaagtctggtccggttcggcctggtctgggccagccgaacagccacccaaacactatcacagcttgcccttccgcttgctctggctgcctgcagacttggagccattttaaggagaaaccacctggccacgccccctagagaacccgagaagccaatccacgctcggccacgcccatctccgcgcgctgcgagagcgccaacggtcgcgcggggggttagggcggggcgtgcttccgcgtctagccggagaaacttgagccggctgccccgcccacggtgcccgaagccccaaaggctggaattaggggctagaagtctggcacccaccgcctggccaggtgttcgggacgcgaccaggtgggcggtcgccccgccccgggagcgcggcttaatagctgagagcccgggggccaggccgcggctgcggcccaggcaacgccctgagggtggccacgctgccaggtgttccactcccccgggactatgggcaagggcccggggcggggagggcggcaggtgctgacactggagctgcgccggaggtcggggaactcggcctcctaagactgaggacactcgcctgctgggccggtcgagctgtgcggtgccctccgggacgcagggggcgctgcagccacgctgggtcaggctccgcagggccctcccaacccggggactaacggcgccggtgacgacttcgccgcgcgttggtcagccatggccaccgctctcgcgctacgtagcttgtaccgagcgcgaccctcgctgcgctgtccgcccgttgagcttccctgggccccgcggcgagggcatcggctctcgccggcggatgacgagctgtatcagcggacgcgcatctctctgctgcaacgcgaggccgctcaggcaatgtacatcgacagctacaacagccgcggcttcatgataaacggaaaccgcgtgctcggcccctgcgctctgctcccgcactcggtggtgcagtggaacgtgggatcccaccaggacatcaccgaagacagcttttccctcttctggttgctggagccccggatagagatcgtggtggtggggactggagaccggaccgagaggctgcagtcccaggtgcttcaagccatgaggcagcggggcattgctgtggaagtgcaggacacgcccaatgcctgtgccaccttcaacttcctgtgtcatgaaggccgagtaactggagctgctctcatccctccaccaggagggacttcacttacatctttgggccaagctgctcaatgaaccgccaggaactgacctgctgactgcactctgccaggcttcccaatgctttcactcttatctaccctttggcacttatcttgcttatcaacataataatttatacacttctcccaaaaacacacatacaccccacagcacacacacacaacaaacgggtgccccgcccccaagaacatatactcccctacaggggggtcgcgcccccaaatcacattaacccacattaaccgcacggaaattcatcgtagcacaccaacattgttgccccctataacacagtgggtagagtataataaaacacaagtcattactctagacacgacgtgtctaaaccaatgttgtgtcctggggaaaacatagtcgtaaacatcagagaaaccatctatcacaagaacgaccc

SEQ ID NO: 637863 - DNA, 110 bp, Homo sapiens
gtgagaagctgcagcggtgacctggaggctgcgatgtggaggtggaggacacaccctcaaccgttgctcctgtagcttccgagtcctggtggtgtcggccaagttcagta

SEQ ID NO: 637864 - DNA, 1388 bp, Homo sapiens
taaccccgccgtccacctgggaacacccgcgctcggtgccttgtcggtgacgctgcagcgccgagcaccagggccgaaaggggtccacagagcagccgcggacccccgaaaccccattgcgcccggccccagagacccaccaccaggtcccactgtgccgagcttcccgctcgcccggccccgcgggtagcgaaagcgacaatgttcccctgaggccacgacagagccggcgtgccgagatgcccaaaccccgcgcgggggccagcgactctcgcgccagtaggcccttgacttggatcaagacgggggacgggggactcccaggacgcgagcagagtgaacgaggacaaggtgatgctccacgcgcttctacttcaagtctggtccggttcggcctggtctgggccagccgaacagccacccaaacactatcacagcttgcccttccgcttgctctggctgcctgcagacttggagccattttaaggagaaaccacctggccacgccccctagagaacccgagaagccaatccacgctcggccacgcccatctccgcgcgctgcgagagcgccaacggtcgcgcggggggttagggcggggcgtgcttccgcgtctagccggagaaacttgagccggctgccccgcccacggtgcccgaagccccaaaggctggaattaggggctagaagtctggcacccaccgcctggccaggtgttcgggacgcgaccagggccccgcggcgagggcatcggctctcgccggcggatgacgagctgtatcagcggacgcgcatctctctgctgcaacgcgaggccgctcaggcaatgtacatcgacagctacaacagccgcggcttcatgataaacggaaaccgcgtgctcggcccctgcgctctgctcccgcactcggtggtgcagtggaacgtgggatcccaccaggacatcaccgaagacagcttttccctcttctggttgctggagccccggatagagatcgtggtggtggggactggagaccggaccgagaggctgcagtcccaggtgcttcaagccatgaggcagcggggcattgctgtggaagtgcaggacacgcccaatgcctgtgccaccttcaacttcctgtgtcatgaaggccgagtaactggagctgctctcatccctccaccaggagggacttcacttacatctttgggccaagctgctcaatgaaccgccaggaactgacctgctgactgcactctgccaggcttcccaatgctttcactcttatctaccctttggcacttatcttgcttatcaacataataatttatacacttctcccaaaaaaaaaaaccacaacaccaacaccccgggggcctctacccggggccgcgcaccacaccg

SEQ ID NO: 637865 - DNA, 116 bp, Homo sapiens
gatgagccggccactaatgaactattagtagctggtccctccgaagttcctcaggatgtgtgcgtcgcgcacacatctcagtagaggtataactagtctgactaaggacggtctgt

SEQ ID NO: 637866 - DNA, 1949 bp, Homo sapiens
taaccccgccgtccacctgggaacacccgcgctcggtgccttgtcggtgacgctgcagcgccgagcaccagggccgaaaggggtccacagagcagccgcggacccccgaaaccccattgcgcccggccccagagacccaccaccaggtcccactgtgccgagcttcccgctcgcccggccccgcgggtagcgaaagcgacaatgttcccctgaggccacgacagagccggcgtgccgagatgcccaaaccccgcgcgggggccagcgactctcgcgccagtaggcccttgacttggatcaagacgggggacgggggactcccaggacgcgagcagagtgaacgaggacaaggtgatgctccacgcgcttctacttcaagtctggtccggttcggcctggtctgggccagccgaacagccacccaaacactatcacagcttgcccttccgcttgctctggctgcctgcagacttggagccattttaaggagaaaccacctggccacgccccctagagaacccgagaagccaatccacgctcggccacgcccatctccgcgcgctgcgagagcgccaacggtcgcgcggggggttagggcggggcgtgcttccgcgtctagccggagaaacttgagccggctgccccgcccacggtgcccgaagccccaaaggctggaattaggggctagaagtctggcacccaccgcctggccaggtgttcgggacgcgaccaggtgggcggtcgccccgccccgggagcgcggcttaatagctgagagcccgggggccaggccgcggctgcggcccaggcaacgccctgagggtggccacgctgccaggtgttccactcccccgggactatgggcaagggcccggggcggggagggcggcaggtgctgacactggagctgcgccggaggtcggggaactcggcctcctaagactgaggacactcgcctgctgggccggtcgagctgtgcggtgccctccgggacgcagggggcgctgcagccacgctgggtcaggctccgcagggccctcccaacccggggactaacggcgccggtgacgacttcgccgcgcgttggtcagccatggccaccgctctcgcgctacgtagcttgtaccgagcgcgaccctcgctgcgctgtccgcccgttgagcttccctggtgagcttggaccccgcgccctcgaccatccagccccctagggccggcgactgccagcccagcaccttccggcctctcgggctgcccggcccggccccgcgcccctgaccctttccctccgcagggccccgcggcgagggcatcggctctcgccggcggatgacgagctgtatcagcggacgcgcatctctctgctgcaacgcgaggccgctcaggcaatgtacatcgacagctacaacagccgcggcttcatgataaacggaaaccgcgtgctcggcccctgcgctctgctcccgcactcggtggtgcagtggaacgtgggatcccaccaggacatcaccgaagacagcttttccctcttctggttgctggagccccggatagagatcgtggtggtggggactggagaccggaccgagaggctgcagtcccaggtgcttcaagccatgaggcagcggggcattgctgtggaagtgcaggacacgcccaatgcctgtgccaccttcaacttcctgtgtcatgaaggccgagtaactggagctgctctcatccctccaccaggagggacttcacttacatctttgggccaagctgctcaatgaaccgccaggaactgacctgctgactgcactctgccaggcttcccaatgctttcactcttatctaccctttggcacttatcttgcttatcaacataataatttatacacttctcccaaaaaaaaaaaccacaacaccaacaccccgggggcctctacccggggccgcgcaccacaccg

SEQ ID NO: 637867 - DNA, 320 bp, Homo sapiens
  misc_feature (267)..(267): n is a, c, g, or t
ggcctcttgttgggacagcgtcccctcggagcaagagcccggggcgtgtggccgcctcactgtgacctccggccgtgcaggcctctggggagggtggagatgttttccccttctcagagcacgcaggtgttacctgcccacagagtaggaagtggggtgctgtcacctgcaccgcacaggtgaggaagctgaaaacccaagacccaagccatttggtctcactctggctgaatcacctggaggctttgggaaacagattttcttccnccttccagccttaccgccaccctcctctgttctagaagaggcaagaagaagcg

SEQ ID NO: 637868 - DNA, 909 bp, Homo sapiens
gggtggcccggaccgctatgctccaagagagctcgtactggtaccattgctgacaggttggctttactgtgactcgtcggacttgccagatgctcctgcagaagatgtcagtaatacaagggcgcgcctggccatccggtacataatgttattgccaagtaatcaactgccagcggcaagtgccgagccttgtggacactggctcgcttcatgcgaatatgcgagtactgtgctcaccattgtggccctgtgcaccaatgagccccacctggtacaaagccaaaaacaatggtgggccgtgcagggcatcatcccagtccaactacgtccacgaaagcgtggatggcgcgatgataggcgggctaccaaactcagccgtcatgccttgcgattccatcggcaatcgatcacacggggagcaggctgagcgggttctgtacccgccggaagactaggcctagttcctggtgcgggagagctaccaactaccccggaaactactatctgctgtgtcggtgagactgcgatcggcatatggtggagcatctaccgcagtcatgtaccattgccatgaatctcagacactcgacgatggaggtgtactttgagaacctcatgcacgctgttggagcagtagatctcagacgcagatgtgactctgtacgcgcctcattatgacccagagggtcatggagggcacagttggcagagcccaggcactgatgttgctaccgaagacggtttgggcccctgacacatgctagggagctgaagctgctgcagaccatcggggaacgggggagttcggaaaacgtgatgctggggcataaccgaagggaaacaaagtcgcggaagtgtttaaaaagaggcatgcccaagctactggtgaacctcttatgccaattgggc

SEQ ID NO: 637869 - DNA, 159 bp, Homo sapiens
gcccacgcttataaactgggaatgacacgtcacaaaatcagttatagagtgctgctgatacagtcatcattcattctaaccacgtatttaaaccgagaagattgcatgtatgttctgcctgtcaaggaaaccatggcataaattgtgtaaaatttgaaa

SEQ ID NO: 637870 - DNA, 1008 bp, Homo sapiens
taaccccgccgtccacctgggaacacccgcgctcggtgccttgtcggtgacgctgcagcgccgagcaccagggccgaaaggggtccacagagcagccgcggacccccgaaaccccattgcgcccggccccagagacccaccaccaggtcccactgtgccgagcttcccgctcgcccggccccgcgggtagcgaaagcgacaatgttcccctgaggccacgacagagccggcgtgccgagatgcccaaaccccgcgcgggggccagcgactctcgcgccagtaggcccttgacttggatcaagacgggggacgggggactcccaggacgcgagcagagtgaacgaggacaagggggccccgcggcgagggcatcggctctcgccggcggatgacgagctgtatcagcggacgcgcatctctctgctgcaacgcgaggccgctcaggcaatgtacatcgacagctacaacagccgcggcttcatgataaacggaaaccgcgtgctcggcccctgcgctctgctcccgcactcggtggtgcagtggaacgtgggatcccaccaggacatcaccgaagacagcttttccctcttctggttgctggagccccggatagagatcgtggtggtggggactggagaccggaccgagaggctgcagtcccaggtgcttcaagccatgaggcagcggggcattgctgtggaagtgcaggacacgcccaatgcctgtgccaccttcaacttcctgtgtcatgaaggccgagtaactggagctgctctcatccctccaccaggagggacttcacttacatctttgggccaagctgctcaatgaaccgccaggaactgacctgctgactgcactctgccaggcttcccaatgctttcactcttatctaccctttggcacttatcttgcttatcaacataataatttatacacttctcccaaaaaaaaaaaccacaacaccaacaccccgggggcctctacccggggccgcgcaccacaccg

SEQ ID NO: 637871 - DNA, 172 bp, Homo sapiens
  misc_feature (119)..(119): n is a, c, g, or t
  misc_feature (137)..(137): n is a, c, g, or t
  misc_feature (154)..(154): n is a, c, g, or t
gcggcggtactaccagagaaccttatcaaaccatttacccatattaagtattggcgatagaaattgaaatctggcgcaatttatattgttccgcaagggaaagatgcaaaaattcattncctagcattatattgtcnagggactaacccctatnccttctgcattatgaatt

SEQ ID NO: 637872 - DNA, 418 bp, Homo sapiens
agagagagagagagagagagagagagagagattgagatagagcgagagattatcctgcctgaggattgctcccccggaggctgtgatctcccgtaccctgtcgcagctgtgtgtctgactgttaaggctccgcactgtgtgcgttagacgccttagtatggcaccgtttccagacagtctggtgggatccatcattaggtgctgacgcccaggtgttatctctggctctagtcccatgtttgacggacttacgaatagtgtgaatgccatggaggaagcctccattgttccctgtacggccttttgctgtatcccatcttgtccttgtcttgctcctgttacttctctcgcgtcctcacttgcttatcctttttcggtttcctctgttgcgttctctctgctccgctctccgtcgcct

SEQ ID NO: 637873 - DNA, 420 bp, Homo sapiens
cggagcatggagagacagagagagtgacgtgggagggctgcaaggcttttaaacaagcagatcccacaagcgctcactcaatatcacgagaacagcaagggggaagtcgtgccccatgagccaatcacctcccaccaggtccctcccacaacactgggaattacaatttgacatgagatttgggtgtggatccagagctgaaccatgtcaagggtagttcaaccgctgagattgattgattgattgattgactgagatggagtcccgctctgttacctaggctggagtgcagtggcacaatctcgggtcaccacaaccagtgacaccattggtacttatttgcttctacctagtgactaaaggaatgaatgagtttctccagagactagagctccaccgtcaggaagagaccgcagggtc

SEQ ID NO: 637874 - DNA, 1754 bp, Homo sapiens
taaccccgccgtccacctgggaacacccgcgctcggtgccttgtcggtgacgctgcagcgccgagcaccagggccgaaaggggtccacagagcagccgcggacccccgaaaccccattgcgcccggccccagagacccaccaccaggtcccactgtgccgagcttcccgctcgcccggccccgcgggtagcgaaagcgacaatgttcccctgaggccacgacagagccggcgtgccgagatgcccaaaccccgcgcgggggccagcgactctcgcgccagtaggcccttgacttggatcaagacgggggacgggggactcccaggacgcgagcagagtgaacgaggacaaggtgatgctccacgcgcttctacttcaagtctggtccggttcggcctggtctgggccagccgaacagccacccaaacactatcacagcttgcccttccgcttgctctggctgcctgcagacttggagccattttaaggagaaaccacctggccacgccccctagagaacccgagaagccaatccacgctcggccacgcccatctccgcgcgctgcgagagcgccaacggtcgcgcggggggttagggcggggcgtgcttccgcgtctagccggagaaacttgagccggctgccccgcccacggtgcccgaagccccaaaggctggaattaggggctagaagtctggcacccaccgcctggccaggtgttcgggacgcgaccaggtgggcggtcgccccgccccgggagcgcggcttaatagctgagagcccgggggccaggccgcggctgcggcccaggcaacgccctgagggtggccacgctgccaggtgttccactcccccgggactatgggcaagggcccggggcggggagggcggcaggtgctgacactggagctgcgccggaggtcggggaactcggcctcctaagactgaggacactcgcctgctgggccggtcgagctgtgcggtgccctccgggacgcagggggcgctgcagccacgctgggtcaggctccgcagggccctcccaacccggggactaacggcgccggtgacgacttcgccgcgcgttggtcagccatggccaccgctctcgcgctacgtagcttgtaccgagcgcgaccctcgctgcgctgtccgcccgttgagcttccctgggccccgcggcgagggcatcggctctcgccggcggatgacgagctgtatcagcggacgcgcatctctctgctgcaacgcgaggccgctcaggcaatgtacatcgacagctacaacagccgcggcttcatgataaacggaaaccgcgtgctcggcccctgcgctctgctcccgcactcggtggtgcagtggaacgtgggatcccaccaggacatcaccgaagacagcttttccctcttctggttgctggagccccggatagagatcgtggtggtggggactggagaccggaccgagaggctgcagtcccaggtgcttcaagccatgaggcagcggggcattgctgtggaagtgcaggacacgcccaatgcctgtgccaccttcaacttcctgtgtcatgaaggccgagtaactggagctgctctcatccctccaccaggagggacttcacttacatctttgggccaagctgctcaatgaaccgccaggaactgacctgctgactgcactctgccaggcttcccaatgctttcactcttatctaccctttgccttatcgagggtacgagctcgattcgtatatgta

SEQ ID NO: 637875 - DNA, 479 bp, Homo sapiens
ccttttattacttttaggatttcctttttatcactggttttgatggatttgattaaggcgttccttggtgaagttttcttcatgtttcttgttcttagaataatcatatttctgtaatatttgaagtttatggtttccatggagcttctaaatctttcatccagtatgttttaaatatctttgtctctcttctccactacacgcccttcagggattccatttagccctatactggggggtttaaagttttgatgccaatggtctttttatgttttcaagtcatttgttactgtgtgtttcatttatgttagtttcaacttctattccttctagttcaataatcttctcttctgcaatgtttaatccactgccttcttccatttcagactgtaaatcatactttttatctacagaatttgatatttaaaaaatcttcaacctccccatttaattaaaatacaattatactaaaaaaaaaa

SEQ ID NO: 637876 - DNA, 177 bp, Homo sapiens
gtgctccagctaaacgatattatggaggtcagcactggtgctcacgtgtcgacggaacttgtacatgggaggcatgcacctgcagtggtgaatacacgtacgaccatggctccatgctaaaactgatattatggatggtcagcactggtgctcactgtatctgaacggaactatgta

SEQ ID NO: 637877 - DNA, 2245 bp, Homo sapiens
  misc_feature (2053)..(2054): n is a, c, g, or t
taaccccgccgtccacctgggaacacccgcgctcggtgccttgtcggtgacgctgcagcgccgagcaccagggccgaaaggggtccacagagcagccgcggacccccgaaaccccattgcgcccggccccagagacccaccaccaggtcccactgtgccgagcttcccgctcgcccggccccgcgggtagcgaaagcgacaatgttcccctgaggccacgacagagccggcgtgccgagatgcccaaaccccgcgcgggggccagcgactctcgcgccagtaggcccttgacttggatcaagacgggggacgggggactcccaggacgcgagcagagtgaacgaggacaaggtgatgctccacgcgcttctacttcaagtctggtccggttcggcctggtctgggccagccgaacagccacccaaacactatcacagcttgcccttccgcttgctctggctgcctgcagacttggagccattttaaggagaaaccacctggccacgccccctagagaacccgagaagccaatccacgctcggccacgcccatctccgcgcgctgcgagagcgccaacggtcgcgcggggggttagggcggggcgtgcttccgcgtctagccggagaaacttgagccggctgccccgcccacggtgcccgaagccccaaaggctggaattaggggctagaagtctggcacccaccgcctggccaggtgttcgggacgcgaccaggtgggcggtcgccccgccccgggagcgcggcttaatagctgagagcccgggggccaggccgcggctgcggcccaggcaacgccctgagggtggccacgctgccaggtgttccactcccccgggactatgggcaagggcccggggcggggagggcggcaggtgctgacactggagctgcgccggaggtcggggaactcggcctcctaagactgaggacactcgcctgctgggccggtcgagctgtgcggtgccctccgggacgcagggggcgctgcagccacgctgggtcaggctccgcagggccctcccaacccggggactaacggcgccggtgacgacttcgccgcgcgttggtcagccatggccaccgctctcgcgctacgtagcttgtaccgagcgcgaccctcgctgcgctgtccgcccgttgagcttccctgggccccgcggcgagggcatcggctctcgccggcggatgacgagctgtatcagcggacgcgcatctctctgctgcaacgcgaggccgctcaggcaatgtacatcgacagctacaacagccgcggcttcatgataaacggaaaccgcgtgctcggcccctgcgctctgctcccgcactcggtggtgcagtggaacgtgggatcccaccaggacatcaccgaagacagcttttccctcttctggttgctggagccccggatagagatcgtggtggtggggactggagaccggaccgagaggctgcagtcccaggtgcttcaagccatgaggcagcggggcattgctgtggaagtgcaggacacggtgagtcccgggactggggcatgctgcggggagcacaggcctggcgctagacaggctgatgctgccttttctttgcagcccaatgcctgtgccaccttcaacttcctgtgtcatgaaggccgagtaactggagctgctctcatccctccaccaggagggacttcacttacatctttgggccaagctgctcaatgaaccgccaggaactgacctgctgactgcactctgccaggcttcccaatgctttcactcttatctaccctttggcacttatcttgcttatcaacataataatttatacacttctcccattttgtatcaggtgtgttgctggccaggagctgatggctcactgggctcttggaggggaatgtgaagaaaccaaggagtcactttttcatctagattacttaggattccttgacttttcagaagtcgggaagcagtatgtttgcctgttgtagacctacttgctcacatgcagatttgagaggacctcaacggcttttctcacaaaaaaanngattgtttctcttctcccgcgatggagtctcgctgtcgcccgggctgcagtgccctgccggtgatcttggcccactacaaactccacctcctggattcaagcgattctcgcgcatcagcccggccaaggggtcccgagcccgaatccgtactctgtctagcccctctcccacgccccccccccgccccccc

SEQ ID NO: 637878 - DNA, 127 bp, Homo sapiens
  misc_feature (11)..(11): n is a, c, g, or t
cccagcgtagnttcacagccttggaccccagccccaacggcaagcaacttgctactgtttcttgggatacctttctcatgctatggaatttcaagccacatgctagagcttacagatatgtgggtca

SEQ ID NO: 637879 - DNA, 637 bp, Homo sapiens
  misc_feature (445)..(446): n is a, c, g, or t
tgctcgaattcaagcttctaacgatgtacggggacatgaaggccgagtaactggagctgctctcatccctccaccaggagggacttcacttacatctttgggccaagctgctcaatgaaccgccaggaactgacctgctgactgcactctgccaggcttcccaatgctttcactcttatctaccctttggcacttatcttgcttatcaacataataatttatacacttctcccattttgtatcaggtgtgttgctggccaggagctgatggctcactgggctcttggaggggaatgtgaagaaaccaaggagtcactttttcatctagattacttaggattccttgacttttcagaagtcgggaagcagtatgtttgcctgttgtagacctacttgctcacatgcagatttgagaggacctcaacggcttttctcacaaaaaaanngattgtttctcttctcccgcgatggagtctcgctgtcgcccgggctgcagtgccctgccggtgatcttggcccactacaaactccacctcctggattcaagcgattctcgcgcatcagcccggccaaggggtcccgagcccgaatccgtactctgtctagcccctctcccacgccccccccccgccccccc

SEQ ID NO: 637880 - DNA, 205 bp, Homo sapiens
acgcctgtgcgcccgatcgggtagcgcattgctaccggccgtgacagctgggtaagcgctggatgcacgcgtgtagcacgagtggctgcccggcagtgggaacatgtacttcagcaatcgtggccgggtatccggtgaggctctcgaccatcacctggaagcgcgcgccaatccggcatgacccagcacggcggcaatcaccgca

SEQ ID NO: 637881 - DNA, 244 bp, Homo sapiens
cgtacctgcagctctctctgatgacattgaggtaataaaagatttaacccaagaatcgctaactataaagaatatataggctgggatagtagtgcacgcctgtaatcccagcactctgagagaccgaggcgggcagatcatctgacggtcgggagttcgagaccagcctggacaatatagtgagactccgtctctacgaaaaatacaaaaattagctgaatgtggtggcacatgcctgtagtcc

SEQ ID NO: 637882 - DNA, 179 bp, Homo sapiens
ttgagatacagcgtgtgcacacgctcagccctgagtaagttctagtatttttttctgaacttcactctaaggatagcgttggaaaaagaatgcacgtgtgagttactaaaaagttagaattatgtggctgggaaccgtggcgcaacatgctaaaaaatcctcaatggcatccagcaaaa

SEQ ID NO: 637883 - DNA, 432 bp, Homo sapiens
tctattagcctctgtcctactttctacttataatgatgacagcagcatttgttagtttccacatgtgagtgagaacatgtggctttttaacttttagaatgtggtattcaggcacttcatggtacagttggtaaaagtgaaaatgtgtccaaaagtttgtgattatctatataaacaaaaatggtataaatacaaatatcaattttgcattgaagaacttaccttagaggtatattctcacaagtgcacagagcatttaagcatttgttcactgcagcattgttatcagtattttaaaactatggtacatccatgtacttccacatacagctcttaaaaataaggaggatatgaatgaactagtatgaaaagaagtccaaatacatttgaaagtgagaatagcatggttctggattgaaagggggatctggg

SEQ ID NO: 637884 - DNA, 200 bp, Homo sapiens
ggccctgggggttggggggccttttttttttttgtggttttttggtaacccggtagcccttttgggcccgcccaccccggtcctttttttggttggggcaaaatcttgaaaattcccccccccccccccccccagggcccttaaaattaaaattttttcccccccccgggggcccaaatggggggaaatttggttggtta

SEQ ID NO: 637885 - DNA, 1064 bp, Homo sapiens
ggagaagctgctgaggattcagagatgcggcatatggaatacagtccactgcttctcaatatgaatgctattcttggaaagttaagagcacagaggactatatcgaacctgtgttgtcaaggcaggaaatgtgtgctaaagtgaagcaggtggactatggttattcggtcacttgattcaagaaaagaagagaggtagagacaagaatatttgcgtgacatgttttgaggtgagcttaacagatagtggagccgcgaaattaggcgcgcctggactccgaaacaccttaataggctttggcttaggatgccacaggacctttccttattctcgggtatgaagcatctcgttacaacaagcttgatttctagcatcatgcactttcctctggaactgagaaatatggtcgacaaagctaggactctataggaaggaagagcaagcgttgattatttcttgtgagccgaacatcatcgaaggcaagcccgctgttgtaagtatggcgtgctagaagaacacagagacaagttcccagcagttacatagtgctttagatgaattcgttgatataatggacagccgctgtactgtgttaaggaacacgaagacagtggcgaagcaccgtttagttctaccaaggtgaaaaacaaaggcaagaacaagaaagcaaaggattcaaaggctatgtcagtaggggtctggaacaacttcagtaactccaaataactgagaatctcacttcaagtgaagaaccttggccatccaaaattcgaatactggaaggcccatttggcacgggccttgagcaatcttcgggaagaaggtaacaaaaaacttgtagacgcccctctcatagacaacacaccccgcaacggcaccaacgttggcccggcaaagcaaaacaagccacatggtggagactaactcagacaccaaacaaaaacagggcttcgcccatataagaagtaggaccctaaacagaggaggagagtagcacagacagcaccactactatgaacaagtagacagcagaagaatcatcgccgtcaacagtaagagtcaca

SEQ ID NO: 637886 - DNA, 849 bp, Homo sapiens
  misc_feature (101)..(101): n is a, c, g, or t
  misc_feature (644)..(644): n is a, c, g, or t
  misc_feature (648)..(648): n is a, c, g, or t
  misc_feature (672)..(672): n is a, c, g, or t
  misc_feature (697)..(697): n is a, c, g, or t
  misc_feature (743)..(743): n is a, c, g, or t
  misc_feature (766)..(766): n is a, c, g, or t
  misc_feature (768)..(768): n is a, c, g, or t
  misc_feature (840)..(840): n is a, c, g, or t
tctctctgtaaatagcctttgtgtaatggtctttagattaatatcctttgactttattaataagtacctgtgtgcccaggtggatctcagctaagtcatcnttaaattctgttcaaatagaaataaaccataaaatgagcctaactataacccacactcacttatcaagcattcccccaaaagttcagtgcgattcaggtaaccttgacctaaacttgtacactccggtgtacatctttgaccataaactctgggagatttccctctggatttgggatcaggagcccagtagggccccattgctgaatgtttatcacacttctggctagggcttatggatgagcagaccacgtaggagctaggatttactcagttccacctcactgacaggctttcctaggtggccaaggcaactggacttttcctggtggtaagggaaggcccaaggtacttggaccaggtggatattatatgggccatgggcaaaaggtataaaatgggatgggatggtagaccatatctcaacggcaggaatcacatttttaggatcgggtatctgggcattggtaatcatttttgtcttcttggaattaaacatggccctggcttggtctttttctggaatgggaaggggtagggaaagngggnagggtactaaaaaagggaaaatgntagtttttagttttctttttctaangctaaaaggaactgggcttttactaactggctcatatttttactanccacataagtaagtgtaggatgntngtatcaacttggcttaagggaatggcttttcaaaaaagggttacctcccatcagtcaaaaaaaagggggggnttatacagc

SEQ ID NO: 637887 - DNA, 188 bp, Homo sapiens
cccccccccccccccccgggaaaaagtttcccttttttcccccccccccccaaggggggggcccccccccaaatttgcctttttttgggggaaaaattcaaacccccccctttattttttttttttcccgggtttaaaggcttttttggggttaaacctttttttttaaatttaaacccaggggccga

SEQ ID NO: 637888 - DNA, 182 bp, Homo sapiens
tggtgatctagaggtccctgtggctactgctggagaacactgcctacagctttgggagacacagcattgccaacttgaaatcagtgaacaaccttgctatgtggtgcacacctccttcgccttccatgtatctagctgctcacctgtctacagcatgacgtagacagtgtacctgagctcga

SEQ ID NO: 637889 - DNA, 434 bp, Homo sapiens
ggtacatcacatatccaaaaacatcacaaaaaggctggatgtggtgactcatgcccataatcccagcactttacctcaggatggaaggggaaaagagaggagaacaaagccagtgggatgattaataaacgttttgagttgcacagatctgggtttgaatctacctacgtgacctaaagccagttatatgacctctctcagtgcagtttctacatctgtacgatagaagtttgagaataaataataaatgtaaaatgtctggcatggtgccctgatacatcttatggtaatataattatctatatttctgtcagtgtcctccactaaactgtaatcttggaaaactgggtctgtgacctgttcatctgtatgtctcagcctttcatacagtgcataagctcatccccattcctgaagtttcattccatgtgaag

SEQ ID NO: 637890 - DNA, 179 bp, Homo sapiens
cgcttagtctgaggggtaatcaatacaaaatagatacttaattgaatcctagaatccataaattacacttattatttacaactagcacaaaattcacagtggtgctgactgtagtaataacccactattgggcaaacatcccgtaaaacctagcctgtaagccatagccaataggagta

SEQ ID NO: 637891 - DNA, 922 bp, Homo sapiens
gtgtccttctgataaataaggcccttgctatgggaaaggcaacctaaatcaccttatggatgtcgcaactaatagcaagccagagtacctctgagcttctcatcaagagagctggggtgctttgaacgtagtaagtccctacccctctcccccataatgcagctgaagcgagtgtgtacagcggtgttgcctatggaggggatatcgagttcagataattgttttccgtactaaggagtcacgaaacttgaaagacgtttcttaaatctccagaatatctttccgacaagatttaatgggcctcgtaattcttatatttttgctttactaaatcactcgggatctggttgcttgtgagttattggcccggtattatccttatgtctggaagaattatctgctctgagtgggataattaacagttactttagtgcgatggaaatgcatttcctcatttgaggttaaggttccggcgttgcactcatgtggttcctgatgcattttggacttgtctgttggaactgctatctgctttttctctaacagatttctttccatatactgtttgggtaccacccgtatttcggtaggacctgttagggattggaaagccactggcaggcatgaccagtcttgctgtgtggtattacatgcatgcttggcaggtgcccttaggtctacgctgagggggacggacgtttttgtactgcggcgcaggctgtggacctaggctctgtgcccgatactcaagtgtgcaatctttccccaggcaaaggcggcccctttttcttctggcgacacgcccgatgagatgcccctgttggcgcgggcgtttccccttttgggaaaaggtcccgctcgcgcgtccccagtacatcatgggcgtaataggggcgcgcctcgttttttccccggtactaca

SEQ ID NO: 637892 - DNA, 193 bp, Homo sapiens
tctctagagcatacacacacgtcacgccttctgcaggcaggacgaaaactcgggcctgtgggtgcccgcccgcctcaagcagagcctggatggcgaatgcggggtcccagaggtgtgagccgctggtgccctgcattttcatgccgtcaaggcccatccagagatagtccgccattctggagacatgctcctg

SEQ ID NO: 637893 - DNA, 1076 bp, Homo sapiens
agcgggtctctcgctctctcccgggcaggcaggctgccggcgtgcaccgcgggaaggcggggctggggctcggcggtgaggccacccccagagaccgcccgggaggagcgcgcccagaagctgctggacgcggtgggaagcaagccggcaggcgtcctgctccttggacccccaagtcgcatagtctgcgccaggaagatgttactggcagtgcttggggccagtctgctgtcccgggaagcccgggctgagtgggtcgggcaaccgtcttctaggcccaatatcctttggaagtcctgcgcccgccccagtcgctgtgcctgttcgtccggccaagaaggctgggttttacccaaggagggattgcttggggcgtaattgagtagcctagccgaggagcacctggaacgcatacgccgcgacgtcgaaaaattagcctctggaactttacttctgtcactaaccacatgtggaccgagtgcgctgagaagtcttgagacaaacctccgcgttcagttactacgtgcgggccaagtcttgcactgaggccaattggggctggcggtgaccttgggggcctctccaagaccgtgtcaagattgtgccgcgttgtctgacataaccaggtcgtggagttacacgtccctcaaactattaaatcccgtaggcgcgtgaaatacgccgagtttgcctttgtgaccgtttgagagtgggtggacgtcgcaaccttgaaataaccccaggttgtggaattgtagcccccaggaattttggtgggccacgtatcacacgccaggtgcctcaggccgaagaagagttggtcagtggcccgtgtcctacatgtgtcggcgactcccataatgcttgacgttgtttaacaattggtttcgcaaattttccaattgctttggacgcaggagggcatttgttaaaggccccccaaaatatgagaaacagcgctttcaagagataatacaagccccctttggagttttagaacggcgaacaccctgtcagagaaaatgcatagtgtaaacaaggacgccctccagcggagcgacggggagtctaccagc

SEQ ID NO: 637894 - DNA, 245 bp, Homo sapiens
tagatatagttttaaagtcacagccgtaggatacacctgctgccatcacggtcctactgcattcgacttggaatgggcactggaagtttgtctattgacagcgctgcatttatttctttaacaatggatacaacccaaaggaccatcagagctgtacaccaggtctgcaataattagtcttctctatttgtgagactacagcgtatcacgtactttgccacacttgaaactgaatcactgtgtga

SEQ ID NO: 637895 - DNA, 153 bp, Homo sapiens
gatatcctgggcaacccccctccccccctcctccttttttccttcaagacccaaatgggcccccgctttgattccccccagcctttttccctgccccccctcccttagtttttcccaggcttactttccccataaatggggtagagctttgca

SEQ ID NO: 637896 - DNA, 366 bp, Homo sapiens
gctaccctcgatatgggggcaagttagcatcttgtgtaagtgagaaagatctgtgtgggcgcaataaggagtccctcatctggttgactcatgatgcccgcaccatgcgctaccccgatcccctcatcatggtgaatgatagcattcagattgattttcagactggcccgatcactgatttcattctacgttcgactctcgttacccttgttttagtttttgtccctgaaaacctaggaagaattggtgtgatcaccaacagagagaggcaccctggatcttttgacgtggttcacgtgaaagatgccaatggcaacagctttgccactcgactttccaacatttttgttattggcccttatcgag

SEQ ID NO: 637897 - DNA, 154 bp, Homo sapiens
cttttcccctctacaagaaagactccagtacaagatacctaggtcccaggtagtctaaattgtaacagcaacccctgtggactattgtagggtatgagtttatgattgaaatatcaaagcttactttatctgtaagttataagtttatccactc

SEQ ID NO: 637898 - DNA, 103 bp, Homo sapiens
gtggagaggttaatgatctgcttaggttacacaggtctctgtcagtggagcctggtctagcacataggtagctgactcagtccagtgcttttcccattacata

SEQ ID NO: 637899 - DNA, 668 bp, Homo sapiens
  misc_feature (629)..(629): n is a, c, g, or t
tctagaggatcccggtgtttcctttgtctctaacactctcagtgctttatttttgtcaaaatccaaagagaagaacagagaaaatgtgctttctccaaatcattcacaattgaaatcaacagcaagatcaagtctgaataccaaaacaactatgcactcagagtaaatctcatatatcatggcccactaatcaggagtcgggcattggggataaaacttcaaagcagaccaggcgcggtggctcacgcctgtaatgcccgcactttgggaggccaagacaggtagatcacctgaggtcaggagttcgagaccaacctggccaacatcatgaaaccctgtctctactaaaaatacaaaaattagccaggcgtggtggctcacacctgtgatctcagctactcggaaagctgaggcaggagaatcacttgaacctgggaggcggcggttgcagtgagctgagatcacaccagtgcactccagcctgcgtgacaaagtgaaactctgtctcacaaaaaaaaccaaaaggccggacgcggtggctcacccctgtaatcccagcactttggaaggctgaggcgggtggatcacgaggtcaggaaattgagaccatcctggctaacagggtgaancccgtttttactacaagtacgaaaaattagccgggcatg

SEQ ID NO: 637900 - DNA, 1245 bp, Homo sapiens
ctttcctgttaagtgggcacactgctacctccttcacagggctgctgagaagaaaggagacaggcgcatccgcacacagaaagcactcagtaaatgctgtttccccccttccccctatacaaagagactgaaagcaaccgcggctgcccggagggccgaactggagggtggccgcagccgtgacttccttgggaaccgcgctgcctcgactcggctacctctctgcgaagcactcgctaagccgggcagccccggggtcgcttagcggcccaggaggcgccagcgatcctgttcccctgcagagctatggggaccggaaggcgaaacagagctgtcgacgcgggagcatacgctgcccaccagtggagcgcaggtcatcaaagccgaatccgaatttgaattctgtgcggctgattgcagagctgtcttgaggccctgaggactgggatctgcgacccccagtggacaaaagtcgactctaccccagaggctaattttctcaaggcaggcacctgttgagaggctgcaagtaaaatacaggggaacgctagtttccgagctcatgtaagaatctgagaaataacgggggtaaactttgacaaaggggtgtgtgattgagacctgaggtcatgagattaatgggttcttattacctcttgcggggggaggtagtaaaggggaggggcaggtggcctgtggcgtcctgaagatttttcatgcattctttttccgagaactaaacattgtcaactctaatatatctatagcgcaacttgcttcaaggacagtaataattttcatttaataattttccatttaatccctttactacatggtcatttctgtctcttatattcctaggtttccctttataaggattagtcagatcaacattatatctctaacaatgttccttagctttttcactctcattatacctagagaatttaatggaataaaccagattttatatatatatatatatatatatatatatatatatatatatatataaatgtgtgtgtgtgtgcgtgtgtgtgtataaaattactcaacattcaagtagtcttgaaaaaagatgggtgggagtcaccttctttcccttcatcagttaccagtgttctcttaacataatggaagaggcaggaggtattcccacctacaactcaggattcctatgtcctatgggttcagttgtgtccccccccccaaaaaaaaacaccaaatacatctattggactcctg

SEQ ID NO: 637901 - DNA, 593 bp, Homo sapiens
  misc_feature (2)..(2): n is a, c, g, or t
tnttgattgactccagttgaaggtgagaaatctgtaccaatcattcaaaaagggaatctattgttttgaaagaaactctctcatatttcctttaaattgttaatagttgttatgcaactaaagaatgttatgaagaaaaatagcattgcaaaaagtaccattggccaggcttacaagtcagccacaatgagtcggtataactactgtgttattctttttctagacaaattttgactcttctacttttatgtgtaataattccagtattctatttatttcagcattatgtgaaaaatgataagaatgttaaaaagaaaataatagtgtggtttaattggtatgagatacctgcttcctcctcctcaaaggtttgactgggtgtatctctcctatgtgtgacattatgtctcctggtgttaacacaggaaatgagtgctcctttttaaaatttctttcttccaagtttttttttccaggaagagaaatatgcagttatgcaggaaaagctctcttaaataatgtgtacataaatctcaagagaatcaaattcacagagtgaataaagtaataatattaaactacaaaaaaaaaaa

SEQ ID NO: 637902 - DNA, 118 bp, Homo sapiens
ggcacttctgagcacaagcacagctacatccccttatccccatactagttattatcgaaaccatcagccgactcattcaatcgatagcccttggtcgtacgcacttgaccgcaaacat

SEQ ID NO: 637903 - DNA, 932 bp, Homo sapiens
agcggaacggttgaatcttgtggagctccagtcctgaaggtctagaggctggagattcaagatctgggtgccatcattttctggttctgttgatgaccctcgtatccacacaaacatacgagcaaaagggagaaagaaaagagaaggaaaagagaggagagaaaaaaaaaaggaaagagaagagggaaagagaagaaagaagaacaaagaagaaagaagaaagaaaaaagaaaaagaaaagaaaaaagaaagacggacggcagagagaagaaagagacgaaggaagggagagagggaggagaaggagagggagaagggagggcagacagcgaggaaaagaggagagagaaagagagggacgcgcgagaggcaggcgagaaggagcgggcaggagggggcagagcagaacgagagaaagaaaagaagaagaagaaaacaacagagaagaaagaaaaagaacgagaagaggaggagagagaagaacagaaaagaaagaaaagaagaaagaaagaaacaaaagaagaaaagagaaaaaagaaagaaaaaggaggaaacaaaaaaaagagcagagggagagaaaggagggaagaggaagaaggagagaagagagggaaagagaaaagcaagaagggagagcggagagaaagaaggaaagaaggaaggggaggaagggagaaggcagacgagaggaaggaagaggaggaaagacgaagaaaaagaaacgagaaaagagaaagcgagaagaagagaggaaacgagagaagagaaggaaaaagaggaggacaagaaaagaagagaagcgagaaagacgaagaagaaaaaaaagaagagaaaagaaaagggagagaaaagaaagagagagagagcaaagaagaagaagaagaaacaagagaaagaaaaaaaagaaagacaagaaaaccggaaaggaagaa

SEQ ID NO: 637904 - DNA, 136 bp, Homo sapiens
ccgtgtgtagggacgggcgcgagcgcttcccttccccctgcacgcgccggatcatgtctgagcaatgtcatttctgggacgcttcgcagctattatgtcgactcgatcataagtcacgagagtggaggacgcgcct

SEQ ID NO: 637905 - DNA, 341 bp, Homo sapiens
ggtcgacgatgaaacttaaaagatgaagtcctggtccgggcacggtggctcacttctgtaattccaacactttgggaggccgaggcaggaagatggcttcagccagcgacaaaaaaaaaaaaaaaaacacaagaaattagcagggcgtggtgacatgtgcctctagtctcagttactcgggaggctgaggttgggagatcagttgagcctgggaggtcaaggctgcagtgagcagagattgcaccactgcactccagcctcgacaacaggcttttggacatagcctgcctcaacaaaagaagagaaaaaaagttttgccctatggtgagtcggtcgacgcg

SEQ ID NO: 637906 - DNA, 890 bp, Homo sapiens
  misc_feature (1)..(1): n is a, c, g, or t
  misc_feature (115)..(115): n is a, c, g, or t
  misc_feature (173)..(173): n is a, c, g, or t
  misc_feature (239)..(239): n is a, c, g, or t
  misc_feature (295)..(295): n is a, c, g, or t
  misc_feature (312)..(312): n is a, c, g, or t
  misc_feature (382)..(382): n is a, c, g, or t
  misc_feature (487)..(487): n is a, c, g, or t
  misc_feature (509)..(509): n is a, c, g, or t
  misc_feature (554)..(554): n is a, c, g, or t
  misc_feature (764)..(764): n is a, c, g, or t
  misc_feature (767)..(767): n is a, c, g, or t
  misc_feature (803)..(803): n is a, c, g, or t
  misc_feature (821)..(821): n is a, c, g, or t
  misc_feature (843)..(843): n is a, c, g, or t
  misc_feature (867)..(867): n is a, c, g, or t
  misc_feature (869)..(869): n is a, c, g, or t
ncaatttgaacttccattttgttaaattgttcttaattattacttattaataacttcttctttgagtctctctgcaagcaatctcctctttagtaatgtttgcttctcctctgcngtcattcctggtttctctgtcattccctctacctccccagtgggttttcctttctgcnccatattttgtatctttttagtcctcaaatcctttctcatggacatcaacttatctctctcctgcntgagaaagtgtcctcgtggccgaagtcctcctgtcccaagtcctgaaaagtttgcnattggtccttcaatgcncgcatgccctaagccaggaatctccaggcctttctgtgggagggaggaagtttcagacctttccactctnctccccaaaggttctattgactgattagcaaaatgcatttaaactcctgagggtgggtgtccaaaaggttcaccatccccttgggaataattcattattgcagcntcactggaatccactgtgggcnctcctgtctaagcctctcaaaactgtcttttcctctccctttctnctccctggtcatatccctctcttgatttcctaagaacttccctcaggattttcatctctccgtgtccaaggtcactgaccacatcagacccatcggttaagcagtcaggtaatacaccattcctctctcgaatcattcgaatggcttgcagcgcgcattgcaatgtctttctggaccatcattgctttaaagatagtaaaatcttctgcngcnaacacaggtggcaaaatggcctgtgatgtatgggtntttgcaagaggagaagtncatgctttttgaaattgatctncattaattccaatttctttgaggnancttctaacagcttttcaacta

SEQ ID NO: 637907 - DNA, 327 bp, Homo sapiens
agctctctctgtggggccagcgggcgtatatcagccactccccttcactggtcctctacttggtggctcccttattttctcccagtcatcagggcctttctttacttttcctaactagctcagatttcacaatcggtccttggactctccctctggccgtctagtcgggcccaatggagctcacctttctcggggggtcggcgccggcatgtcctcggcagagaaggcagggcgatggcggtcaccggccttcaccgggcgtcccgtggccggcatgccggccctgcatctccggtctcctccccacagagagagcgtcgggtaccg

SEQ ID NO: 637908 - DNA, 154 bp, Homo sapiens
tctataggatcccccaagtcataaatttgactcagattttattgttgaagtacaaactctgttctcttttccctatgtcgggctggctctctatacagttaggcacttgtctccttgcagactccgtgctctccgcaaggtattcagtagtttt

SEQ ID NO: 637909 - DNA, 427 bp, Homo sapiens
gacggattccgagtggttaacgccctgcggtatgatgtagagtactgccacatctttgaaaggagctgacccttgtgctatgatacccggctaggacagtggcagaagagcattctggccgtgggtatcgcaggcatgatgactacagaggaggcggggaccgctatgaagaccgatatgacagacgggatgatcggtcgtggagctccagagctgattcctctcgggatgattataggcgtgatgatagaggtccccccaaagaccaaactgaatctcaagcctcggagtcctcctaaggacgatgattcctctgctagtacctcacagtccactcgaagctgattctatctttggaggagcaaagcctgttgacacagctgctagagaaagagcggtcgaagcacgtcatcgaagaaccaattag

SEQ ID NO: 637910 - DNA, 130 bp, Homo sapiens
ctccagctggccccaatgcggctacggggttatatcttctcagcaacgggccgcagtctcttctgcaccattttctacagccagacctgcttggcaccacagggacgctctgtttcctgaccctgacaca

SEQ ID NO: 637911 - DNA, 1576 bp, Homo sapiens
ctgcccaacgcgtctgcagcagcctcccccttgatgccccctcgcttcccgacgttccagttcccccgctgccctgcacttctgacccgccaccagactgcgccgcctatcctgaaggccgtgtccaccgaggaaaaggaatcgtatcgtatgtcctgcatatcctagaacggcatccactcttgtcagaccccatttgcgtgatgcaagtaacggtgatgaccatgcattccatgctcggcacatgaggattatatccatataagaattcaacagagaaacggcaggaagacccttactacatgacacaagggatcagcatgaagattacagatacacagaagaaactagatagaagagcgtacaacaaaaagtacgcctgcaatggcacagaaatagaacatccggaactatggagacgtactacagactacagggtgacccaccgcaccgaccatatgccagcgccacgacgaccaatggaccagcgcaaagcgacagcacacaagaaacagacactggctacataagaacgcaagcggcacactgaagcaccagtgccacaaccctgcatagacagcaaaaccctactcacaccacgaaaaggtacaacaaacctcaaacaggttcacagcaacaaacgggggacgcaccaaaacacgcgaccactcgagaccctacagaactaaacaaacgagccaccgcccacccaacgagacccacaaaaacacaggcagccaaggcgcaagcacgcaaccaaaaccaccaacgcagtacaaggaaaccacccccaatgacaacctaggcctcccaccacacccggagccacaaaccccccgacatcccataaagctcaccacataaatctgcactaaccaaaacaaaacacgatactctcatctctctcttccttccttctcatacactacaaccacaacacatccacaacaaaaacacaccacacacccccataaaaccacaacacaaagcactaacacaacacacacaagccaccacacaaacaaaaaaacaaatacaaccagacacacacgaagcagccaacgaaaggcgcaggacaaagagcagagccgaacacaacaaggcaaggacagagagacacgaccgaacgacgcacaccgaggacccacaaccaaacgcgaagaccgcaaggagaacaacgcgacaccgagaagagggagaaagaccagcacgcgagcacgacaacaaaagaaagacgacggcggaggaagcggagcgcgagagggaagggagaaggaggaagccggaggagacgagaaggaggaggaagagaaccgacgacagcaggagagagcgagggcagaagcagaaagaggaaagaggaagaaggagagacgaaagggaaaagcgggagacagggcagaccgagagacagaggggagcgcaccgcggagaggacatagacacgaagaccacggcaaagaggcgagcgagcgatggacgcacagagagagcgaagagaacaaggaagggcgagagacggagaaagcccggaagcggacgcgaacgcggagcaagggaagacgagaagacaaac

SEQ ID NO: 637912 - DNA, 226 bp, Homo sapiens
ggggggggggggggggggttttttccccccccccccctttttttccccccccccccctgggggggggccccccttttggttgggggcccgtttttttccataaccccttgggggtggggggcccaaatacataaacccatccatatatccccagcccagccatgaaatagggccaagcaattgaaaaaaagaaaaaaaataagcaaaaaacaaatgtggttaaaga

SEQ ID NO: 637913 - DNA, 725 bp, Homo sapiens
gttatgtgtcacacacgcgccccttgtggggagcacacttgtgttgcagacaacaccagctctgtatataaagatcatagagcatcgtatgttatacagttctcgtacgcaacggagtggctagtagggaacactaaatataccgtgatagtttcctagaactatgagggctcttcgccttatagagttgacgaccccaccccttgtggggagaataaggacgcgggacctctttctgcacgcgtcatatttgcctgttgcaggacaactcatcgtggtcttgttggggaagggcatcatttcttctttttcccccggcgacacgcacaccccccgggcgggggtcattatattatgagtctcctcccctcgcaggagttgtcgatatgtgttccgttcagttttgtcctctctgggagagaaattggtcgccatgggttttctgacatggcgggggagttttaaccactcgggcgacccccagaggttactctgtccaagaaagaggcccccctctggtgacatcaccctgggggtgtcatctcgctttctctacatgggcgaacattatgatgattcttgctccggcgctttcttcgtgagtgatgaaaggtgtggagtcgacccgccttgcaaccaggtctccaagattttcatcatccaccctggtcaggaatactgaacaaggttggacaatcccccgctccaatcaatgtcgagaaaga

SEQ ID NO: 637914 - DNA, 219 bp, Homo sapiens
tgctgcatgtactgccagtcccaggacacaggacaggacttatctgttgatgtcttttccctcctcacactcacctccaggccctttctctcattttctttattttctctttttaagacaaggtctcactctgtcaccctggctggagtgcagtggcatgatcatggctcactgaagtctcaaccatctaggctcaagcaatccttccacctcagcctc

SEQ ID NO: 637915 - DNA, 376 bp, Homo sapiens
tttgccccaaaaatgtcctgactttgcccccttgcccctcagccatttgccatccccccaaacaactcagctttggggccggtgagggggggggcctccccccgcccaaatgaggggcagctggggtaggctgtttgtgccatggcccccccctcccccttcccttggagggagggggggcaggaatacttcccctttcctctcccccaggggcaggggggggaggggcgccccgggttgtctttgtgtatgggggaaaggccctgggggcctccagccccccccctgtttcagatggggggtcccgcccccgattgttgtaaactgttgttttgtatgagcgaaattgtcttttctaacccgattttatagttta

SEQ ID NO: 637916 - DNA, 1295 bp, Homo sapiens
  misc_feature (410)..(410): n is a, c, g, or t
gcgcggggacactcgtgcgacttggggcaaggtgcccagagtgcttctctcctaatttgcctcacgctaatgagttgagatcccagagggctaggaaaactgggttctgaatttgagatgagccgtcctcggcatcagatcgagaattcattcatctgcgccagatgacccggctaatctgcggattccacggtcgcctgtgcgtacgcatatttcctaggaagccttggctatctcgagcgttctcttcccagacaggaagcgaatcgggtgtgcattgaacctcccgctcgagagcgacattgcgggttgaacgagcattggcggcgatagcgatagcagcatatgatcgctcaattgagaatgctcggatttgctttggtaatgaagatgctgccccgtggcagcangcatgtctggctacttctatatccaggattgcgtcatagaggcacaagccttgtagacagggcgggtctcattacgcgtttgcgctggcttggcttgcggagcccgagcgtgaggggagtttgctttctttcgggcttagggcggacgaccccttggagctttcctcccctcactagtgacatcaagggaaaccttggacttcctcgtgacctacataacctagttccacaagaggcgttcacgtagaaaggctagggcacgccctcaatgacttattaatgtctctcgaagaacaatgtcgtaccaatgggagttaacaaattgcgccaattcattccccggcccccaggtaggacttgtaccttacgcggggcatttactagtcacgccctagggatgatatcttagagttataccaaagggaattaagaatggggccctttcgcaatatctttcttacgctaagcttttacagggtattggtcaagtccctacattcatttaatcaacagctagatttctctactttttgtgcttgggctaaacgttggttgtatcggtgtctagagttatctccgtgattgatttcccgtttcaggtacgcttaattcttggggggaaacagcccgttgggtgccaatttcgaaggaattgttccccagggccccaacatttcccatagaaaagggttgctttccactctccccttggttgcctttggaagattccaaacttgggcccggcagaaacccattaacacacttgagagaagcacaaggtttaacttctggcttctaaatcaaaaggatattcaccattcttaaggaacttgggcgggttgtggccagggggcctgataggggggtgtgggggacgacacccgg

SEQ ID NO: 637917 - DNA, 332 bp, Homo sapiens
catcatgattaggattctcagggtatcccctcacacactcctcgactcccacccctgggatacatcaagagtctaatattgactgaagagaggccttggtagaaaagctaatgaagtcatatggagttgctgtgcaggccagaagacacagctctgcctccagataggcgagtttgctccttgagctcctggatggtggcgtccgttgactggatcacggcttgtgaattctggagctgcaaaggggtgggatacacgggcggtcatttaggagggactcattacgacgactcaccagaattcaccccagttgctgggaagggtcccgagct

SEQ ID NO: 637918 - DNA, 1237 bp, Homo sapiens
  misc_feature (361)..(361): n is a, c, g, or t
  misc_feature (598)..(598): n is a, c, g, or t
  misc_feature (1004)..(1004): n is a, c, g, or t
ggagagaactagtctcgagttacgatatatatgtttcgataaataccacagacacttgttttcccttttaagtttggttaaaaaaaatttctgacaaatcaaaaaggggggttacaggagtctttgtggtgattgcaaaatcgagtggaacgccagtggggtgtggggcctgttcaggggttgggggcagatagagtgatctctattacacccccacccgtggagttcctctccttgaaggactagcagggtacacatttccaaaattgggagagttcttcataccgggggctcgtgtcacaagtgttaagagagggagaatggctcttatctctctccatatcagggacacggctctcanctataagatatgtgtgagcccctcaaaaagcagaaatcctgtgagcacatatcaatgtgacgagatctcttggagccactccaatttcctcacttgggggacaccacacacagtgtgtttggattacgcacaaagggcccctgtttggtttgtgcctccaaacaacgccgtggcttgtgcactcctgtgggccccacccccagcaagttgcacagagtataaggggtgtctcgaggnaaaactccctctcaaggggaccagtgtctccatctaaattataaaacgagttccaaagtgtttcaccaccccccgactttcgaaagttgctccccagtggtccctctcggtggcccaaaaatttagtgttttggttaaaggcccacaaagaacattctctgctcaggtggggagaaaaactctgtttaaaaagcagtgtgctttgtaatcacccggagaaaaagggcctctcttaccatccactgtgatgggaacactcccctagagtgatagagacatttggcccaaactgggcctgtagggaacgagaattattagggctcccaacgtataaggcatcgtgcttgtggccccacatgtgcaaatgtgacaccccggaatgtgaaaccagggaagtttatcacgncaaagaggactacacccactcttagtgttgtgcaaactctcaagtgggcactttccaagaaagttgttaacaaagaaagcctcccgggaataccatacaacagatggacctttacaaagatcaccagcgataagaaactgtggggtggcaaccccatttgacacggggttcaacacttgggtgtcttcagcatagtccccagggaaaagaatcttccccagtgggaggactgc

SEQ ID NO: 637919 - DNA, 772 bp, Homo sapiens
tggatgggcatgtgttggcacgaaagcacccggctggttcctcaaacgatacctcagcagcagagttaccaacaggtccgccgctgcccagcagatcccgatctcccttcaccacatctctgcaggcacaagctcagcttggactgaggggtgaggcattcctgtggtcccagtcccaggagatcttcagctccttgacagcccttcagatctcaggtgtacatgcaccccagccgtgtcacctgaccagacacacatgatcctctctgggggcacacgccttgaagcctccatactcggcgttacccaggcatgcagcccttggacgatgtgtgaatgcctgcatgtctgtgctcacacctaccaggcccaactgagcgggaaccaaagcccttggtctacgacgggacaaagctcagctcagtgcttgcctggcctgggatgcctccccaagaatgttgggacctccccatgcatccctacacgcaaggcttgaccactgcccactgaccatcggttacagggcatccggggcagcaagcccacgttgatcctgccacccagatctatatccagacatgacacacatgtggcatgagacctctaccgataggggagccccccgaatggaattcctaccgcccgggtcccaaggcccgcccaatgtccatggaacacccagacagagagaccctctcagactggcagcactgacaatggctaccactttgccgaaaggaaaaaacagaattgtccacattcaagagggccg

SEQ ID NO: 637920 - DNA, 393 bp, Homo sapiens
cagcggaaaacggatcggaagcctggtgtcacctaacattgtaaatgaccacacaagggaagcaacaatcttgtctgaaggacgaagtaaatgatacacttctggtgactgaactcgcaatcaaaagaatctgacatcatgacaacaaatggtgtcgttcaggtcgtagatcaactcctctatcgcagcagagacacctgatggaaagtgatcaacggctgggaagtacttcataaattattcaaatacatccaagattaagttggtacggggtagcaccttcaaagaaatccccgtgactgtcaatactactaaaattataaccaaagatgtggaaccaaaaattaaagtgattgaaggcagtcttcagcctattatcaaaactgaaggacc

SEQ ID NO: 637921 - DNA, 288 bp, Homo sapiens
gagacaggttctcactttttcacgcaggctggagtgcactggtgtgatctcatctcactttgacctctgccttccaggctcaatcaattctcccaccttggccccctgagtagctgagaccacaggcatgcaccaccaagcccagctagtttttgtatttttttgtaaagctgtagtttcaccatattgcccaggctggtcatgaactctgaggctcaagggatctgcccgccttggccttccaaagtgctggaatcagctgggatgagtgctcccttctgtcgtctt

SEQ ID NO: 637922 - DNA, 349 bp, Homo sapiens
catatgtacataagactgacttaagattatgaagctgaatgtacttcttttgtattaagagcttaggttgttaaactgacccctaattttgtggtgtgtgtgtgatcctaggttctcgtgtctcttaaatggctacccgctctagttattggatttgtttgagcttcataagacttcactgaattggtgatcgctaaatggcctagtttgtgccaatatgtgttggtttctctctattattcctttaaagttttattgtttaccagtttcttttttgtattgagagaaaaataggccaagcatctttgacatcttttctgcgacaggcaaaaaaggaccttgaacaaag

SEQ ID NO: 637923 - DNA, 694 bp, Homo sapiens
  misc_feature (528)..(528): n is a, c, g, or t
  misc_feature (639)..(639): n is a, c, g, or t
tttagaaccaatgagatattttgtaggtggatcctgagggaaattggcattatcttgcatggcagctgcctccagggaggctattacagtttcctcaggcaatgcagggttagtcccctcagatgttggagacgctgtttccactggcaaagacgactcatcagaatttagaggctcagccaggcgcctgtaatcccagcactttgggaggtgaggcaggcagatcacttgaggtcaggagtttgagaccagcctggccaacatggcgaaaccctgtctccattaaaaacacaaaaattagccaggcatagtggtgcactcctgtagtcccagctacttgggaggctgaggcaggagaatcgcttgaacttgggaggtggaggttgcagttagctgagattgtgccactgcactccagcctgggcaacagagcaagactctgtctcaaaacaaacaaacaaggaaagagtttagagctcagtgtacccagctttatcaaagtctccccacatgtcctcatttcaactntcaagatccagttccttattgatcaataacctcaatttaacagtagatacccttacaggctaggagttcttgctttcagccagtcacaggataagaatctaggtttgattntcaacaatcttagctctgcctacccgcgatatggctggcctttagggcacacacg

SEQ ID NO: 637924 - DNA, 336 bp, Homo sapiens
  misc_feature (25)..(25): n is a, c, g, or t
  misc_feature (82)..(82): n is a, c, g, or t
  misc_feature (250)..(250): n is a, c, g, or t
aataaagtccaagccttgtaagttncctttccatggatcatgccctttgatgttgtatcaaaaaaattatcacggctgggcncggtggctcatgccctgtaatcccagcactttgggaggccaaggcggtaggattacttgagcccaggagtttgagaccaccctgggcagcatggtgagacctcatctctacagaaaatttttaaagattagccagacgtggtggtgtgcgcctgtagtcccagctacncgagaggctgaagtgggaggatcgcttgagctggagaggttgaggctgcagtgagtcatgatcacgccagtgcactccagcctggg

SEQ ID NO: 637925 - DNA, 395 bp, Homo sapiens
gaggtgccaatcaaaattgtaatttaaataatttgtccaggcatggtggttcacgcctgtaatcccagcactttgggaggctgaagcaggtggatacctgaggtcgggagtttgagaccagcctggccaacatagtaaaaccccgtctctactaaaaatacaaaaattagccaggcatggtagcgcatgtctgtaatcccagctactcaggaggctgaagcaggagaatcgcttgaacccaggagacggaggctgcagtgagccaagatcacaccactgcactccagcctgggtgacacagtgagactccatctcagaaaaaaaaaaaagtgtttcaacatacaatcaatatttttaaattattaataaaataaagttttttcataataaaaaaa

SEQ ID NO: 637926 - DNA, 440 bp, Homo sapiens
  misc_feature (10)..(10): n is a, c, g, or t
  misc_feature (77)..(77): n is a, c, g, or t
  misc_feature (84)..(84): n is a, c, g, or t
  misc_feature (101)..(102): n is a, c, g, or t
  misc_feature (122)..(122): n is a, c, g, or t
  misc_feature (136)..(136): n is a, c, g, or t
  misc_feature (151)..(151): n is a, c, g, or t
  misc_feature (153)..(153): n is a, c, g, or t
  misc_feature (157)..(157): n is a, c, g, or t
  misc_feature (169)..(169): n is a, c, g, or t
  misc_feature (177)..(177): n is a, c, g, or t
  misc_feature (202)..(202): n is a, c, g, or t
  misc_feature (211)..(211): n is a, c, g, or t
  misc_feature (260)..(260): n is a, c, g, or t
  misc_feature (312)..(312): n is a, c, g, or t
  misc_feature (315)..(315): n is a, c, g, or t
  misc_feature (334)..(334): n is a, c, g, or t
  misc_feature (337)..(337): n is a, c, g, or t
  misc_feature (351)..(353): n is a, c, g, or t
  misc_feature (405)..(405): n is a, c, g, or t
ctcgggtacngggatattcgtgggctcctgactatgatcgaagccaatggctggatgtgaaattcaagctagacctnaactttnctaatctgccctacctnntggatgggaaaaacaagaanacccagagcaatgncatcttgcgctacancnctcncaaaaaaaacangtgtggtnagactgaagaaaaaaagattcgagnggacatcanaaagaaccaaataatggatttccgcacacaactgataaggctctgttanagctcataaccacgaaaaactgaaagcctcaatactatgagaaaaagctacntgnacaactgaaacaattctcnatntttctggggaattnnnatggatttgccggggaaaagctcacctttatggattttctcacctatgatancttggatcaaaaccgtatatttgaccccaagtgcc

SEQ ID NO: 637927 - DNA, 1326 bp, Homo sapiens
  misc_feature (494)..(494): n is a, c, g, or t
  misc_feature (747)..(747): n is a, c, g, or t
gtgacaagaccattgggggaggagatgactccttcaaacgaccttcttcagatgagacgggcgctggcaagcatgtgccccggagctgagtatgtagacttggtacccaagcagtccacttgatggaacgatatcgtgactgggcgaccgtaccgacaacctgcttccacccatgaatgcatcttcatcacagagacaaagcgtaagatgctgaccaaatagacatatgacccgagggcacatacactcgatatggcgaagcgagatcattgaacccgttgctggttggaatccgagattcgagcaaagcctgcgtcatgaccaaggtgacaaccggctcgtatacagcggtcattcgtatggatagaagcacagcagaatgtttctgagatgcggagtgcagacgtagagttctctcgggattcgaccccatcctggcgtgagcagtgcactgcgggaaaccgcgatctgtgcggtagcagtatctgagagtnctcatatgagtgcgaaaggcaccaaactgcgccaaagagcctggtgaaggatatctatgcgcaattgtttagcacaccggtgcaaacaccacccaggtgatgttgtcccattccaacgtgcgttggataaagcgttctggaaggaggccgctcgaataggcctacagagcatacgcaatttaccaccgtttccatggcgacatgttacccctaacaaagcggcgattgcgcgccgttggtggcatcggccaangcgttgccgtggaaaagttcgtggactgggcggcggtgtacacgtttggggttacattgacggcaggaaatggtaacgcaggcctacaactgcgggtatggtgagcaaagcagaatcttcgtgtcgggctctcgggtcttcaccgagaatgacgtaggcaaccgatatccgaagaggttataagagttcccggaaacgggacctgggtctggcgacaaagaaagcgcacacacttaaaaggatagggcacttaaaaaaggcccccattcctggaaggagggcctacctggacaacctatagtaagttttataaaaggagctcccaacggcacatttggttggggttgtgttaccaccttgacgcaacgatttcaatactccttggggcctatatagcgctccgcctttgggagagcgcaaacttttcttgcgaacgcttttgggggaagcgtagcgcttccgccgtatggaacactggtttggcgataattatggaaatacctctctttggggaaacggcgacgggcgaaaaaacagttgtggttccttcaaagcaaacagaagacaaggggagactcg

SEQ ID NO: 637928 - DNA, 1189 bp, Homo sapiens
agcggggatggaacccgggcctggctgaggcggaggtgttgcggatgcttctctcgtccaggcgcaccgcagattcctgcccgggggctggacccgaggaaccgcacgtctctactgggttccgacggccagcaggctgggccctaggcatgagcggagagtgggactggcagccttgaaacgggcgcctaacaagaagcccgtgcaatccaagtaggcctgcagcctcaggcttggagcactgggcgggcggagacccgcgctgagctcgttctgtccattattactccatagccaaccctgcgccgtcctattatctcacgccggcaaggccgctcaaacactctccggtccttactcagttccacgccaccactcaggttccttactctcgctctactagcaccgtttcctcgtgttcatctgtgcctgtgcgatttcccttggtaacttacaaactcgtcctatacacgcaccccctggctcgatgccaaacacagtttgtggtggtgcattcctcgcggtgacctactttaccgttggcacaatctttgactggctggtcgccccacgtgttccgacctggaaagaccgccagagtctgggcgcactggcactgagctaagtgtttctcgcccctcccgtgggcttgccacccggtgtctcccccaccgggcacgtctaggaactgcgcaccctcagctgcctcacaccacgctggtcgctgttgggctctacacctccctgctaacttttccccccaaattgtgtcgacccctccgcagatcactcctccaagacactggggtcaagcaccccagttctacggcaggaactcacgcatttgtgtaagcgctcgatcagctttgggctcacttcgctcctcccactcaagcccctcccagcgtactcattcgccggccccctccagctctagccactgcctcttgaaaccccttctgagaccgcccatttggcacatctctggcccaccctccctgacatgatactcactatttcactcccacactagcgccactgcctatccaacatagcgcggcatcgttctactgacgcgccccctgtcatacacgacgtcgtcctcttcactcaccggctcgcctcaccatcagggcccaacgctcacaaccccgtacgtctccctcctgacaacgtgtccccgctacta

SEQ ID NO: 637929 - DNA, 202 bp, Homo sapiens
ggctgtttcaagtgctctggaggctgtgggggcggactcatgaggggggatagatctaaatcagtacctggcatgcatggtgctgggccgcttgctcagtagtattacaaaaaaagaaaattggccaggcgtggtggcaggcgacctgtagtcccagctgctcgggaggctgaggcaggagaatggcatgaaccagggaggt

SEQ ID NO: 637930 - DNA, 743 bp, Homo sapiens
ggagggggaaaaacattaatccataccatgctgaaattattttcgtatacccttaaaaagcagaagggcggagaggacaaatagcagtgagcaatttactggttgtctcacgtagattctttaaggttacaaggagcagagagatgtgtagtttaccttagttgaaagttaaaagtgaaatagacaaaagaggagggacatgtgtccatttctgcatagaaatctcatggaacaggaaagccatttgggttgcagctgtaattccagagaccctctggacaccacagctgcagtgatccactcaagttgttatcccctcagcaagcaatatccatttcttcttttttgagatggagtctcgctccgttgtccaggctggagtctggagtggcacgatctcaactcactgtaacctctgcctcccaggttcaagcgattctcctgcctcagcctcccgagtggctgggattgcaggcgtgtgccaccgcgcccggctaattttgtgttttggtggagatggggtttcaccatgttggccaggctttgaactcctgacctcaggtgatccacccgcctcggctcccaaagtgctgggattgcaggcatgagctaccaggccgactagtatccactttttctaaacctatgccccaccattttggggctaaagctacattctgttctgttctacttatttgtgctgtatacttattatctagctaatctgcctaggtgtatcccaa

SEQ ID NO: 637931 - DNA, 559 bp, Homo sapiens
aagtctgaatggagatatggctaaatatgtctgatataagtgcggtatgatagcccttagaatttgataaatgatgactgtgaagatgtacattgtttgatgcggaataggagacgataatagatcaagaacagccatattcagacatccagctaggatcgttttttccacgttattctttcggagtcagtgcaatcatcggtctatctgctctgtgagttgctcagcagcagattcatcaccatgtatggtgactaattatctggtgttgtcgtgtgagttaagggcagtgaagaatgtccacagagtaggactaatggttggtggctagcgtttggtggtaatccacacttgtatgcaagcatgggtaagagccagtgggtgtctgaatctagaagggagtcctctcgaggagaataaagagtgtgtcagaggctgaatcaagaatcgtttggttgggactaattgctgttgcagtactgtgggtgatatttgcctttagtgcactcttctccttcagagtacagtggttggcggtggtgaatcagtgggtgtggtg

SEQ ID NO: 637932 - DNA, 273 bp, Homo sapiens
cggcacgaggttaaagatggccaccaacagctgcgggaaacggcaacaacccctcactttccgggatggtccctgcgggtcggcccggccttgatggagagaagaaacccgaggagcgccgaggctgaggcggcggcggcggggacccagcgaggacgaggacgcggcggagcagggacgggggcaggagaagggaaaggcggcggcgtcgctgcccctgctgcctagcaccgctgcctggcccggcggaccggttcccatacctcgcggccg

SEQ ID NO: 637933 - DNA, 335 bp, Homo sapiens
ggtcgacagccgagatagcgccattgcactccagcctgggtgaagaagcaagactctgtctcaaaaaaaaaaaaactaccacaggggtttatcaggctgccttggagttctcaggattgtcagattgttagggtctctgctgttttgaaattcatttctctctatttacagggcttattttttcccacttcaaactgaacattgtacttgatagagaaacggaaaaaggagtttatcaacagtgagatttcatgtctgaaaaaaatttttttaaaagtcttaatatctacaaatgggcctgttggaaaggttgaataaaacatggatgtaaagta

SEQ ID NO: 637934 - DNA, 441 bp, Homo sapiens
  misc_feature (198)..(198): n is a, c, g, or t
  misc_feature (287)..(287): n is a, c, g, or t
  misc_feature (358)..(358): n is a, c, g, or t
  misc_feature (400)..(400): n is a, c, g, or t
  misc_feature (413)..(413): n is a, c, g, or t
  misc_feature (432)..(432): n is a, c, g, or t
ttatccagcacaaaatgtcagccactgttaagaaaccctggtgtaagcctaaaacttttctctgttgaaggggtatgacttttttctttgggtaattttttattgtaaaatacaacataaaatttatgattttagcccttttgttaagttttcagacagggtctcactctgtcacccgggctgggagtgcagtgggcnaaatcacgggctcgctggcagcctccaatctccccaggtcacaaatggatccctcctcttctcaggcctccctaggtagcgggggactngcagggtgtttggcaccactacgggccaggttaattttttaaaaattgtttttgtagggaggacagggggncctttgctggttggatggcacagggctggggtctttggactnccggggggggttnaggggtgatccttgccccncccttgggg

SEQ ID NO: 637935 - DNA, 448 bp, Homo sapiens
acctgtaggtcagtggcatcgttcctctaccgtgcaacacgtaagtgtggtatgctagaaagatccagtccgtaaaagggctcactgagatcacgtcatcctcagcttcaactgccatctaaacactgcagactcttccccctagtacaagatgccaggtcaggcacggtagcacctgcctgtaatcccaacacttggggaggccgagggaggcagataacgaggtcaggaattcaagaccagtctggccaacatggtgaaaccccatctctactacaaatagacaaattaactgggcatggtggcatgtgcctgtaatcccggctaggagggaggctgaggcaggagaatcgcttgaaccaggacctgggaggcggaggttgcagtgagccaagatcacaccactgcactccagcctgggctacataaggaaactccatctcaaaat

SEQ ID NO: 637936 - DNA, 922 bp, Homo sapiens
tatgtagaagcacatcatcagcaactctgaccacacaatacaagcaactgatttctacagaccaagaagaagcagtggtgctacaactgtgaagaggaggccatgtaccactgctgctggcacacatcctactgctccatcaagtgccagcaggagcactggacgcggaaggaacatagcgcacctgccgccggagaagatgaatgctggcccttcccggagtcaccccgatgattactcttttcagacacagcggtcttagtgtttccacatgaagccaaaattgtctagaatttagcttcccatttaggcagccagcacctttaaacaccttttcgtgaagacaattttgcacagtagtaaaaacatctttgtgtcaattgctcctccgaaacgtcttaacagggggtaaacagtaacatcagtggacgggtattactcatctcaactcaactttcacattgcgcaatttagtctgcatttctcacgcaccattttaagaacattttctaaggttcttacacgacgattttacacctttaacacaacagatctttaaacaacaacaggtggaataccatgtgagttttcaacaacagaaacatttagcacataagatctgacattgtaaacgacaactacacggaactgtttcacgcaaattacacacataactaacttgaatgtgaccatttttttactttaacccttgttggagctgggtatccgtcaggcttcaactatactgtttccaccagggcattaatcatgatggtcacacccagcgggtataatgacaacgcacatcgagggaacaggtttcgaccccaggtcgggtatcgcacaggcaatatttctctacaatattaccccaaataggggtttccaaaatatttcacaatccaacttaacacacagtatg

SEQ ID NO: 637937 - DNA, 258 bp, Homo sapiens
tgcatggatgcactgaataattgcctttcttctaaattccaaccgaacttcttccaacctccaaactggtgaaccccaaatccaagccattaactacacctgacagagcaattgtctgattaatcactgaccccttgaagacagcagaatgccctttgcaatgagagcagatactggacttgcgtccaactggaaagcatttgactatctgaacttggagtgcctcctcagaatggcaggactcacctggatttaata

SEQ ID NO: 637938 - DNA, 224 bp, Homo sapiens
aatcgcgatagatccgggattggaccagaagcgccggtcctcgtgtggcgattactgccttgcgaaacgtcgctggaatttcgtcgtaactcagtggatgcacgcgcttctcgcgcatgcgcagggccgtcgcctgcctcacgcgcgcggcgacgggattcagcgtgtggaagtacacgtcctgtcccatccacaatgcgatcttccgtatcctggtcgtagct

SEQ ID NO: 637939 - DNA, 707 bp, Homo sapiens
gacctgctccagcagctggtgctgcaccagcaggaggtcctgccccctccactgctgctgctccagctgaggagaagaaagtggaagcaaaaaaaaaaaaaaaaaaaaaaaacaaaaaacatttgttgggagcgactgtgccccctagaaagaaagttttataaaccattgtcggttgtggggccgcggcccaggtgggtttaggttgaaccacggtcgccacatgagcggttcccagagggaagactccggggccatgggcatatgggtgcgtgggttttccaccaaataaaaaaagcgccgggggacacacgacgagcgtgttccttgcacacactccaaagtggggagttcagggagacaccaatacgggggctacatacacacagggaggagtcacaaaagggaagagcgtccagagatataacaaaaaattaaagcgcccccgaccggtgggggacaaagaaagacaacaacgaagtcgcgcaaaggacaacagcaaacagacagagcgaagacgaacagaagagaagacaagagcacgcaccagacgacagaacacagcaacacaggcaataagaagcagtagataacaagagacacagagcaaaagaacgaagaaagcaacaatcacagaaagagaaagcaaaacagacgaacagaacactagagcggagcacacgaagagaaagaaaccgagagagagg

SEQ ID NO: 637940 - DNA, 561 bp, Homo sapiens
ggcctcattggttgcgattactggtgcttgccactatgcccaactaatatttggaattttcgcatacgtggattccagaggggtgacatgtgaaacgtggtaccatccagttgcaggaaaacaagctataatacgcccactgattctagattatgctcttacctcccggcagcctctccaggcccagaactttctccagtcaggctctagagaccgagctcatgactcacaatgggctattaaggcccataccctgcgtcacggaagtctccgcagatgagcctactgtcgccttaagagcctccacaggcacagatctatcgttagtatggcctctttagacccagctcctgcgtcgcagcgttctctccaggccctgaagtttctcaagtcgagctcaccaggcccaggtcatgcttctttgcagactctccaggcccagctcctgcaccttggtggtccctccaggcccagcctctgccttccgtcggtctctagagtccgacatcttgctcacaggagattcttcacgcccagcatctggctcactgtggaacctcc

SEQ ID NO: 637941 - DNA, 1983 bp, Homo sapiens
gtttaatgttagtgatgttagttttgttattgatggattgtaatagtgttttgaagttatgttgctatgtgcttttcagtgtatgtgtgctagttgggttagtgtggaagagtttagtctatgtgatgatagggagttgaggttgatgtaagattggtattactattgagtattggataacgggatgattgattaatgtaatgaagtggattattaggataaggggtgtttgttgggtagttgatggtatgattgtatatatgtcattttggtatgatgtgtttagttagttgttgtggttgtgtatgtgtgtgtgggtgtggtgtgtagtaggtggtgcgtggtgtgggtagtgtggtgtgtggggtgtggtgtggctggtgttggtggtgcgcccggtcctgttttgtggttgttgtgcgcgcgggtcccactgtgtttgatgagtccattggcaccccgtttgattgctgtgtacaaatacaacaacataccagaatgttttaagggggggacaaccagactattgatgagaccttcgcgtagagggggtacgccaccgacaagaagtggtggtgggacccgcggagaagaagaacgcacctcaggggcgtttgtggtgtataagactgtcttcggcggcgccccaagtttgtagactgtttatgttgtatcgcgaggttctgcttttaaaaggggtgtaatactccgtaaagggcaccaactttggtgggggttgtgggcagcgtatatatatttgtcctggggccacacccggaagtgggccaacacctattttggtgttgcccctcctgaaataatattatgtggggggaacaccacccccgtcgtaagtttggatgaaattgtgggccgcttttccacacacgcagtcagaagggaggtttttcaaccaccctgcggtgtcttcgcatggtagtaccgtctgtggtgagaacgaccctacacgccgtggtagaagaatttgtggtagtaccgcctcggtggcctcgcgccttggtagaagtaggagtaggtcgccggggggacaactttggagacactccgacggggtcataaaggaggcgggtagaggagatgggagccccctcctgctattgtggggaggagcgtgtgtgtgaggaaaaggtgtggagatgtggagaagacgcccggagacaccactggtgagccgcgtctttgatcgacagaaatacgccccaccacaacagcggtggtcgcctcgatgaataatactttatcgccgcctcataacccgtgtggcgacgttgtgttgagagaaatgttgttcccggtgagtgggggggcggagaacacctctccgggagaggacacaggagagacgcgcacaagacactcctctccgagacgacacagttgaacacatcggccttatgatagagacttttgtcacacacacgagtgtcagcagaagcgcgcagaaatctcatctcttcatatgagatctctcacaacatggtggagagtccccacactgataacagccttgtgagacgcacacacgggggacacacacagttgtataccccttataggtgagatataacacggcgggcacaattccgtatattttctatagagagggctcacatatgagcacacacacacatatagggggttttatacgagccgctccgagatgttgtgtgagatacacaggagacacatctcctgagatttgtgtggcacagccgctattaaaaggtgttcggttgtgtgcacaacgagttaaaatgtcctgaacgtggagttctggaggtttcacgagcccgaggtaaagcccaggtgcggtttgtctatttaacttcacaatttcctcgccctcgtacgcaaaaggaccaaagagaaataaggcctacttctaccaagcgccttcccccgtaaatgaaatcatttccaacttagtatcataccccccacccccccaagaccaggtttgtt

SEQ ID NO: 637942 - DNA, 425 bp, Homo sapiens
cacgattccgagttgcatcattctaaagatatacagtcgaggacttgtgcaggagaatggtcctgtagaagagttcgcccttcatgatcattaatccatagctttctataagaagagtctcagattcaaggattccctgttaggttctgagatttggacatcctcttaattcgcagcttgcctggcccgcagccatgtctcctggcttttagatgggcttttgaatggcctggccctgaccacagtctgcctctgtgggcttgtgggggacagtggctggctgacctgtaaggggtcggctccactcccagcttgctctggctccagctgactggcatacctctggcatctgcgctgcactgggtagggcagggaccaggccctcagcctccctgccctgctgtacctcctcccaaataccccct

SEQ ID NO: 637943 - DNA, 869 bp, Homo sapiens
agcgcttttgctctggcgtgtttgggcctcccggggtggttgctgctgtgccgcggagaggtgcgcgcgcggtggtggcctcttgcgcgtgtggtggtgcgccgagttggctctctcggccgagggtgcgttctcggtcttttgttgcggccggggggcgggtctggctttggctggcaggcagcgtgttcgcttgtggcgagacgagcaggggggtcgcggggggggccgggtcttttgctggcgcgccccgcggctgggttgtgagctggtcccccccgctttgtgtctatggctggtcgggttgtgtggtgttccgctccgccggtgtccatgatctttgcgcggcgagacgagccctaacttcgcgccccgacgtgtggttttctgccctcgggtccatcgtcctcccccgcggggggagcgtgttctttattctccgtcctcggtttcctcctccatcgggttgtttgtgttgttgggcagcgcacgtggcttttcgctggcttgcgtggttgtggtggtggtagcgaggtgttcgtcgttctttttcttgagcgccgggtggctcttccccgccttgtgtggtgttggggcgacgaccgggctgttaggatgagtgttttcttgtttcctcgctcccggctagtttcgctttgtagagtaggggggcgaggccccgctccgctcctcctcctcgccgatctatgtcattttggcgaaagccgcccgctgatcttggtgtgtgtccttattgagcgatggtggcggtgggtctttcgccgcgtgggttgtttcccccggctcttgcggaccggtgggcttctttgcgggtggtttgatacaaaccgggcttttttttttcaata

SEQ ID NO: 637944 - DNA, 919 bp, Homo sapiens
gtgcggtaggattggttatctggaggcgtaacgtgagtctgactcgatgaccgcttttaccatatggttcctacaccccctatctttgaggcccccattctgagtccactatttgttctgcccgtcaaaattgccatcttcgcccatccgcgggaaacaatggtaaacaccgccgcgcttcaatgaacatcacgggatggggcttctttgccgcgcccggccccttttttctcgcgcgccccggcgcaccccttggtgcttggtcattctaatgcaacaccctgctacgtcgcggccccaagtgtggcatcccccttccccggccaacgaagtttgggttccgcccagaatccacatgggtgcgggggccagcccccatgggtgttatccgcgtccccgaaaccgtttatctctgaatgtggttctgtcttgaccgtgcttgcttacgcgcttgtacctcccgccgggtatcctccccccccccggttcgagacacaacgtgccacacacgagcgattttggggagacatatcgcggagtgtcggccacgcccttttctatgagggtctcccaaccagatctcaccctttttccatagggggtccacaccaccgcacaagatccccaaaggacggcggacccaaaggggcccccgtagaccaccccggagtacaagacaaactctgtaacggcccacgctcttggaacgtcacgacatcacggctgctctgtcggaataccacacgcgtgtgctaataaagagagcagagccccacccggggtttgggagctacacccgcgcgaagagttctagaaaaactaagcaaaagtgccccaaagccgccggacgtctcacaccgatgagtgccaactcttttttcaacaatggaggcaaattttttaaaaaaaaacaaaaaca

SEQ ID NO: 637945 - DNA, 733 bp, Homo sapiens
  misc_feature (1)..(1): n is a, c, g, or t
  misc_feature (357)..(357): n is a, c, g, or t
  misc_feature (466)..(466): n is a, c, g, or t
ntgtttcgcttcgtgttgttgtcgtggtggtgggctctaagtttttccgtcggtacccccgcgtgtttctgggggaaacgccggttttcccccccctcttccgcggggttaaacccgccccgcccgcggtgtcttgttaactccgacacccctataatggggcgcgtttttctctccccacctctggaatgtccgtggctcccctgaagtctccttgtgttcgggggatatccggcgccgccataaccttctctgttatgcgcaacaccccttattaccgggagttttttccacgtctctgccgggttcccggacaaaaatctccccgggattttctcgccccctttctccgcccgncggcggactaccaatgctctggtgtgtacacctggctatctttacacaacctagtgaactctgtagagccacgcacgttttctaaagagggagaattattgtttcctancaaagcgaggtgtcaacactaaagaagatagtctatatcttgagaaatattttctatgcgagacattgcgagatgatactaaatcgagtacatccccacgacgaaccaccgtgcgagagcaccaattttcaaacccagaaattcctcctattggggaccacaacccgtgtggggtcaccagtcttctttataagggaatccggtgccacagaaagggcaccaaaaaatttgtctttggggggaacaacaagggcaaacccaaaaaaa

SEQ ID NO: 637946 - DNA, 227 bp, Homo sapiens
gtcgatctctagcaggatccccggtgtcacgtgacattcatgaccagcgatttcagttgggcgctctgccacacagtcatcacgcgtgtctccttagcccaggagaccagcaagatcgtgtggtgtgagggccaagaccctagtctcattcctgctttctcgtataatgccgacctgagctccagggtaccgagcctcgagatttcgtaagtcagtggtcactagct

SEQ ID NO: 637947 - DNA, 358 bp, Homo sapiens
cacaaagcgcagggattacaggctgacctagcgtgcctggcctctataatgacatctgttatatcagctcataccattaggatgcaatatttgcatcatgcgccttgagctgtatatcacatagtcaacatatgacaccttagtgctatgtacttactccagtgactaggagtctagtaccactagcagagttacctcatgcattacccttttctgcatattcattccaattcgaactggaggtctgtgtactacccctgtatgattggctcatctactaagtggagggatttattactgtgatacttaactcaaattggtagaaaaatgcatgcatttacccaaggcaatcaagctt

SEQ ID NO: 637948 - DNA, 665 bp, Homo sapiens
  misc_feature (576)..(576): n is a, c, g, or t
  misc_feature (612)..(613): n is a, c, g, or t
  misc_feature (615)..(615): n is a, c, g, or t
ttcggcacgagaaagtgcttaatagaaggcactggccctcctcctgaacagattctttctcctgtgggagcttgctgactctgttagatggagagaattaatacttttcccatgaggttttttcatagtaagtatgaaaacctgggatctgcataggaaaaaagactcagtagtaactctccgttaatgactttgaatagccaagatttatgaagtgtttactaagcctgtaactgttccaagtgttttacgtgtattaactaatctttgtcacacctgtgtgaggtaggtgccgttattacaggttgagtatccttaatccagaaatccaaaatcctccaaaatttaaaactttttgagcactgacaggatggtcaaaggaaatgctaattggagcattttgaattttagattttcggatttgagaggcttaatcattaagtataatgcagatatcccaaaacctgaaaaaaaaatccgaaatccagaatacttccaagtcccaagcatttcggatgaagggtactcaacctgtttcccattttgcagataagacaactaaggaacaaaaagatnccggagggggaggcggaggttgcagtgagccaaganngngccattgcactctagcctgggcaaaaaaagtgaaactctgtctcaaaaaa

SEQ ID NO: 637949 - DNA, 1106 bp, Homo sapiens
caggacactggtgaacagcaaatgctccacgactgggacggaagcattgcctgatgcctgtacatggtgggcactgagagaacaagattcctgggccctgccttccatacactccccacgatcttggaggaagctctgaggacgccactgctgatgaacccgacagacaggagcgactaactgcgctatgacagcacataaaatggcctaaagaatggagaaatgttcgatggacctgcttgactagtcctccaggtggtgcatgttggggaagctggctcctttctagcgttctaacaatcgcttcctctagacactgtactagtgcatgggaccgcccccgatctaatcataccatcgtgccttctatgagttgtgcaacaatctagcggcgctaatacagctcaggtcggcaccatgaagggctcaggcgtgcaagacttggttagactccgttccttgcaacgcaggtcggcggggtgcaacgatcgtagcggttgagttagaaagtatgcacggaagctagttactgtgttgccaagcctcacttccgtctcccggagatggcatagaagagtatcttaatgaaagtcccctgtgccggtctggacccattgtagatgccggggttcagccccccagacatgttagcaaatacggctacgcggtcaagcatggagacatcccttcctggggacataggtacaagggcaagcatgtggccattcctcatgccttatgggtttgcccaatccccatggtgtaaatgggaataagccaagagagctagccctcttttcaacaatcggtcttctcaaccaagaatgttccagggcagtgaagggggttgggccctaggtgaattgtgcaagggacctagtcctcaccatgactagtaaaccaacctgcgtcaggcaacctagggcaaagtcgaacatagaagcccctttttggcccccacggatgggtctaggtattagacaccaatgctgtggacatccgcacattcgacccagagagggaacggaagagcccggggccaaaagggggtaccttccttgaagaggtccccagaagggccaccaatccgtacaagacaacatccc

SEQ ID NO: 637950 - DNA, 894 bp, Homo sapiens
  misc_feature (279)..(279): n is a, c, g, or t
cacatgggcatctgcacatccacaggagtcatccgggacttcgcgggcccctactttgtctcacaggacaacatggcctttggaaagcctgccaagtactggtaagttggaccctgcctcaggtctatgctatcgggcccaacgcatgtgacacggctgtgcacgacgcctctgaggagtacaagctccgtaatgcacaatctctgctgtgacaactgccactcgccacgtggacattggaccctgacatctgatgcagctacaatcaagcagcaccanactggacatatgcgtgcacgctctgcctgtcttctgcgctgtactctacgcgtgaagtacgctcagcgatcggggacctatcgtgtaatgacctggcatgccccttcatccattcgtcctggagcacttcatcctacactcgtcaggccgtgcgctctttaaaccgtctcaggtgactaggctagactcgtagtgagaccccatcagcctcatccacagggatccccagatggaataccacgctcgaccaatcgccattatgtgggtatcccatgaacttatattatatcgtccctacagcacccatacaagcgcaaggggttaggagccatagctgagttgctgagaaccgagcgggatcaggcgggcttggtcatggatgtggacatggacctgacggaaccatgcattgaacgtgggcggtattgtccgctctcctctgtccctcttcagggaagcagccgctggtccccgtctctcctccagggcactgtgtacctccggcgccttgcgaagacccactttgcttcttgctgtgtgaaacggccttggtgcttcccgtgtgtagcagcgcacgccgggactcatcttgctggaggtcctgccctcagccca

SEQ ID NO: 637951 - DNA, 579 bp, Homo sapiens
tcactctgtaaagcttgtaaaaacataggctatcatagggtgcttaatcataagcctaagacataccggttatcattcacattccaaataagtaattcagagagtatttttcatccataataaagctatcaatcaaagacatgaaatacagtcttccagtggtaattctcatgggcaggacaagcattacatctcacaacttaagcttagtaatccaatagtcaaagatgaaaaatagggatggaaattaaatttagactgcttgctgttatgattactagggaacaataggtcatgtaattaactgaagaacatacttgatcctctcaggatcctactcagtaacttcatcctgggtaggaagcatgtttagaagagagatattatttttccaggatccaggaaaacagggctttaccatctctcaaagtggctatcacttcctgtcctgggcatcaaccctgtgtagcagacactgcccctctcccctcaggccctactgcaatagtgcaagatggattccctactcccagcatctctatggaatccagagaattaacagtccgatctccctagagt

SEQ ID NO: 637952 - DNA, 560 bp, Homo sapiens
  misc_feature (7)..(7): n is a, c, g, or t
  misc_feature (147)..(147): n is a, c, g, or t
cggggtngctactcagtagggcaataaaccgcgattgctcaagaaagttagacaatacggtaaaaagcaatgcgcgcgtcaactccgcttcgcagggtctgctgggttgctgcttgctgtggttggcggctagccggaacattccgntgtacggctatgacaacgataaccggggttgccaccggaccaggcacacaggttaattcttatttaaaaacaacagataatcgttgatgatgttacggttgatgtgggtgattaatacgtgatttaacgttgagagttcaatgacgttattgttgcacgcgaaggcggccaggtagtcggaagggtaaacgtagcatggttattgacgcttacctctacctctttttcggtcaggatcaccacgcaaggttcactgctgctcaattgcatttcgcactcctcagatatcagaaactccgctcaaaggatctatgcttcctgcatgagtgatcggcccgttcgccgataacgatcttctttctttagcacgctttttagcaattaatcttgatggaattcgcggccgcgtcgac

SEQ ID NO: 637953 - DNA, 1089 bp, Homo sapiens
gaccgttgactattctctacaaaccacaaagacattggaacactatacctattattcggcgcatgagctggagtcctaggcacagctctaagcctcgcttattcgagccgagtcatgggccgagccaggcaagcattcataggttaacgaccacatcttacaacgttatcgtcacagcccatgcattggtaataatcttcttcatagtaaatacccatcataaatcggtaggctgttgcgcaactgacttagttcccctaataatcggtgcccccggatatggcgatttccccgcataaacaacataagctgtctgacatcttacctccctctctcctactcctgctcgcatctgctatagtggaaggccggatggatggaacaggttgaacagtctaccctcccttagcagggaactactcgccacacctggagcctccgatagacctaaccatcttcgtccttacagctagcaggtgtctcctctatcattaggggccatcaatttcatcacaatcgaattatcaatatgaaatcccctgccataagccaataccaaatgccccgcttcgtctgatccgtcctaatcacagcagtcctacttctcctatgtctcccaggtcctagctgatggcatcgagtatactactaaaagaacggaacctcaaactacacgttcttcgaacacgacggacggtgggagaacccattatatacaaaaagtattctgatagtcggtaacccgaacgttatatcttattctaccaggctcggaatgaattcccatgtggtaacttactaatcggggaacacacagaacagttggagaaacaaagatgggcagagcgaacggaacatgggacgcacggggaatcagtagacaacccgcaaaattacacgaggaaaaacagcagaaacaacgagaaagttcaccacgcggacaagaacaacgggcaacccaggggcacaaccaacagagcgccacacgggaggagaagagaacacgccgagcgaccacgaagacaaccaggagcacagacaacaacaaaacaagcagacagcgagacacaaaacaagaaaaaaacgata

SEQ ID NO: 637954 - DNA, 302 bp, Homo sapiens
ggctcgcaccgctctcgtgaactcctcagtgtctcatccatgcatgggggataataatagctcctgtctcagagggcggcggagaaggccagataaagtggcatgagtccatgtcacaaggcttgattcaacctcgtgaagcatgaactgaaagaaacacctccacccttgtatttcctacccactcacaagtcttatgacgccccagagtatatctcgctttggccccctcacttagtccctcttcccaacttcacaggagctctcccagtttctccacctgccttgccccccatgctacc

SEQ ID NO: 637955 - DNA, 291 bp, Homo sapiens
aagacaagatactgactagggtgggcaacatagtgagaccgcatctactatatctcaaaaaaagtttatatcatctatagaaactaacatatataactatgataagcagtcttgcacaagacctgcgggatcaggagtccaggactgtcctgggtgcccccgccttgccctggacgtgagagtgctgtgtggggtcccgggagcccctggtcccacaggcagggccgacaggcaggtgccgtgcccgtcctccctgcccacgccaggtgctcagagggacaggtgggccag

SEQ ID NO: 637956 - DNA, 174 bp, Homo sapiens
agatgagtagtgactacatcttctctccttgaaaaagttgccgatatgttcgaggccattgcacataccatgcctccttatcagcagatctacgaggcttgtagaggagattcatcccgtcctgacatgaagcaagaagactaccacctagcagcgctcgtgtcttgtcgacgc

SEQ ID NO: 637957 - DNA, 230 bp, Homo sapiens
cgggctagcagatcccctgagccagcgagtccatagcactcttgggcagcatacttgccatagtgtaaaaattagctgggcagggctgggcttgatggctcacacctataatcccagcaccctgggaggccgaggtgggtggatcgcctgaagtcaggagtttgagaccagcctggccaacatggtgaaaccccacctctactaaaaatacaaaaattagctgggtatag

SEQ ID NO: 637958 - DNA, 903 bp, Homo sapiens
ttcgaaactctgtagctcaagataaaggtgattcttagaggtcgatatattttttttttttggaaaacttagtctcgctctgtggcccagggggagggcgggggcgcaggactgggctcaatggcaaccttcagcctcggggaatacaggcgatgtcgtccggccatcagcctcgtgaggggccggaactggcaggtgcgtgccaccacacataggcaaatcatgcggagttttaattgggggacagagagggaataccccgtgtaggccggggggagcacgagccggacctcaaagtgatcaacctgccgcggcccaaaaggtgcggggaataacaggcaggaagccccttgctaccgggcggagactgtgaaagaccgtgggctgttaacatacggaaccaatcattacaggggcattgaacacaggactctcccctcccggatatggccagaattctagacacaacaacggtcgttgggcggacaagaagtcgaccaaaacagggaacgactggacatccatcacacaggttcatgtgagaaaaataatgggacggacagacgggggggtaagaataccccgcaaaacggaacgggcgctcggagtattaagtgcaagccagcacggacgcaagggctgaaagcccagaccacccaataaaccagagtgtccccacacaaccacgggactactcctgggagggcacccgaagaacaccctaggagaacaggacacacaaccgagacagtacgtcccgacacatgaaggggcggaaaacacccgtaaaaagggctacagagcgcgcaaaggcctacacgcagacaacaccatggccctcacacgagggacaaaggcccaacctaccaaacggggcgacgggcagtacaagaaggagggctg

SEQ ID NO: 637959 - DNA, 743 bp, Homo sapiens
cgccgccaccctgagccggagcgtggctggtggccgccaaggtcaagatggtggactacagcgtgtggtgaccacattgaggtgtcgtgattgatgaagacgagacgctaccccaactagtcgacacggccagtctcttcctgtggcgtgcatcaggcccgggtgtgaacgcatggagcagttccataaggagaagcgaggaactggacaggggtctgccgcgaagttgccaagctgcaacggtgtgccgtaggtgccatgaggtccactgacaggcagctggcaggtgtgccgagggcggctaggctaggagcatggaagctgccttgcaggcccgaggctctagcagacttgcgccaacggagggcgcggttagctggcgtagccatcacagctgtgagccggagactgcgccacagagggacgaataagcgtgcgcctggaacgttggacacgctcatgccaatagactggcgttctagcaaagaagcagtgggtacacatacctgggcgctgtacgaagagcacccgggcacgggacgcggcacttacatgtacagagacacgctcgatggtggaaacgaggaatcacgcaactaagaaccttttcggctggggagattgccgttcaccgacggaagacgcgcgcatcaaagccacattttggacgcactggctttccgcaccgccactggggcatgcaccagcacttaataggtaccatggccagacatgggcgtcca

SEQ ID NO: 637960 - DNA, 612 bp, Homo sapiens
gttttttagaataacacacaagcacaagttactattcctttattagctgcagaacataaatacaaatacatattccatatgctcgcatacaaaagcatatataaaaatgctatttactggacttgacagtctaatcgttgcggttattcaattgcaggtatcatacatatcattgtattatattaactttataagcacttggatcaagcaaatttggaagaacagctttgtgagcttacaaattttattccaagtgctattctttaaacagatgcaactaaaacgaggtcttacctttttaaaagaggacactaaagagcttattttataaaaagtggtccgcaaactcacaaacacccaaacctacatataaaggtggtctatgttcttaggaatcaataagaagtgaggttacaggggagagggagtgaacaagcatgacggttcctgtgaaatccattccaccgagcagtcactcttatgtgtccagtttggccatcgggagttatgctggctcagtcatctaagcctatgcttctgatcatgctgatattcacagttttgatcttggagcactagagcttctggacttcatgtggaataagttgcgac

SEQ ID NO: 637961 - DNA, 283 bp, Homo sapiens
  misc_feature (1)..(2): n is a, c, g, or t
  misc_feature (67)..(67): n is a, c, g, or t
  misc_feature (71)..(71): n is a, c, g, or t
  misc_feature (86)..(86): n is a, c, g, or t
  misc_feature (88)..(88): n is a, c, g, or t
nnaaattttttcaccaaacaaacaccaaaaagggggttttttatctacaaataaaccccctagctgnagtnattataatttaacantnaaccacaaatattaataacttagtgaaaaaaatttttatctaaaaaaactttcttaagacaatttagacttaaacaatattactacaaaaaagttttattaaagaaacttctacagtttacttcaagaaaaataaaaaaaccacagtagagtttttagatgcaagagcaatttaagtataaatttatcagtttta

SEQ ID NO: 637962 - DNA, 418 bp, Homo sapiens
aaaaaaaacccacacaaaaagaccaacaaacggcgcaacaacaagcgtactcccagccctggacgacaaagagtgaagacttcgtctcaaaaaaaggaaaaagaaaaaacataaatctttaaaaataactagttgctgggtgtggtgctcacgcctataatcccagcactttgggagtccaaggtggaaagatttcttgagctcaggaatttgagaccagcctgggcaacaaagcaagacctcatctctgctaagaataagagaaaattagctaggcatggtggcagatgcctgtagtcccagttagtcaggaggcagaggtgggaggattgattgagcccaggagagctggtctgcagtgagctacgatcatgccactgcactccagcgtgggtgacagagtgagaccctgtctcag

SEQ ID NO: 637963 - DNA, 153 bp, Homo sapiens
ctcttcctctaaactgttctagattcccaggcgcctgctaggaacaggtgtgggccacccttggggtgagctgcctcccagaggcctggaaggaccaggccttgcacaatcacctgacaagtggacgtagcaagagcaccccgcaaatggaca

SEQ ID NO: 637964 - DNA, 198 bp, Homo sapiens
tcatgttatacggtaccgtcgcttgtactgaggttgggccgccgatagggctattgaataaaacctcaccatcaaaagtagcgagcctgcgacgtacacccgccagaccaccagaagcatttttatctagagcatttaatggaatacccccagcaccatcatcttgtacttcgagcattacatgggattgcctatgag

SEQ ID NO: 637965 - DNA, 129 bp, Homo sapiens
aacccccgcgaggggggtgtgggacccccaaaaggggggggggaagggggggccccccccccccccccattgtttgggtgggggggtttagggcccccgggaccaaaaaaccccccaaattttttttta

SEQ ID NO: 637966 - DNA, 396 bp, Homo sapiens
acacccaagggaatgggtcctgcaaaaaggaatgccccacaagtgttcccatgccaaaactggaagattctacaatgttcccacgcatgctgttgccattgttgtaaccaaccaagttaaggccaagattcttgccaagagaattaatgtgcgtattgagcccattaagcccaagagccgaaatagcttcttgaaccgtgtgaaggaaaatgttcagaaaaagaaagaagccaaagagaaaggtccttgggttcaattaaagcgccagcttgttccacccagagaagccctctttgtgagacccaatggaaaggaccttgagctgctggaccctattccctatgaattcatggcataataggtgataaaaaaaaaaataaaggctctgtgggccac

SEQ ID NO: 637967 - DNA, 172 bp, Homo sapiens
atcctgtgtaaataccatgtaactactcgtctctagtctttacaggaatttccatttctttcctggttgagacacaaacacccacgtttaacggagggcaacggagtgaccgtgtgtttactgtgtgcctgaccgtggtaaacgcccccgcgaatttagtagtagtaggcgg

SEQ ID NO: 637968 - DNA, 511 bp, Homo sapiens
  misc_feature (290)..(290): n is a, c, g, or t
  misc_feature (339)..(339): n is a, c, g, or t
  misc_feature (385)..(385): n is a, c, g, or t
  misc_feature (414)..(414): n is a, c, g, or t
  misc_feature (434)..(434): n is a, c, g, or t
  misc_feature (489)..(489): n is a, c, g, or t
tgtatttttagtagagacggggtttcaccatgttggccaggctggtcacgaactcctgacctcagataatccacctgcttctgcctcccaaagtgctgggattacaggcgtgagcaccatgcccggctgggcttgtatcttttagcttgtgttagtaaaaggattctagtatgaagtccagattcaaagggatctctgttaatacccactgacaggcatatgacctaacaggaggttggtagcatagatccaagcagcagttgccggccgtagatggcctatcagtttcnggtgccttgcctaagatctgaaggctttgtttcaacagttggaagtcantgtggtccagctgacttggaggaataaggatactctagagtagggnatgattccagataattcggggattgaacnactgagttaaggccgggacnaattggttagtatagaattgaagaattaattttgcagcggcccctgggtggtggnccgtggttggcgactgtccggc

SEQ ID NO: 637969 - DNA, 1157 bp, Homo sapiens
ttgtttttttgttgtttttttgttttgtgggcggaaggggggaggagtggggggggagcgaaggaagaaaaaaagagaagtaccctgggacgatttttgtacacatatcatcctcctgtcggtttgtctctctcactctgttttgccacaaatagtgttccatttgcggtcacccttttggggaggatctggttccccttgaatgtgccaatagggtggatgcttaacaccccttggaccatttttgtgacacttcctaatttctcctctccacactctctgggccccaagaaaaaaaggggttttacttcgtaatgaagtgggctgaccctgggcacaacttggttttggcaccggggctctttttggtgtctacaatacacgggttctggcacaacaccctttgccttacccgcatctgaggggaaaccttttgcccacccgaaagttcggcccctttcccgcggccaaaccttgttgtccccgccacaccccccctggggaaggaggggtccaaatacctccgggttctaaatctcccctcggggacccacgtggttgcccctgtcgacggggtacctgtagatggcccagaaattttcttcccttgccctggaactgtaccacccccgcgcgttggttgggttccccccacactgtcctctctcttgggtggttccccggccccgaagcgttgtcgttgtcctgccccaaatcgctctgtctatgggttctccccacccgtcttttcggggccacagggcttcctctgggcccggggtgtttacccacagctctttaggggggcgcctaacccccctttgtttgcacaccctgtcattgtgtcgttggcgtctaccccctatttgccccaccgtttgcgcccctgttgtgaaactggggaactcgggccctttggggggtgccttcatcgtatttgccccaccactagtggcacccctcgccccacaagaggtggcctgccttcctttcacggctccgcctgtttccggcttgtagcccctcttttggtggaagattcccccccctctccccccccccctttcccagggcaggaccccggccgacccttccttggccccccccacacccgatacggggtgtgtcgtgtttataaagagtttctcctttggaca

SEQ ID NO: 637970 - DNA, 167 bp, Homo sapiens
cgcgctcagcttcgggtcgccggccagcgcggcgttgaccgcgacggtgatgccggcgtcatcgacgctggcgcgggcttcggcggtggcttccttggcgtcggccacggcggcatcggtgccggcgcgcacctcggcggtggcttccttgacctcggccttgacct

SEQ ID NO: 637971 - DNA, 226 bp, Homo sapiens
atatatttttctttgaggggcaaagactctgatgggtatgtagtagtagtaacccatctaatagtaggagatgataaaaataaatcttattctcttactaccttcatagatataatatctgtaagcctccatttcttgattcgtgaaaataatcaggactattttaactccttgctaataagggtaagaaaatcagtacacttatacctccctttccccagctacc

SEQ ID NO: 637972 - DNA, 124 bp, Homo sapiens
tgctctacgaggatctccccagctactcaggaggcaagacagctggttgagtacactgagaggtgcatgtgattatctgtttatgttggagacatccagtcacactacaagtcccatagaagta

SEQ ID NO: 637973 - DNA, 1002 bp, Homo sapiens
gaaatggcggatgacgccggtgcagcgggggggcctggtgggccctggtggccctgggatggggaaccgcggtggcttccgacggaggtttcggcagtgtgcatccaggggaccggggtcagcggaccgatggactgagtggcctgtgggccgagggccagcggagactcgctggagggcaaaggccgcaggcatacggagttggatgccctgtcaccaaagttggagcctgcattggtcaaagtgacaattgaagatcacgatccactggagggagacatctcatctactatcatccactgacctaattaaggaaagtcagagaagtcatgtgacgttgtcattaccatgggggggaccgtctcattcaaggggacatgagagatacgctgacaggacttagttgccaaggtggcaagacaggcgcaggcccgcgtgacccgagacacaagacggcaacgcagaggttatcaagatggcagttatgtatagcgtgattcgagagggcacgttaacaccagtgggaccacaacagagtcagggcactcattggggatgataaaacacggtaggcatccgccaaaaggcaagcggatggggacccaacactgaagccacaattcacacgatagaggcatgcccaccagtacaataccgcttgcgacacaaaagaagagtcaatccccaatacggatacaccgcaggaaatgcacgacgaggaagtgtacctaaacttgtgaataggggacaatcacacaaggaactatcagtagaaaagcggacgccccacaaaaagagcgtgggcatagcccggttttggccaagcggggctaggaaccaagggacaccggaacattgagccgcgagatccagtgacatgacattggactaaccgaaccatgtcgagtacgactgctttggcaacacgcaaaggaggcgcaacacatggggaacaaatcggattacttccagtcagacctatcggtggcccatagagtgaaa

SEQ ID NO: 637974 - DNA, 157 bp, Homo sapiens
aacaaacaaacaaacaaacaaacaaataaataaatatatatatatgtggcatttttttaatgcatctatcgatggacacttggattttgtttcaccttttagttattgtgaaaacactgctatgacatgggtatacaaatatacatctctatatttg

SEQ ID NO: 637975 - DNA, 763 bp, Homo sapiens
tttttatttttggtctttttttttaaaaaacaatatggtttgaaggtggtcttcttgggtagaagtcattgcacatggtaaaatcaatggaaacttaggtcctcgccatctatataaaacacggagagaggaggcccagatggtatgcggggccagggaaagcacgggggtgcatatcatcttgagggcaactacgaaatacttgagctttaattataaaaacaaaagctcaaaaaaatcttatatctccaccaaagaaaaatacagcgttggcatgataatatagtgggggaaccagtaggggacaaaacaagatacggccacattagacagccagtagtgatacaggggaagaacctgggtcaaacccatctctaaattctactttggggggtcaggggataaggagaggacacgggtacaaacatccggtagtacttcacgaaacatcagtccagctcaagaacaaggtgctcgggacaaacagtccgggagagagacaggggcaccattcgcaattggtgaaaaacccttatttcagcgaaacatatgcaggcctcaaggcggtgacataggaagaggagtttggaacaggcatcggaggctcatataatcgcgggggtatcatacacagtggtacagtaaacgggttgagacaagacccttccccaaattaggggggtaataagactaaaatacccgcctaagtaacaaaaaggacaaggagcgcccttgaacgaaccgctgcattcaaaattcggag

SEQ ID NO: 637976 - DNA, 1074 bp, Homo sapiens
ctctagaggatccgatgatctccagaagaaacagcccagggtaaatatatagtgggggaaaaggaagtgaagtgaaatgggaaaagtcaatttgagattatctggagttttaagaagtttgttggtttttattcagtgggagagacttatagctgcaaatttgtgttttatatacgtatatctcttttgtaataatagccaaagaaagtaaaaatcataaattagctcttttcagagctccctctaagcaaggtacccagaaccctggcaagttagcacttggtgtggagaccgtggctcaccggactggtgatggggtgctttttcatttctgccacctttcttggtcattgtaagggcaaagcgggcatactcccatggcatcgaacttttgtcttaaagtaaatcaaggccgttgagttgagaatgctttgcttttgttctccaagtgtatcttcatggagcaaaagtcattgatcccactgagaaaattaagactcagaagtatcttttaaaatcagtttagagcaaaatggggcttaagtaaaacattgaaatcctgaccatattcaccagtcacttatttaggaccaagaaacaggtacacgccttggcattttctgctgtgaggtgtgaagatgggtttctgtcgtgtctaacacttagcgttgttctccatccccatggacatcatgcacatgcagcttctcacccagggaatgcacttcgtagcccatcaggctgcaggcaagagccgctgcttctgatggtttggtgactgaggatagtaaatcactgtgaagggaattctggccgggatttcatatgttgtaggggctcagctcatgccctgcaagttctgcactggctttgcttttctgttgttatagtcttttcatatgagagtaatacacttcaaatatctgcaaaataataaaaagaaagctgctttctgcttcacccccaaagtaccactgtgaacatcttggtacaattttttctgttttgttcacccttctgccctatatttctttcttctggagttcatcggatcctctagatcgacatcaccca

SEQ ID NO: 637977 - DNA, 229 bp, Homo sapiens
  misc_feature (44)..(44): n is a, c, g, or t
aatcgagctcgtaccgactgcatctgtgctcatgtgacaaaaanagtttcgtgagatctaatcaggttcacactgacagtagcccccccttatcctcgggagatgcgttccaagacccacagtgatgcctgaaaactggatagtaccaaaccctatgtattctatgctttcacctatacatacatacctaggataaattttaatttataaattaggcacagttagcagt

SEQ ID NO: 637978 - DNA, 427 bp, Homo sapiens
tgaacggtctgtataaggccttgactggccgtcatttgaaccttacaaaacgcttaaatgaccttggatatctaaccaagagacatgtgtgataaaataggactcggctatgtaacaacacaattagtttgtatcttggttattaaccagtatctgggactgatttgggcagaatattaaacttactattgttgccaattattgtttacccgagtataatgtagctatatagcacatgtgcttggttttacaaaacacacttctccttgggcaacaagtactcctcttttaatattaccttcccactacgcgtacactgcctggacatagctcttgtgcacccttaaaataaattgtttagagtgtattatgagccccagacaaataatgtattaaaagttatccccttgctactttactgatacct

SEQ ID NO: 637979 - DNA, 422 bp, Homo sapiens
  misc_feature (210)..(210): n is a, c, g, or t
  misc_feature (308)..(308): n is a, c, g, or t
  misc_feature (375)..(375): n is a, c, g, or t
agaatattatggtaaattgttcgcctaaggagagttgattctgtgaaaaaaaaatcagttaaaaatttttttcacagctttattgagatttaattcatataccatacagttcacccatctaaagcatacaattcagtggtttttaatatattcagagttgtataaccaccactactctataattctagaacattctcatcatccctaaangaaaccccctattcattagcagtcattcctcagcccctggccaccacaaatctactttctgtctctatgtatttgattattctgggacatttcatatnaaatgaaatcaggacaatatgtaggccttttgtggaccgtctttcttttcactgcaacaggaatacntttccggggttcttcccttctggtttacatctttccctttccacatc

SEQ ID NO: 637980 - DNA, 177 bp, Homo sapiens
  misc_feature (159)..(159): n is a, c, g, or t
caccccatgagcggtatccaatataaggaggccgagcccagtccctttcaccaaaggtaattagataataaaaaaaaataaatgccacgcaaatttttcctttaaaaaaattatccccccatccatgggggaactccgggtaacacgcatagatatatnataaattttttttggggg

SEQ ID NO: 637981 - DNA, 830 bp, Homo sapiens
  misc_feature (96)..(96): n is a, c, g, or t
  misc_feature (129)..(130): n is a, c, g, or t
  misc_feature (137)..(137): n is a, c, g, or t
  misc_feature (181)..(182): n is a, c, g, or t
  misc_feature (197)..(198): n is a, c, g, or t
  misc_feature (234)..(234): n is a, c, g, or t
  misc_feature (259)..(259): n is a, c, g, or t
  misc_feature (277)..(277): n is a, c, g, or t
  misc_feature (358)..(358): n is a, c, g, or t
  misc_feature (362)..(362): n is a, c, g, or t
  misc_feature (364)..(364): n is a, c, g, or t
  misc_feature (367)..(367): n is a, c, g, or t
gattgcgcgtgtggccatggcggccagcggggctgtggaaccagggcccccgggggctgcgtcgccccgtcgccgcccggcccgcagctgcccctnatcacctgtccggccatcaggccgaggacgagnngcagagncacgagatcgagtcgtatgcatgaactgtactgaatggatgacnngcctcctgtcaccannattcccttcttcagagaaataatagtgagctccttntcctgcgagcactgtggtggaacancacggagatccagtcggnaggcaggatccaggacagggagtgcgctacactttgtctgtcagggctctggaggacatgaacagagaagtggtgaagacntgantntgnatgcacaaggatatagctgaggctaggattattgaaacttccctgctataagacacagagaaaggagctctgaacagtgaatgaaggatgatcacacagtgatatctcctggacgttggagcaggaccagcaatgcacgaagggaaacaagagatgctacaggctagaaagaacttgataagtacatcgaaaatgaaggaggctaagaagtagactgccctataataatgatattgatgatctcacgaaacagtctagcgacgaacgaactgcctgctcgaagatgatgccgagtatcaacactaaccgacagacagacgaaagatcagcgactcaagaaccaaagagcccaccgaagtccgatcaggaccgcgcaaatgcagagaggcccaacgtagtacaccatagagaacgaccgaacgacgcggcatgcgaacaacgcccccacatcgcatacaggcgt

SEQ ID NO: 637982 - DNA, 542 bp, Homo sapiens
  misc_feature (30)..(30): n is a, c, g, or t
gcctataccagagcccccccccggcccggnttccgcctttggcgccaaccaaaagttctttacccttgcgctttcccagcgggggtttttcaacgggttcaacttcggcaggtgggagtggccaccctttccggaaccttgggcattctggcgggccacgtggccccctttcaggttcttcggccggggctggttgtggggcattcaaagggcggcccccaccttcccaatactttgttagcagcgggtccattgcagtgaaccccgactttttggggcagttgttggcccaaaaggccgttaccctggacatgttggacctgggggcaaccaaggcaaacttggagaaggcccaggcggagctggtgggggcaactttcaaggccccccgggcaaagattcaaattcgaatttaggcccaccaggccctggtgaaggccctggagtaggggagccaacccccaaggttggcctcaggtttggagccccctttggatgaactggccccagcccccgccccctttaagacccgggaggcttga

SEQ ID NO: 637983 - DNA, 204 bp, Homo sapiens
attgagaaatgactcgtctctgtatttgtattaagccttaaccctttttttaagggcattcggggccaacattttttaaagctggaccaaaacaaaaagcctggactcccatcccaatgtcattttgataggagcgttttgttttttttccaaggcagaatggggggtaacagttgaattaaacttagcaatcccgtgctcaga

SEQ ID NO: 637984 - DNA, 108 bp, Homo sapiens
ttaaggtgtgtgaaatcgttgcagagatgtgtatctgcactgccttgagaaatcctttcaggcagcggactgaaactgtagaataaaacaagatggggcgagcggccg

SEQ ID NO: 637985 - DNA, 1083 bp, Homo sapiens
ttatgtttttttcctaatactgtgatctatctgatctgcagacaagaaccttgtctctgttgaagagcatcgatgtgtacataatctccccttgatgctctacaatcagagacaaggttcgttagtgtgcagatcagatcataatcgtgtgttagggaatataatagatgtgatggtgggtgtgatgtgggggaagatgaggtgtacaggaggagagaaaaaggcatgcgatatttaatataatgttgtatgctcgtattcggtagtggttagattatcgtactcttaggacatgaaatggatgggaatattaagaaaatggaacgagaggtattaagaaataatactagtatatattaacatgactgaattgtgacttgatgtaatagaactgcgatcggctgtgtgtttgtcgtattaataacctaaggggtggatccatattatgctgttgataattgatattgtttgagcgagacccatcgttaggatctgacctattccctggtgtctggattcatcccaatcgctgaaagcgtggtgagctttaatagacacatacagtggtgatctaatggtccgaatctaagcacgtagtatagccaatctgaatagactggatgcatcctggagtaccttggcaatacggtaacgaccaccctcaactttctgctgaagacgcctgccatttgccaaatacatgatgaccatggaacaatacggttgtgtcctggagcacaaaaagcgggggcgcagaaatgccgacccgcgtgtcacgccaaggcggaccacaccgtcacgaccagtcggccgcaccagcgaagtacccgacggaacccgcaggccatagtgaacggagcgcaaacacaaaccgcgtcgctccactgaaagccttgctcgcgatgtacggcctgcgaccacacgagcagcaagcgcggcccgacagacgcgagcgcgcaacccacgcggcacccaggcccaaaccgccgagcgacacaccaggctcccaacacagcacacacccgtaatctgccagcgcccccgaccaggcggcactcaggacgcactgcgccaaacaatacg

SEQ ID NO: 637986 - DNA, 991 bp, Homo sapiens
tcggacgggcgcggagacgcttctgcaaggaacgccgtgatggctgcgcacggatatccccaggtccagcttcagacttgtattggttggtgatggtggtactgagaagaaacgaccttcgtgaaacgtcatttgactggtgaatttgagaacccaagtatgtctgccaccttgggtgtggaggttcatcccctagtgttccacagccaacagatggacctacttaagttcaactgtatgggacacagtcctgcgcccaggagaaattcgcgtggactgtagagataggcatattatatccaaagcccagtgcagccattcataaatgtttgaatgtaacatcagtagagattacttacgaagaatgtgcctaagcgtggcatagagatctggtacgatgtgtgtgaaaaggcatccccattgtgttgtgtggcaatcaagagtggagtattaaggacaggatagagtgaaggcggaacactcccattgtcttccaccggaaaggaagaatctttccggtactacaggacattgtgcttgctcatatacgtaatcttacaaactttgaaaagccccttcctctgtgcctagtctaggacagcttcatgtggagaccctaaacttgtgaatttggtggcatagcctgggtctcgccccaagcaagaagtttgttcatggacccagctttggctgcacatgtattaagcacgaacctttataaggttggctcaagaataacttgctactcccctggatgtaaagaatgatgacgtggtgaagaaatgaagtttggaagtcccagcggtcagaagtcttaagatttataaggcgggtggcctgttaatttcaggggggcaaggggttgttgcaccctctgtattttctactaaggggaacaaggcgctactggggaagctggagagaataaggggcgcccgaaggggagtgggagttaaaaaaactatgtgaggttataagaggaagaggaatc

SEQ ID NO: 637987 - DNA, 1002 bp, Homo sapiens
  misc_feature (260)..(260): n is a, c, g, or t
aatcccgatcacgatgccgcgtactgggaagtccgtaaaagaaaagatgtgctataccgagtttagactgccgacgttgctaagtctgggtgcatcctatcttccggagaccaaaccaagcaccaccagacagggccaatgtaagttctcaaggccagaacaatgaggcaaccacacgtgatgccgtgtcatcatatggcagaggtgtcctgtcaggagatcccgctgagaaaggtctcctatgagatgagccgatcaanaagagcgtgagcactcagaaatcacagacttggagtctggaaccagttccagacacgttcagatccgagtctgatctggaaatgtctctagttcagtcaaacatgctctggcgtggctctagagagaggcatctgtggatagaatggatgtacaaaaggaatgaagtagtgcgtaacgtactcgattatgacatacatttgagttggttcctcaccaaatatactatagactcgacatagtagctcagtagtgtaaccatttcctaggcacgtcgcacgtatatggccttggtgggtttttcctcgtactcacagcggtattcacagatcctcagctaggctttggatgtaggtggggctcatctccctcattttttctttggctagggaccctcgtagcattacttgtataacgagtcaatggaccggaaaagggcatccatctggatctcatagaatttctggacgttccaccacagagacatggttcactgggtagaaaggttgcattggcacagttcttggcaatcgaatattgtcttacgaacctggtgcgacatccgcttggaccagagggtcacttttggtggtagatcagtgcaagccactttcactgaaactccaaaggttgggaactccagggcataccacgtcctgggttctcccagagagagataaatggcgtgcttaacacgggttggacccgaccccaggcacgggttttcaaatttccttttcaccg

SEQ ID NO: 637988 - DNA, 509 bp, Homo sapiens
gatcttgattcccaggtttcccagaagggtcttggcccggttatacagccccagcccaaatcctatttcaagagcatctctgtgaccaagatcactaaaccagatgggatagtggaggagcgccggactgtggtggacagtgagggccggacagagcactacagtatcccgacaccgaagcagtatagcagatcctagtgggtgatccacgaatcaccatagacctccggaccctggatcgatgcctctttccatccgtggacattattcctgggacagttggttccgagtcccaggtagcctgtgttaaccctcagagcgccttcaaagtcctttcctacctctacaccccattgcccaccagttaataagcgttagctctctctgtgccacactcagagggcattgagatatagtggagatagatgacactgagggccagttgtcaggttatgtcagctctacccagaactgatcccaataaaacccttgtattgtatgctgaaaaa

SEQ ID NO: 637989 - DNA, 2729 bp, Homo sapiens
  misc_feature (17)..(17): n is a, c, g, or t
  misc_feature (32)..(32): n is a, c, g, or t
  misc_feature (35)..(35): n is a, c, g, or t
  misc_feature (38)..(38): n is a, c, g, or t
  misc_feature (40)..(40): n is a, c, g, or t
  misc_feature (46)..(48): n is a, c, g, or t
  misc_feature (50)..(50): n is a, c, g, or t
  misc_feature (54)..(56): n is a, c, g, or t
tgcaggctggtacggtnccgaagttcgttcanctngtncntccgannntnatgnnngacgcggctgtcgcgagggcgggggtcggggctgcaggcggggcagggctgggtgggggcgcgcgacgcacctgcctgcttcctgcacgggtggtccccaagcactgcgggaccccagcccaaagcggaccttgactaccgcccagccccgcgctcccaggacctcccgcccgcggagcccactcggattgctctccgcccgggtcggcggaggccccgtctcctgtacccggcgctgggactgctccgcaccgcgcggctccctttcagcagctgcgggagcatgcggaggaggccctgccggccccgcgggtcatggaggagttccggcgctcctacagccgcctgtgcagggagagtggggccgagccccaggaggctgtcctgcagcagctgcaccagcttcccaggggccggctggacctggccacgcaaagcctgacggtggagacctgcagggccctgggcaagctgctgccgagggagacgctgtgcacggagctggtcctgagtgactgcatgctcagcgaggaaggggccacactgctgctccgaggcctgtgtgccaacaccgtgctgcgctttctggacttaaagggcaacaaccttcgggctgcaggggccgaggctctgggaaaactcctccaacagaacaagtccattcagagcctcacgctggagtggaacagcctgggcacgtgggacgatgccttcgccaccttctgcgggggcctggcggccaacggcgccctgcagcggctggacctccgcaacaaccagatcagtcacaagggcgcggaggagctggccctagccctgaagggcaacaccaccctccagcagctggacctgcgctggaataacgttggcctcctggggggccgggccctcatgaactgtctccccagcaacagaaccctgtggagactggacctggctgggaacaacatccctggagacgtcctcagagccgtggagcaagccatgggccacagccaggaccggctcaccaccttccaggagaaccaagcccgcactcacgtcctcagcaaggaggtccagcacctccgggaggagaagtccaagcagttcctcgacttgatggagactattgataagcagcgagaagagatggccaagagcagcagggcgtcggcagcccgtgtagggcagcttcaggaagccctgaatgagaggcactccatcatcaacgctctcaaggccaagctgcagatgacagaggccgccctggctctgtcggagcagaaggcccaggacctgggggagctcctggccacagcggagcaggagcagctgagcctgtcacagaggcaggccaaggagctcaagctggagcagcaggaagctgcagagcgggagtctaaactcctcagagacttgtctgctgccaatgaaaagaacctgcttctgcaaaaccaggtagacgagttggagcggaagttcaggtgtcagcaggagcagctgttccagaccaggcaggagatgaccagcatgtcagctgagctgaagatgcgggccatccaggccgaggagcgcctggacatggagaagagaagatgcagacagagcctggaggactccgaaagcctgcgcatcaaggaggtggagcatatgacccgtcacctggaggagagtgagaaggccatgcaggagcgggtgcagaggctggaggcggcgcggctgtccctggaggaggagctgagccgagtgaaagcagcggcactcagcgagcgtggccaggctgaggaggagctgatcaaggccaagagccaggcccgcctggaggagcaacagcgcctggctcacctggaggacaagctgagactgctggcgcaggcacgggacgaggcgcagggcgcttgcctacagcagaagcaggtggtggccgaggcccagacccgggtcagccagctgggcctgcaagttgagggcctgcggcggcgcctggaagagctgcagcaggagctgagcctcaaggaccaggaaagggtggccgaggtgagcagggtgcgcgtggagctgcaggagcagaacggccggctgcaggcggagctggcggctcaggaggcgctgagggagaaggcggcggccctggagcgccagctgaaagtgatggcgagcgaccaccgagaggcgctgctggacagggagagcgagaacgcgtctctccgggagaagctgcggctccgggaggcggagatcgcccgcatccgggacgaggaggcccagagggcgagcttcctgcagaacgccgtcctggcttacgtgcaggcgtcccccgtgaggaccctgagccccccaaagtgagacaggccgggaggacccgggcgcagtaggagtgcatcaggcggcgcccgagatggaccaggggctgcgtcccgcccgcgccgcctctttgagacccgggtcgtctgttccacgcggcggttgcggcgactgttggtggtgtcgcggctgcgggggaaccccgtgggaggcgcctgggaagggctccctaccggccccttcttcccggtcgacgccacgtgggagcacaccgggaaggggtcccgcgggcgcgtctccccctcgccttttgcgatgtcaccgtgaacgctgcggccgcctgcgcgcggcggggtttggaaatacagcgcgtttgcactttgtgat

SEQ ID NO: 637990 - DNA, 209 bp, Homo sapiens
tcgataaggcaatgcagcggtttatcagacagggcgtgctgagagacatttgtgaaaaagtgcctttaccgaccacacatacacagagagaaagagagagagagagaagaaagtgcccagggagttgaaacaacttgagggctgcaaagagcctttaaagtcccttggtagaacctgttaactttcagatcagattggcccttatcgag

SEQ ID NO: 637991 - DNA, 861 bp, Homo sapiens
ggcgtcctttgttcttatttttttataaataagttccctatgttaaaagttactgagaactaaagaatatagaacatggttataggcacttagcatgctatcaaatgcaggaattcacttcaataagaagtgcttgctttgtaagcatggttcatggcacgtagaagctccaacttgggagaggatgctttccgtgacaaaaataataacccacaaaaaaaatggtggttgaaggaaaagagtccaaatttacagatgctttaaacttctttgggccttggatcagctttcactgttaaaacaataaacgcttggtgggtgaatgctattctcacgttgcaaaagttaaatgcgtcgtatgagatgggcgaatctgggtcagatatgcatttttaaagcagcaaaaccaccggccaccaatatcttccttgtgcatgcatataaattattttcttctaattcaaatggcagcagaggaatcccggcgtgcatgtgcatggagacacacacacatcactaaggacacaggagaaactatcataaaataagcagtatcccaaacacatcatcatctataggctgtttacacaaggtagaactacaaagaactgaatgtcctcagcgtaacaaggcaaagtctatttgctccatctctgggtggcgccaattatcttacttaagggtttcacagaaaagccaccgttttaattgaacaggcaattcagtaccccagaagtttgactggggagcactaatcagggatggaagttttgaagcaggtactaaaaacccctttaaaaaggtttaaaacccattttactcaagggccatttaagatgagtgttaagatccgtggtccaa

SEQ ID NO: 637992 - DNA, 2802 bp, Homo sapiens
  misc_feature (17)..(17): n is a, c, g, or t
  misc_feature (32)..(32): n is a, c, g, or t
  misc_feature (35)..(35): n is a, c, g, or t
  misc_feature (38)..(38): n is a, c, g, or t
  misc_feature (40)..(40): n is a, c, g, or t
  misc_feature (46)..(48): n is a, c, g, or t
  misc_feature (50)..(50): n is a, c, g, or t
  misc_feature (54)..(56): n is a, c, g, or t
tgcaggctggtacggtnccgaagttcgttcanctngtncntccgannntnatgnnngacgcggctgtcgcgagggcgggggtcggggctgcaggcggggcagggctgggtgggggcgcgcgacgcacctgcctgcttcctgcacgggtggtccccaagcactgcgggaccccagcccaaagcggaccttgactaccgcccagccccgcgctcccaggacctcccgcccgcggagcccactcggattgctctccgcccgggtcggcggaggccccgtctcctgtacccggcgctgggactgctccgcaccgcgcggctccctttcagcagctgcgggagcatgcggaggaggccctgccggccccgcgggtcatggaggagttccggcgctcctacagccgcctgtgcagggagagtggggccgagccccaggaggctgtcctgcagcagctgcaccagcttcccaggggccggctggacctggccacgcaaagcctgacggtggagacctgcagggccctgggcaagctgctgccgagggagacgctgtgcacggagctggtcctgagtgactgcatgctcagcgaggaaggggccacactgctgctccgaggcctgtgtgccaacaccgtgctgcgctttctggacttaaagggcaacaaccttcgggctgcaggggccgaggctctgggaaaactcctccaacagaacaagtccattcagagcctcacgctggagtggaacagcctgggcacgtgggacgatgccttcgccaccttctgcgggggcctggcggccaacggcgccctgcagcggctggacctccgcaacaaccagatcagtcacaagggcgcggaggagctggccctagccctgaagggcaacaccaccctccagcagctggacctgcgctggaataacgttggcctcctggggggccgggccctcatgaactgtctccccagcaacagaaccctgtggagactggacctggctgggaacaacatccctggagacgtcctcagagccgtggagcaagccatgggccacagccaggaccggctcaccaccttccaggagaaccaagcccgcactcacgtcctcagcaaggaggtccagcacctccgggaggagaagtccaagcagttcctcgacttgatggagactattgataagcagcgagaagagatggccaagagcagcagggcgtcggcagcccgtgtagggcagcttcaggaagccctgaatgagaggcactccatcatcaacgctctcaaggccaagctgcagatgacagaggccgccctggctctgtcggagcagaaggcccaggacctgggggagctcctggccacagcggagcaggagcagctgagcctgtcacagaggcaggccaaggagctcaagctggagcagcaggaagctgcagagcgggagtctaaactcctcagagacttgtctgctgccaatgaaaagaacctgcttctgcaaaaccaggtagacgagttggagcggaagttcaggtgtcagcaggagcagctgttccagaccaggcaggagatgaccagcatgtcagctgagctgaagatgcgggccatccaggccgaggagcgcctggacatggagaagagaagatgcagacagagcctggaggactccgaaagcctgcgcatcaaggagggtggggagtccgtgaggagaaggtagggaggcccgctctccactctggccccacaatccctgccctgagcaggtggagcatatgacccgtcacctggaggagagtgagaaggccatgcaggagcgggtgcagaggctggaggcggcgcggctgtccctggaggaggagctgagccgagtgaaagcagcggcactcagcgagcgtggccaggctgaggaggagctgatcaaggccaagagccaggcccgcctggaggagcaacagcgcctggctcacctggaggacaagctgagactgctggcgcaggcacgggacgaggcgcagggcgcttgcctacagcagaagcaggtggtggccgaggcccagacccgggtcagccagctgggcctgcaagttgagggcctgcggcggcgcctggaagagctgcagcaggagctgagcctcaaggaccaggaaagggtggccgaggtgagcagggtgcgcgtggagctgcaggagcagaacggccggctgcaggcggagctggcggctcaggaggcgctgagggagaaggcggcggccctggagcgccagctgaaagtgatggcgagcgaccaccgagaggcgctgctggacagggagagcgagaacgcgtctctccgggagaagctgcggctccgggaggcggagatcgcccgcatccgggacgaggaggcccagagggcgagcttcctgcagaacgccgtcctggcttacgtgcaggcgtcccccgtgaggaccctgagccccccaaagtgagacaggccgggaggacccgggcgcagtaggagtgcatcaggcggcgcccgagatggaccaggggctgcgtcccgcccgcgccgcctctttgagacccgggtcgtctgttccacgcggcggttgcggcgactgttggtggtgtcgcggctgcgggggaaccccgtgggaggcgcctgggaagggctccctaccggccccttcttcccggtcgacgccacgtgggagcacaccgggaaggggtcccgcgggcgcgtctccccctcgccttttgcgatgtcaccgtgaacgctgcggccgcctgcgcgcggcggggtttggaaatacagcgcgtttgcactttgtgat

SEQ ID NO: 637993 - DNA, 2496 bp, Homo sapiens
ggcagcccgaggtcgcttcctctccaggctctccaatttctgtgccgtagttaaagcgagcaggcgcgccccttcctgcacctgggagtagagggcagttcctctgtatgacgggggagaggccttaacattcgcggtcttacctggttccccgcgtgcagagccggcttggtgcctggcaggggctgcaggtgtttcaaacatgacttcgcagcgagactcttggccagcgccaacccagaccatcgggacagttgtcccttcctgggtctagggagctgccctgaaaaggggcccacggggcagggccttgcgggtcagcaggggcagagagtgaccgccggccccccttacacaggggccacactgctgctccgaggcctgtgtgccaacaccgtgctgcgctttctggacttaaagggcaacaaccttcgggctgcaggggccgaggctctgggaaaactcctccaacagaacaagtccattcagagcctcacgctggagtggaacagcctgggcacgtgggacgatgccttcgccaccttctgcgggggcctggcggccaacggcgccctgcagcggctggacctccgcaacaaccagatcagtcacaagggcgcggaggagctggccctagccctgaagggcaacaccaccctccagcagctggacctgcgctggaataacgttggcctcctggggggccgggccctcatgaactgtctccccagcaacagaaccctgtggagactggacctggctgggaacaacatccctggagacgtcctcagagccgtggagcaagccatgggccacagccaggaccggctcaccaccttccaggagaaccaagcccgcactcacgtcctcagcaaggaggtccagcacctccgggaggagaagtccaagcagttcctcgacttgatggagactattgataagcagcgagaagagatggccaagagcagcagggcgtcggcagcccgtgtagggcagcttcaggaagccctgaatgagaggcactccatcatcaacgctctcaaggccaagctgcagatgacagaggccgccctggctctgtcggagcagaaggcccaggacctgggggagctcctggccacagcggagcaggagcagctgagcctgtcacagaggcaggccaaggagctcaagctggagcagcaggaagctgcagagcgggagtctaaactcctcagagacttgtctgctgccaatgaaaagaacctgcttctgcaaaaccaggtagacgagttggagcggaagttcaggtgtcagcaggagcagctgttccagaccaggcaggagatgaccagcatgtcagctgagctgaagatgcgggccatccaggccgaggagcgcctggacatggagaagagaagatgcagacagagcctggaggactccgaaagcctgcgcatcaaggaggtggagcatatgacccgtcacctggaggagagtgagaaggccatgcaggagcgggtgcagaggctggaggcggcgcggctgtccctggaggaggagctgagccgagtgaaagcagcggcactcagcgagcgtggccaggctgaggaggagctgatcaaggccaagagccaggcccgcctggaggagcaacagcgcctggctcacctggaggacaagctgagactgctggcgcaggcacgggacgaggcgcagggcgcttgcctacagcagaagcaggtggtggccgaggcccagacccgggtcagccagctgggcctgcaagttgagggcctgcggcggcgcctggaagagctgcagcaggagctgagcctcaaggaccaggaaagggtggccgaggtgagcagggtgcgcgtggagctgcaggagcagaacggccggctgcaggcggagctggcggctcaggaggcgctgagggagaaggcggcggccctggagcgccagctgaaagtgatggcgagcgaccaccgagaggcgctgctggacagggagagcgagaacgcgtctctccgggagaagctgcggctccgggaggcggagatcgcccgcatccgggacgaggaggcccagagggcgagcttcctgcagaacgccgtcctggcttacgtgcaggcgtcccccgtgaggaccctgagccccccaaagtgagacaggccgggaggacccgggcgcagtaggagtgcatcaggcggcgcccgagatggaccaggggctgcgtcccgcccgcgccgcctctttgagacccgggtcgtctgttccacgcggcggttgcggcgactgttggtggtgtcgcggctgcgggggaaccccgtgggaggcgcctgggaagggctccctaccggccccttcttcccggtcgacgccacgtgggagcacaccgggaaggggtcccgcgggcgcgtctccccctcgccttttgcgatgtcaccgtgaacgctgcggccgcctgcgcgcggcggggtttggaaatacagcgcgtttgcactttgtgat

SEQ ID NO: 637994 - DNA, 607 bp, Homo sapiens
  misc_feature (477)..(477): n is a, c, g, or t
  misc_feature (588)..(588): n is a, c, g, or t
  misc_feature (600)..(601): n is a, c, g, or t
ggtgtacagacggcgagtatacgtgatgcgtgattagtaagctggactcgtgagtatacatgacgcgcgagttataaatgatttcttgattgtaagctaggagggcgagttataactccagcatgagtgtaagatgtcggccgaggttaagcgcacagtgtgtggtactctgactccagtgcaagcagtagccgaggtcttagtgtgggcttgggcattggcggaggtagcagctccagcgtcaaatatgtctccaccacctcctcctcccggaagagccttcaagagctaagaagcctgctgcaagtcactgccttccaagtgcagcaacaccagcccatggagattgcctcttctaggcagttgctcaagccatgttttatccttttctggagagtagtctagaccaagccaattgcagaaccacattctttggttcccaggagagccccattcccagccctggtctcccgtgcncgcagttctatattctgcttcaaatcagccttcagttgtcccacagcatggcgcctgctagacacgagaatccaaagtggttcccagatctaaatcatcaatacagatcantacctcggcccnnattttt

SEQ ID NO: 637995 - DNA, 2667 bp, Homo sapiens
  misc_feature (17)..(17): n is a, c, g, or t
  misc_feature (32)..(32): n is a, c, g, or t
  misc_feature (35)..(35): n is a, c, g, or t
  misc_feature (38)..(38): n is a, c, g, or t
  misc_feature (40)..(40): n is a, c, g, or t
  misc_feature (46)..(48): n is a, c, g, or t
  misc_feature (50)..(50): n is a, c, g, or t
  misc_feature (54)..(56): n is a, c, g, or t
tgcaggctggtacggtnccgaagttcgttcanctngtncntccgannntnatgnnngacgcggctgtcgcgagggcgggggtcggggctgcaggcggggcagggctgggtgggggcgcgcgacgcacctgcctgcttcctgcacgggtggtccccaagcactgcgggaccccagcccaaagcggaccttgactaccgcccagccccgcgctcccaggacctcccgcccgcggagcccactcggattgctctccgcccgggtcggcggaggccccgtctcctgtacccggcgctgggactgctccgcaccgcgcggctccctttcagcagctgcgggagcatgcggaggaggccctgccggccccgcgggtcatggaggagttccggcgctcctacagccgcctgtgcagggagagtggggccgagccccaggaggctgtcctgcagcagctgcaccagcttcccaggggccggctggacctggccacgcaaagcctgacggtggagacctgcagggccctgggcaagctgctgccgagggagacgctgtgcacggagctggtcctgagtgactgcatgctcagcgaggaagggcaacaaccttcgggctgcaggggccgaggctctgggaaaactcctccaacagaacaagtccattcagagcctcacgctggagtggaacagcctgggcacgtgggacgatgccttcgccaccttctgcgggggcctggcggccaacggcgccctgcagcggctggacctccgcaacaaccagatcagtcacaagggcgcggaggagctggccctagccctgaagggcaacaccaccctccagcagctggacctgcgctggaataacgttggcctcctggggggccgggccctcatgaactgtctccccagcaacagaaccctgtggagactggacctggctgggaacaacatccctggagacgtcctcagagccgtggagcaagccatgggccacagccaggaccggctcaccaccttccaggagaaccaagcccgcactcacgtcctcagcaaggaggtccagcacctccgggaggagaagtccaagcagttcctcgacttgatggagactattgataagcagcgagaagagatggccaagagcagcagggcgtcggcagcccgtgtagggcagcttcaggaagccctgaatgagaggcactccatcatcaacgctctcaaggccaagctgcagatgacagaggccgccctggctctgtcggagcagaaggcccaggacctgggggagctcctggccacagcggagcaggagcagctgagcctgtcacagaggcaggccaaggagctcaagctggagcagcaggaagctgcagagcgggagtctaaactcctcagagacttgtctgctgccaatgaaaagaacctgcttctgcaaaaccaggtagacgagttggagcggaagttcaggtgtcagcaggagcagctgttccagaccaggcaggagatgaccagcatgtcagctgagctgaagatgcgggccatccaggccgaggagcgcctggacatggagaagagaagatgcagacagagcctggaggactccgaaagcctgcgcatcaaggaggtggagcatatgacccgtcacctggaggagagtgagaaggccatgcaggagcgggtgcagaggctggaggcggcgcggctgtccctggaggaggagctgagccgagtgaaagcagcggcactcagcgagcgtggccaggctgaggaggagctgatcaaggccaagagccaggcccgcctggaggagcaacagcgcctggctcacctggaggacaagctgagactgctggcgcaggcacgggacgaggcgcagggcgcttgcctacagcagaagcaggtggtggccgaggcccagacccgggtcagccagctgggcctgcaagttgagggcctgcggcggcgcctggaagagctgcagcaggagctgagcctcaaggaccaggaaagggtggccgaggtgagcagggtgcgcgtggagctgcaggagcagaacggccggctgcaggcggagctggcggctcaggaggcgctgagggagaaggcggcggccctggagcgccagctgaaagtgatggcgagcgaccaccgagaggcgctgctggacagggagagcgagaacgcgtctctccgggagaagctgcggctccgggaggcggagatcgcccgcatccgggacgaggaggcccagagggcgagcttcctgcagaacgccgtcctggcttacgtgcaggcgtcccccgtgaggaccctgagccccccaaagtgagacaggccgggaggacccgggcgcagtaggagtgcatcaggcggcgcccgagatggaccaggggctgcgtcccgcccgcgccgcctctttgagacccgggtcgtctgttccacgcggcggttgcggcgactgttggtggtgtcgcggctgcgggggaaccccgtgggaggcgcctgggaagggctccctaccggccccttcttcccggtcgacgccacgtgggagcacaccgggaaggggtcccgcgggcgcgtctccccctcgccttttgcgatgtcaccgtgaacgctgcggccgcctgcgcgcggcggggtttggaaatacagcgcgtttgcactttgtgat

SEQ ID NO: 637996 - DNA, 154 bp, Homo sapiens
gtgagtatgagtatgtacatatcttcgaagggtatgagactatatggaaaatggactcatatgccttaaacaaagaataagaaagatcgagaaaaagaagctaaatgggaggattataaggatatgctagaaaagaggagagcatgttaatcca

SEQ ID NO: 637997 - DNA, 377 bp, Homo sapiens
  misc_feature (55)..(55): n is a, c, g, or t
ggaaaatcgtgcgcccggcctcgtccaccggacagaagacgccgctacacaatgngagtctcgctctgtcgaccaggctggagtgcaatggtgcgatctcggctcactgcaatctccgcctcccggtgagaggtgaagccagctggacttcctgggtcgagtggggacttggagaacttttctgtctagctaaagatttgtaaatgcaccaatcagtgctgtgtctagctaaagtttgtaaacgtaccaatcagcgctctgtaaaaatgggccaatcagcactctgtaaaatggaccaatcagcactctgtaaaatggaccagtcagcaggatgtgggcggggtcaaataaaggaataaaaagctggtagccgaaaa

SEQ ID NO: 637998 - DNA, 1470 bp, Homo sapiens
gagaagagatggccaagagcagcagggcgtcggcagcccgtgtagggcagcttcaggaagccctgaatgagaggcactccgtctcctgtacccggcgctgggactgctccgcaccgcgcggctccctttcagcagctgcgggagcatgcggaggaggccctgccggccccgcgggtcatggaggagttccggcgctcctacagccgcctgtgcagggagagtggggccgagccccaggaggctgtcctgcagcagctgcaccagcttcccaggggccggctgttccagaccaggcaggagatgaccagcatgtcagctgagctgaagatgcgggccatccaggccgaggagcgcctggacatggagaagagaagatgcagacagagcctggaggactccgaaagcctgcgcatcaaggaggtggagcatatgacccgtcacctggaggagagtgagaaggccatgcaggagcgggtgcagaggctggaggcggcgcggctgtccctggaggaggagctgagccgagtgaaagcagcggcactcagcgagcgtggccaggctgaggaggagctgatcaaggccaagagccaggcccgcctggaggagcaacagcgcctggctcacctggaggacaagctgagactgctggcgcaggcacgggacgaggcgcagggcgcttgcctacagcagaagcaggtggtggccgaggcccagacccgggtcagccagctgggcctgcaagttgagggcctgcggcggcgcctggaagagctgcagcaggagctgagcctcaaggaccaggaaagggtggccgaggtgagcagggtgcgcgtggagctgcaggagcagaacggccggctgcaggcggagctggcggctcaggaggcgctgagggagaaggcggcggccctggagcgccagctgaaagtgatggcgagcgaccaccgagaggcgctgctggacagggagagcgagaacgcgtctctccgggagaagctgcggctccgggaggcggagatcgcccgcatccgggacgaggaggcccagagggcgagcttcctgcagaacgccgtcctggcttacgtgcaggcgtcccccgtgaggaccctgagccccccaaagtgagacaggccgggaggacccgggcgcagtaggagtgcatcaggcggcgcccgagatggaccaggggctgcgtcccgcccgcgccgcctctttgagacccgggtcgtctgttccacgcggcggttgcggcgactgttggtggtgtcgcggctgcgggggaaccccgtgggaggcgcctgggaagggctccctaccggccccttcttcccggtcgacgccacgtgggagcacaccgggaaggggtcccgcgggcgcgtctccccctcgccttttgcgatgtcaccgtgaacgctgcggccgcctgcgcgcggcggggtttggaaatacagcgcgtttgcactttgtgat

SEQ ID NO: 637999 - DNA, 139 bp, Homo sapiens
cctctgctgcaagcacggtcttagtggatgctcgcggactctggtcatggtaaaagctctttatgcccttactggtctgtgccagtaaggactgctacaaaaaccccaggttatacgaaataggccagatgatataggc

SEQ ID NO: 638000 - DNA, 180 bp, Homo sapiens
ctagaggatccctgatgtgtcagtaatatctaaagacaattggcccccatctggcccttgcattaacttctgcgtacttactgggagtagaaacagctcaaagtgttcaacaaagtgctgagattttaccttgtcttggtcctggatggacagtcttgtacttttcagccttatgtcgca

SEQ ID NO: 638001 - DNA, 182 bp, Homo sapiens
  misc_feature (6)..(6): n is a, c, g, or t
taggancccctcatcgaaaccctaaaccctggaatggttatctgtgggatcatcttccatagaagggagatcttttaaataaaaaaagaagatgatgataaatggccagctgagctggcctagggtgagtgctcctatctaggagggggggaggcaggtggtatacagggagggtttgatga

SEQ ID NO: 638002 - DNA, 652 bp, Homo sapiens
taaaaaccctcatcaataaatggaaacttccaaaaatattcaaaccacttctacaaaagtgccagttatcgagggcgggcggtttcgaaacccaaagtgaatgttgggttgttaagggtgaatatattagtggggcggataaagacaatatggtgagaaaattgtgagcccatatatgtggacctgtgagaatgtcccgggggaacctctgtgtgggtcctaccaaaaatatgtttggacccctgaaaaatcccgtccgaaattgggtggaaggggaaatccaaattaatctcctgggggtcttgtgagaagggttaaaatataaaaacacccaggattaaacatagggttaataaacgcaagggcttggaaatattaatgtgggttctcgcgggtgtgtttctcttattaacactttagggggtgaacaccccgagggtgatatgtgaataactcctcgtggatggcgaagttaaataagggagatgttgttttagaggagaggtgggcacttccaggggggatattaaaggcgggggtgaaatgccgtgtgtggggggccccggtgcccctccctaaattgggggggtatagggggccataggccggggagttgtggctaaaggggggctccaaaaaaaatctctctggc

SEQ ID NO: 638003 - DNA, 363 bp, Homo sapiens
cagggccaagaggtaaaatcaaggatattacaaagatacttatgaaacaagacagaagcaaagtgcagtggctcacgcctgtaattctagcattttgggaggctgaggtgggcagatcacctgaggtcaggagttcgagaccagcctggccaacatatagacaacatatatgttacaacatatataatggccaacatataatacaaaaattagctatgcatggtggtgggcgcctgtaatcccagctactcaggaggctgaggcaggaaaattgcttgaatccgggaggcagaggttgcagtgagccaaaatggcaccactgcactccagcctgggtgacaaagtgagactctgcctcaaaaa

SEQ ID NO: 638004 - DNA, 158 bp, Homo sapiens
tcgttggtctccattttacgagtcggcttctgcaagttcaatccattgacgctaactgttgggtagcacgcttggtagttgtagacgtttgcaggtaagggagatttctgattcgtacttggagttgatgctcaggtccccagcccggtttgcatcct

SEQ ID NO: 638005 - DNA, 389 bp, Homo sapiens
cggcgtttttcggggaacgagcgttgcttttctgtgaggcaaggcttgtgtgccgttctctgaataggggccactttctttggtccagagtgccggcagtggaagaagagtaccctgctcgcttcagactattcttcaattttctcctcgtccatggaatctacagtgacactcctccacagtttctgaaattctgcctcgccgagcgtggtggctctgtaatccaagcactttaggaggccaaggcaggcggattacctgaggtcgggagttcgagaccagcctgaccaacatggagaaaccccatctctattaaaaatacaaaattagccaggcgtggtggcacatgcctgtagtcccagctacttgggaggctgaggaaggagaat

SEQ ID NO: 638006 - DNA, 298 bp, Homo sapiens
tataatgggtggccgagcagacgcatgaagggccgtgatttgaattgtattgaacgaacatagctcttggaggggaccaaataggttctcggggaaacgtgctcctttcccataagacactgacttgtaaatagctcacagtgtcacctgggccaccccatgaggtctggcgctgttctcaaaccctgagaacgcaggtgatgacaagatgggggatttggaaggatttcgtgaagaggaccttgtttcctgagcacacacttttgtaatgtcaaagctatagttaaagtgacagtac

SEQ ID NO: 638007 - DNA, 315 bp, Homo sapiens
cccgaccttcaggctgatgcaggcccccaccttactttccttaattattcctgggctactgggtcgagctaactttggaggacatttaggctatggtttaaataacaggcctgccaaaaactcaaccacttatttttttgagacgaagtcttgctctgtcgcccaggctggagtgcagtggtgtgatctgggctcgctgcaatctctgcctctgggttcaagcaattctcctgcctcaacctcctgagtagctgggattacaggcgcatgccactgagtagctgggattacaggcgcctgcaatcaagcctggaa

SEQ ID NO: 638008 - DNA, 407 bp, Homo sapiens
aagaaacgggaagttcttcttgcggtatcccttcatggcgtcacaaggtcaggtgccgggttatatttagcccttccggtgacaatagcgtaacggaaaacctcgccgcatcttctgcgtgctttgttggctcgttccattgcaccgcgatcttcaaacctgcggattacttccagcagttgcatcggctcaatatcctgaatttcaaggccgccaatgataggtaaaatgtcgtcgtcaaacattttggcaagttcagttgcataccctactgaccatacttgcttcttgtgctcgtaccattccttgtaaatcgcactaaaggaattgttgttagacgagcctttttcgccttacaggatccatgccaaccgagatgtctttcctcgcagtccatgctttatccc

SEQ ID NO: 638009 - DNA, 190 bp, Homo sapiens
gctggatacaggcattgtgccaccatacccacgctattattgttttgattttttgtagagacaggctctcactatattgtccaggctggtctcaaactcctggactcaagtgattctcctgcctcagcctcctgacgtgctgggattacaggtgtgagccactgcgcctggcccaaatatttgatctttg

SEQ ID NO: 638010 - DNA, 247 bp, Homo sapiens
  misc_feature (43)..(43): n is a, c, g, or t
  misc_feature (47)..(47): n is a, c, g, or t
  misc_feature (62)..(62): n is a, c, g, or t
  misc_feature (83)..(83): n is a, c, g, or t
  misc_feature (85)..(87): n is a, c, g, or t
  misc_feature (89)..(90): n is a, c, g, or t
  misc_feature (117)..(117): n is a, c, g, or t
  misc_feature (132)..(132): n is a, c, g, or t
  misc_feature (172)..(172): n is a, c, g, or t
  misc_feature (184)..(184): n is a, c, g, or t
cggcacgaggcaaaccccacactcagtcaaattcatagaaatntgcnttctcttgctatganctgttttagattatgtatatntnnngnntgcacttgcctagtaatttagaatgangctcttaaaattggngctttccaaatcaatatcacaatttagagactgataaganaccaggtatttntactggactatagggggtaaattctacgctgcgcaaactaacattctgctttgtaagtaaaat

SEQ ID NO: 638011 - DNA, 390 bp, Homo sapiens
cgccaccactgacctgtgacagtgaatctacactgccgcgttttgtgtcgcggggcatactcctgctgtcagacctgtgctgtctgtgccctgtgtccctggctgaggatccccaaggagaggctgtccagaagacacgatacattccacacatgatcaggatcacccaacctttaacaagatcacccccaacctgtgtgagttcgccttcaagctataccgccaggtggcacaccagttcaacagaaccaatatcttcttctccccagtgagcatcgcttcaggctttgcaatggtcttcctggggaccaaaggtgacactcacaaagaaatactggagggcccggatttcaaactcaccgagattccggaggctcagatacgggtttc

SEQ ID NO: 638012 - DNA, 385 bp, Homo sapiens
cgctgacctgttgctgcaacacgatgaggtcttgcaggatctgcacgggctgcacggcgcagtcgtgttcggcagcaatccacagcgccgcttcaaacagcgcagggggtgaacggtccaggcaggcgaaaaaggctgtgcggggattcattgcgttctccggcggatgccccgttttagccttgctgagaattttcgtccagtgacttaagcaataacccacctgcttatgtcgcagatcccacgaaatccggcggcttattccagcgcacttcggcagttttctaccgcaagcctatacttgggcctctaccagaagtgattcgggagctcgacgatgtttgcgcttatgcacagcacccgccttgagtcgctgcacctgagt

SEQ ID NO: 638013 - DNA, 696 bp, Homo sapiens
  misc_feature (128)..(128): n is a, c, g, or t
  misc_feature (162)..(163): n is a, c, g, or t
ggacccggcaggcctgcgcgggcaacatggcggcgcccgggagcggggccgcttccacggcgggaacctcttcttcctgccggggggcgcgcgctccgagatgatggacgacctggcgaccgacgcgncggggccggggcgcggggcggagagacgcggccnnctcggcctcgacgccagcccaggcgccgacctccgattctcctgtcgccgaggacgcctcccggaggcggccgtgccgggcctgcgtcgacttcaagacgtggatgcggacgcagcagaagcgggacaccaagtttagggaggactgcccgccggatcgacgaggaacttgggccgcacaacagcatgggactgtcctcaacaacactggccgcatacataaccccgacctgcccaccccagaacagcagcaagacagtggcccagttcagacattatgttctaaggtattaactccctgtgaggagtgtgctgaagaccctaagaaaaaaggatgtgcagggaaccacccagacaccggcagcccgggcatgcttcacacagtggctggccacgtgcacaatgaagtgaacccgcaagctgggcagagcgtgacttcgagtgctccaaaagtggagagcggggcgcgtacggctggaaggatgctcctgtgagtggcggtggtcagcatagctttccgggagagcaacagga

SEQ ID NO: 638014 - DNA, 99 bp, Homo sapiens
tcaagcttctaacgatgtacggggacatgatattctgcctatggcacaaattgtaaacctttgtttttctaaaataaagtaattgaaaacctgcaaaaa

SEQ ID NO: 638015 - DNA, 428 bp, Homo sapiens
tccccggaaattcggcctttatggccggggggtggcttgagaaaccgccagtatttgccagagccaccaaaggctgaccagaatcctgggggaccaggcaaccttgcttttaagttttggaggccgttgaaccttacgttcccaaggggttaaaggctgaaccattaaccttccttgcggatttttgcccactttttgagaaggggggccaattcaggaaccaacctgcactggttgagctcgtgaaccacaggcccagggcaccaaaggagcacctgaaagctgtaatggttgattccgcagttttggtaaagaagtgctgcagggttgccgataaggaaacctgttttgccaaggagggtaaaaaactggttgttgcaagtcaagctgccttaggctaataccatcccattttaattcatttgttt

SEQ ID NO: 638016 - DNA, 288 bp, Homo sapiens
gggttggggccctggggggggtttttttttcttttcttttccccttttctttttttctttttaaggtggttgcgggaaaagggggccaccccgattgcatatccgggccttgggtattttatgcttttttggaaaaaacccaggtcagggggcccgggcccccccccccctgtttggtttcccgcaaatccacggctttttatttacccttaaaccaattgttttggggggtaggccccccccttttagaaattagtcctttggaaaaaaaattccatttccctggga

SEQ ID NO: 638017 - DNA, 827 bp, Homo sapiens
cggatagctgcggcgggagtgctgctgctgatgcccgagtccgatgctcgcgggcgggcgggcccgagaaatgcactacggtgataggaaagagagccactattctgaagaacacttgtgcaaagggtcattatcgttaattgtgatgctctttctatgctgggggaattatgactgggccctgcaaagcaaacatacaagctcaaaaactctgtaaaaatgaccctgagggaatcaaggatctaattcagcagcatgtcaagttacaaaacacaaatagaagacctaccaaggtcgaacagcaacataaggatccaattaaagccttttatgaccaacagggcctcacacacgctaggagtttatcagcacctatatttactacttccactataaacttagtggagaacggaaaagagatttcagaaaaattaatacaacggaaatggacacacaggttgcgtaatcagaatctaacaggtggcaggatgaggggtagaaggtagatgattgtgagtgtcatcatgaatatttcacacacccattcaagtcaggctacacaaagataaaggcaaagaaaaagaagtttcgaagaaaaatgaatcagaacaaagttcaaaggtatggtagattcagccatatgaactattagagcagcagatttggaagaaagcatatggagagaaacaaaagtttagaataaaatcttcgcagaagtgaacaccaagggaatttggctaataatatgaaaattgtgagaaagataaataacaatggaatatgggcttattggaaaaaagatagcaggaatgagaaaggataaaaag

SEQ ID NO: 638018 - DNA, 914 bp, Homo sapiens
  misc_feature (126)..(126): n is a, c, g, or t
  misc_feature (405)..(405): n is a, c, g, or t
  misc_feature (436)..(436): n is a, c, g, or t
  misc_feature (565)..(565): n is a, c, g, or t
  misc_feature (640)..(640): n is a, c, g, or t
  misc_feature (751)..(751): n is a, c, g, or t
  misc_feature (759)..(759): n is a, c, g, or t
  misc_feature (784)..(784): n is a, c, g, or t
  misc_feature (786)..(786): n is a, c, g, or t
  misc_feature (789)..(789): n is a, c, g, or t
  misc_feature (841)..(841): n is a, c, g, or t
ggagactttcttcgccgagagtcgcgcgggtctcctgcttcaacagtgcttggacggacacccggcgctcgtgtccccagcccgggcaggactgtgcctatagtcagccctccagttcacacatcnttcagcggtgaccctcggaactgtcctcgaaggaccctcctgacgcagtgcgtagtctcagcagcgctggggatctaatcgagacatgcacgtccgtccagcgcaatctcatcactgtagcttccgcatactcactgattgacgctgcgtcccacacgtcgtcatggtggcgtccgagaacatatccagcaagggacctcgagagcgcacggctatccaaactcggccaagaatcgaaagcctttgcgacgcagtcctatcgtctcgtcccctatcagntttgacgcgtggtctcaatcgatctttgacntagccctttgtgaacactgctgatatgattgttagcgcctattggaaggaaacatttgtgcgcaaaaagataacgtattcggtatcgacaacaaatagattcctcagtgcagcgaacgatgcgcgcaangcaattaggcgtagagtgagaaacccttcgaattagaagaggtcctggcctatgaaaagcgcaaaatccggtagngctcgcgaccagggaatttcctctcccctattcagagagtgaatcttacagaagacgccagaacttcgtggaatgaactcttgaggcaagatgcgggtgcgcttgatactngcctactngagactcttgtagtcatttgaacantnttngcgaagataacacagatcggtcgtatatccaatggtcccacgtaatctaggncatatctgtggcaaatccaaaaccgtgagttccggatctgtggaccattcacaacacatttgagggcccccta

SEQ ID NO: 638019 - DNA, 165 bp, Homo sapiens
  misc_feature (2)..(2): n is a, c, g, or t
cncctggggacccaggctctgctctggatttacctgcctcgtcatttgcgcttcgtggtcaccagttgttcaccacaggggtgcgcttctggctacctactcagttggtcttgggcacctgcctgcgacacttcctggaggagccctggcttattggtggaggct

SEQ ID NO: 638020 - DNA, 539 bp, Homo sapiens
atccccgttgcgcttagactgtgtctgcgtctcagaatcaaagatatgcagactcatcaagaacatataaacatatgaatctaaggagactaaataaactgagagatatacgatattacactctgtagatcaacacattccataaaatcctattgtttttactttttacgtggaaattgacaaactgaatctaaaacttatgtggaaatgccaagagccaagaatagccaacacaatcatgaggaagattaaaactgatactagatatcaaaaaaaactgtataatttagaataggatagagaaataaaccagtagaatagaatagagagcctaggaaaagacccatacatgtatggggcctaatgtgtgggcaaagatgagactgtagggaaaagatgatcattttagtaaatggtttggggttaattagatatccatattgagaaaagcattaatcttaactcttaacctcattccataacaagaaaatcaactctagatggattgcagatctaaaagtgaaaggcttagcttctca

SEQ ID NO: 638021 - DNA, 262 bp, Homo sapiens
  misc_feature (170)..(170): n is a, c, g, or t
cactttccagagatagccactgttttttaaagagacagagtatctccctgttgccccagctggagtgcagtggcacaatcatagttcaccacaccctggaactcctgggctaagggatcctcctatagcctcagcctcccaagtagctaggtatacaggcatgtgctacncatgcctggcttacttttttttttatttttacaattttggagcagatgtggctcaaggctgggtcatcaaactccgaggcctcaagagtgat

SEQ ID NO: 638022 - DNA, 863 bp, Homo sapiens
  misc_feature (128)..(128): n is a, c, g, or t
gatccaccgggctgcaggaattcgtgacgagggttgcgtggagtaataagagagatgaagagggtggactactgctgttcagcgatggttgctctaaagagtgatattgatgactgtgctatcaatantacacataatacactggctatgaaaccatatatctcacttaagtaacacagtagatactctgtgtatcactaagtaatagacatgaatcattgactattatttaaagccaacacaacagtgtaacagatataagctcaataatggtaagtatcgatcagaaaatataggaggcaaagttcagatgatgacaattgtgtatatgctactggatgctgaaagtatctctaatgaagtatagtgagtatcacacaatatcactgcccgtcgtatacaacaactcgaggtggggcccggtcgccaattcgacctatagtgagtctgattacaattcacctggtcgcagttgacaacgtcgcgactaggaaaaccctgacgtactcacattagtcgcttgatacatgcgcatgcgcagctgcgcatagcataagcccgtacgtcgccttcgaaagtaggcacctgatgcgatgcaacatgagcgtacatatgtaaatcacgtaaatttagtaagcagtcatcttaacgacagctgaatcgttaagacgtgctcacgtaaggcgaaacgttacagcgaggccttctgacatacctatagttttgggcagggcgaggctatcgacttaagtagccggtaaagtgcggaagcgcaccggcgaagtggagagcaagacgcctggcttaaattcggacccgttcaccccccgcaaggctcaggcgaaggctttggaaatgaacct

SEQ ID NO: 638023 - DNA, 566 bp, Homo sapiens
tggagccggtaccctataggcttggagctgtggaaatagcatctcaaggacaggaatgctgtcttatttatcactgtccctgtaactagcacatacagtatttccaaaagatcttaacaggctgaaatgaaatacactgaaccaaatgagataacgataattgccagatcctacccttccctccaaatatcaaaggcacaaatacaagatgcaggagataatgtcttcagggctgttcctgagaaactgactcatgagttctcagttgacagttaacatgggtcgtggctgcaaagatcgaacacaattttatatgtgcacatgtgccccattaggaggagcaaggaaggtgttattcctgctcagctctctgcccctcagaaatggaatagtaaataaagttgggaagcatggaaaatgagtttaatatgccatgctttctcagactaacggcagtgagtcatgtgaaattacacagttagctttggcaaactgtttcccattatgccctgagggggaaggtacacttacacacagaagagctcctttcgaggcaggggatggga

SEQ ID NO: 638024 - DNA, 147 bp, Homo sapiens
tcatgattgtctgcgaccaccttgtacgaggcggtcgcggaagtctgcacgcgaaccagcgcaagggccagagaggtccctggacgacggtggagttgcagatcagcttgaagacactatgatccccagaaggacaagcgcttctcg

SEQ ID NO: 638025 - DNA, 853 bp, Homo sapiens
gggagtcctctgacagcagcagcagcagcgatggggagggcgccctccggaggcgcagcctccgctcccacgcccggcgccgtcggcgtacgggcgccgaccagcggagggccaagaggggcggaggtgcaagtgagacggcatgtacggagaagttcagaacgggactgaagcgagtgcatgtagtgagcagtgagggagaggtcgagggccctgagagatcaagagggagaagtgaaggtaagccgtgccggacgtagaccgttacagatcacgggtgtagcgagagaggcaagggaaaaagcacgggggtcgatggacttgtgcaatctaagcagcatcagcgtcgaacgtgagtgatctcgagtggagcatagaaagtgcgagcactaagagcgcttggagacgcattgccctccgagaagaagacaggccagtaggatccagcagccagagttccccccgacgtagagcgtagttgggcacagcaagccagggggaaaggccaaagtctagagaagcgcacagtatgcttccagagtaccgctggacaaacaggagacagggcaataaatagaggaccgacaagttcaaaggacgacaggcgacagcgggaaggaacagggggaacaaaaagtgttagcgccattgacgcgaagcgggtgagcttggccccagagagaacgttgcggcgagaacagcggagcgaaagcggcattggggaagtagggggaccggcttggggaagcgagacgctcagacgcggcggaggagacggacaaagacggagcgaatggacctgggaaccgaggaagacgacccggcgaaagacgagagaggcgcgaggccggtg

SEQ ID NO: 638026 - DNA, 121 bp, Homo sapiens
cacaggtcttccggaagttgccaaaccccggtagcggcagttccggctgggggctttattagggggcaccagggtttgctttccgactaccttccgactccgcgcctacgcaggaagcgat

SEQ ID NO: 638027 - DNA, 96 bp, Homo sapiens
catggatttgctggtgcagtacaactaggcttaatagggacatgttagccaggctggtctcgaactcctggccccaagtgatctaactttcttctt

SEQ ID NO: 638028 - DNA, 752 bp, Homo sapiens
  misc_feature (404)..(404): n is a, c, g, or t
ttctttttttttgtttaaaccaaagtctcattctgttgccctggcttgatctcagctcactgcaacctcttcctccggggttcaagtgatcctcgtgcctcagccctcctgttgcgaaaagctggtaattacagacgtgtgcaccaccaattgccgtgacttaatttttgtctatttttatagttaaaagacaagtttttcgctatagtgcagtggccaggctgtgaccctcgaacctccttagccctccttcattatgtgactcacacccacctctcctgtgtgaagacaagcattgttgacccttataacgttctcattgtgacacacccaccctctccaaagtttgtgcgccatgtgcgccgcttctccaagaaccatgtggagggaagaaagaaaggcantctcatgtgggagaccacctgtgaacaaaaaagaccggaattgtgcacacagagaacaagaggacgctataatgtcgccacggacaccacgaattttgtgacacgttgtgggtgggggtctctctcaatataaaacgttttacttttctccacgctttgaaataaaacaacaaaaaacacaaaaacaaaaaaaaaaacacctctgcgaggggactatctcttaatgtgtctgcggggtgtggcgggaaaaaaacgagagaggttagtgtagaaagtgtgggcccaagtgtggctccataaacagtgtgttctcccgctaggccccccagcgtttctttgtgtttatcc

SEQ ID NO: 638029 - DNA, 690 bp, Homo sapiens
ctcttggtaaatgtccactgaggcacaggcatggaacgaatagaataccggactgtaagataaattcgatttgagtaactggactttctgtaaaccattagacagacatttgagaagccacatgtatagctgctgtggagccatgtttagcctatctaagggtctcggaaatctcaggaggagatcacatatatgtacacaatataaatcgcttctctggtgtatgttgtgagcacagtgatctgatgcattgggaatgtgatcttgtgaatcactcaggtgagcaagcctgacatgagtgggcataaaggtcagtaactgaatgaggtaccaaaatgttgctacatgtgtcaattgtgacctaaaagaactgaaggcattcaccctccctgtgaagtaatgaagcgtgacgacagcgagggggctgcaaattccactgcagatcagggtcttgaagctgacatactgaagagtggctctcacttgagatacagagtagcgaactactgtttccgtatggctactgaatattccacaaataatctcctcagcgtgccattattaattaatgtaaagctcttagggtcccatctatcatagatcccctcggaaggcaaactataagggccgtacaaactcatactgcggacatatatgctattatccaaagttttgggctaaatttactgc

SEQ ID NO: 638030 - DNA, 480 bp, Homo sapiens
aaggacccgtctctcgcgtccgtaaattccccctgatgcaccagacagaaagctcggtacacaaagttgacctcggaaggacatggaaaggaaagggtccctttgtcactctcacaagacgtaagaagcaaactaataatgatggccatcacacatattatactcaccatgtagaagctgtgctgccttaaacttctgttcattcagcacttactgattgccagtcccattgctaagggctccgcgtgacttaactcccctaatccttgtgagtagccaattattattcgcattttatagatatggaaactgaggctccaagtggtttaaaaaatgaacttgcccaggttacagtgtgttggtaggtaggggtagtctcaaagttggtaaattttacgccaaagctcacgatacttgccttctttcccttctcaatttatttctctgactgtgtgctataccacacagcagtgtcatcca

SEQ ID NO: 638031 - DNA, 1124 bp, Homo sapiens
  misc_feature (15)..(15): n is a, c, g, or t
  misc_feature (32)..(32): n is a, c, g, or t
  misc_feature (39)..(39): n is a, c, g, or t
  misc_feature (85)..(85): n is a, c, g, or t
  misc_feature (110)..(110): n is a, c, g, or t
  misc_feature (126)..(126): n is a, c, g, or t
  misc_feature (128)..(128): n is a, c, g, or t
  misc_feature (131)..(131): n is a, c, g, or t
  misc_feature (141)..(141): n is a, c, g, or t
  misc_feature (144)..(144): n is a, c, g, or t
  misc_feature (148)..(148): n is a, c, g, or t
  misc_feature (157)..(157): n is a, c, g, or t
  misc_feature (159)..(159): n is a, c, g, or t
  misc_feature (164)..(164): n is a, c, g, or t
  misc_feature (180)..(180): n is a, c, g, or t
  misc_feature (217)..(217): n is a, c, g, or t
  misc_feature (238)..(238): n is a, c, g, or t
  misc_feature (240)..(240): n is a, c, g, or t
  misc_feature (248)..(248): n is a, c, g, or t
  misc_feature (253)..(253): n is a, c, g, or t
  misc_feature (262)..(262): n is a, c, g, or t
  misc_feature (273)..(273): n is a, c, g, or t
  misc_feature (280)..(280): n is a, c, g, or t
  misc_feature (282)..(282): n is a, c, g, or t
  misc_feature (291)..(291): n is a, c, g, or t
  misc_feature (301)..(301): n is a, c, g, or t
  misc_feature (316)..(316): n is a, c, g, or t
  misc_feature (708)..(709): n is a, c, g, or t
  misc_feature (759)..(760): n is a, c, g, or t
  misc_feature (764)..(764): n is a, c, g, or t
  misc_feature (770)..(770): n is a, c, g, or t
gtaggatgtggagtnacatggttctatccttnacttatnagactcagaaatatatctacaaagccagatgctctgtcttcatatntgcagacatctagaccccttgctanaaacccactgaagttntnggntatgttcttnganccanaccatcaanantaccntcaaatctaattgccntacagcatattctatcatgtggactaggttcctgganagccggaactcatgattcttntnaaaactgncagantagaagggngagagaaaacntttctancntttgatcancagtgtgaanagaatccggaatgcngtttcagcgtgacctgcagtcattcatgttcatagggatttgacagatggaaacccaaggttatcgaagattggaaggttgatcattgtgaagaagtagtctcaagaggactccggtttcggtctacaagtgtgatgtctccatgaagaagacttagtatggatatgggtgggtgaagaaagcatttaatcgcccaggaaaggacatgattaaagttgaccttttaatactgtagtaccttgctgttaagtaaccccactattgtatctgcatttatcttttgtcatctactttcacttacatacagtattatataagtagagaaaaatgggaaaatgcaagcaaattcaacttatttatacattgtatatatgtacacctacatattcatnngggtttattaaagagatagtcacaaagggttacgaaaatcattttgaatnnatanttagantattgaataagcaatcctatgatccacctaattcgtgtctagatcaagtctaatcaatattcaatcacaagacatttactgtatattctagtcatcttggagatgagttcaaccccaacatataatacatcaccacgtgtagagatgtctctctcgcagtccttatgatgtggatatactcacctaagtggacttgtatgctgataattctagaccaaagtaacatatggccagaatatttatacatgaacaaaataatttgcaaatattttctataattgtattcatttaaacactgttgatagccttgtgtaagttacaggcaggggtgtatattcgattacagcaaatact

SEQ ID NO: 638032 - DNA, 862 bp, Homo sapiens
  misc_feature (1)..(1): n is a, c, g, or t
  misc_feature (103)..(104): n is a, c, g, or t
  misc_feature (120)..(120): n is a, c, g, or t
  misc_feature (122)..(122): n is a, c, g, or t
  misc_feature (125)..(125): n is a, c, g, or t
  misc_feature (128)..(128): n is a, c, g, or t
  misc_feature (152)..(152): n is a, c, g, or t
  misc_feature (156)..(156): n is a, c, g, or t
  misc_feature (251)..(251): n is a, c, g, or t
  misc_feature (276)..(279): n is a, c, g, or t
  misc_feature (285)..(285): n is a, c, g, or t
  misc_feature (288)..(288): n is a, c, g, or t
  misc_feature (314)..(314): n is a, c, g, or t
  misc_feature (318)..(318): n is a, c, g, or t
  misc_feature (322)..(322): n is a, c, g, or t
  misc_feature (324)..(324): n is a, c, g, or t
  misc_feature (344)..(344): n is a, c, g, or t
  misc_feature (349)..(349): n is a, c, g, or t
  misc_feature (386)..(386): n is a, c, g, or t
  misc_feature (400)..(402): n is a, c, g, or t
  misc_feature (404)..(404): n is a, c, g, or t
  misc_feature (437)..(437): n is a, c, g, or t
  misc_feature (488)..(488): n is a, c, g, or t
  misc_feature (504)..(504): n is a, c, g, or t
  misc_feature (590)..(590): n is a, c, g, or t
  misc_feature (627)..(627): n is a, c, g, or t
  misc_feature (669)..(669): n is a, c, g, or t
  misc_feature (677)..(677): n is a, c, g, or t
  misc_feature (703)..(703): n is a, c, g, or t
  misc_feature (737)..(737): n is a, c, g, or t
  misc_feature (741)..(741): n is a, c, g, or t
  misc_feature (768)..(768): n is a, c, g, or t
  misc_feature (786)..(786): n is a, c, g, or t
  misc_feature (836)..(836): n is a, c, g, or t
naaactaaacaaaaggcaaggtaacatcccaagcaagtaaaggggctgagttttttctaggtgcgggtcagctcaggaactggctgcgcaaggccagagaggnnactgtgtgcggctctntncanatnagaccgacgagcgaggagcgcttnattncctgtgcagtgttcacatctgcccagtgcagtgtgacgtctgggacctcatctgctggctctggatccttcctcaagggcccccggggggacgcnaccgcaatgggcagagggccacagnnnncccggnttnccacgaacatggaggcccctctgatnagcnagcngnggaggggtttgctgtgtggngagcncacggaagaggccctgggtgaggctgagcatatgaanggacccagagaccnnngnatagatgtgtgtgatgccaatgagctggcaganggtgatgatggccctgtggcagcggaggccgtgacctttgggttgtgtctncatcttgatatgcgtncttttaaatcttaatgaaatatcatggaatattgtatggtcttcatatcgttctatataatgcaaatggtgaactgctctgttctntgcttttctgagagcatccatccgatcagtagctttnccaatagaaaaacctgcagctccttttccgttccccacagcnaccaaganacggatcgatttctttcttccctctntcgcagttatagtgaaaacgtttctcacctcaantatnctgggtatcaaaatcctcatatgtctntccacagggaccagggtnaggggggccaagactgacgcctccccatgagttttcacttcatcctcgcncccgtttaaccttcatcttcttcttt

SEQ ID NO: 638033 - DNA, 458 bp, Homo sapiens
tgtccagagttgatggccaccctctggaatataaatgcctacaatcttgaagttgattgcaattagctgagaacattgatacttgtgctcggttgacaagtaaaataactgaattgaaggaagggaaaaatgtacccatgcgcagcttcgatacctgagttacccctgtgataggataagccttacgcacaatgattgataaatcatactttatataaaaggactgtgcacactgagcctagactacaaagacacacagcagatgactaaaaatgattgcagaaacaggactaaaggtatagcactatggaaatcctaaccgatgtagccgataaaccttcaagaggtactaagatcaaggtggcatagagctacgttcacttgcatgaaccactcctaaagtctttagcctggacccaaagacagtaatggactttttctatgacaacctgcattct

SEQ ID NO: 638034 - DNA, 132 bp, Homo sapiens
gtttgggcaggcgaatctcctgccacaaggtgactattatcaacatcttttcgacacttgtttgacgtgtggttctcctggtccttgatgaacagatccacatttatttattaaagttcccttccttaatga

SEQ ID NO: 638035 - DNA, 715 bp, Homo sapiens
taaaggtcagggcccagccattacgtctccccaacgtgcagccaggtgcacgcttgggctccagtatgccatggctcatagatgaaatcctttatagcaggatgtgaagaccatgtgaactgcccgggcctttttggatttttgtgcatcaaattcgaccgtcttgttccagacctctttaagtcacactgcactaacttagctttctctgatggtctggtttgccgccattagtttcttgttactagtagcccactactgggcccactatagctccatcccatacgggtagcttggctccagtctgcgcctaaggtgcagacccgccctgggcatgctggcctgtagacggagcctgaggtcacagcctcctgactagcctgagaccttcctaggggactgtggctgtttccggggaggccgggaggggcagactgtgagccctagtggaggacgttgggagtaacgctgctttcgctttggcaggttgaacggggcccggccaggactcggggaacggatggcttgagagtcagcgatgacctctggggtcactgtcccaggagggacttcacctggtacaagagctggaggcagccgcttgcccatggaggcttgtcccctgaggcgcttcgccagtgagcgtgcgggcataagggcatcgagtctctcctggagcacggctgcggtgcgccggcagctacgggagtacccg

SEQ ID NO: 638036 - DNA, 657 bp, Homo sapiens
  misc_feature (1)..(1): n is a, c, g, or t
nagaaaaatggtttccagtccaggacgttgaccagctcttagtgtcagcactcatggcggcatataataagtaataaacagtgcacacttgaggccgttccgcatattgagctatgttagagcgccttgtgattatgatgagatcagccctcatagcagaacatagtcaagttctggctgaatcctgtcatgagcactcacgatgctataacattaagaaagcgcgggagcttattcctacccagcgagatcagttatgtgaaaagagtgtgtctttgtgtgtttgaactctcaccacgttagggccaactcgatatgcatgctaatgacctcctcttatgcaatatcaaagacaggtctaaagcatgctagagtgatcatcagtcagaggctcatacacgcactctctttcatctgtttccatatgacctcagtctatagattagtgacaccaacgatcatgagtagctataacattcgaaaaatttcttgagcagctctttgatgatggtggtgtttatctccttcttctcgccaggcaagcccagcgtaagcatggcattcagcagttgctgccctagcctgggtctgctggtggtcctgcatctcaccaaggatctgcaggtctggctgtgcagtagggttgtcctcggaata

SEQ ID NO: 638037 - DNA, 201 bp, Homo sapiens
aaggatcgaaaaggggatgcatacgatacaaaaatcaaaagcttatctggtatttcactgattctttctctagcttgtacaatgagagttagattttattctttacatttgctaagctgtcctgcatctgctcattgaaatctttctatggcgggaagctgtgtgggcagattccttaagccgacccatttgggtaccaac

SEQ ID NO: 638038 - DNA, 917 bp, Homo sapiens
  misc_feature (23)..(23): n is a, c, g, or t
  misc_feature (98)..(98): n is a, c, g, or t
  misc_feature (106)..(106): n is a, c, g, or t
  misc_feature (115)..(115): n is a, c, g, or t
  misc_feature (135)..(135): n is a, c, g, or t
  misc_feature (148)..(148): n is a, c, g, or t
  misc_feature (151)..(151): n is a, c, g, or t
  misc_feature (181)..(181): n is a, c, g, or t
  misc_feature (191)..(191): n is a, c, g, or t
  misc_feature (244)..(244): n is a, c, g, or t
  misc_feature (280)..(280): n is a, c, g, or t
  misc_feature (291)..(291): n is a, c, g, or t
  misc_feature (299)..(299): n is a, c, g, or t
  misc_feature (324)..(325): n is a, c, g, or t
  misc_feature (349)..(351): n is a, c, g, or t
  misc_feature (364)..(364): n is a, c, g, or t
  misc_feature (386)..(386): n is a, c, g, or t
  misc_feature (404)..(406): n is a, c, g, or t
  misc_feature (459)..(459): n is a, c, g, or t
  misc_feature (479)..(479): n is a, c, g, or t
  misc_feature (490)..(490): n is a, c, g, or t
  misc_feature (528)..(528): n is a, c, g, or t
  misc_feature (606)..(606): n is a, c, g, or t
  misc_feature (782)..(782): n is a, c, g, or t
  misc_feature (818)..(818): n is a, c, g, or t
  misc_feature (871)..(871): n is a, c, g, or t
gggatatttatttatattataanattttaattttttgagggagtaaatgtaaaagaaagggataatttttgaaattatatagaatttgaagagattgntgaagaangagagaatnggtttttaataattatttanttgttaagaaggntanaaagaaaaatgtattgaatgttagttgtanaaaaatattnagtattttataaaattaatttttaagaaaggaagaaaaagatagatgttgatntttaaaatgggtgtatgggctaaagatttaaagaanagaataaattnatttgcanttaataatgaatttataaaatgtannaaggagggggcataattgtgtatnnngtgaatgatatgnagaattgaagtatggtgtgttnaagtagttatagaagtannnagatgagtgagtggagagagtaaatgtgtgtttagtaaaggaatatgataaanttgatagatgtttggatatnttttggtgtgnatgtgtgtgtgtgtgtgtaaaataaatgtgtatattanttttaaagaagatttatagaaagtggtatgatttatgaggtttagaaatagctagctatatatggtaggtgccgctanagtttttatttagcatggggattgcagagtgaccagcacactggactccgaggtggttcagacaagacagaggggagcagtggccatcatcctcccgccaggagcttcttcgttcctgcgcatatagactgtacgttatgaagaatacccaggaagactttgtgactgtcacttgntgctttttctgcgcttcagtaacaagtgttggcaangagactttctcctggccctgcctgctggagatagcatgcctgtcctttcagtntgatcatccatctctctcttgcctgaggggaagagagatgggcagg

SEQ ID NO: 638039 - DNA, 425 bp, Homo sapiens
  misc_feature (23)..(23): n is a, c, g, or t
  misc_feature (286)..(286): n is a, c, g, or t
  misc_feature (416)..(416): n is a, c, g, or t
  misc_feature (418)..(418): n is a, c, g, or t
aactgatatttcctggctgggancccagatgcctgaaaatggatgaagagaagtccatgaaaactgaaagagccactgaatcactctgccttaagtgtggagcagaggatccacatggaagcagtgaaaaagctcccagaatgtagcccaggcatggtggctactgccctgtaatccccagcactttgggaggccgaggcgggcagatcacgaggtcaggagatcgagaccatccctggctaacacggtgaaaccccgtctctactaaaaatataaaaaattagcngggcgtgtgcgggcgcctgtagtcctagctacttgggaggctgaggcaggagaatggcgtgaacccaggaggtggaacttgcagtgagctgagatcacgccactgcactccagcctgggcgacagagcgngnctctgtc

SEQ ID NO: 638040 - DNA, 83 bp, Homo sapiens
cgtgagttcagtcctgctctttatctcaaaagatgcgggatattcggaccggcgactgagagagatcatggtgcaccgtggtt

SEQ ID NO: 638041 - DNA, 270 bp, Homo sapiens
ctctcttacaaggtcgccatcatggctctggtagggggaacatgtgtcatttccattacatctttcacattggctatatcacgacccaagacacaattctgtttcttgagacagtcgcatattagctttactagttagttatggcttaatgacactcgctaatcatcaatagaagcatgtacatttccaaattcacaagttgtgtttaatactcatagctgaatacatactgctttcatcttggttccaagtatccaggtaccgaggctc

SEQ ID NO: 638042 - DNA, 175 bp, Homo sapiens
caaaacccacagttacatcttgcaccaacctattaaaataaatagtacataagggtaaagaagtaatgtaacctaatgtattccagaagaaagaaaaattattttccctccggagtctccttctgtcacccaggctggagtgcagtggcccactcttgcctcggggggatacccc

SEQ ID NO: 638043 - DNA, 292 bp, Homo sapiens
tcactcaaaaactttagaaacatggattactctgaagtattgccagcagattagaaaaactggtatcttataatcctgcaacaatacctaactttgaagatccatataaagccgctatatgctatgggcgtctcgaatacacaagcgaaacgtgattgcacaacgaacaattatgccatatgcagcgcacaaaagcctgaagcgtaaagatttgactagcagaacttgtagaacattactctaaggcattacgttaaattctagctaagggtcctaaaagattaaattcaaa

SEQ ID NO: 638044 - DNA, 629 bp, Homo sapiens
ggagagaactagtctcgattttccgaggtcaggatgtcgtcgaaactgggtctatccggcagggaattctatggaatccaaagggtagtatccctatttgaaaaatgaaaacctaaaatcaagtttaaaaagcaagcaatcaggacgataaagcacggtgaaaacgccctttgtacaaattcagccccgagagtcaagagacaccgaggctgtttcataaccccccaagggccaacatgtggacagcagtgctttgtagatatcccaagttaacaaaaaccgagctaaaccagaagcgcacaccccagaggtgggctcaatagaaagtgtaggaccacaatataaagggtgccactttgtagaaacatgtttacctccgtggaagtgttcccggtggggcattatttgagggggcccctccgtggaaaatataaaggccccattaatttcagaaatcctcactagtactctgcgttaatcaaccccgaggcggtgtgtaacaccgaagaaaaagatctcccaactctggtgcgctataaaatgtgtcccccagaaaacacacttttttaaaaaagaggccctctctaaaaagaatctcccagggcgttgggaaaaaaacccacacctat

SEQ ID NO: 638045 - DNA, 659 bp, Homo sapiens
ggtggtgggtgcctataatcccagctgcttgggaggctgaggcggagaattgcttgaacctgggaggcggaggttgcagtgagccgaaattgtgccactgcactccagcctgggcaacagagcgagactccgtctcaaaaaaaaaaaaaaaaaaaggaaaaggttaaaggaaaaacccgggaaaatttcaaattccattagcgggggggaagggggaaatttggccttgtttgagaattccatttggccccttgtgggagtgactcatttattttccttctttaaagctgtaaattttattggcgatcatcccggacttcaaagacaatcagcttggtggggatcccaaccagggcaggagagtatatcttccgagagaggatcaagacttggcaagagggttcaggccattttggggaggccaagaaaccatggggtagtcatgccagatgccaataaggaaattaccctgaaccagttggttgggggcagcatatggagctgctgggtcagcgctgcagtggctctttcaacagaagcccttgtggggagaagccaagaagtggttgccaaagctggtgggagccatgccaaaaagctgagagtcaatgccaggagatcacgctggagctgattctgggccctctgatcatccccag

SEQ ID NO: 638046 - DNA, 264 bp, Homo sapiens
cccccccccgcagctctcattctcgtcaccaatactcattcggccgcatcgttgttgtttttattggaaaataaaggccagcaaaagttctcatttggcaaatatcaggtcaaataacttaaaaatataatattcctgcctagactttctttttctcaattgtgaggcgttctctgcctttctttaggttgattgctttctctctaggtgacttctggggtttccttttttgtgtgctacctcttcttctgggaccagtgactt

SEQ ID NO: 638047 - DNA, 192 bp, Homo sapiens
aggcatagccatgtagataacactatccactcacataacgctcctacatactaggactactaaccaagacactaaccatctaccaatgatggcgcgatgtaacacgagaaagcacatcccaaggccaccacacacacacacacacacacacacacagagaaatacacgaagcgaagaaaaaaaaaagaatct

SEQ ID NO: 638048 - DNA, 867 bp, Homo sapiens
tattggcttcagctgttgttaatggacatacaggtaggcccaataccaacaggccgggaggtgctgcatagtggggaaaaatggaaggtggagggtgaagtgttggctgcagaacagctgacttgagagggtgggtgacagggttgcaagactgggacgaggccatagagacgttaaagaacgcgaatgttaatgggccagggccaaagctcagggtattcaatgggaacaacagcccagtgtgcccttaaggcccctaacatcttgagcgtgggtgtattcttgtgaccccaacgccagggtgtggagagttcctcgtggagcactcccattattcttcgccataagagtggacaccttggcgacaatagatggtaccacccacgtaggagaaacagggagaactgcttgtccacccctccttttgccgactcttggcgctctccagcgggtgcctctcccaagctccagcgaatttcctctctctttcgtctccccttatgaattcgtgggggtgggtgcccacatttagattgtgtgcccaaacccaatgtgctctcttcggggctgttccccccattagaaggcaggcctgtgctaataaccaacgacgcccacgtgtcttcccagagagtggagcgcgagtgaggactcttttcttctcccctgggggtgtgtccccagaccataacccagtgtggcccagtgttaaaaccaggccccagaagtgtgatggtctcctacacaagcggttgtggctttggcccataagagtgggatgggcgccttggtcggaaaaacgggggcgtgtttggggcaaccatggggccctttgtatgaacaggggttccctcctgggtttctcat

SEQ ID NO: 638049 - DNA, 361 bp, Homo sapiens
  misc_feature (76)..(76): n is a, c, g, or t
  misc_feature (132)..(132): n is a, c, g, or t
  misc_feature (140)..(140): n is a, c, g, or t
  misc_feature (147)..(147): n is a, c, g, or t
  misc_feature (162)..(162): n is a, c, g, or t
  misc_feature (165)..(165): n is a, c, g, or t
  misc_feature (167)..(167): n is a, c, g, or t
  misc_feature (170)..(170): n is a, c, g, or t
  misc_feature (175)..(176): n is a, c, g, or t
  misc_feature (179)..(179): n is a, c, g, or t
  misc_feature (190)..(190): n is a, c, g, or t
  misc_feature (192)..(192): n is a, c, g, or t
  misc_feature (199)..(199): n is a, c, g, or t
  misc_feature (201)..(201): n is a, c, g, or t
  misc_feature (205)..(205): n is a, c, g, or t
  misc_feature (209)..(209): n is a, c, g, or t
  misc_feature (211)..(211): n is a, c, g, or t
  misc_feature (227)..(228): n is a, c, g, or t
  misc_feature (236)..(237): n is a, c, g, or t
acgagcccggccgagaagccctgaggggggaggggaggccattttgtcccgaccgactccccggaaccgggcggancggctgggagaggctgcagagccgcggtcgccgccctcggaggcactggacgccgncactgtcngggcttnctcagctgttcgtangtngnccncgccnnctngagcctttttncnacgcttncncggncctncngcctgagaacgccctnntgaggagnnggccgtattgaatggcgaagaagacgtactacctgcttttgctgctactgatcggagattccggagtggggaagacctgcgacctttgtggctgttcggatgatgccttctactacgttttttc

SEQ ID NO: 638050 - DNA, 94 bp, Homo sapiens
tggataaccccctccccgctaaaatgccttggaacacatggcttaacagtggtctgcacagaaaatatacacccctccctgtgtagaatttgaa

SEQ ID NO: 638051 - DNA, 365 bp, Homo sapiens
  misc_feature (76)..(76): n is a, c, g, or t
  misc_feature (132)..(132): n is a, c, g, or t
  misc_feature (140)..(140): n is a, c, g, or t
  misc_feature (147)..(147): n is a, c, g, or t
  misc_feature (247)..(247): n is a, c, g, or t
  misc_feature (270)..(271): n is a, c, g, or t
  misc_feature (273)..(273): n is a, c, g, or t
  misc_feature (289)..(289): n is a, c, g, or t
  misc_feature (298)..(298): n is a, c, g, or t
acgagcccggccgagaagccctgaggggggaggggaggccattttgtcccgaccgactccccggaaccgggcggancggctgggagaggctgcagagccgcggtcgccgccctcggaggcactggacgccgncactgtcngggcttnctcaaagctgttcgtatgtcgcccgcgccgtctcgagccttttttccacgctatcacggtcctccggcctgaaaacgcccgaatgaagagttggccgcantggggaccgatcccttggggccnncngcggcgagagcccganccgctcctnccaatggtgaagcgtccgacctgcttttcgctgctcctgatcggggatcccggagtggggttcaccc

SEQ ID NO: 638052 - DNA, 360 bp, Homo sapiens
  misc_feature (76)..(76): n is a, c, g, or t
  misc_feature (132)..(132): n is a, c, g, or t
  misc_feature (140)..(140): n is a, c, g, or t
  misc_feature (147)..(147): n is a, c, g, or t
  misc_feature (162)..(162): n is a, c, g, or t
  misc_feature (165)..(165): n is a, c, g, or t
  misc_feature (167)..(167): n is a, c, g, or t
  misc_feature (170)..(170): n is a, c, g, or t
  misc_feature (175)..(176): n is a, c, g, or t
  misc_feature (179)..(179): n is a, c, g, or t
  misc_feature (190)..(190): n is a, c, g, or t
  misc_feature (192)..(192): n is a, c, g, or t
  misc_feature (199)..(199): n is a, c, g, or t
  misc_feature (201)..(201): n is a, c, g, or t
  misc_feature (205)..(205): n is a, c, g, or t
  misc_feature (209)..(209): n is a, c, g, or t
  misc_feature (211)..(211): n is a, c, g, or t
  misc_feature (227)..(228): n is a, c, g, or t
  misc_feature (236)..(237): n is a, c, g, or t
  misc_feature (245)..(245): n is a, c, g, or t
  misc_feature (268)..(269): n is a, c, g, or t
  misc_feature (271)..(271): n is a, c, g, or t
  misc_feature (287)..(287): n is a, c, g, or t
  misc_feature (296)..(296): n is a, c, g, or t
acgagcccggccgagaagccctgaggggggaggggaggccattttgtcccgaccgactccccggaaccgggcggancggctgggagaggctgcagagccgcggtcgccgccctcggaggcactggacgccgncactgtcngggcttnctcagctgttcgtangtngnccncgccnnctngagcctttttncnacgcttncncggncctncngcctgagaacgccctnntgaggagnnggccgcantggggaccgatcccttggggccnncngcggcgagagcccganccgctcctnccaatggctgcgaagacctgcgttcttattcgtttttctgatggccttccatactacctttttc

SEQ ID NO: 638053 - DNA, 273 bp, Homo sapiens
gactggagcagcaaaggtgatttgctacttagcaaagagactgggagcattctgcccctgtctagagatctgtggaacttcgaacttgagagagatgatttagggtatctggtggaataaatttctaagcagcaaagcactcaagagttgacttgggtgctcttaaaagcattcagttttggctgggtgcggtggctcacgcctgtaatcccagtactttgggaggccaaaggtgggcggatctgaggcaggagaattggatcaacccgggag

SEQ ID NO: 638054 - DNA, 660 bp, Homo sapiens
tagaggggtgtaattggtattcattaaaatggcctgggcctttaaagtcctttcattgtaagttaataagaccgcttgccagttggttctaagattcctttttcggagtaaaacaagcgacatacaggtatgctttgttctcaaaaaaatatatcccatgtttcttggcccttgatttagaagatataaaccaataaacttcttttttgtcggggcagaatatttgctacccaaagtggggtttttcctgtttgagcataatatccagagggtagtgggagttccagcatgcaacaaggttagaatttgcagggaaggcttaactttgcttcccagggcctgttttcaacaacccaaggggaccctgtgcaaccttttgttcaaaaagagtgcagaggaaaaccaaaattgcaagggctccttgggaccctttgtttaaaaaaccttggacgcccttttcaccatttttggttttacccttttaaaaacaaaaggggtcaattttgccccccaaaaaaatgtcccagggtggagaggggcaaattctgcccaaggatttaaatgggtagaaaaaaaagacgtttccccctgggatgaacataacaagtcttctgaaagaaagtagacagtattacaccctgaataaataaggtgttgttt

SEQ ID NO: 638055 - DNA, 252 bp, Homo sapiens
ttttcgttctggccgcgcaaggtggcccagggcgagccctactaccacctctggtatctgtacatgatcgtggggctgtacatgttcgcgccgctggtgcgcctgctgtacgtgcgcagcacgccgcgctcgcgttcgctgtgggtggtgggcatcctgggcctggcgatcctggatgcgctgtaccgccgcgcgctcggcgcccagcccggctttttcctgacctggttcctgccctacctgggctgtttc

SEQ ID NO: 638056 - DNA, 143 bp, Homo sapiens
ttatgggacatatctcatatgacacaactggaaaggctcaaaatagtaaaatgcttcaagacaggcataaagacggaactccgccataaaattgaagctcttccatcatgatcatcagcatagatgcaaggcaaagttctaac

SEQ ID NO: 638057 - DNA, 246 bp, Homo sapiens
  misc_feature (39)..(39): n is a, c, g, or t
tgatagtcaccgaactcaaatggtaatctggaagggatngccgaaacgtcgagtcaaacgcagcaataaagccagcaggaagaggcagcatgaggaaccagagagcttctttacctagtttactagaccattctgatgcaggtcgctgatacagttagagagaggtcatacaaagataatatttgggccaaacctcattacagtactactttgtttcccgagtctgcactgattgaagaatggaga

SEQ ID NO: 638058 - DNA, 1387 bp, Homo sapiens
ggacacaggtgacgaacagtatggggacggaagtcgtacttggatctacagtatagccatggagaccgaatgaggctcgtcctatccggtgctgcaaatacacagacgaatgatctatggactaccaagggcacatctgacattgccaggatagtaacgcgtctagaagcagtgaaagaggccattatggatagttgcttgttgtccgcaaggtacaagaaagcaataagcgagttccgtctccgccactctggggtgtccgatgaccacgggtgcgtcgcatcatcggcgttcccaatcgcgggaggggatataacatactatcgtcaccagcgccctccagaagccgcgaggaaagctatggctagctctcctctggtcagaatccgcagaagcctcataggacctgagaggacatctagctcgtctcccctgtggcgtactgctatccgtcgatgacggggatggcaaggtacgatttttggccctccgggctagagggggtccaataacacctcggacgaatcaacgaggtagagcgtggggaacgttgcgactactccaagggaggaaaccctagtcggacggacacgggttgtcaatcgtctcgcgagattcaccccctgaaaggcaacgctgacaagaagaaacaactctgccgtttggattcgtcgtgggaaacggctttgcgcgaaattcccctatgagaagcgatgtaacttctatttcgctttctacgcgcgaaaacaatcaagccggtagattgtgttcccgccgatgtccgcgccaagggaagtcgtatacccgctggtaacagaacattgtaccaggggaacttaccttcaagattacgggggatagacctccgaggctttttaattggacccaacaatgtgtgggtccaacaacggttgggaaaacctgatcacgccccgggagtcgggcttaaccaagcggataggttctggtcgcaacccaaccacagggacctaccacggtcgatttggccaacgaaaggaaaagcattttttccccccggaaaataaccgatgcgttcaaatctacagggcgcaaacttttgttgcaacccgtgggttgcccctaccaaggcgccggattcccccttggaagtcaccaaacattgggcggacggaacccaatggggttcctagggccttgttggcaaaattaaccctatggaacccccccggttgtggggccggcccttggcagagaaagcttggcggaacactgcgaggaattgccccttcttcttgttgccagggacgaaggaacattgtggcccaaccccaaagtcttccccaagttggaccccccaattaaaatttgggcggccggggcgaaacagctccctgggggcccacgg

SEQ ID NO: 638059 - DNA, 788 bp, Homo sapiens
  misc_feature (3)..(3): n is a, c, g, or t
  misc_feature (209)..(209): n is a, c, g, or t
  misc_feature (215)..(215): n is a, c, g, or t
  misc_feature (277)..(277): n is a, c, g, or t
  misc_feature (427)..(427): n is a, c, g, or t
  misc_feature (480)..(480): n is a, c, g, or t
  misc_feature (484)..(484): n is a, c, g, or t
  misc_feature (487)..(487): n is a, c, g, or t
  misc_feature (511)..(511): n is a, c, g, or t
  misc_feature (524)..(524): n is a, c, g, or t
  misc_feature (748)..(748): n is a, c, g, or t
agnaaaaggaagaaatgagatgttgaaaaaaagatggaggagggttcactctcttttggggactgattcaaaaaatgatgtggcagtataaaccatttcagagtcaggggtgttcattcttttttgggagtaagaaaaggtggggattaagaagaagtttttggaggtttagggaccaaggttggtttctttcccccctcccaaccccnttgatncctttttttgattaggggaaaggagctgagtgagggaggtagagttggaaagggaaggattntatttgatagagtgggatagaattttccagagtagagcttggagggagattgaaagtggagataatactgctgaaacctcacttgaagctgagatgggaaatggacatacttagaaatttagtgactttaatagcttggatttccctctncaaaacttttagaatggaaaatcccatttccttctttatatagtgacttctantcantancttttaatattttctaatttgggnttaggatgatggncattatctacatgtgttttcagcacctggttggttctaaatgggatctggagacccagcttcttggagatttttaagaggaagtattaactggacaaatggaatgggcacagaaagaaatacagggtcacccagaatggcagaaacctaggtttcccagagtggaaagagagaggagacattcaacaaacaagtatttattgagcgcctactatgtgccaggcntgttctagacccccccagaagaaaaacaaaaacaagatag

SEQ ID NO: 638060 - DNA, 708 bp, Homo sapiens
gccagccggctgtgtatgccatccaccaccagcagctgccccacggcttcaccaacatggcccagtgttacccagtgcccatgtccaaactggaatcacagcagccccgccccctcacgcctgggggtgcccaccctgcccaggtgatgctgcgtgcacccaccccagagtcatggggggcccccctcaaggcgcggtgccccagagtggggtgccgtgcactctcagcttccacaccctcaccctacccctacatctggactacccctcaaggtgagcagcctggccaggcgcctggcatttccaggaggagccgatgacaggattcgtgagttctcattagctgggggaatttggcatggaagagctgatgggctgcaggtggggcaggatgcacggcgttctgggtggggagtgaggggtcttggaggcagggctgtcccacagtggcgcccgccgtacctgcacctgtctgtgaaggtatgtagggtgggcagaagccacgagtcgccgccgccaggggctttgctccttggctctgtcctttgctttcccgtccgtccgtcgctcagtatgtgatccagcagcccccttcccattgctccccagctctcagtgaccccgagtgtctctgacttagccgaggtaaggtcagtgcgctgacagggccgactgcggttgggggttggctgggccatagtgaggccg

SEQ ID NO: 638061 - DNA, 345 bp, Homo sapiens
  misc_feature (1)..(1): n is a, c, g, or t
  misc_feature (14)..(14): n is a, c, g, or t
nccctatatggtantaaggggtcaaagccaaagatataacactgtaatatagcacccaactctagagcacccagaaatatcaagcaatattgttagagctaaagagagagatagatcccaatacataatagctggagacttcagcatcccatttcagcattgtacagatcttccagacagaaaatcaacataggacctaatctgcactatagactaaatagacctaataaatatttacaggacacttcatccaacagctgtcagaatacatattcttctcctcagcatgtggattattctcaaggatagaccacatgttaggtcacacaaatctgaaagtattcg

SEQ ID NO: 638062 - DNA, 488 bp, Homo sapiens
  misc_feature (66)..(66): n is a, c, g, or t
  misc_feature (131)..(131): n is a, c, g, or t
  misc_feature (307)..(307): n is a, c, g, or t
  misc_feature (375)..(375): n is a, c, g, or t
tcgagctcggtggaccccacttatgccgtgtgtatacagtagtccccccttatcctcatccggtgngtatacagtagtccccccttatcctcatccggtgtgtatacagtagtccccccttatcctcatcnggtgtgtatacagtagtccccccttatcctcatctggtgtgtatacaatagtccccccttatcctcatccaatgtgtatacagtagtccccccttatcctcatcccgtgtgtgtatacagtagtccccccttatcctcatctggtgtgtatacagtagtccccccttatcctcatntggtgtgtatacaatagtccctcatcctcatcccgtgtgtatacagtagtctccccttatcctcatcnggtgtgtatacagtagtccccccttatctggtgtgtatacagtagtccccccttatccggtgagtctacagtagtccccccttatcctcatccggggtgtatacagtagtccc

SEQ ID NO: 638063 - DNA, 1358 bp, Homo sapiens
  misc_feature (650)..(650): n is a, c, g, or t
gctcagagtgcactgatatcccaggagtgcctgtggtcacattgccccggtgtatatctcacaggatgcttgtgagcgcagactggtggaagatggactcctcggaccaggtatggtgattggaggagctgtcgagtgagcagccatgaaggcggcgagcttgcgagccgcctggggaacggcatcaacgggagtggcttccgtgtgctgaggaaatcggaagacacaggccgtctcgacggtgtgtaggcagtgagtaaggtcatagccaggtagtgagcgtgaggccggaatagctgatgactgagatccagcgagagtctccaagacagtggcctcggactggagtctccggaagccaaggcaaccaagttcggattgtgggagagcaacttgctagacgagaagcatggaaggtcgcctttattcaggtagtcaggtaaactcagtcataaagtttgggcttgggacagtatatggggagacaactccattgccgggacacgaggtctggacgtgaaggcaggcagatgactactctgacttggacggcacctgggtagaaacaaaagtcagagaaggtgggacccaggagaagtctttagtgtaggctggcacacccaaagccaaaggggaagcgcatagccagntagaggaccggagctttgttcagacacagcgggaagaagtaagacaccatggacttgaacgcgagtgatttcaaacttgtgggcgccattctgccacaagaggtgttcggactttggttggccaaacaataggaacttatggccagagtatacccgtcgcatggcacaaaactgcgcaagcgcggacgaagcgtttgccacattggacaagaaaagcgattaaagaaaagggcttggctgttggccatattatcgggcgggttacaacgatatgtcacacacaatccgggaagtgactttccccaaggtttacaccccatacaacactggaccacggggatccggtgtgccgatgctgggctaccttccccgatgaggacactggtaagggaccttccccaatggatgttgcaagtttgccacagccacatgtgggcaccaaacgtggcccggcacgttgtacaacccctgtatcgagaggcaaaaaagggtagtcccaggggaagcaggttccataagtgtgttggcggaagccgttggaaaggccgcgagctgtgttccaaaagggaacaccacgagggtcccttgtgacgggccgtgagggaaggacatcctggaggggaccaatgcagttggatgcaggctgaacggaccaaacccagtgtgaggatccttttggcaccaagtgtgggcgcctggccccactcc

SEQ ID NO: 638064 - DNA, 285 bp, Homo sapiens
gaggatccccgtccagtagggtgtgcccagtcatttagaagtttaggccgggtgagtggctcagtgcctgtaatcccagcacttgggaggccaaggtgggcggatcacaaggtcaggagatcgagaccatccgggccaaaatggtgaaaccccgtctctactaaaatacaaaaaattagccaggcgttgtggcgcgcacatgtagtcccagctactcaggaggctgagtagcaggagaaccacttgaacctgggaggtggaggttgcagtgagccgagatggtgt

SEQ ID NO: 638065 - DNA, 367 bp, Homo sapiens
taaaagcaaaatcaaaaatacaaggccgggcacagtggctctgtcatcccagcactttgggaggccgaggtgggcgtatcacctgaggttgggagttcaagaccagcctgatcaacatggagaaaccccatctccactaaaaatacaaaaaaaattagctgggcgtggtggcgcatccctgtaatcccagctactcaggaggctgaggcagaagaattgcttgaaatcaggaggtggaggctgcagtgaaccgagatcatgccattgcactccagcctgggcaacaagagggaaactctgtctccacaaatatatatatataacactaataaacagagatccagaatgtaagactgggactgacatg

SEQ ID NO: 638066 - DNA, 742 bp, Homo sapiens
ttaaagtagcaatgttcatttcagcgtggtaactctctccccctttaaaatctttttagttttatttgagaaacatactacatttttttctcttttcttccctttaaaggtggatgctcaagtttgaggactgtcatggggactatcaggttttttaggcatgtgctttctttttcttcaaattaaaacctgttgtctgtctcttgtcacttttcaggacagccacactcggggctcttacaatcaggggtcataagctgctatgtcacctacctcaccttctcagctctgtccagcaaacctgcagaagtaggtaagccagcctgttagtgggcttgtgtttgcggtgtgaatattttcattcatggaggaatgagctattgtttaaatattggagaggccttggagatagagagcagaaagatggttaccagaggctgggaagggtttgggaggaggttaggatgattaatgggtacaaaataaataggaagaatgaataagacctagtatttgatagcacaacagggtgactatagtcaaatttaattgtacatttaaaaataactaaaagagtataattggattgcttgtataacacaaaagatcagtgcatgaggggatgggtaccccattttagatgacgtgattgttacatgtttcacacctgtattaaaacatctcatgtaccacagaaatatgtacgcctactatgtatccacaaaaattaagttaaaaaaaa

SEQ ID NO: 638067 - DNA, 172 bp, Homo sapiens
tcgcgtcccccttccccatttccgccggcctctccggctcgccgttccccccccccccaggcttccccggccttcacgtcattcttggcccccctttcctccccctctgcttccccccccccctcgttttccctttccctcccccccccccctcggcttcgccgccgccgcc

SEQ ID NO: 638068 - DNA, 195 bp, Homo sapiens
tgtgactgagcgtcattctcaagacgctgaagggtgcgctgaggtcatgtaaccgcgagactctgctcatttgcaggtgttccttgatgctcagtggccggacggatccggctcctccagtttcttgatgtgcaccgttagcccgtttcaggaggctcagcgtggtgtggtgggtgctgtcggggcccaggggca

SEQ ID NO: 638069 - DNA, 1544 bp, Homo sapiens
  misc_feature (40)..(40): n is a, c, g, or t
  misc_feature (45)..(45): n is a, c, g, or t
  misc_feature (622)..(622): n is a, c, g, or t
  misc_feature (1012)..(1012): n is a, c, g, or t
  misc_feature (1382)..(1382): n is a, c, g, or t
  misc_feature (1494)..(1494): n is a, c, g, or t
tacagatccttaccactgttcgtggagtttgacataagtngaacnagaactggacagcaggcacagccagtaacaagctgtggtacgcctccctggccctggtgacgctcatcatgtattccattgccactggaggcttggttttgatggcagtgttttatacacagaaagacagctgcatggaaaacaaaattctgctgggagtaaatggaggcctgtgcctgcttatatcattggtagccatctcaccctgggtccaaaaatcgacagccacactcggggctcttacaatcaggggtcataagctgctatgtcacctacctcaccttctcagctctgtccagcaaacctgcagaagtagttctagatgaacatgggaaaaatgttacatctgtgtgcctgactttggtcaagacctgtacagagatgaaactggtgactatactggggacagcctcttaatcttatgtatcttgtattcatgtttgacatcaacaacaagatcgagttctgacgctctgcaggggcgatacgcagctcctgaattggagatagctcgctgttgtttttgcttcagtcctggtggagaggacactgaagagcagcagccggggaaggaggnaccacgggtcatttatgacgagaagaaaggcaccgtctacatctactcctacttccacttcgtgttcttcctagcttccctgtatgtgatgatgaccgtcaccaactggttcaactacgaaagtgccaacatcgagagcttcttcagcgggagctggtccatcttctgggtcaagatggcctcctgctggatatgcgtgctgttgtacctgtgtacgctggtcgctcccctctgctgccccacccgggagttctctgtgtgatgatatcggcggtcccctgggctttgtgggcctacagcctggaaagtgccatcttttgaacagtgtccccggggcagggactggcgccctgtgcctgagtgggtctgaaaaagctttgagagagaaanaaaaatctcctgattagctttttattttgaaattcaaaaagaaactaccagtttgtcccaaaggaattgaaattttcaaccaaactgatcatggttgaaatatcttacccctaggaactggataccagttatgttgacttccttctgcatgtttttgccaaacagaatttggggcacagcatcttttcacagggataaaaatatcttgtggggccagtcattctcatcctcggaatagaaaaacatgccaaatcttgagtccccagcgcctaacagaatccagacccctctcactcacttccgcctcttagagccttgtccccagggggctttgaggacaggactcagcctgcagggcccctggtatttntagggtccaagaggaggcacctgcttttcaactgcaccctcagtgctgcctcttcacggcccctaaacgtttccctttgaggttgtgatgctgggaatcacagacttcactntctgcctgcactcaataaaccctcaataaatattttcattgtcaatcaga

SEQ ID NO: 638070 - DNA, 112 bp, Homo sapiens
cgagtggcagagagaacggataagcacaggagtcaataaattcgatgcaacaggagaaggaaccttgtgacttaacggaacgcatgtgaactagcgggtgtaatttatccac

SEQ ID NO: 638071 - DNA, 111 bp, Homo sapiens
aactacagaaatgcttattccaggaaacagaattcttttatttttgtcattaatattattataattttatcctatatatatatggcagaaggaaggacagttttactatcc

SEQ ID NO: 638072 - DNA, 790 bp, Homo sapiens
  misc_feature (40)..(40): n is a, c, g, or t
  misc_feature (45)..(45): n is a, c, g, or t
tacagatccttaccactgttcgtggagtttgacataagtngaacnagaactggacagcaggcacagccagtaacaagctgtggtacgcctccctggccctggtgacgctcatcatgtattccattgccactggaggcttggttttgatggcagtgttttatacacagaaagacagctgcatggaaaacaaaattctgctgggagtaaatggaggcctgtgcctgcttatatcattggtagccatctcaccctgggtccaaaaatcgacagccacactcggggctcttacaatcaggggtcataagctgctatgtcacctacctcaccttctcagctctgtccagcaaacctgcagaagtaggtaagccagcctgttagtgggcttgtgtttgcggtgtgaatattttcattcatggaggaatgagctattgtttaaatattggagaggccttggagatagagagcagaaagatggttaccagaggctgggaagggtttgggaggaggttaggatgattaatgggtacaaaataaataggaagaatgaataagacctagtatttgatagcacaacagggtgactatagtcaaatttaattgtacatttaaaaataactaaaagagtataattggattgcttgtataacacaaaagatcagtgcatgaggggatgggtaccccattttagatgacgtgattgttacatgtttcacacctgtattaaaacatctcatgtaccacagaaatatgtacgcctactatgtatccacaaaaattaagttaaaaaaaa

SEQ ID NO: 638073 - DNA, 319 bp, Homo sapiens
tgaggaccccgaggctgttcctcaacgggcagttgcgcgatattcaccacgagaaggatccccatcctggatcgcggctcactgcggagtaccagaggattattcctacggtattcggaaacgaaaaaatatagacaagaatgaccgctgtcaaaggtcgaaagtgaaccattggtcatttccgaactattggtgtggtgaatgatcatggccaaggcacgttgcttttgcggtgataggtctgtgctagagcgttttaggtaggcttggcctaggaattggccatacagtttgccctggcccggaggccgttatgacc

SEQ ID NO: 638074 - DNA, 901 bp, Homo sapiens
gagcgtagtgaccgacccggcctcgttctggctggcgacgtatcgctaaggcggaaataagatgattgcccgcagggcgctggctccagacagctctggacagagcgagagtcaagtgaggccatgacatgcataggcagctagtcgtgatgcgacagccacgacaggaatggcgacgcgacagagcacgcgcagcttctggaccattgtagagacttcatagcaccttcatcaccacgagggatagatgtccgattctcacaagtgatttccgtcgctggaccgattctacacgctgttgtcacgattttggtattctaacaccatgatgagtgctggatcctttgcccttgagccacggggtgtttccagcagcaaaaacctgggaaagacccagagggaaacggacaacagcttatcttctagttcgtcaggaaattttgatcactacgatttccaggcctcaaaaatcctcctctcaaggagcccaagcaatttgatggcaagaggatccccagaggtgagtgacgacttgaacactttgttcccacacaatgatgcttcccactcgaggccagcttgaagggacgaatgataggtgactgcgttatgagcatgggctggacaatgtcaccagaggaggctgtattcagcatgttgtcatatgctgtggagaatcaccttaaagatatactgacgtcagatagtgtcaaggaaggaaagcttatcggttacagagatggtcattttcacatatgcctttggcagtaacgtgagcccgcaggcatacctgaaggaatagtgtacgtagctttacaagcaacttaattagaaaagccctacagcttatacttgttcctgggcagggtccgaatccaggtactcagcgcacgccctgatg

SEQ ID NO: 638075 - DNA, 433 bp, Homo sapiens
tgctgcttctctcctcgtgggttgtgtacatctaggtcaaatttgaatgtaagcatttacctataatgatgtctctgaattgacatgctactactctggtctcgttctatattagacattccatgttcgttaattttgggcgtgaagttttttcatgtcgagagcgactccttacagattttcggtaatgccgttttgtagttcttccttcatgccttccactggaagatgggacgttctcattgccatcactcatacctgaagcaacatctgaatgtgcactgtctacagaggaagccaaagtggtcggctgggtagcttggggctgtgctactgcaactggctctgcaggagcaacctgagagactccctgagtactctccaaaactgcttgctgggaggatgtagtgggggcttgtgctaaactccctcc

SEQ ID NO: 638076 - DNA, 257 bp, Homo sapiens
accgtcacaaatcacagtaagcggtatgaggaggtttgggggtttgttgttttcttctggcattgctgattgactccattacaccaaaactactttcttaagaagggattcatggtctgaatctaatgaaaacatgtttttgtttaaattttcacatttttaaaaaggctatccattttacaaggcaaaaactttcattgaatctgcatcttccaagacagctgtttctaatgtaaggttgttcctaatatgtgcat

SEQ ID NO: 638077 - DNA, 550 bp, Homo sapiens
  misc_feature (457)..(457): n is a, c, g, or t
tttattaaaattggggttcaccaggttggtcaatcttgtgtcacaactcccgaactcaagcgattatcatttgggccatacaacatgttgtggttatacgcaaaagccattagccccggtcgggggaaaaacagattatccgcttctactgtttagagtatctaatccaggcgtgagaccgtttttgttaacaactaccccattatctcattgaagatggattacttgttgcataacatcttatatttaaagcatgatacggaatgaagctctcattaatgcttgagtgctaggctggatcgaccactgatgaatctgcaagtatggcatactgaaatatttgttgaatgggtacatttgcttacttaacaagagtcgcaaaagacgtgatggctattataccagctaacttttggctggcaagcgctcttcctgcaacagtatgaagatgctttgngtggcacgcttaatgcttcccattggaacatgaccattcaagaggattctcaggcgttgacgctctagtaatacggcatgcttcctctcgtat

SEQ ID NO: 638078 - DNA, 410 bp, Homo sapiens
  misc_feature (36)..(36): n is a, c, g, or t
  misc_feature (77)..(77): n is a, c, g, or t
  misc_feature (146)..(146): n is a, c, g, or t
  misc_feature (207)..(207): n is a, c, g, or t
aaataaagtactataaaaaatttgtaacaaagtgtnccctgccatgaaaaatcagttttaaaattcctcctgggaanatatgccccaggagcacaattgcctgaattgtatggtgatatggtttgaactcagatctcatcttgaanttcccacatgttgtgggagggacccggtgggaggtgactgatttgtgggggcatgtctttncctgcgctgttctcgtgatggtgaataagtctcacgagatctgatggttttaaaaaggggtgtctccctgcacaaactcattctctgtttgcctaccgccatccgcttaagatgtgatctgctcctccttgccttccgccgcgattgtgaggcctcctcagctatgtggaactgtaaatcgaattaaacctctttcttttgta

SEQ ID NO: 638079 - DNA, 422 bp, Homo sapiens
  misc_feature (258)..(258): n is a, c, g, or t
  misc_feature (299)..(299): n is a, c, g, or t
gtattagtacgcagtacacagaagaccgactcgaaagaagaaaaggagagtacataagcatattcatctatgaaagagaaaagcaagcagaaaagatgaaagagaagggaaagtcctaacagttgcacccgtccgtggagctcctccaggaagctgcttcctgtgaggcccttttttccgagccatttcgggggacattggctggtcacgcctgagctttccattgtcctgtgagctggtcgtgtgagacacagtganaagacccccacaccatggtgctcaaacttgtggttctatangcccctttctctttctccaaattggcagtaagccctttcttggtcccatgaggggtgcggccacacaaccacgtgctgcagcctgcgagacaacccaggctgtctgtgggggccaggctggag

SEQ ID NO: 638080 - DNA, 163 bp, Homo sapiens
gggtccgaaacgcaaatggattatttcatccaacatatattcctattacatgattcaaactttctacttccggaaagtaatacttaaaagtttgagacaaagaagtgagatgcaacaatatctctaattttatttcttttaagcagtcttcattaataatgtt

SEQ ID NO: 638081 - DNA, 204 bp, Homo sapiens
ccccccctttttccgggggccctggtcccattttttatgccccaaaaggtcctttgttcccccggaaggaaaaaaaaaaaaaaaatgggctgggggggctttttttgggtctttaaaggggggtggaaaaccctaaagggcccagaattgggttgggaaatttttgggggccagggggtaaaaaaacccttttggtttccctta

SEQ ID NO: 638082 - DNA, 549 bp, Homo sapiens
tcgttcatttatttttcaaatgtttattacattctactagaccctacagattgaaagatgtacaaggtatgtccttgtcctctggggcttatggttaataggtattattacaatttacctgactaaagacctatgtggcctcatgatacacaggagcctataagatatgtttattagattatttatttacttttagttaacattttaagcatgtacaaacaatcaccataacctattggatttttttttgttaaaaaaattagtattcacttctgtgtcttgagcccacagatataagcagtatataatcagaaagttataaataaactcagattatatagggaaaggtgtgctcctaaaaacgacacatacattaattaaaaggatgcatctaaaattatgaccaaactatctttagaaggcagaaatgtaaaattatacctttaaaaatgaagacatcatttatatacttcaaaaataaaatgtgatatagcagagatgaatgatcgctataggattgtattggtttaagagaacacgatttctaaa

SEQ ID NO: 638083 - DNA, 198 bp, Homo sapiens
cttgtcggcacatacttctggtgggcactgatgcggaaacttgaggatagaaatcagtgagctgcatgcacttgaaaggcatggcctgtctacctcacttgagtgcaaggtccatcagaccaaacgcccatgttctagatcacatactcactgtacagaccagggggtatcctactacgagatcgcacctagcacggc

SEQ ID NO: 638084 - DNA, 254 bp, Homo sapiens
gacagggagacgataacactggagtgaaagagttataatcaggattcagtgtaatactgtggggactgtattatacatagatatatcagcgtacagtaggggaaaggtaagactggaaatatctttataaggatctgtaggaataagatggatatggtattgtgtgtaacctgcacaatgtgggaagctgatatacctgtgcaaaatctttgcctctgtgctgtcagtgtgatgtgctttctgcatggttatat

SEQ ID NO: 638085 - DNA, 976 bp, Homo sapiens
tatccgccccgtcccgctttgttgtacggcactgcttctcgtcctacagtgcttcccgctccacaggggggcacttcccccctggattgactcggggcttgacatcttttggggaacctttccggtgtagctttcttgcttaatccgtttgcccttggggggtctcatggacgcaacgcgtgggcgctgcgaccccatggggtgctcacttttgtttgcccccttgggccaagccccccctggttgtgccgcaccacacacttggtggtttggacgatagttccctcgactgggggtgagcgcgtcgcggcactcctccctatagggtgctccgcggcatctgattgtggcacttggcccttgctccatctgccagcgggggcgagcttcgcacactggccacgacttatgccgcgggtacgcccccttgtggttgtgatccccgattggtgacccccccggccggaacgcggagtattgcttttggcgcgggtgtgtgtgggcgctgttgtgtgtgtgtgctgtgggttgggtcgtctcttccaagtatttgctcgttttttgtttacccttctttcttgtatttctatccccgactcaccacgggaaggttattgaaatccaaccgtcaccccttagtttgcttgaacttttgtgtaaccccctgcttagggactcttgctacttaagatatatccccttcctcaagtggtgctattttgaaaactagaaaaaaactttgaattggctattttttgttgaatagccatattttgttttctgaattcattatgatccccctattgggtaatgctgaacatttatctggaaccgatgaggatattattattttgtatcccaaccggaattcagattaagggaaaatttgactagtgtaatctgagatatgtcatagggatttctttctgaccaaagggtgctttgctgttctttatattaaatacttttagatcca

SEQ ID NO: 638086 - DNA, 124 bp, Homo sapiens
ccaccgggctgctctggtctcgtcggtcccctcctccgccctgtcgtcctgactctactactccctacctttcctacagaggcatgtccggcttccagatcaacctacaacccgctcaaggagc

SEQ ID NO: 638087 - DNA, 920 bp, Homo sapiens
ggcgctcccgtttggcccaagatggcggctccgtgtgcagcgggttgctggggccacgggtgctgtcctggagccgagagctgccttgggttgggcgcccttaaacctccccggtctgcgccaagaaccgggcggcccgagatacgcgataagcaacggggggacaaggcgggtgaaccttacgagggaagggcaacacgcgcgcgggaaataaaatcggcccaccgtaaggggctggttgtcgctggcaacacagggtacaccttgggatgggagacgggacccattgccggaagagcggaaccgcggggtgacaggagatgttccttcgccaacgtttccattggtggggggtacccttaccccagtggcttggctttggattgacccaagattgggtttttaaaaaggcgcggccgggggtgatacacccaatgtttgagaagacttctggtggccgggtggtctccctgggagggccattgtttggtcctccacacacaaagaggtaagcatactctatacctgcgggtggggcataacaaggttggaaacttttgggtgtggtccctaatatctttcacaaaattggtcctgggtgcaggacttccaactcttacaaagatgttgttgggccttcaaaggggtggtggtattaaaggttactttcttaggaagaaattccccctttttttttccaatcaaagggtttgttagccttgtaggaagattgtgaaacggtggggaagggaagtggtagtgtgggagggaaagtgatcccccttcaagagggaattggaggcaatagtctcatcatgagggtaatgggaataaggagactttttatcccaataatataacacataacacaaaaaaaaatgtttggggcggcgtggcactgggagggttaaaaaacattg

SEQ ID NO: 638088 - DNA, 284 bp, Homo sapiens
  misc_feature (120)..(120): n is a, c, g, or t
tctcactagttgaccaggcaggtctcaaattcctggactgaaacaatcctcccgccttagcctcccaaagtgctgtgattacaggcgtgagccaccacatggcttatttctcttttgggnttttttttttctttttttttttttttaaaagtatacctttgacccccagttgggaggccatggggtgaattttggcaaattggaaccttgggcttcgaaattaaaagaaatcttcctccttaacctccccgggtggggggtttaggggatttcccccccacccc

SEQ ID NO: 638089 - DNA, 353 bp, Homo sapiens
  misc_feature (20)..(20): n is a, c, g, or t
  misc_feature (37)..(37): n is a, c, g, or t
  misc_feature (39)..(39): n is a, c, g, or t
  misc_feature (79)..(79): n is a, c, g, or t
  misc_feature (108)..(108): n is a, c, g, or t
  misc_feature (149)..(149): n is a, c, g, or t
  misc_feature (152)..(155): n is a, c, g, or t
  misc_feature (190)..(190): n is a, c, g, or t
  misc_feature (194)..(194): n is a, c, g, or t
  misc_feature (215)..(216): n is a, c, g, or t
  misc_feature (240)..(241): n is a, c, g, or t
  misc_feature (244)..(244): n is a, c, g, or t
  misc_feature (249)..(249): n is a, c, g, or t
  misc_feature (266)..(266): n is a, c, g, or t
  misc_feature (269)..(269): n is a, c, g, or t
  misc_feature (280)..(280): n is a, c, g, or t
  misc_feature (282)..(282): n is a, c, g, or t
  misc_feature (318)..(318): n is a, c, g, or t
  misc_feature (320)..(321): n is a, c, g, or t
  misc_feature (328)..(328): n is a, c, g, or t
  misc_feature (336)..(336): n is a, c, g, or t
tttctcctcatcattgcctnttttgtggttgtaaatngncttcttgcactttgaagatgagttactccttgtcatcttncaaatatgtgatatggtaattttcatagnagatgtcagttttgaaccaagaattggtgatttgtttatangannnnaggtggcttcatttctgtgaaattgctctttgaangggnctttttacacgtgtaagccanntgagataccgtgatggtgttgatnnctntcaangatgcttaccatctatnttngccactgagcntnttattatttgtctatttgtaaagattatttgtcttngnnaaaatantaaatatnctgtttatctgtttctg

SEQ ID NO: 638090 - DNA, 934 bp, Homo sapiens
tctgtatgcctgcttcagcagcagcaaaggtgctaccacctgtgccgtcgccagcgccattgatgtcaggaagagtccggttctgggacagctggagcacagctggtggtgactgaaataactttaccaaaggaaaagctatttgcgaactatcttctccagcggagatggccaaatgtgctttggtaaacagagccagactggttttcctatctcccaggatatatgcatctttagcttaaacagggttgtcaatcccaaagccatttacgacatgcagtggatcatcaggttcggatgagctctcatgctaggctgctgacaccttccacgatatatgctcatgcaacagtgtggcctgatgacaactatgcggaccctttggacactcaccggatcagagcgttccagcttctcctgggaaccattagcgttagatttgtcaccctcaaatggagacctggcttcaccagacagaaaacacgcctgcgtccatcaaaacttttgccgtgactgtcctagcagaaacctattattcaacgtttgctacgaccttgacgatctggtcaatcgaccacccagcattgtcgacttgccattccagcgcgtacatggactgcacccctgtatgtacacaagacacttaaccagtgaccaaacccttcacttggacacgttgcccacagtaacatgttccaataccacactgtcccgcaatcgcttgtcacacccatttaccatcacctgttccccgaactgtacgcctaatggccaaccacactgaactgactggcacatcacaaacctaacaatgcactcacttctttcaccttcaccactcctcaatcccacactcacgctccaccacacctacccctgcccacccgcatcctccttttccccgcacccatccacacaccacaactaccatatc

SEQ ID NO: 638091 - DNA, 691 bp, Homo sapiens
  misc_feature (11)..(11): n is a, c, g, or t
  misc_feature (88)..(88): n is a, c, g, or t
  misc_feature (90)..(90): n is a, c, g, or t
  misc_feature (101)..(101): n is a, c, g, or t
  misc_feature (121)..(121): n is a, c, g, or t
  misc_feature (125)..(125): n is a, c, g, or t
  misc_feature (127)..(127): n is a, c, g, or t
  misc_feature (164)..(164): n is a, c, g, or t
  misc_feature (166)..(166): n is a, c, g, or t
  misc_feature (168)..(168): n is a, c, g, or t
  misc_feature (176)..(176): n is a, c, g, or t
  misc_feature (179)..(179): n is a, c, g, or t
  misc_feature (181)..(181): n is a, c, g, or t
  misc_feature (185)..(185): n is a, c, g, or t
  misc_feature (224)..(224): n is a, c, g, or t
  misc_feature (226)..(227): n is a, c, g, or t
  misc_feature (230)..(230): n is a, c, g, or t
  misc_feature (239)..(239): n is a, c, g, or t
  misc_feature (256)..(256): n is a, c, g, or t
  misc_feature (274)..(274): n is a, c, g, or t
  misc_feature (277)..(277): n is a, c, g, or t
  misc_feature (317)..(317): n is a, c, g, or t
  misc_feature (320)..(320): n is a, c, g, or t
  misc_feature (339)..(339): n is a, c, g, or t
  misc_feature (341)..(342): n is a, c, g, or t
  misc_feature (434)..(434): n is a, c, g, or t
  misc_feature (498)..(498): n is a, c, g, or t
  misc_feature (520)..(520): n is a, c, g, or t
  misc_feature (549)..(550): n is a, c, g, or t
  misc_feature (553)..(553): n is a, c, g, or t
  misc_feature (573)..(573): n is a, c, g, or t
  misc_feature (575)..(575): n is a, c, g, or t
  misc_feature (631)..(631): n is a, c, g, or t
  misc_feature (677)..(677): n is a, c, g, or t
gatcccatcantacaaaaattcaaaaaattagccgaggatggtggatcgacgagcacttgtcgatcccagccagctcaggacgtgctnanagtgtggacgnatatagctatcgagtgcccncggnanttcaaggctagagtcaagcacgtgataaccagtgcantntngcctgggnaananacanagatccgtgtatcaaaaaaaaaaaaaaaaaaaaaaaaanannaancttctgatntttgtctttctggagtnctatttgctttgtgattnccncaatgcaatgcttcacctagtacatcatctggttctcccnggnccttttaggactgaactgngnntgaaatagttacatgtctgcctgttacacagtggaaactagtttccttcagagggacacgaaaccacagatgaggccacaaagaaagcattntccttccacagcaactggctgagaaaacagaaccaggaaaattctgccttgaggaaacaatgtnagcttcctgaatcatccagggngaaagggggagagaatagattttaaaatnnttnaaaaatggcctttcagagtncnctgttccaattgtttgtgtgtttgcaatcctgtgtcaataatacttggcctctaanagaaacacctggcccccagccatcgtcaacacacattgggcccctnctccaaaacacagg

SEQ ID NO: 638092 - DNA, 303 bp, Homo sapiens
cttgggaggtcccggcaatgctataaagaaagaaaaataagaggagtcctaattggaagggaagagagaagatgaatttgatcatgtctatggaaaccagcatagaatacacagaacaactcttacattcttatgagtgttcagcagggttggtgcaagctcaacttacagaaatcatcattaagaagcccaaggaatccataaataaatatacacaatttttctttgtcaatttaaagaaaatttaaaaatacggattccttcccatcacaatgaagatattaaatctgtctcaacagaaag

SEQ ID NO: 638093 - DNA, 117 bp, Homo sapiens
cttagagcataatgtgtggcagtatgtaggacttgaagattagttcgccgtatttagtgtactcattggttcagtaccattggtggccaattgatttgatggtaagggatggacact

SEQ ID NO: 638094 - DNA, 240 bp, Homo sapiens
gggccccccccccaaaaagggggggtttttttttggggggggccaaggggggggcttggggggcccccccccccccccggggtttttttttccccccccgttttttttttaccccccccccccccccccccccatttgggggggggcccccccctttttttttttttttttttttttgggggggggggggcccccggggggcccccggggggggggccccttttttttttttttttttta

SEQ ID NO: 638095 - DNA, 350 bp, Homo sapiens
ccaggggggtagccaagtagacaaatggaatcctggggtgaacccgaattttccaaaaaacagcctccaatttgtgcccccccaaagatgtgccctaaaggcaggtgaaagttttaattcaaaggggccctttttttccccttccctgcctagtttccttttgttccttgagtccacgcagaattccattttttggtcagcagacaggcttaagctaaagtattgcctttattctgtaaagttctggacatagttcccaagcttttgcagggggtgatttttgctcttgtcctgaaaaaaaacagggctgttttaaaaaacatttgaaataaatcccgcccccaaaggca

SEQ ID NO: 638096 - DNA, 543 bp, Homo sapiens
catcactgaaacaagattagggccaaaggctgaatgtagttaccttttctctaaatttgtcttcagcttctctgtggttgtacatagtactagtttaaaaaaaaaaaatcaaaaatacatttcaaagtgccgaagttgcatttttataaggtcctcatgggtagtactatgttataacttattttacaaaatcaccatgatagttacaccacatatttcctagcatttcacacagattaatttgcagaaaatagagggaagttcttggggatatactgcctgtgctcaaaactatttggctttaattatttaattatgagatatctttaaaatatctaaattataaatattttcagttacttttatagttactatcatatacctgtttaaagcttatgtccctcctttttttaataataagggggatgggggcagtctgtgctgtgtcgccaaggttgatgtgcagtgaccccttctcagtcacactgaaatttctgttccccaggtccaagcaagtatcaggcataagcctcctaaatagct

SEQ ID NO: 638097 - DNA, 194 bp, Homo sapiens
catttagattggaggcctgcagcatgggaggtaccacgctggctagtcagcagtcacaccaggatggtctagccgacactggtgtgcatacatctgtagcttgtcgactgctttcccagggctgtctgttttagatccctagctgtctccgcacaaagatcccccagtgaggtttctccgtgacttaaattgtc

SEQ ID NO: 638098 - DNA, 953 bp, Homo sapiens
aactccgtctcaaaaaaaaaaaaaaaaaaaatttcagataaaatcgggagcattctggttccatcaatttggaattaaattattaaattccaaaaaagtccggttaattgttattagcccccaaattctatttaggttaagcgggaattaaacacaaattgaagtttttcaaaacccttttggacagagaaaaatacaatggggataaaaaggttcttaaaagagtgacaaagagtggccgggtgtccatgagtttgaaaaaccaagggccatcaaatttattatctcctaatattattatttatagcatttaccccaaataaaaattctcaataggaatttggggtataccttggataaaggggcatttcacagggtgatatagggagggaaaaggtggtccaggctaaaaattttcttgaaaggtctggcagaaattgataagggaagggactggtaattatcagatacccaaaaatttttttaatcgaaaaactgggggtactgggtacccgggatagaccggatttattcgggtcacaataggagatcccagaagattaaacttgcttaatataaggcagggggatagcagtttttttctgaatttttgtctgctaccttcgctgttttgtggttacccacaaatcggctccttttgtacctcagaagaccatggactcatccgggtaacacccgaagcaccttcgggttattaaccggtggcacttggccagcagtatggtgcggaattcatcgggagggagcgtaggccactaataaggcgtgctggccattaatgtgcatgacgcctcgtcggaatacagatcaaggcggccgggatctacatctagatttaagaagccgttagcacggtttctacggagaacgagcaaaccgcggtggccaagaaacggcaccataacagcggaacaccgattgagacaagcgcg

SEQ ID NO: 638099 - DNA, 92 bp, Homo sapiens
aagtagacaagtgtgaagaaggcatcaacagaaccacccgtgaatcctgacgtgattgccgtaccttgaacgttacacctgccacagctgta

SEQ ID NO: 638100 - DNA, 896 bp, Homo sapiens
gctgcgaggagcggccggcgggcggcggctggcggcgggcggcgatggcggcggcggaggccggtggcgacgacgcccgctgcgtgcggctgagcgccgagcgggcacaggcgctgctggccgacgtggacacgctgctgttcgactgcgacggcgtgctgtggcgctggtgtgagacctgcctgtgcctggcgcgcccgatggccctgctgtggctgctgctgagccctgctggcaatgcgccttgtggcttcactcaccaagcaacatgcagcaatgacccgctgctgcctactgccgagaagcttgcggctgccttgggcttctggcgtgcccctgcggggggccctggctgccaagccttggcaggtcttctgtgcacgtgcctacttgcacctgctgctcctagcctgctgccaggcgccttggcctggctgccccctgctgcccagaggccctactgtgctgtggcagcccaggcccttggcctgcggagctgcgaggcctgtgggccgtcgccagctgtgggcgtaggggcccgagccagctgcaggtgcgaggggtccggcgactggctgcacgcgccgctggagcccgacgtgcgcgcggtggtaggtagggctttgacccgcacttcagctacattgaagctcaccaagggcctggcgctacctgcagcaagcccggcctgcctgctcgtggagcaccaacattggaccacccgggcttccgcttgaacacgggccgcttacatcgcggggaaccgtggatgatcagggtccgaagccgtgcgacaattgcctgccaagcggccagggccgaccctcatcggggaaagcacaaccggtttacatttcagacttcgttttccaggaatacgggattcaacccgaagg

SEQ ID NO: 638101 - DNA, 1207 bp, Homo sapiens
  misc_feature (297)..(297): n is a, c, g, or t
  misc_feature (386)..(386): n is a, c, g, or t
  misc_feature (388)..(388): n is a, c, g, or t
  misc_feature (599)..(599): n is a, c, g, or t
ggttgcgagtaggaaccccgagaccccgatcgactgaccagcagccacggggtgacagtgctgcagacggtccgagacgatcataaccggtacttctgcgttgcgctgatctgcgcggcgcgcctgagctaatgcaccagacgatgcatattggcatcgatatggggtaataagcgtagagagtagatgtagtatagacccaatcaaacgtttggaccgcgcattcaaatctgaccacgatcgaaaacgtatcactgcggatgtgatctaggtcggttgccttaaataccttgagcnttccagtccaccaatgcgcaaagaagtctcccaatgtcgctacacagaacggacgcgcgcttgacgaaacgagaggagaacattgatgngntccacactgggagagagtacccaatcgagccaatcgtctccgcattgcatggcgcagaaatcacgcgtcgcaaataaactccatgtgaggagacagaatgtgcatgagtcggctagagatagcactcgagtggcgacgatcacaccgtcgtggcagtcgtttgccatgccgaccaattgcgcagagatgagccttgtgggtgcttccattntgccagaggtgagcgctaggtcctaaacatatcggtgggtctagatcccattgcttcatggctctctcgcatccttgcatagatctgtcccacctaaatggttctgttccattgcggatgtttcgaaacaccattgcaggcaaagtctactttgaacaaatcaaggtcctttcaacggaatccactccatgcctaatttggctcttcgcttgacaaaccgaacacaaaactttgccttttaggtcgagcccccttgtgtgcccaaagaggttcattcccaattgaacaaactttatagaggtacttccggtccgccaagggaagcgtcaggtgaaccgacaagtttccatttggcccaattcaactttggccactctccaagaaatgaacttggtgcagacttgtggccccccttctcgggggaaaaaaccttggttaaggccggtttgaaattgcgccccggcccgagggtggtcttcttccccaggaaaaacgattccaattccccctgggctatcttatcttgtgccggcttaggccaaagtggccttgttggggggtaaaagtggtccaattccccttgaagcttgaaacgggcgaaagcttca

SEQ ID NO: 638102 - DNA, 710 bp, Homo sapiens
acatgctgtactgctcggaattcgggatctgggcggcgggcctcgcgagtacgtgtcgacttcggaagtctgcgagcccagccaggtgtgcccgcttccacccctctcccctgagcgtcgtcccgtcggggtcgaacctcccccgcgacagtgcgccagccgcctgttcccccaatgccttgcctgcggacgccctgggaactggcgtctgggagccccgaggggctggcgggactcggtgtcccgggcatgcggcagctgccccgccctccggacatccccgtgcatcgggatgccgcatgctggggtttctgctcctcgctgcgccggcgaccccggacccggcacccgtgacccctcccgctgcctgcggctctgcgccgaggcctgccccgggagagacctgtccatgccgtccaaggcggagaatctagcgtgcactcctgagcccgggaccacgcagttacgccgtggaaggggaagtgacggctccaagtgacagttccctgtgagcctccggagccaggaccatgcgccgcgggtgtgtccccaaaccgattgctccgggctccgagaagccctcgcgcttgccaagctagcaaataccgggacaaggcccaagcggctaggtgacaccgcctagcccgaacaagcacccaataagacacagatggaccaccagaaagagacctcggacttggagccgaacc

SEQ ID NO: 638103 - DNA, 311 bp, Homo sapiens
acccgttttgcaccgtggtaccgcaggaggtaaagaatagaaaactggccgggcacgtggctcacacctgtaatcccggctttgggaggccaaggcgggcggatcacctgaggtcaggggttcgagaccagcctgatcaacatggagaaaccctgtctctactataaatacaaaaattagccgagcatggtgtcacatgtctgtaatcccagctactcgggaggctgaggcaggagaattgcttgaacccgggaggcggaggttgcagagatcgcaccattgtactccagcctgggcaacaagagcgaaat

SEQ ID NO: 638104 - DNA, 1088 bp, Homo sapiens
  misc_feature (60)..(60): n is a, c, g, or t
  misc_feature (128)..(128): n is a, c, g, or t
  misc_feature (159)..(159): n is a, c, g, or t
  misc_feature (175)..(175): n is a, c, g, or t
  misc_feature (398)..(398): n is a, c, g, or t
  misc_feature (477)..(477): n is a, c, g, or t
atctatgctggcaggaagaagaagaattgtgtcagttctctgccagcatgcctggtgacnttcctgccaacggttttacctaatacatagaataatcgctagttctagtcaggctgccctcgctgtcntggatttgagtcgaggtatctcgaggcattntatgactcatctattnaagcgtcacgatggagatcgttatcttgaagactgagatatgcagttctatcatgagagacgagcatgcaggatacataaggtaaaagggccgtggcattaatcggctaggaagatcagaaatacggagaattataccacacacgtaactgagcagtgtgccatggaggcaatgtgatgacagcacgcgaattgtatgtccaggtaacattacgctacgaganagaaagacgcgtgtaagtagttctagcgaaccgagacggttcccataattaagatgcctagccatgtgtgtcgcccttntgttgagtgtatggtacctgttctgttactgaccgtgaagacggcatctgtgtggcggtgcaaggacacataaacagtctacctgtggagatcgttgtacgtgagactgttgggtgcaccggagagccaccggtagtctattacctatcttggaatcagagtgctatcgggcttacttgtagtcaagtcaattcctgaacggtcaacccggcattgcttgcccctcactgggggtttccagttgtgtatattggcattgcgtctatggtaggaaggaaagacgcgcgggatcctctagggcggatggctaaaaccattcgtcttacccattgtggtacaggaataaaggaatatcagaaaggtttcgtatgaagacaatcaagtgaggagttttgcctcgattagcttgtttgactcgaccaagtcaatagaaatagacatgggggttccaccgatttaccagactggggcgtgtggactttctccaacctcagccattcggcattcgtattcattcaatttggccggctaccgaatttatttttccaaccaaataagctttaactttaaattggggcgattaaacacttctgcttgagggagaaaccaga

SEQ ID NO: 638105 - DNA, 399 bp, Homo sapiens
cagagatgagatcttggcctgttgcccaggctggtctcaaaccgctgggcttatgtgattctcctgctttggctcccagagtgttgggattacaggcatgagccaccacctccagcctgatgctttttaaatatatagtatttaggtctggtgcagtggctcatgcttgtaatcccagcactttgggaggctgaggcgggcggatcacagggtcaggagatcgagaccatcctggctaacacggcgaaaccccgtctctactaaaaatacaaaaaattagccgggcgtggtggcgggcacctgtagtcccagccactggggaggctgaggcaggagaatggcgtgaacccaggaggtggagcttgcagtgagccgagatggtgccactgcactccagcc

SEQ ID NO: 638106 - DNA, 513 bp, Homo sapiens
atcttgctctgtcatccaggctggagtgcaatggtgcagtcaaagctcactgcggactcaacctcccgggctcaagtgattctcctgccccagcctcctgagtagctgggattacaggcatgcaccaccacacctggctaatttttgtatttttggtggagacagggtttcaccgtgttggccaggctggtcttgaactcctgggctcaagcgatccaccagccttggcctcccagggtgctgggattgcgggcgtgagccactgtgccaggtccatatctactctgtctgtatctctctgtctctgtgtatctctctgtctctgtctttatctctatttctgtttctctatctctttgcatatctgtctctgtctctttctctgtctctgtctctgtctctctctgtctctgtctgtttttctatctctctgtctctttatctctctgtctctatctctgcctttgtctctgtctctctatctctatctctctgtctctgtctctctatctc

SEQ ID NO: 638107 - DNA, 141 bp, Homo sapiens
cgatctacaggatctggaacattgccagccagtagaggatgctgaagttggggagcggctgcaggccacacaggataagctcagcgttccattcagtggcacttccacctctggccaggtcacttctctgctggatacctt

SEQ ID NO: 638108 - DNA, 677 bp, Homo sapiens
cctggtctctctaaccgcgccagtgtgcctccgactcggaacggcttcctgtgtgccggggcagcgagggccgggggcggcgggcgggatgagtgcgtgtgtgcggtggagcggcgcggatgctgcggacttgccgggacgccacggctacgccgccgagttctcccacgtacctagcctgggccgcctgtgctagagccacctgagcagcactacggcatcgcgggctgtggaaccctactaatattggatccagatagaagctgggctaaggctttaaagaagctttgactggaatgatggtaagtaaagatgtgacttggagtgagaaacaactgaacatgtcctacatacacctgtagatggaggatggctcgactgcagcatctgggacactgaacaaagcaatgaagagagcaaaatagaaaggtataatagaagacacacagcatcaggagagatgatataaatagtatagattagtaagccaaataaacaagaaggtgaaaacagagtttgtaggatggtactggggaatacagtgaggaataaaaaacataggtaaaagtagggtagaagaatcacaaacatagattggaaaaagatatacatgatagcaaccattcagaaagaaacaatggaaaagtaataaaataaaaatagcaacaaaaaaatga

SEQ ID NO: 638109 - DNA, 115 bp, Homo sapiens
aaaactgggcatgtagcacatccaggctgatgtatggccacttgggattgatatggtcctccacattccagatggagttgagggtacctccaggtatggggtgcaagtaacttcc

SEQ ID NO: 638110 - DNA, 1056 bp, Homo sapiens
gggcggctgggaccctgtacacgtatcctgaaacactggagggccttcaaggctctcatcgctgctcagtacagcggggctcaggtccgcgtgctctccgcagcaccccacttccatttaggccaaaccaaccgcacccctggaatttcatccgcgaaatttccgtgccggccaagggtcaccagaccattatgcagggtgtgcatagcatgtgcattcgtagtgatgatgtatgccagcagcacaactgccccatttgcgctcacatcatagtgcagccacattgcaggcagcttgcggggcacagtcaatccaagcaggccagcaagccccagagtggtagccagttgggtgcagctttatgctgcattccggatctcgtgcccccagaccagtacctgggtgttccccaccttgggcatcatgcaacacaacaaacaggccactgagcactgcacaggaggaagtgcggcgaattctggggctgctggatgcttacttgaagacgaggacataaactggatgggcgaaagagtgaaaattggcttgacatcacagattgtctgacccctgtatgtggatctaataagcaaggtactagagccttctttccgccaggcctttcccaataacaacgctggattcctcacctgcattaacaagcccagttcgggctgactagggggcacgtgaaactgtgtgcgacagctggacagcaagacgctacaaacgatgcagaagacccaaactacaccagacaacaccacggaccgagacgggacccgacaagagaaccagaacgccagagcgaacgcaacacgaaaacaaggggcagacaccgaaacacgaacacgaaacggcagaaaggcaacgggagagtcagaagacaccagggcacggaaccatggcccagtgcaacaacaacaggcggaaaacacacgcacaacgacgcgagcacgccgaggacaggcaccaggaaacagcaagacacggacacggcaacagaaacccacaaaacaaatacgagaacgcgagcagcaaacacgaacacactca

SEQ ID NO: 638111 - DNA, 415 bp, Homo sapiens
agcactgccaacagaccagagtgcgcgagcaacccaacagtgacacagcatgcgctcgcgatgtaggaagaacttcggcgagagggaagcattgagactctgagtaacaggtcaagctccaccagcggcagcataccaagaaactttgatggctaccgatcttcgctgtccaccaatgagagccagacccttagactctttccgactggctttccgtaggtaccagaaacctggttctgactggccaggccccttccctgttggaggaagggagaagccccgctctgtgcctacaccttagactctggtcttccttcatccacactttcccaagcttagtgacaggagacgcccatactaactggatggagaagagaccctctttcgcacctcagagcacttggcctctgtcacc

SEQ ID NO: 638112 - DNA, 498 bp, Homo sapiens
agcgcacacgttcggtgtcctgcagtacgacgatgacgtggcgggcgaagatctcgccagcggcggtcaggcgcaggccgccgggcagtcgctcgaacagcggcgtgccgacctcgtcttcgagcttgagaatctgccggttgaccgccgaggaggcaacgttgagccggcgcgaggcttcgcggatcgactggcagcggcgcaccatgtcgaaatagtgaatggccggcgagtggatgcgcagcttgcgggccaagccttcagcgctccgctgccggtggcttgagtccgcagcccttgagaatgatggcgatcagattgtcgctggcaagggcgaagtccgcgcgggtcatccgcttgccgttgatgcggcggatctggtcggagaagtcggcgtagtgctgcgttccggcccagatcaggaagatcaggtgcatggggtcgaccgggtccatcttgccggcggcgatccaggcgtcgaataccgcggcgcggccg

SEQ ID NO: 638113 - DNA, 444 bp, Homo sapiens
atggcggtctttattgaaatgttatcctttgtgctaaactggctgggcattccacagcaccatgttgaggtcatcgatgatgtcatgaggatggcggcatcaagattacaggccactgactgggcagtccccaggatctctttaagggttccagagagttctctggctaagaatcggtgccgcatctgtcgagcaaggttgacaatctcatcaaaagtgatattcccactgtgttcaatgttgttctgttactttctgtctcttggtggttccttgaggggctttgatgatcagggcagaggcagaaggcaccacctcaatctgggcctgtctgtactgaatggtcagtttcactgtaatcctcaggcccttccagtcacccagttgccttggcaatgtcatcaccaacttttttgggagacagacccagggggccgatcttgg

SEQ ID NO: 638114 - DNA, 188 bp, Homo sapiens
gacggaccactgcacactcataaaggaattcccatcatttcctcatgagacagccacctcagggtgtgaccatggccttggtatcccccactatggatggagacccttccgtttagaaaactcactcacacacattaagtttcagagggcacagcggaaaccactttctttgtttattgattctgttt

SEQ ID NO: 638115 - DNA, 498 bp, Homo sapiens
gcgatgcgattcatcgtcttgcgttggtgcagactgctcactcgcggatgctggccgagtaggataactgccggaagtgggtccgctggttccagactccagatatgcccaggctgtcatatcggtcttcctcgtgtgtaatatgatggactgggcggtaaattcatcatcgaagtaccttgtgtcgacctcggacgtgacctgaggtttgaagggtggcaggagcttcttctggaccacgtcctgccagttgatgctgaggaagaacctgtgctccatgacctccttggcatcgctgggccccccaccaagcctctgcttggggtccttcttaagcagcccagcaagcagggacttggcctcggggctgagcgtgcgcgggaagcggatctcttccatgaggatgagctcgaagaggcgctcgtggtcctggttgtagaagggcaggcgggcgcacatcatctcgtacattaacacacccaggcccaccagtcccgg

SEQ ID NO: 638116 - DNA, 240 bp, Homo sapiens
tgacgggaggatcccaggagtgtgtctcttcagtgggtattggcggagccgctcgtgcttgagatgctggtaggaaaaggagtagctaaagagcacgtagcatgccagcaccagggtaatccccgagatgctccccttcttcacatggatgtacttgtggtagtaccggtagtaacctcttggaaacgctccgaaaaggccactaggactgaagtcccgcatcaagatccggcggtctca

SEQ ID NO: 638117 - DNA, 1360 bp, Homo sapiens
tgcagtgaagctggcacgggcaccgtgcacgaccctgtggaaagccggggtccccgcgagttgcagctcccggagctccgtgtttgctggctccaccggcgaaagagatcccggaggatcctagtggacccacgcagccgtgcggcgctatgtgctggggcctgctttttgggcaagggcggcttttgcaggtgcttcgagatctcggacgcggacacccaaggaggtgattcgctgggcaaacgacttgtgccgtaagtgatctcttgccttgcgtccaagcccggcaaccgcagaagggcgaagacaagcactggtcgccatgggagccaattagttcgcggagtttcaaaccaggacacaggacccatcggggcacacaaagcccaagagcaacaggatccgttaacgagagaaatttgacccgagcaggggggccatatcaatataccagggaatgaggcagcccaaaacaggaaccttttacagcgataggatcacacgcgtggagctcggcacagggcgaaggcatcagttgacgcaagaaccaggagaacgctgatccttcagatacacgttgaggaaaggcattgggcaaacagacaggatcggggacgggggtagaaacgggaccccgagttgaaccttgggacgccaccttgcaagggtgcacccccggaagatacgaggtaacgcaattacaccggcggagaaaaaaagttttggatggcctattggcgctttgacccagggttacccgtgtgacgagcccggatagaacacacaggaaggattactaaagtgcaacaattcaggacaggaaccactatccaagaggccttatggtgggccacaacgccccatttgtataaccctttgcaaacaattggcaagggaaactccttgggcgaacgcgaattgtaacgaacacagttaggcggcggcggcactcacgggggggacagtgggggcaacaaccacgcaacaagcatccgagaacagctacaatggaaacagacgggacggcaagaccacggaggacagacaagagtgaccaccagtatgggaaagatcaggcggcgagacgaccccgcgaaagaggagacagaggaaaagcagacacccccggaaagagagatatggacgagtgcaggcggcgacagaagaaaacgaaggcggggccgacaaaacgacaagcacacgccaacgatgcaagtaggaatcagtccaggtaaggagacacacgaacaaggagagggaagtgcgacagaccaacggtcggatagcacgcaaccgagtagagggacaaacagaggggagggacaaaaaacgagacagccgaataaaaagacacagaagg

SEQ ID NO: 638118 - DNA, 497 bp, Homo sapiens
atacatgtcgtcgctcgggcatcaaccggggccccggcgcccatgcgtccggcctgtacgaaaccttcgacggcctgccgctgaccggcccgggcggcacgccctacgaactcaaggacccgttgtggctcagccgggttgaagtgctgcgcggcgccaatggttttgacctgggcgcattggccctcggtggtgcggtcaactacgtcacccacaccggctacgacgcccccaagctgcaagtgcgctacgaagccggcagccatggctacgcccaacgggaaatcagctcggggcaggtgctgggggatgccgactactacatcagcctcaccgactcgcactacgatggtttccagaaccacagcgccggcagcggcaaaggcatggcggccaacttcggctaccgcttcaaccccgacctggaaacccgcttctacttccgctaccgcgaaaccgataacgattcccccggcaagctgacccgcgaccagatc

SEQ ID NO: 638119 - DNA, 479 bp, Homo sapiens
  misc_feature (19)..(19): n is a, c, g, or t
  misc_feature (58)..(58): n is a, c, g, or t
  misc_feature (90)..(90): n is a, c, g, or t
aaaaatattcccctcaganaaaaaggtttgggtacccctaaaactttaaaaacctcantacgtttttttttaaaagtatgttgtcctcantcctattgaagaagtttatacaacatacaggccttcctaggtcctaccccggcccatcctagtttagtcaagacagctgtgtaacaaacgtagccttgaggcccggcacggtggctcatgccctgtaatcccagcacttttgaggctgaggcgggcggattacctgaagtcaggagttagagaccagcctgtccaacgtggtgaaaccccgtctgtactaaaaatacaaaaaagctagccgagtgtggtggcaggtgcctgtaatcccagctacttgggaggctgaggcgagagaatcacttgaactggggaggcagaggttgcagtggcccgagaccccaccattgcactccagtccgggaaacaagaacgaaactcccatctcatat

SEQ ID NO: 638120 - DNA, 592 bp, Homo sapiens
atgtaaaattgtacttgaatatgcttgaataattttgcacttcttcacttttttctctatgaattattcaatggtcattacttaaatttgtattttaatgtatgataaatgataatatgggggggggaaatagagtgaagtaccctgacattctacagatataatatgatatgctatgaaaaacaaaacaaaaagaaaatgtgccatatattttccatgtaccatctttatatgatatacagtgacttcattattagtgagtcaagttgtttaaaggactaccaaaagaagtattgctattttatggtttttatggtgtaaattatttttctgtcttcttgagtcttatgtctaagtctgtcttccttgtccagatgctgtcatatttttccaggaaatcatactgaaaacatttaaaaatttatgcacgatttcatcaacttgtttttcattatattatatttagttcaattttgcaactaacagactctctatcagagtcattaacctgtgaacagtataaagtatttaacatgtaactatagataatttgatccgaaacaataaaaatgaacacttttcaagaatatgg

SEQ ID NO: 638121 - DNA, 521 bp, Homo sapiens
cggcatacttggatgaaggtcatttaactcagagcggacaaaaggatatggtcttatatggctctcaaatttttctcggatcggttcccaatcgggaaacgtgtgagtacatcacttcagatattggctaggcatctgagctgggcctgaggatatccaccagcatgatggagaagacatgctggtcctcaggaaggcccaagtctaagcaccggctcatgccccttcctgggcggtgtggcttttctacgctggaaaccaagctggtagacatggtgtacctttccataacaggtctctctcttcggtcaggtggtggtcacggaatgggattgggcagaaataccagaaagtgcaacatgtggtcgcagctggtgaccttcaagtcaggtcacggtgggcattggccagcctcggtgtgtgggttctgtgtgaatcaggcctaggtgggactcggctcctactattggagggcttgtgaggcttttctgaagtgtgtctcctgctccttgagtcgggct

SEQ ID NO: 638122 - DNA, 246 bp, Homo sapiens
tcaatatcctgccaggcagcaagccatactgcccagacccctttggcccataaattgccccagcctgtaagcagcagtgggctctggcattatgctggttcctgacttctgtaggttttatgctggacataaagcctgcatttgctattaagccaccctcttacgtatgtctttctttaaccctcgccttcccttcaaaacctaacagccagttttgtcccctggaaaagagtctcctttctccca

SEQ ID NO: 638123 - DNA, 222 bp, Homo sapiens
ggcttgcagatagaggaagaagaagaagaagaagggaccaaaggactaaaaaaagttgaaaaaactgtcttgggactgggaaccttattgaattgatatcaaacccaatattggcagagaccatcaaaagaagtagaaggaagatgaatacaaagcttttctacaaatcattttcaaagggaagtgatgaccccatggcttatattcactttactgctgaag

SEQ ID NO: 638124 - DNA, 615 bp, Homo sapiens
  misc_feature (50)..(50): n is a, c, g, or t
  misc_feature (75)..(76): n is a, c, g, or t
tacacacgtggagtttaaaacattgtgatactttcaggtcacttattccntacacaaacactatagagaacctgnncttggcagcagagcagtgaacatgtggaagtggtctctaaaacaaatattgtcctggaactctccaggacaacacaaccttatgagtgacatctgttggcattctgtggaatttctgtttatagcctgagtctctgtttgaatgcaagtaaagacccttaaaatttgtttgccaagtatcatattagaattggtgtttttgttatccggcattaatacaaacttcatccaaaaaaaaaaaaagaaataggccgggcgcgagccaccgcgctcatagctgtagtcccagcactttgggaggccgaagcgggcagatcacaagatcaggagatcgagaacatcctggctaacatggtgaaacaccatctctactaaaaatacaaaaaattagctgggcatggtggcgggcgcctgtagtcccagctactcgggaggctgaggcaggagaatggtgtgaacccaggaggcggagcttgcagtaagccgagaccgtgccactgccctccagcctgggcaacagagcgagactctgtctcaaaa

SEQ ID NO: 638125 - DNA, 306 bp, Homo sapiens
  misc_feature (50)..(50): n is a, c, g, or t
  misc_feature (75)..(76): n is a, c, g, or t
tacacacgtggagtttaaaacattgtgatactttcaggtcacttattccntacacaaacactatagagaacctgnncttggcagcagagcagtgaacatgtggaagtggtctctaaaacaaatattgtcctggaactctccaggacaacacaaccttatgagtgacatctgttggcattctgtggaatttctgtttatagcctgagtctctgtttgaatgcaagtaaagacccttaaaatttgtttgccaagtatcatattagaattggtgtttttgttatccggcattaatacaaacttcatcca

SEQ ID NO: 638126 - DNA, 709 bp, Homo sapiens
  misc_feature (46)..(46): n is a, c, g, or t
  misc_feature (50)..(50): n is a, c, g, or t
  misc_feature (55)..(56): n is a, c, g, or t
  misc_feature (60)..(60): n is a, c, g, or t
  misc_feature (68)..(68): n is a, c, g, or t
  misc_feature (72)..(72): n is a, c, g, or t
  misc_feature (78)..(79): n is a, c, g, or t
  misc_feature (83)..(84): n is a, c, g, or t
  misc_feature (86)..(86): n is a, c, g, or t
  misc_feature (91)..(91): n is a, c, g, or t
  misc_feature (95)..(95): n is a, c, g, or t
  misc_feature (106)..(106): n is a, c, g, or t
  misc_feature (108)..(109): n is a, c, g, or t
  misc_feature (114)..(116): n is a, c, g, or t
  misc_feature (123)..(123): n is a, c, g, or t
  misc_feature (128)..(128): n is a, c, g, or t
  misc_feature (140)..(140): n is a, c, g, or t
  misc_feature (142)..(142): n is a, c, g, or t
  misc_feature (156)..(156): n is a, c, g, or t
  misc_feature (164)..(164): n is a, c, g, or t
  misc_feature (177)..(177): n is a, c, g, or t
  misc_feature (181)..(181): n is a, c, g, or t
  misc_feature (184)..(184): n is a, c, g, or t
  misc_feature (203)..(203): n is a, c, g, or t
  misc_feature (226)..(226): n is a, c, g, or t
  misc_feature (235)..(235): n is a, c, g, or t
  misc_feature (237)..(237): n is a, c, g, or t
  misc_feature (244)..(244): n is a, c, g, or t
  misc_feature (253)..(253): n is a, c, g, or t
  misc_feature (267)..(268): n is a, c, g, or t
  misc_feature (272)..(272): n is a, c, g, or t
  misc_feature (331)..(331): n is a, c, g, or t
  misc_feature (435)..(436): n is a, c, g, or t
  misc_feature (439)..(439): n is a, c, g, or t
  misc_feature (693)..(693): n is a, c, g, or t
ggggttatctccaaaagggtacttaaaccaggtctggtgcagtggntcangcctnnaatnccagcacnttgngaggcnnaggnngntggancacnaggtcaggagntnnagacnnncctggcnaacanggtgaaaccccntntctactaaaaatanaaaaattngccaggcatggtngcangcncctgtaatcccagctactngggaggctgaggcaggagaatcncttgaaccngngaggtgnaggttgcantgagccaagatcannccantgcactccagcctgggtgaaagagcaaaactctgtctcaaaaattaaatgctgtgctgnttgagttctggttcatttagataacattctttcctgccctatgaccaatcaaaaggctttaggaaaatagcatttttaaaattaaaatgtatttcagtgcatgnnatnttaataaaaatagaaaaccaatgtgtacatgatttccaatttcacacgggcctagattctcctctcatcagttgctattgaactgatttttttgtgtgctgccatagtgtaggctctttagtcatcttggtagaattaaggccattattaatgctattataattttcaggccagcacaatggttcatgctttgaattcccagggcctttggaagcccgaggaggccggattgcctgagatcaggggtttagatnaaccttgcccgtgatg

SEQ ID NO: 638127 - DNA, 766 bp, Homo sapiens
  misc_feature (46)..(46): n is a, c, g, or t
  misc_feature (50)..(50): n is a, c, g, or t
  misc_feature (55)..(56): n is a, c, g, or t
  misc_feature (60)..(60): n is a, c, g, or t
  misc_feature (68)..(68): n is a, c, g, or t
  misc_feature (72)..(72): n is a, c, g, or t
  misc_feature (78)..(79): n is a, c, g, or t
  misc_feature (83)..(84): n is a, c, g, or t
  misc_feature (86)..(86): n is a, c, g, or t
  misc_feature (91)..(91): n is a, c, g, or t
  misc_feature (95)..(95): n is a, c, g, or t
  misc_feature (106)..(106): n is a, c, g, or t
  misc_feature (108)..(109): n is a, c, g, or t
  misc_feature (114)..(116): n is a, c, g, or t
  misc_feature (123)..(123): n is a, c, g, or t
  misc_feature (128)..(128): n is a, c, g, or t
  misc_feature (140)..(140): n is a, c, g, or t
  misc_feature (142)..(142): n is a, c, g, or t
  misc_feature (156)..(156): n is a, c, g, or t
  misc_feature (164)..(164): n is a, c, g, or t
  misc_feature (177)..(177): n is a, c, g, or t
  misc_feature (181)..(181): n is a, c, g, or t
  misc_feature (184)..(184): n is a, c, g, or t
  misc_feature (203)..(203): n is a, c, g, or t
  misc_feature (226)..(226): n is a, c, g, or t
  misc_feature (235)..(235): n is a, c, g, or t
  misc_feature (237)..(237): n is a, c, g, or t
  misc_feature (244)..(244): n is a, c, g, or t
  misc_feature (253)..(253): n is a, c, g, or t
  misc_feature (267)..(268): n is a, c, g, or t
  misc_feature (272)..(272): n is a, c, g, or t
  misc_feature (388)..(388): n is a, c, g, or t
  misc_feature (492)..(493): n is a, c, g, or t
  misc_feature (496)..(496): n is a, c, g, or t
  misc_feature (750)..(750): n is a, c, g, or t
ggggttatctccaaaagggtacttaaaccaggtctggtgcagtggntcangcctnnaatnccagcacnttgngaggcnnaggnngntggancacnaggtcaggagntnnagacnnncctggcnaacanggtgaaaccccntntctactaaaaatanaaaaattngccaggcatggtngcangcncctgtaatcccagctactngggaggctgaggcaggagaatcncttgaaccngngaggtgnaggttgcantgagccaagatcannccantgcactccagcctgggtgaaagagcaaaactctgtctcaaaaagaaaaaatagaataaaaaagcaggcttttaaatgagtagctacagtgttaaatatatttaaatgctgtgctgnttgagttctggttcatttagataacattctttcctgccctatgaccaatcaaaaggctttaggaaaatagcatttttaaaattaaaatgtatttcagtgcatgnnatnttaataaaaatagaaaaccaatgtgtacatgatttccaatttcacacgggcctagattctcctctcatcagttgctattgaactgatttttttgtgtgctgccatagtgtaggctctttagtcatcttggtagaattaaggccattattaatgctattataattttcaggccagcacaatggttcatgctttgaattcccagggcctttggaagcccgaggaggccggattgcctgagatcaggggtttagatnaaccttgcccgtgatg

SEQ ID NO: 638128 - DNA, 1501 bp, Homo sapiens
  misc_feature (685)..(685): n is a, c, g, or t
  misc_feature (763)..(763): n is a, c, g, or t
  misc_feature (837)..(837): n is a, c, g, or t
  misc_feature (839)..(839): n is a, c, g, or t
  misc_feature (1098)..(1098): n is a, c, g, or t
  misc_feature (1243)..(1243): n is a, c, g, or t
ggagacgccacagagcggggggtgctccgacaccagtgtgttcaacagaagggggcttcacacgccgtgtggggaggacgttcgttcgttcccccgcgggaggtcgcccccccccccaggcccaagaggtgccaaagtgcctcgttggaggaaccccccggggggccccacaaagaaaggggttccaccaacgaagaagtggcctaccggccggcgcgcggagagggggggggaaaaacccccccccgcgggggaaaatgtgttataaaggcccccgccgtttgggagaacaccagaaccgcccccccccccacggagaggggtgtaccaccacaaaagaagtgcgctggcgccccccctgcgggcgaggtggaaaaacgccgtcgggtgtgccgccccccccctccggcagataaaatgggggaggtaataaaaggagtgtgtcccccgccgccccgagggggggacgctgcgacaacccccctcccctccgagaatggaaaaaaatatgccctgtcgagaaaccttatagtagtagagaggatcgaggaaaaatattgttgtcgtcccctcacgcgctgcgagggtctcaacaaaaaggtttcccctcttctctctctctgggagagaatatggaagtattgaccaacacaccggagagggagagcgccacacacgtgtgttngggggtcgtctctctgagagcgcctctgtcctttttccggcggcgtcatcacacaggtgccttaatatattcttctcncactcctctcgcgggttatagacaccacacgtttgcacgcgcaccacacacacaagatgtcccccacatcatgngnggttgtgtctcttgtaaaataaaagagtgccgtctcttgtgtgtggtgtggtgtgtggtatgatgaggacacaccactcgtaatgtgtggtgtataaagaaaaaaaaaagaggaacgacgtcgtataattggtgtctttatagagaaaacaccctctatatatgggggtgtctctcgagaagagattttttttgggacacacccccccgtcgagatatagagatctctatatagagagctctcgtagagagagagcacntctcgagagagatgtgagacacacatctgtgctctacacatagactctctgttctcatcactcgtgtctcgagagagatcacacagagaataatatgacacactctgcccacagtgataagagagaggctctataaatatagtgntttcactctctcttggtgtgtttgtttttcataagacacacactcttttctcttatattctccccagtgcattctctcgagatattcaccattttgatatatataaagaaaattgaggcgtatacccatacaccacacccgtgtatattacattttatattccactaatagcgtttccagcgtttacattttattgtgtatagataatagtgaggttttataaaaatagtttgagtccaataaaattagaaaagctta

SEQ ID NO: 638129 - DNA, 169 bp, Homo sapiens
cacacagaccgcatcgcagcagcgcacctgtggggagggaggcctgactgctacagaggatgatgctgttgttgtcgagggctcagatgctgttggttctatgagaacaacgaagcttccatctgttatctaggcgagactgtgtgagacagaagctaagctaagatgc

SEQ ID NO: 638130 - DNA, 255 bp, Homo sapiens
gaaaatgctgcttctccaaataaacaaggacaatgggggccaaagcctgttttggacaggatttccaccctcccctggtttttgccaatgagatgtatataatatccaaggttaaaaaaaaccccgcccccagttttcatttaaattgtttattatttatttccaaggaattttgtttttctttattaagaccaaaaatgtgtttctcattaaaaaatggcaacttttatgggcccttagtggcctgtgccttca

SEQ ID NO: 638131 - DNA, 986 bp, Homo sapiens
  misc_feature (1)..(1): n is a, c, g, or t
ncttttttttcctctgtgtagtgagaacgagaagtcagtgacgcgagagggaccggacattgtgccaccaggtgtgtaatttgtctcggcttgtagacctaacccgccgttgggggggaccttcaaggcctgtggccgattgtgcccgccctatttattagcgcccggcctgttggccccgccgccttttaggtgtggctttcgccgtcgttttgttcggaccctcaggccttccgcgaaaaacggtttggggaccaaacaacataggcgcccatgacccgaagatccgtttctggacaccaagggggccccactgcacaccaggtgcaatcctcggcagggccgggtcacctccctgagcctcagccacgacccactcacctgctgcaactgttcccgagaccaccaccactcaaggtcatcgacctgcgtgtcagcaacatccgcccggtgttcagggcccatggcttccagatgtggttctgactggacccaagactgtgttcagcccggaccgtaagctatgccactggccggctcctgtgatggggccccttaacatctgggaatgtggacacccgggagaactggagaccacgactaccacgggacccccattgcgctgccgtcaacgccgctggcctggtgctaactccggcggagccaccactggtgagcgctggacaccccgggccacggaaaggttgtgctctggcacctagggccaccgacctcgcctgcctgggctcggagctcttgcccgaagcctgaagcttccttcggcgccacatgcacccaggggttggggttgggactggaggctggccttgggaatttaaatggggaagaaaggcctggccacggacctggcctgtttgtttaaaaatggtaagatatgggttgggggattacgctagatttttctttgtatttttatctctatctatctcctccctttttctccccaagtagaaaaaaatgatatc

SEQ ID NO: 638132 - DNA, 182 bp, Homo sapiens
gcggccgcctactactactactactgctcgaattcaagcttctaacgatgtacggacatgcactttttttttttgtatttttagccgaggtgggtggatcacttgaggttaggagtacaagaccagcctggctaatatggtgaaaccccgtctctactaaaaaaaaaaagttgtactgcacc

SEQ ID NO: 638133 - DNA, 471 bp, Homo sapiens
tctgcttgaagactcagcctatgctctttgaaggtcagttgaatagagctaagagaaacaggccaagatagcaatacattctttagtaaatgaggcagtgatcatatgaccaaactcaaaatatgcttgaaatcccagcatatggttgcacattgtggcttcaaactccatgctcttaattcctaaactatcctttctgtcttctgaaaggacgtgtaggacctgatactcctagtcatcttgaaaatgttgtccttggtattacatgtatcatagaattgaccatataagcattttttgtaagtattattgctcttagaaatctgttaagtaatttcatattttttagccattaccttacttatgaatgtaaagctttcaatcttacatctgtttttactttgcaatcaggaactgtgaccgtgtcatttgtaaagcagaagtaaaagatgttctattgaaaaaaaaaaa

SEQ ID NO: 638134 - DNA, 229 bp, Homo sapiens
gaaaccatggtgatttgccccagaatgtgtatccaggtgagaactgaggtatccttagctgctggaggagtctctctctgtcacccaggctggagtgcagtggcgcgttctcagctcactgcaccctccacctcccaggagaatcacttgaacccaggaggtggaggttgcagtaagccgagatcgtaccactgtgctctagccttggtgacagagcgagactgtctta

SEQ ID NO: 638135 - DNA, 336 bp, Homo sapiens
  misc_feature (35)..(35): n is a, c, g, or t
  misc_feature (147)..(147): n is a, c, g, or t
  misc_feature (168)..(168): n is a, c, g, or t
  misc_feature (217)..(217): n is a, c, g, or t
  misc_feature (249)..(250): n is a, c, g, or t
  misc_feature (252)..(252): n is a, c, g, or t
  misc_feature (279)..(279): n is a, c, g, or t
gtaattctccggtaatagatcctaaccaaaaaganataatcaaaataccaatttaaattattgattgtaaagaatctcatggaaataaaaagacaaatctgaaaaccagtactgatgaatcaacaaattaattttgaatatgaatgncaagtgtaccaacgagatggntatcattatttctaaaaaagccagaactgctagaaaataaaaatttttngaagggatttaaaccaaggccaggttgaaagnntncaaccaaggaggacttaggagccaagncaaagccaggggaatctcacttgcttgaaacaaatctttttaaattaatagagtcag

SEQ ID NO: 638136 - DNA, 908 bp, Homo sapiens
  misc_feature (94)..(94): n is a, c, g, or t
  misc_feature (97)..(97): n is a, c, g, or t
  misc_feature (105)..(105): n is a, c, g, or t
  misc_feature (112)..(112): n is a, c, g, or t
  misc_feature (118)..(118): n is a, c, g, or t
  misc_feature (132)..(132): n is a, c, g, or t
  misc_feature (138)..(138): n is a, c, g, or t
  misc_feature (147)..(147): n is a, c, g, or t
  misc_feature (154)..(154): n is a, c, g, or t
  misc_feature (161)..(161): n is a, c, g, or t
  misc_feature (168)..(168): n is a, c, g, or t
  misc_feature (191)..(191): n is a, c, g, or t
  misc_feature (198)..(198): n is a, c, g, or t
  misc_feature (207)..(208): n is a, c, g, or t
  misc_feature (233)..(233): n is a, c, g, or t
  misc_feature (235)..(235): n is a, c, g, or t
  misc_feature (244)..(244): n is a, c, g, or t
  misc_feature (250)..(250): n is a, c, g, or t
  misc_feature (312)..(312): n is a, c, g, or t
  misc_feature (323)..(323): n is a, c, g, or t
  misc_feature (333)..(333): n is a, c, g, or t
  misc_feature (335)..(335): n is a, c, g, or t
  misc_feature (350)..(350): n is a, c, g, or t
  misc_feature (363)..(363): n is a, c, g, or t
  misc_feature (499)..(499): n is a, c, g, or t
  misc_feature (813)..(813): n is a, c, g, or t
  misc_feature (815)..(815): n is a, c, g, or t
  misc_feature (826)..(826): n is a, c, g, or t
  misc_feature (887)..(887): n is a, c, g, or t
ttacctgagcttcagattacatggaattttggactgttgaatacttttgattgtgtagtggatataactaagcaattttttttttggggtgcanacntagaatgnaattacnggatcntatgaaaggcaaanagattnagtatgtantcagcancaaaaanaaaaaanagaagacagggtaatgaaaaaanaaaaaanaataaaaannctcaaaaaacaagagaatgaccaanancaaggggcngcatcnggtgaaaaccttcttgctgtgtccaaaatggtggaaagcatcacatggcaaggaaacatgcntgtaaacaganagaatgagancngaacttcatcttttnaacagcaacaccncaccagcaataattaacccaaacccaaaaaaaaggcctaaaagtaaaaaagagggcagagtccttataactcaatcacctcttgaaggtcccactcttaatgctgtcgcagtagcaattacatttcaacatgagtnttggaagggatatttaaaccatagcatacatgtttgctataaaaacgccagtcttccaagtgaatgtacccattttaaacacccaccagaatcatttgtgagatctaattgttcattcaatcttactatacttggtatagtcaattattttaattttagcaccataatgaatatgtagtgatattaaatttggtattactttgcattaatgactaaaaattagataacaaatgatattgaacttatttccacatgcttattgatcatttggatatattactttgtgaagttcctttttgaagccttttgcccantnttctttgtgtngtatttattttccatactcatcaaaaacatcccaaaatgctagaggaaatgctctagaatncaggaataacttcttttgtgg

SEQ ID NO: 638137 - DNA, 396 bp, Homo sapiens
tatgaataccagcgaccgatatctgatgtacaacttagggtccttgagatatagcaggatctgtatgtactggcataaacccattatttgagctctcttaattgcttttgggatttctttcttgtttcttccccacaaaggacctgtaattgtgcctttccataacatgcatccaggtaaatggagaaacaaacgtgggacaaaacgctgttaccattctttataatctaacatggctttcccacacaaagatacattttcttaaggaggttcctatataaaggattttcccattgaaaatggcgcaggtcctacatatgctgggataacctgtatgtgaacaaaccttcttctccaaaggcaccgcggtgattccccgcgctgggtgtattccgg

SEQ ID NO: 638138 - DNA, 266 bp, Homo sapiens
  misc_feature (7)..(7): n is a, c, g, or t
gcggacnttctctctcccactccaattacacaaaaaagctcatatagctatttttataaaccaaaagcaaataaagttcatatactgcatttgattataaggaaactttcatctcttttcatctagaatatgcctcttttttaaaaaatctatgacattcacttttagaaatgatcaactcaagttatttcatataaatgtcccatgtgaaagatttgtccaattgtttcctaatagcataatttaacttcttattttatcatttg

SEQ ID NO: 638139 - DNA, 839 bp, Homo sapiens
ggtccttgtcagtgaaaagtgtcaaacaatacagccatggatgaaccgactcacctgactccggacgtcagccgcgtatctgccagatgtgatttacatccgggatggggcagcatgaccaaatgcgatgtggagcagtcttacaacctgatggaatagttgtagagacgacgcgtccgtcacggtgcactctccatgtcacattagggtgtacacaatgcgcgagaagtcgccgggttctaccatgtagaaggagcttacctcgctctaggctggatagttgccataggctagtcaaccgggcctcggcctactgtctcccaggggaacgactcggagccgctcggagaaaccgctggatgggtcaggatacgcgaagcagtctcgcctacgaatgctagccttggcatcgtaacggtgtgcgcatcggtgcaacggcattgccttggatgcgatcgtgcggctccgatgcgcccgttggtgccgatcgagcggtgcgcctggaccttgtgctcctcgcggacgcgacggtacctaccatcgccgtgcccgagagcgtcgttgtgcgcgtctagtcggctggctgtgcgccacgaggactggtctcccagacgagtctgtcgatgagcgtgggttcccgttggacggtgggtgtttcatgagtcggtaacagagcgtccttcttgcacataccgaacctcatatggacaacaagaggcgagcgctaggaccaaagttcggagggccgttgcatgccatccgtccgtccctgaggttgtggcacctcgtgattgcaggggtgctggtcaccccctaggttgcgatccccgaaagggaga

SEQ ID NO: 638140 - DNA, 171 bp, Homo sapiens
aagtgacgccctcccagtgtgcaaatgagggctgcggtcgcgacgacacagttcgtggggtccccaggtgcttctatcctaataccatcgacgtccctccagaagaggagtgtgaatttaagacacttctgcagggatctgccagcatcctgacgcggtgcagtcccagga

SEQ ID NO: 638141 - DNA, 440 bp, Homo sapiens
tagaggatccccaatccatccagcgttacttttcctcagcaccttgggctagatagtctaacctgtgactaatccacggttggcttattctaagtcgttgctccacgctgcccactccaggtgctcagatgatgaggagccagggtcatgggggcagcctgtctctcttcccatgtgatgcacatccttacatcattggctggtttgttctgcaatatggatatctcagcctggatgccgagaaagctgctgggactgcttaagggtgcgagaggtctcacgtgtgtctgacaggcaagcagtgagttgttcccccatggcggaacgaaatcctgtgtgatgctctgtaatggaaacataaaatctggcagttttataacattcactttctgcctctgaggaaagatacagggaacaaaaatccatttgtacaggggtac

SEQ ID NO: 638142 - DNA, 365 bp, Homo sapiens
gagatatacggggtatactcaagatagatagagtcaactttgaattctcgaggccaagcaatgggcgaaacaaaagagctttgtgtttgcgtgctttggcttttggttacagtcagagcaggacaaagaataatgaaggagtagacatgttattacttgggcatttaataatcagtgcatggcagagccttgtgtatggcttgtctttttttttcctttccttttctttttaaaagacagggcctcactctgtcacccagatgggagtacagaggccccatctcagctaagtacaacctcagctcctggggtccaggtgatcctcttgcttcagcttcccaagtagctgggactccgggcacgcg

SEQ ID NO: 638143 - DNA, 596 bp, Homo sapiens
cgcgatggctcacgcctataatctcagcactttgggaggccgatgggggtggatcacgaggtcaggagtttgagaacagccggaccaacatggtgaaaccccatttctactaaaaatacaaaaattagccgggtgtggtggtgtgtgcctgtaatcccagctactcaagaggctcaggcaggagaatcgcttgaacctgggaggcagaggttgcagtgagcctagattgtgccactgagctccagcctgggcgacagagcgagactccgtctcaaaaaaaaaaaaaaaaaaaaaaaatttttgggcggcctgggcccacagagaaagtttttaaaaccatcctgtggggcgcgcggcgggcccccaatgatgttacatgtgagacattggcgcaactagctggttcccaaagaagaacccggggccagtagactagtgtggctgggggttcctccacccattaaaaaaacgccccggggggaaccgggacgctgtcttggaccaaactcacaagatgggaggtctcggagggcaaacgggactctaacaacacagggagcccaagagacgccgatatcaattatccgcgcgctgtg

SEQ ID NO: 638144 - DNA, 1025 bp, Homo sapiens
gtgtcaggctaatgactgggtcggcgaatcacatatataactgggtgccgaagcaaaggaaccacgaagcctaactttccagcgggggtgagcgatgtgctgtcgctctcatgggcctcttaccttatagtagaaaggcagactgctggggtacaatgggttgccatatcatggacaaggacattgtgacatacgttcgtatcattacccgtgtctgggcttgaggcaacatgggagaactgaactgtggtttccaggagacgacgatacgtactcagttaccggtgggcgaccactttgcatacatagcgagaatgccaagaaagccagtcaggagcaggccatgcagcgggcgacggtggagcagagggctgtcccagtggaatgagaggaccatcctgggtctgctccatggttatctggtgtttgggaggtgcctgaacccaatattggagtctagcagaacacaacctgtggcagtggcgcatgttgtgcaggtaccagtgagacccctcagcctccttggaataatagggcttcggtctatgactcctactgttggatgtgaggacaccatcccttgaccagacgtgggattttgaacgtctacagtattccgtgtgtgagcatacataccggggtttgttgctggcgtggggactttgagttacacagggcaataaacgtgttcttgtatgcttccgtgcaaggagggaatcgtgggttccagtccgttgagtcgattaatggaacttacaaaggtacctcggtggaactcggcaatacgagtcctgcggacgaggtgtggagggataaacatatttcatgagacgtagggaccaagaatcgaatatttggaaagcccgggaggggactttgcgagttccgagagacatttgcggtgggcgcagtctctgtatttgggatgcgcacgggtataccttaggagcggcttaccaatttcggcaaagagagaaatatttcccgaaaggctgtcgatgggcacacgtgcacactatatgcga

SEQ ID NO: 638145 - DNA, 493 bp, Homo sapiens
gccggacctccccgggtacttgcgctactagtagccttcatcaggcttagctgaatagcggatatataggctgagcaagaggtggtgaggttgatcgatggttcatcgagtaaccgaatcaggttcctctatagggatatgacaacaccgcaagtcctttgagctttaaactgtggctcgtattgttctgacgagcatgttttgttagcatttgactgtcgaggtttagggctaagcatactggggctatctatcccagtttgggttatatcttttgtgtgttcaaatatgttaaagccactctcgtagtcgatttcgtgtcagctgtatgtctccgacaactcaggtgagtttgagtctctcattggggagggggtgatctaaaacactctttacgccgggttctattgacttgggttgatcgtgttgacgcggtggctggcacgaaattgaccaaccctggggttagtatagcttagttaaactttcgttt

SEQ ID NO: 638146 - DNA, 303 bp, Homo sapiens
acacaacaagtcctaataaagataagattttaaaactcaatgcccaccaccccaccaatgcccccacccttgacacatgagctagatctcagcaccaatgccagcacacttaccttattctcacattttcggagtaacttcttctttcccaggtcatagacacgcaacagcttccccacaccaatcaacaccctcccctggaatggggcaatagcagcagggaccccttccacaggagtctatagaggaaaagcaggtaatacagctattataaatgccagccagacacaggccacacttctc

SEQ ID NO: 638147 - DNA, 143 bp, Homo sapiens
cttgcgagtctcatatcacgaacagcaacgcgaccaaaggtggatagtctgagaagctctcaacacacatgggctatgcaagtgaaccatatacaacaagtggctgcatcaccatgacttcaatgaatttacgggccatactt

SEQ ID NO: 638148 - DNA, 137 bp, Homo sapiens
tagacatatcaggaaactggttcactggctagagaatataatgtggatcttaagtccaagacgccacatgtcatagaacgagtgctctgctgtatatctagtatagtgactttggaaaagtctgaggcctcgatttc

SEQ ID NO: 638149 - DNA, 141 bp, Homo sapiens
tagctggcctgtgtgtcgagtaggagagagaaatggacagaaagattggacagtcaagggaaagatccagagaaagagagaaaaaagatgaaatgaacagaaaaggggaaaaaacccagacgactgaactgcccacattga

SEQ ID NO: 638150 - DNA, 356 bp, Homo sapiens
cattttcccccccccccccaacgggttcccaaaatattttttattggccccaaggatggacccctttaaaaggggggggtaaaaattgtttttttacccgggaaaaaaccaattgggccccccccccccagccttttaaaaccaaaggaaaattttggtttttttaaaagggggggggggtttatttttgaaatttccccggggcttaaaaatggttaaaaaaattttttaaattgggtccaattttttccccccccccccccctagaaaggttggccaaaaaacctggattttgggccccccaaaaaaccttttgggggggtttacctggtttaaaaaaaacctttttaggtgga

SEQ ID NO: 638151 - DNA, 481 bp, Homo sapiens
aggacccccctagaaggcgctgacagaaataagtgcgtataggccgtactttaactactagtatacctatagcttgctccttacccccttccctaggtgatttctcccacagtggtctgtatctcaacattctacttattcaaaggaaaaaatatatatatataatttcttttaattgatcaggtctagtaaatgtgtactaaaaaaatcagagtttatttataaacaaaatagtttatttaaagcagaaggtctctcccttattgatatacataggtatagcattaattccatttgttactattgtgcgcaaaagccctgttcacaggggaataggtgtaaacatttaaactagttttgtccactgtatattagtagacataactagttgaatagttactgaattttagatgtaaagaataatgtgaccatcttcaggtatagggatatactgaacgtttcaaatttcaatcaatgagca

SEQ ID NO: 638152 - DNA, 257 bp, Homo sapiens
gtcgacaataaagggcatccaaatcagtaaagaggaagtcaaactgtcactgtttgctgacgatatgatcgattacttcgaaaaccctaaagactccaccagaaagctcctaggactgataaatgaattcagcaaagtttctggatacaaaattaatgtacacaaatcagtagctcttgtttacaccaacagcaatcaagttgagagtccaaatcaagaagtgaaccccttttacaatagctggaaaaagtcgacgc

SEQ ID NO: 638153 - DNA, 240 bp, Homo sapiens
ggggccccggcccccttggggggggggggtttttttttaggggggggcccaaacccctttgggggggccctccctttgcccttttttgggggccccccctttttgctttttggtttgggccccgggggggggggaccccccctttttttttggggggggggccccccccccccctggggccctggggtttggcctccccccgtttgcccgggtaaacccttttttcgccggtttttaata

SEQ ID NO: 638154 - DNA, 393 bp, Homo sapiens
attcgcggccgcgtcgacctcgggtccaacacagacgtctatctcgcgcgtgtcaactggtttccagacagcagtacgctcgccgtacaacgggagtcgcgagatcaaaagacactggtattgctccgcgcggacgcgacatcagggtcagcgcgggagttgttgagtgagcatagcgacaaatggatcgacctcaacgataacctcgccttcgtgactcgagcccaccagctcatctgggcatcgagtcgcagcggcttccaacacctatacctttacgactgggacggtaacctcatccgcccgctgacccagggcgactggatggtcacgggcgacaatgactcgcacggcatccgcggtgtcgacgcgggcgcgaatttagtaatagta

SEQ ID NO: 638155 - DNA, 288 bp, Homo sapiens
tgagacgacgtttcactcttgttgcccacgctggagtgcaatggcacgatctcagctcactgccacctcctcctcccaggttcaagcgattatcccgcctcagcctctcgagtagctgggattacaggcacccaacaccaaacccagctaacttattgtattttcagtagagatgggatgtcaccatgttggccaggatggtcttggaacccccgacctcttaacgatccacctggaattggtttcccaaaatgttggggattacagggcacaagccactgggtctca

SEQ ID NO: 638156 - DNA, 184 bp, Homo sapiens
ttatgagacgcgggaaagagcattctccgcgcgtccctggggaagccatctcgatagactctcaagggccgtcagctccgccatggctgccgacacctgtggcttccgtggggacctggtgtgtgacgagaaggagggcgggaagggtcagtgcgaggcaacccgacctcgatacccgccgatg

SEQ ID NO: 638157 - DNA, 113 bp, Homo sapiens
cggttatggcgcaggacgctggccggcagtgccaacttcgcacgctggatatcgacgatctgctcggtgagggcctgtgactggggcctgcgtgcaggctatcgccacggcaa

SEQ ID NO: 638158 - DNA, 132 bp, Homo sapiens
  misc_feature (68)..(68): n is a, c, g, or t
ctggaaggaccataaatttaaatggagaaaggaccctcaagacaaatgacccccatcccatggggtanataagagcagtagcagcagcatctctgaacatttctctggatttgcaaccccatcatcctcagg

SEQ ID NO: 638159 - DNA, 142 bp, Homo sapiens
tggggggggggggggaaaaaaaatttggggggggaaaaaaaggggggggaaaaaaagggaaaccctaaaggggggggggccccccttttttaaaaggggccaaaaggggggggggaaacgggcccccggccaaaaataaaaa

SEQ ID NO: 638160 - DNA, 198 bp, Homo sapiens
acggtccccccggcttgctcaggtctggtgataggttcattttctactctttcatcagtgactagtaggctgggtaggtactttgtcttcttgtattatgagatgatttgaaacatgatgttcaaccgtctccctaaagtgagtagtacagacaataattgatgctgcctgctcttggctggcccattattcctttca

SEQ ID NO: 638161 - DNA, 945 bp, Homo sapiens
agcgggggggcggctgcatgcagtgcgctcagagtccacgtgatcctggcccgtgaccccgctgagactctgaggaccgcgacgagctcgtgtctgaatccgtgtcttatccaattggtgctgctccgctcctgaaccaggcgtctcacatccactgggccgcggctccgtgtcgcgtattgcgccttggcctgctgtttgcgtcagcgccctccgtggtctccgtggcagaccgttgcgtcggcctggattccagggcaggattgcgctgccgctgcagctaaccgaggctagtgcgcctcgggcctgacaatcccagcgtctcctaggcttgcagtatcgtcgcgtacttgtgaccgtgtaagacatagcctctctcctgcctagcattccggggacaaacccgtgcccaatcgaaagcatctctagctagccctggtcccgacagctcacgcacgcctttcccctcctcccgaaatggtcatctcatgtacaccccccgtccacgagcaaatgcgctagccaacacccctggacctccacaagcccctttcttgcataaggccccaggccccgtgctactgacgcgtgcgccctctcactgagccaacggggtactgagagcgggccttccctgtgacaacgcgactcactggagtcgatcgtactttgcgttcgccactgtgcatgtcccagaagcacgcaatgcagggtccctactgcgaattcgcttggagagtccccatcagccacataggcgggcaacgtgggcgagcgcgcttccagttgaaaactacagaggcgtgcccgggaggtggagggtaactgagcttcggccctaggcccaaactttggctcctaggaccctggcctcgccagcaaggctttcgttgggcaatccagggggggaactaagcgcgcagaagccctgtaccccatagcagt

SEQ ID NO: 638162 - DNA, 419 bp, Homo sapiens
  misc_feature (388)..(388): n is a, c, g, or t
cgggggccaggctatgactccagccatggcagcattatagaaaatctacccccaccctcctccaaaagcgaaatcctttccttcccagggctaccaggcttctttagaatatggatttccaactttgccctcctagctcatcccctctatgaagtggccaaaggccctcccaatgaacccctaaacccctcacataacatactccccagcttccacaaactccaaactgctcttgtcactgcgtcagctccgtccttacctgatatctcccaacctttcactctctatactgctgaaagctgaggaatagccctcggtgtcttaggacaacagaaaggaaatcctccttcctttgcccctgtagcttacctctctaaacaactagatnacacagtcaaagggtggccagcctgctttaa

SEQ ID NO: 638163 - DNA, 328 bp, Homo sapiens
gctctagagaatcccttacctggaaggacatcctactatcctgccagagctttctggagcctgttaggagcccatccctgggccgttggcagcgcctgatgcgctttgactatagatttaccttttctggccatttcatataaacagaatcatacaatatgtcgtcttttgtgtgagactgcttgtaggagtgaattacactgtaaaagctggtaaagtagctggctatcggaaccaacagagaagtctttcgaaagaatgattcctcatgggaatactttcttctttagacatgatgtctatcagaggtagggtaccgcgctcgaat

SEQ ID NO: 638164 - DNA, 255 bp, Homo sapiens
atcccaggcttatccctcctgtgtgttttcgtctagcttcttcatggtccatgctgccagctgaggttgtcagtacaatgaaaccaacctggcgggctggccgcagattcttctgccatttttccaggtctattgagttgcacgtcaaatctaggggctgatcaccccacacttgtatagcctgcctagtgcggttcacatcaatatacccagctctagaggtcctcaatgatatcaaatatcgccaatgtaaac

SEQ ID NO: 638165 - DNA, 150 bp, Homo sapiens
ctcatttggaaattgcgggatggagggatattcgaaggttggatgcaatccgagaagccagaggaagggttttggtgatgctcccaggatggtgggctcagatgggatcttaggagggggtgtttcttaggtcgcttggttcaggaggtc

SEQ ID NO: 638166 - DNA, 585 bp, Homo sapiens
tgcagctggttttctctgaaacatccctgcttccctgcttgtcactggccctgggaacggcagagctgaccaggctcccttgccccatgggctgccgggaagctcagagccgaaagggttacaattagtgttcggcttatttccaaatctattttgtgtacttattcttccccttgtcttcctctttccttgaaggcctccttcaatcctttcgagaatgaagtagagcataaacaaaccaacagaccataataacaagaacagccatcaggccagagccccacattccccaggcacctggaagagtatgggtgaggcaaacatgggagtcccaggctcggcggccaggctcagcagaccagggtgtgagtgtcagctctgccactcagtgaaggtgacatggagcaggtcctctgatccctctgaacctctcatttgtcattcactagggacacactggggataataatgacatcaacctgcagggctcttgggaagatcccacaagatcagggtgggagcttagcccagagccaggtgtccagttaggactctgtgaatgtcagataatgcatcatcatgagg

SEQ ID NO: 638167 - DNA, 938 bp, Homo sapiens
aagcttgtgtaagcacacgctgttaacctagcgttgtattcataaatgctgccgtgatacgtaaaatagaacggttttgcgcaaaccacaaaggggtaagggtccaagatactattcctcccttgtcgtcctagtctgtgtaaccgggtacacacacccctgttgtagcgccggacacaagtggcgcggaagagccgttgaccctttgtggccaagcatttgggggtccccacagcctccgatggtgccaaccctccccactactgtcttaggtccagggggagtacccccttgtgtatgtgtggtacatggtgccggcagcaaagttagtgtgccaaagggtgtataaaaccaacccggttgcccctaatgcccgccacgtgttccacacgtaaagataacgttgagaggatggggtccaccccggggttgtccccccgggagtctaaaaacaaaggtcggaaaaaacaagccgaggactattgacgactgggtatatttgcgcaattatatgaccacgcagtttcaaagtgtattccaggtgataccactcgagcaccgatgcttctcttcgccatgttattagaccaccccggctgctggttgcacggagtattaactcgccttcagatctcagagttcaccaataacccccccgcgttctcaaagttggtgaagaacatcattctacttgtatagtcgtcctatagaattacaataattttagttatggcccaccatccacgtcggcccgcttatgaatcaccccaaaagtctcgtggagtcctacaaaattaatttttttcaaatttctatcgccttctatcggaaagaacatgccccaagtgtctcccccaagataatctttttttgttttaacttttactagtcaaacagtggtggattccaaacaaaaaggcccgtcgcccacaaagaca

SEQ ID NO: 638168 - DNA, 463 bp, Homo sapiens
tttttagaggaagccaccaaaccagactgatgcaatctcccgaaaaaagtgcattttattttcacctaacatatcacatgtaacactagttaccaaattctatcctgaaatcatagaaagaaaaagattctgtgaaacagcctcaggcaaaagtagtaatggtgccgtgttgaccccacccccaaaaaacaaaattccagcccgcatatttattagggatgtgaccttgaagaagttacactctgagtgtcagtttataaaatgaatgctataggacttaatttcactggattataagagtcgtatgaataaatgaaggtttggaagaccgccaagcatctggcaagcacacaataaatggtaactattattattggccttttgtattcttctcctccaaatccagcacaattccttgtacatacaagatattcattacatttttttaaaaaagtaaatatat

SEQ ID NO: 638169 - DNA, 753 bp, Homo sapiens
tggtaaatagagacaaggtctcgctatgtggtccagcaggtgaccctcaccactcatgcccccttgggctggggggcccatttacaaagttcctttgaagcaggtatcttgcatggcccaccgggggtgaatggcccgggccatggctacctctggaaagtcaaaggccgacggcttctatttcctctgggacaaaactgggacacttccctaaacacaaaactctttggacaatactggtggggtggcctaccgggagctgggtggaagaaatggacctcaagtcactcacctctccaagaggaggataaaaactggaacctgggggagccaggtgtgttgggttcacacctggttggtaatcccagcacttggggatgggtgagtgcaggagcatggtctcgagcccaggctggggcaacatagcgagacctgtctctatttacaaaaaaaaaaccaaaaaaacacggccaatcttagaggggggtaacaaccgggttcacacacggggggtccagatcataaacacaattaagggggcaggctcccctaaggggaacgtcggccaacacacgcaacacaacaaaaaaacaacctcgggagggtcaacaatggcgggggcgggacacacgggcaacatgggcatcggccacacttggtccaggaacaggttctgggcaccgggggaacaacgagcgcgccacaaaaggaggcaaactcagaacaccggaactgaatgagacagcgagaaga

SEQ ID NO: 638170 - DNA, 237 bp, Homo sapiens
  misc_feature (46)..(46): n is a, c, g, or t
agaggatccccttgctttgggacggcgggcaccgccacacgccggntatttttgtatattagtagagacgggttcacggtgttggcaagctggtctcaactctgattcaggtgatcacctgctcggctcccaagtgctggattacaggcgtgagcacttgtgcaggactgtttctttttcttaccgcgctctgctcccatttttgccttcccatttgtgcgccgtcccaaagcacag

SEQ ID NO: 638171 - DNA, 246 bp, Homo sapiens
tagaggattactacctaaatggctgtcttgctgtagtaaatacgttggtaaatctctgtttggggctctcagctctgaaggctgtgagacccctgatttcccacttcacacctctatatttgtgtgtgtgtctttaattcctctggcaccactaggttagggtctctctgaccaagctggtctcagcaacaggcatggatcaacatgcctagctactgtttttgttgtttaaggagatgtgatctt

SEQ ID NO: 638172 - DNA, 345 bp, Homo sapiens
acgactgcagctgtgctcactcctactctgcgctgagcgatggccccgtgtctagaatctctccagttcaacttctctggcagtaaaccttgctctctgttagcaagtttattgtcattggccaggtgcaatggctcatgcctgtaatcctagcactttggaaggcccagggaggcagatcacttgaggccaggagttcgagaccagcctggccaacatggtgaaaccctgcttctactaaaaatacaaaaattagctgggtgtggtggcacacacctgtgatcccagctactcggtaggctgaggcaggagaattgcttgaacccaggaggcacagattgcagt

SEQ ID NO: 638173 - DNA, 431 bp, Homo sapiens
atgaccagcagattacgggttggctgatctgtgcactgttaagtagatagggttaaactatgagccctacttataatattgctattggttgtaccgggaattgatttatgggctttgcgatggtactaggtactaatgaggttgttagcattggggacggagacgatgaagacaattgcggtattatagactaatgggaagcgcagtatttacgatagttgtagttactaccgtagcatgtaaggtaatataatcttatgcaaattagaccagcggttcgtagcatccaatagttgagttgatggagataatgttgatgttgattatgatgttaatgttgatgttgatagtgatgatgttgattatgatgttcatgttgttgaataagatgttaatgttgatgttgataatgatgttgatgtagatgttga

SEQ ID NO: 638174 - DNA, 436 bp, Homo sapiens
tgccagtcgggagagccaggcttggatggaacatgcccacaacttgtcacccaaagcctgtcccaggactcaccctccacaaagcaaaggcagtcccgggagaaaagacggatggcaggatccaaggggctagctggatttgtttgttttcttgtctgtgtgatttttcatacagggttattttttacgagtcttggtttctcaaaatcccccttttcatgttccttttccaccatttcttctggggttcccggggtggtcacttttgtttactccattcggggcgccaagggcactatatgcagaaagtgtgctctaagaagcactttctcacctccccaaagcgggcctttttcccaaagtgccccaagagagtgcccttaagcagttgtgaacttcctgaaagggaagggcaaagagcagaggaatttggctg

SEQ ID NO: 638175 - DNA, 886 bp, Homo sapiens
ggattgcaagatcatcgtaagagtcccaggttacgtgattaattcttttgtgcttgtaaccgattggttgatgggttagacatacatttcagcagcctatgatatgaccgggaaatagggttgcgagaaggcaaaggatgaaagatatatctacaaggatacatgaggttatcatggtggtggatggattaaataggatagaaggtacatagattgtacaatgaataattagttaggagaaaagagatgatggatagctggagatgactcttatttgcactgggaatactgagaaataagtgatgttccaggtccgttcagcattgaagtgtgttgtggtctctgctgtgactaagttggttgactcggattagtggatggaatgagaaagttggaaggcaagagagaagatttgagtgggttgaaacgaacccttgtggaaaacgattctgtgcatggcagacccatgggaggcaatttggagaacctaacatcgatgttgtctaataagaatatgcttggtctaagtaattatatggtcgtgaggcatctacaatctgtcttgggatgagtagtggttgattgaattgctttatgactctactatttacatggctatcgttcttgcaagctggcataactttatagaagggggtgagttaacttgtatggatgagcgaggaagtgtctgttgggcttacgtaatcggtaatagcatgaacgagggaattagggaattcatttttcgattccacggagggagtaaagtgacttaagaattatgattggcaggaaacattaaattcggttaagcggagtttaagtctggtattaggagaacggagtattgtgaagattgtacaatcgttataaaccttttaatagg

SEQ ID NO: 638176 - DNA, 697 bp, Homo sapiens
  misc_feature (227)..(227): n is a, c, g, or t
  misc_feature (287)..(288): n is a, c, g, or t
  misc_feature (292)..(292): n is a, c, g, or t
  misc_feature (294)..(295): n is a, c, g, or t
  misc_feature (300)..(300): n is a, c, g, or t
  misc_feature (306)..(306): n is a, c, g, or t
  misc_feature (341)..(341): n is a, c, g, or t
  misc_feature (353)..(353): n is a, c, g, or t
  misc_feature (379)..(379): n is a, c, g, or t
  misc_feature (381)..(381): n is a, c, g, or t
  misc_feature (406)..(406): n is a, c, g, or t
  misc_feature (410)..(410): n is a, c, g, or t
  misc_feature (418)..(418): n is a, c, g, or t
  misc_feature (429)..(429): n is a, c, g, or t
  misc_feature (473)..(473): n is a, c, g, or t
  misc_feature (475)..(475): n is a, c, g, or t
  misc_feature (516)..(516): n is a, c, g, or t
  misc_feature (521)..(522): n is a, c, g, or t
  misc_feature (533)..(534): n is a, c, g, or t
  misc_feature (551)..(551): n is a, c, g, or t
  misc_feature (562)..(562): n is a, c, g, or t
  misc_feature (570)..(570): n is a, c, g, or t
  misc_feature (572)..(572): n is a, c, g, or t
  misc_feature (582)..(582): n is a, c, g, or t
  misc_feature (590)..(590): n is a, c, g, or t
  misc_feature (592)..(592): n is a, c, g, or t
  misc_feature (594)..(594): n is a, c, g, or t
  misc_feature (597)..(597): n is a, c, g, or t
  misc_feature (601)..(602): n is a, c, g, or t
  misc_feature (605)..(605): n is a, c, g, or t
  misc_feature (620)..(620): n is a, c, g, or t
  misc_feature (628)..(628): n is a, c, g, or t
  misc_feature (632)..(632): n is a, c, g, or t
  misc_feature (635)..(635): n is a, c, g, or t
  misc_feature (688)..(688): n is a, c, g, or t
cgagttggaggcggttggtggcagcagtaggagtgtgtagagtgctgggattgggggccaggccctgcggagggcgggggaagttgtcttcttttttttccggaggggcctggtaaacctggtggctgtttggcaagatgatttttctccgcgggttattgggtggtcattttgcctgaccccagtactcagaagctgagtctatttaatagtgggggttctttggntctgcagtttcgtgatgttattagctaagaaagtcgttgcgttctctcaaagcaggagcnntgtnanntcgcngtttantgggttttcaatcgtttgaattttttttgcattgnttataaacagancgtggcagaggcgtaaattatatgtnangctttgtacacactatagaagagtnagtnctaaggangatatattaangaagtatattttaattcctctagatagtgttaatatttggtttncnaattttcattaattttctttaagcatcaggataatgtctcntggcnntggagctggtnnggagtatgtttattgcnatggctgtggntcgggatntntttggcggtnttgctcgngnanaanaacnngtncctcaggggcacaanaggagggnagtnagnctgagtgttggggctatatggagggactgacgagctgatgccagggaagtganatggaagga

SEQ ID NO: 638177 - DNA, 262 bp, Homo sapiens
attcgcggccgcgtcgactttttttttgtggggatgaggtttcactatgtttctcagacttgtctcaaattcctgggctcaagtgatccttccgccttggcctcccaaggtgctggaattacaggcattaatcaccacgcttgccctcaagtaattttaaattcgggtacatggaagtagctagagattgcataatcagcccccgctgggactggtaaatgcctggttgcggatgccctatgtttcttcttttctacctaca

SEQ ID NO: 638178 - DNA, 614 bp, Homo sapiens
tggcaaggctctcacctcggtcagctccagctccagtgtggacacgctccgccttctttctggccgggcactcctcctccagctggttcagcttctcctccaggatcgcctgcggttccgtgcgggcgtacacttcaatagccgctcgaaggtcttttcttgcctggcgggagctgggccagcctatacggcagggcctctttcctctacagcagctcctcctctggggtctggagccgctgggcatcggcttctacccgattctggccatattggtacggggcagcatccgaacccgtcctttccacaagagccgcgggatccgcttgctagggcggacggctcagagtcttccctttggccggtgaccccataagaggcgagggggggcatattaaccatggagcgagccgttgatgcacggggacatcgtcataatgactggtgccgccggggggggtgggcatagcggtgggaggtgcccctaagatatgggtaagcagatataacaggcttgtacatgaaacagatggttggtttggctggctgaatgagatttgcagacttctccacatcaatgtagtcatagtgcagagtctccgggtctgtgacca

SEQ ID NO: 638179 - DNA, 100 bp, Homo sapiens
ggcttatcctcagtgtggaaggaactattgactcagactcgttgggcctgaaggaggagacagtctaccaggaggggcgttacaaactctggcttgtacc

SEQ ID NO: 638180 - DNA, 500 bp, Homo sapiens
  misc_feature (382)..(383): n is a, c, g, or t
taaattatgtgactactgcaagaccatgtaagtggcttggcactgttagatggggtgctttattacaacctaatgaattaagtgtactaaatttttaatcattaatttctagtatcaaaatggtgagtataaggtgtgaagttttatttaatgacttaattttgagtcttagttccaggaaagacttctaaattagaattcaccctaggataattacaactgtatttgcaaattggaagcattacagaattcattaaaaacattttatttataagacacccctgctgcttatggtaataacttttttacatgattaagtgtccatatgagacagcctttaaaaattatgtatatccatgcaatttataagctttaattaaannatcaataatgaatgtagacatttgcttgcttcccctttaccttctgccatgattgtaagtttcctgaggccttttcagccatgctgaattgtgcatcaattaaacctctttccagtt

SEQ ID NO: 638181 - DNA, 82 bp, Homo sapiens
cccttttgggggggggggggtttttttggggggttttttccccggggttttttaaagggggaaaagggttttccccccctca

SEQ ID NO: 638182 - DNA, 96 bp, Homo sapiens
cccgaggacaccgctgtgtattactgtacaagagcccgcattgtgagtggttacgattatcaggacctaggctactttgacaactggggccaggga

SEQ ID NO: 638183 - DNA, 409 bp, Homo sapiens
  misc_feature (24)..(24): n is a, c, g, or t
ggcccccttaagggttttttgggntacattgggcacagggtgttttcttttattttaaaagagcaccccccttcctccccttttgggggggggggggggtttgcccccaacaccccttttttcaggttttttttttggtttacacaaaattttggtcccacccccggggggggggcctttttggcccccatggctttcaagggttttaccccttggccccccggccccgggaaggggaaaaggggaagggaggacccttttttttgggggggtcccccccccctttgttccccccccccattttttttcccctttttccggttgccttgtggccccctttaagggggggggggcttggggggccccccctttttttttcccctttttaagggcccctgggttcccccca

SEQ ID NO: 638184 - DNA, 125 bp, Homo sapiens
cctaagttcaccttctaacaatgaggatccctcactcagctcctgtgagtctagctcaatatttactagggggcattcttttaaaaacaagggggggaaaatttttgtgggattttaagttccca

SEQ ID NO: 638185 - DNA, 999 bp, Homo sapiens
  misc_feature (455)..(455): n is a, c, g, or t
  misc_feature (457)..(457): n is a, c, g, or t
  misc_feature (538)..(538): n is a, c, g, or t
  misc_feature (591)..(591): n is a, c, g, or t
  misc_feature (616)..(616): n is a, c, g, or t
  misc_feature (672)..(672): n is a, c, g, or t
  misc_feature (690)..(690): n is a, c, g, or t
  misc_feature (748)..(748): n is a, c, g, or t
  misc_feature (955)..(955): n is a, c, g, or t
  misc_feature (959)..(959): n is a, c, g, or t
taaggccgcgcaggactgcccgaatcggaagttgcgatctgtccgaagatgagctgactaggagcacgacatgtgggaatctaggatgctcagaagcgaagaacggtacgctgcctgcattcagcgtgcgttgttcccaatcattagtatactcgacgacactgcagacgaatcgtgagactaagtgctggcggtgactgtatgcgagacgcttgaggagcatcacgattgatcgtgcacatactcatgacgacgagctaactacgctgactgactgacgctgaatttatgcaagctctcgctgactagtgacttaggtagctatcatacatgctgtggcatgctgactaactcagacgtgacttagtctacgatcagactgtatgtacgattctagctaccatgcaatacgctattcaagtacgctcactactgaacattcatcagtttcattngnagcggcacgaaccacaccaacacccacgacgagggcgcgcgctgggagtggtgttggtgtgtgatatgagatgtgtggcgntccgccactatactacagcccgccctgggtgagggcggcaggtgaagtgcgcntccatgtgtatattgttgcccgctntgattaggtgatgttgtccggctccctcgttcgtgtgcatctgcctactgacgacngcactcctatctttcacntatttatattttaatttatataaataacaacaccgccatgaccttatatattatgtcngtggttgttggtgggtgtggtgcggaaacgtaatctctcttcttttcctctcttctgactcaccccccgcgcggcggtgctgtgtgtggtggggggtgggttggtggtgatcaggcaccacccctcactgattgttgttagttttatcatcatacacctgcaccgcgagggtcggtgggtggtcgacacgacagacacaccgaccgnctgnattattatatttatcttctcctctctcgagcgggggcagc

SEQ ID NO: 638186 - DNA, 306 bp, Homo sapiens
cgcggacgtacttgccacttggtgaaaccttctatgtgcttttaagactcagcttgagctccttcaggacttctttagcaccttatgtttcctctgttatagtactgaacacattggattatataactgtatagtcttatgtttatagggctgcacccctagcataaggaagttgccaggctagggtttgaatcggagctacagttgccggcttacaccacagtcacagcaacactagatccaagccacaatctgtgacctatgtcacaactcacggacacaccagatcagacctctaccagaccg

SEQ ID NO: 638187 - DNA, 224 bp, Homo sapiens
gcctggttatgacattccacattcagtgctgtgggttcattaaacaccggtgaacctggtgcctacattatggatggactgaggtctggaattcaacctttctcttgtacagttctgtggcatttgccaaatgcataatgctgtacagccacaaatgatagtatcgtccagagtagttctcctgccttaaaatctcttttgctgcacctgtttctctctcccca

SEQ ID NO: 638188 - DNA, 1824 bp, Homo sapiens
  misc_feature (1647)..(1647): n is a, c, g, or t
tgctggctagcgtgcttgtgttttctttctacgtcatgtgaggatatgtcttctagagtagatctacgttatgcggtgtgtgtcctcactactgttgttgccactcggtggtggatgactcacctcattcgctcttctctcctacttctttgggttgaatgattttgttgtcgttgctcattctgttgctttcatgctggcggtcctcgtctattatttagttgtgtctcatccactttttgtgggcgtcgctacccaaccaccccactcctcgggtgggtgttttgaccaccactccccgctgtggtttgccccaccaccccatctgggtgggggggtgtcaacaccacgacccgcgcggtccgcgtgtgtttgtaccctgtcgggcaccacgttcacttatcttttggtgttggtctcttctcctcctgcccatgcatctggtggtgcgccagttagattaacacatgtgggggcgcccctgttgtccagaaacgcggttgtccaccctagtttggtgttgtgaagtatccgtcttgtggtttggttgtcccgcgccctttttgcatgacgcatcctcctcgctgtggtgagttaccctccccccgcactgtttgttgtggttcggttgttttcgacacagcacgttgtttctcgggggatgtttttctctctcccccccagcgaggggtgttttttgtggtgttcctccctgagtgaacacacgatgaagtgggggtctggcccccctgcggtgtacatccccccctcctctctctctcggtctccgcatgttacacttctcccatcccccggcgggggtgcgccttgtttgtttttctctcccgctgggtgtgtccgagagtggtgtccccctcctgatgatgagagagagtgtgttgtcagatggtgagagacaccacaggcattggtgttcttttatatcatctgctgtcgccagctcagacacacatcgtgacttcacgcactgtctactttcttttgtgttgtggtgaagagagagtgagatgtgtccctctccccctcacactgctgtgttctcagcagaagacacccaccctctcttctgtgtgagtgagacactctgctcacacactctctctgctgtgtggtctctctcacaacagagtgttgttgacactcctgtctccacgctctctctgctgtgcgccactactgtgtgctcgcaccactcgctctctctcgcagagagatgtctctgctctcagcaggcgcgctctactctctgctggacgacacactgctgtgtctctctggcacactagtgtgtctctctcccccggagagagcgctcctctctctctctcacactctgtggagacacacaccgcggcgcaggggccatctcggagcagcagcaagagaggagagagttatctccgcgcgaggtgctagagagagaccacacacactcggtggcacactctctctctctctctctctagagagatattctcacccctgctctccccgcagagaaacccacccccagcacagagagagagagagagagagagagagtattctcgcgggagagggaggcccacagagagagggggccctaagaggccgaggacaccaccctctccaccctccgcggtgttnttccgagtgtcccctctagacacctggctgttttttcccccggccccctcttctctcttccccccgggaatttgggtttgccccctcttttttttttttttgtttttttttttgggggggtgtttaaacacagcccgggcaaaaattagcgccccccaaaaaaaaatttttttttga

SEQ ID NO: 638189 - DNA, 1160 bp, Homo sapiens
  misc_feature (1156)..(1156): n is a, c, g, or t
gctctggggcggtcgcgttggcagcgagatgcggagaagccggactctgggccgtcatgtactacaagttaagtggcttcactgcagaaagttgggcaggagcatggggcttcggaggccctataggccccgcagtgcataaaagccgtggtggttatccaaaagaatgcaaccacctaatccatattgggccaccaaccagacttaaaattggacctccggatctccaccaggggtactgaacataatgcgtggggacaaaaaccaatgttcccagaagcttaacaaaaaagttttttccagaacacgctcgatggttgttgcccggtttatacctgaaacgggaggcctgccggacccaaattggattaaaaccgggacaaacaatggtgagctgaatggtggcaaggaacccattctaatggccctggatcggcaccttctaaatggtctctcggaagcccaacaaaccacattgaagtacggctgcagaagtgcaccttggatatggcgacattgtgggcaatcacccactcttttggaaagcttcccttatcgcaaacattggtcaaaattacagagcctttgaggcatataacgttggcactgcgcttaacccattccttgggcaagaaaataattacggccaccattctggcaccatatgcatgttacgtgggatagtgacatagtgaaattggatataagggttggttaggagaataaattagaaaaggtgaaaggaccattggggaacaggaaatgggtggctttggcgggtgttttggtgactcaaggaatatcactgaaggttgcgtgaattaaggttgtacacaggtcggtaaacggcagaccggtacggacgacccaagggacaggagagggacacgagaaacaaggggagcagaacgccttgggacaggccacgtgccacgtcaccgaacaggagacgaggcatggcgtttaagatgagattggtgatacgacggagatgatacattggggaaaggggtatatggaggcgagatgtgagagaagagagggagtacgctatatagtgacagttgtataggggaaaaaatttggaatagatgtcgtggaagaacattattgaaaagtgggtgaaaaaagcgtgtgttgatggttgtgatattgnagag

SEQ ID NO: 638190 - DNA, 151 bp, Homo sapiens
  misc_feature (118)..(118): n is a, c, g, or t
aacagtgcactgaagcaaggcaaagtgttgaaatctcttaaagaaacaaaacagaattgaaggatttggatgaagatgccaatggaataacagatgaggggaaagaaattaatgaaanaagttctcgcgtcgtagagagatctcttctcgt

SEQ ID NO: 638191 - DNA, 189 bp, Homo sapiens
gatggacgaagtagtggccggacacgtaataggagtcctgagatgtagcagaaatcgggggtatgctgttcgaattcataagaacagaggaggttagaagtagggtcttggtgacaaaacatgttgtgtagagttcaggggagagtacgtacgtgtccggccacaacggtccggctacgtgtccggcca

SEQ ID NO: 638192 - DNA, 843 bp, Homo sapiens
  misc_feature (72)..(72): n is a, c, g, or t
  misc_feature (76)..(76): n is a, c, g, or t
  misc_feature (84)..(84): n is a, c, g, or t
  misc_feature (97)..(97): n is a, c, g, or t
  misc_feature (105)..(105): n is a, c, g, or t
  misc_feature (133)..(133): n is a, c, g, or t
  misc_feature (138)..(138): n is a, c, g, or t
  misc_feature (196)..(197): n is a, c, g, or t
  misc_feature (204)..(205): n is a, c, g, or t
  misc_feature (226)..(226): n is a, c, g, or t
  misc_feature (239)..(239): n is a, c, g, or t
gtatttaactacatctgcctcggctcacaaattccgattagacctttatccagctagtgccaaataatgatnagangctgaatnagaataagaattnaggtctanattctggtgttaatttagagcgttggtnaaagnatgtccttcagctgactccagtataatctcctctgctcattaaactgattccaggagnntggattnnctgtgactagatacagatggngcaaatgtcctancagagaaatagaggtgatgctgctaacaggcgagaaactgccaggcgcacaaagttcagtgtcgggaatttctcccccgtgaccattcactggggccatgcaaggattcgcaacggacagttccccacttcggctcctccgctctttctctcccctctcctttctctattcagcctagaatctctgccgggcccgactggctcggcgctcctcactgtgtctgtgctcgcttcccactgctctgaacagcgctactccctgccggcacaagtccctgcctctccatactctagccattctatttctctggcaacactccacctccaccccccaaaagcaacactgcgtactcgacgtctcaaccgcatcccagcatccccagccctcagctgctccactcatcccaaggacacccaccagccccatcgccactaacccccccaacccacacccaccctccgcaccgtagcgcctcaccccacggccccacactcacggcacgccgcgccccaccggcaggcccgcaccacccccactgcgcaccacgcccctcgccgacacccccgccctcacgcacacaggcggcaccccacacccaaccccg

SEQ ID NO: 638193 - DNA, 1497 bp, Homo sapiens
  misc_feature (1140)..(1140): n is a, c, g, or t
aagccaagagaatagtacagggaccagactcgtcttcagggccatatttgccttgctccaaacctccaacggcctaaaagctcagatacaatgcgtaatatacatccacatactcatgtagaaatagcatactgattcagcttctcgccatccttaatggactttcacacggttgactataacgcacgcttagcacagtgcatgatggctcggcaaactagcgtgacggatataagctagatcttacgcacagaaacattagccacacgtaggtgctcgtcgggtctacgcatcgtggtcttaacaacgtctctagcaaccgcagtcgtcaatgataagcaaaggcaaataactccggctgagtccgcacactagcaaattgctattgtggtaacttacatgtaaatgacaaaatccaagaagggaagctatctaaacacataagcagatcccttaagcacagagataggagatcacgagataggaagaggcactaatagaacaccaaccaagtgcgagtaggaatactgtgcatcgcataagacattgtataggcaccaagccattgggacaaccacttagatcggcaaaccaggtggcaagttgaaccttcactaatttggcaacatcagaggatctagcaatcttgctcgaacgggtactgtttatagagtcggaatcacgtagacttgaagtatcagttaccagccaagctttattgcattagaggaataatgctacggcactatcttgaataaagaaatctcatgcattgcaagcaggaatcaccagggcttaggtgagcacaatagagaagttcatgacaccggtgagaaagcgcgagaagattacgatacaagccacacaaggataggatagcattcagaccaagccagacaagtcattattgcatgtcgcgcagaaggatagatttcgctcgtctgggccttccacttgagcggacatttgagagcgcgttcaactatcacactattagagtcaaaggttggtcccacgacatgaacgcgatgatacacattcgacatgtctatgggaattaaagtagtaatacgacagacgagaagtgaaaggttactaatcgtaaccaacaactagaggacgaagcgaatagaactaggntagtagagacgctcgacatcactaatagacaacggaaggaagggaacgaggaacatgaacagaagacgtgcgggatttaggaggacgcagagtaggagaggacaagacacaatgacgaggatgagagagcagacaatagagagtgtacactacagacagagagacacatatataggaggagatagaaggagagacgaaaaacagtagaggagagaacgagatagacagagcgtacataagagatatgaacaaaaaatagaataaaaacagagcacagaaagagtaagaaaaggaggagaagacacatacgaaaaagaagagagaggaagcagagaaaacacagaaagaagtaagaaa

SEQ ID NO: 638194 - DNA, 343 bp, Homo sapiens
ttttttgtggatggagggaggtgaggaagagtttcactcattgcccaggctggagtggagaggaggaagtggggagagagggtaaaagtaagggaggggtgaagtaaagctgcgggcgcaggcgcaggaggagcaggcaggagaggtgacgccaccatgcgcagcgaagttttgtattgttagtaaagacagggttccactatgtcggtcaggctgatctcgaacttctgacctcaggtgatccaaccgcctcggcctcccaaagtgctgggattacaggtgtgagccaccatgcccagccagcaaacagttttaatttcactgtagtcttggtcctctttga

SEQ ID NO: 638195 - DNA, 324 bp, Homo sapiens
  misc_feature (70)..(70): n is a, c, g, or t
tccctttctctttttccggagtctcgctctgttgcccaggctggacctgactggtgtgatctcagctcantgcaagctcttgttcccaggttcacgccattctcctgcctaagcctcccaagtagctgagactacaggcgccgcaccacgcccagctaatttttttgtatttttagtagagacggggtttcaccatgtctagcaggatggtctccatctcctgaccttgtgatctgcccaccttggcctcccaaaatgctgggattacaggtgtgagtcttgcgcccggcctacttgagtcattctaaagccagtaatagttca

SEQ ID NO: 638196 - DNA, 101 bp, Homo sapiens
tgcaccacagctcctgagtcagtatggattacgggcatgcgcaccaaccctgctaatatctgtgttactagtagagacagggttcctccatgtaggtcagg

SEQ ID NO: 638197 - DNA, 1095 bp, Homo sapiens
gccagagcgagaggaacaggaacagcaggcagaggtttcaaacgccaacccccacccctggaaggcaccagccaggatgtgaccacagtgacactcctgctgcgagaccccacctgggagacacatccagctcagctgcctcactccagctaggttcgaccccacccctgccgtcatcctgagcctccaagttggagcctgccgaggcccagtgtccttacagtctgaggttccaggcaggcccagagccaccgcgccctagtactcgaccctaagaccgaccaggccctgatgcctttcagggagtttctaccaacggctacacgcgcaagtcgaatctgacgtggcacaacggtagaggtccaacaatgtcttcttgatcgtagggcgcccaatagcagacacaccggcttgcccgagagtctcgccagccagagggccctactgagcagcaacgaaagcatacgtaggctaggcacacctcgacgcgctagcgcaagagagcttccacttgtctcggtggcgtcaacttccaccctgcacgaaaccatgcccccaggaaacccgcaaggagttcgcattccccattctttggcccatcgggcaactaacaattctatctcctagcgggccttggcatctggagtggctggtcgcacttcgaagttttcaagctaaatgtttccgaaccaattcggtgaattctccgtgcacatgtagtgcgccttgcctttggtggcatccccaacgtgcactaggtccaccaactctcctcaagtgggcttgcctcctcgtaagaggctacgcacgcgttgaaccacttccagggagaagggatcttacacctagggggcgttccgcagcgcagcctgtacaaatctggagagatggctaccacttcttaagcccatcgcagtctcttctacccgggggggctttcacattcacttccaggctcgcggtcggactgcaataactagagggttatacgtcttcgtcccatgggagcggtccaatctttatggggaaggggtacttctaacggtttaacaatgacggtccattatgccccttgcgttggagacccccaaagag

SEQ ID NO: 638198 - DNA, 86 bp, Homo sapiens
ctgagtttggggggccccttttttgtgacttttcaaaacagtgaattactgtccccttgatggccaagtttcaataaaactttgta

SEQ ID NO: 638199 - DNA, 851 bp, Homo sapiens
ccccgcgaatttgggggcgctgatttattccccaccaggtattggtccgccagacaagttttccgccccagggggttccgcccccataataattggggttatctcgctgggccctcccccccaatagtccgacaaatcctaagtgtgccgctggcaagacactttatgtgtacctatggctggtccacgcccgcggccaaaagagactaaatctttgggcggcccacgcctctatgaccaaggatgcgcatactcttctggcggagcccttctcaccagaggaacatcgatggtggaccctcctcctgtgcacacagaggaaagtatcattaatcacccgacgcgccgactaactccacctagctcggccgtttcttctcagcaattccgccccccactatgaggaacaaatagacatatatttaagtactgtgggaaaaacatttctccccacccaccctctagcgggaaaaaaagaagagtccttcttctgctcactctcgactaactaaattaacaagaatcctagacttactagaaacagcacccactccgcgccatttcaccatgtcctccaaaatattatttcacccctatggaaccaaccacatgtcgccgccacagttgttgtggcaagccgtgatgccacagcgggggcgtaatatgcggtgagtcccagacccattctacgggctctagcccgtctttctccccaaaaatattctgtccccctcgtagatcgtcttggtaagtgagggcaagagtgagagataggacggttcttcaggtagtccgccggccttatcatattctctctaggcaaattagatatacacacaacccacatgcac

SEQ ID NO: 638200 - DNA, 1042 bp, Homo sapiens
ggggtggtgcacagagctgtcgtgcgaggtacgggcgcgtgtccgaatggtttctgtaggtctccatcatctcggagacatctgtcccgcgagtggtgacgaattcatagtgttgactctagcaatcacgcggctatcgcgccagagttgagctctgaggctacgagttgatggaaaggaccgggatgccattgaacagtgcagtgtcgaggtgacagcgagcctggagtgctgtcattggctatccggcgacaagatgcctcgagtgagaacctagtgtcacggacccatgcctggcccgaattgcaggacagtctgttcaacagcattgcggtgagggcctcgagcggagtgcgcacgcggcagcacagtatgtgatggcactcaagacaaggggcacttcgcatggatgaatatgccgttccgggtttgcatagtcaacggatcatggacacgtgctgacgcatggagtgcaggaatgccaggagaatgactccgaggacctagaccctctaatgatggctggcacgtggtggcaagaacatgcacgtcactgatccccatggatggcgaccatggatgagctaagggggatgagctcgctttgggtgggctcgatcgcgtggatcgcctggataggttgcttggagattcctgacagccagtagttcctcgggagccacgtcatacgagggttgcgacgagagacctggcacgccttggcccagtagacagcacgggcatgggacgtaggatcgaaggcgagctagcgtgcgagggggaacgcccagggacgggggcggtgcgaaacacccattatctcctccttcccggatgggaataacgcttggccctccgtcgcggagacgttggcagtgcatggcggctgaagcagattgggcggtagcccttggccggggaacgagccgagacatgcggttggatatggaaggttccctggttctggattcctttcgtagaccggattaacccgagaggccattgattacggctccgtggcagccaaactgcggtggaaggc

SEQ ID NO: 638201 - DNA, 147 bp, Homo sapiens
caatgtttcatgtgtagaaattgaattcaagggctgcgcgcggtggctcatgcctgtaatcccagcactttgtttattagcctatctcgccccttaggaattctttttctttacctcactccttagaaattctttttaaacattcag

SEQ ID NO: 638202 - DNA, 1578 bp, Homo sapiens
  misc_feature (289)..(289): n is a, c, g, or t
  misc_feature (316)..(316): n is a, c, g, or t
  misc_feature (672)..(672): n is a, c, g, or t
ggaagcagtccgcgacggagagtgcgaagagacgctaccggcaggtcaacttcatggatctgggtacccctagcggtccgggaaattggtgtacacacttcttcctgtggtgatgcgaagtccgtccaactgagccccacagtgtgctttctgatcctagagcaggacagtgaaggagtgcataaaccgcgagactgaccacacacgattccaactgtccgagcctgcagacccaatgttctgctctctaagacacttgcttcagtctgcgaggggtgcgagctatgtntcgctgagagttcccgaggtgttctcntccacgttccctaccttcgcgttgtcagttatagctccgccgcgtgttcgcggaggaggacgcatgccgcgaaagagctggcctgcccctagtatttggccacactctttcgatcgcccaagcaccccgccgttgaaaaggtaatcctcacaaagagtttgcgcgtcggtagggagaacactccacgatacgagggagggggaaggattgccaacttcaccttcgatagtatctagcgccttaacagcttgtcaattgccttaatcgtaccgagggattttagatccggggactttgacccattgggtcaatcgcattgaacggtcacaaacggtacattgtgggttgcgaaagcncgaaccaaagggaaccggaaagggcaaatttctgtggaccacgcgctctctaaaaggtacccatcggtccgtcagcggaatagtgttcgccaaagaattgcgcactccataagacgtgtgcgccttgcaacaatagagggtcgccttacgggagtttggttcggggagggtgaaggcgctttttcgtcacaaagtcgggcacgccatactcgcggggcgttccgggacaagccgcgcatagacccgcttgtgatgtgtggtgcatgcgcattatgggccacctatgacattgtggttagattcagcgcttactttctctcttgaaggtaaatttttccagggcattgagaagcagaggagagttccaagtttctagttccggaaagcggcgggaaccgcgaggttagttgcggtttacccatttcttatggctttggtgcccctaggtgaagagagcaaaacggcgtgctggaagcgtgtagacgacttggaggggcgcaacggtcggtgtagtcggtcccgggcaaatgccgtaatgcttatcgcaattggtcttgtgtggagcgcgtttttaggacgtgaatctcatgttgggaggaaatccctgggcgggacgatttccccctccatattgagtgttcgcagccagaggggaagggaacctccccagaattcagcgcgttatatgcctttgtcgattggagccctcgttaggccatcggataaacgggcagtaggggaaagcaagattatcttttcccggggggcacgaaggtgaaaccgtggaggcgggcagggtaagaaagtgttcccggggcactcgcgtagcggtgacatcacgttggcacggttccttcgtggaggacccgttgtggtgggagtatatgaaaacccccacatttctgg

SEQ ID NO: 638203 - DNA, 932 bp, Homo sapiens
  misc_feature (823)..(823): n is a, c, g, or t
cgaagaaaggggctccgcgattacagtgaggatggctgttgtatcctctgtctgattgtatggcagaggatttgtgtgcgcgctgtgcgagcgtccaactttggcggtgcttcggttactgggcggtgcatccgaggagtggctagacgtatcggcatagtaacgcgcgctagcgaagcgatccagactgtcagtactacaacgaattctgctgctattgggctcaggttctgggtctcgcgagtcagtgatcgtgtggtcagcctctgtgaggggtagatatggcgaactgtatactgggacgtgattacagcgggtggaaagtaggtgtccactgctgcttgtgaccgagtgcggtaaacctctccagtcataaggtggtgcgtcgctgactcgctattcacaggtgctagaagtacgactagtgtacacgactggggcacgttttgccttaccgataagcttggcgcgggatgacttgatatccggctacttggctgggagagccaagcgtaggaaagtaggttggcattttaggataggagtgacagcgtagttataaggagaccatattcttggtaagttgaaccgtggtcaccgtgggcacgttgtaaaatgggacctctacagtgatgtttggagaacaatgtgtgactggtgcggctctcagaaacgaagtacgtatctcgaaatgacgtgttcactagactgatctgttaccaggtggtgaatactcccagttgtcggtacggactcgtcttccctgttgaggtgttcaaggatggttgacaatggtcatggttgccagatctaaagtcccaanagcacacttagcatgggagtttgccatggaaggtcattctgcctttgggcccgtgggggggctagtgccaatgttaaaaaccacaaccagggtccccgcagttggattc

SEQ ID NO: 638204 - DNA, 148 bp, Homo sapiens
  misc_feature (107)..(107): n is a, c, g, or t
gtggaccaagggcttcagtaaccacccgagggtgcacctgacgaagaggttctacgagtgtggtcactgtgggaaaggcttcaggcagctggggttcttcatgaggnatcagaggattcacagccacggggaggtgtagtggtgcccg

SEQ ID NO: 638205 - DNA, 352 bp, Homo sapiens
taccgtactgcgctggatatggtggccacaacccggcatgctgggttcactgctgcgtgactttgttcttggttttcttatccataggatggggctgtgaacactgcctctacctggggcagcaggtgagccattctgaggccattcctagagtgggggctttgggatgatcgtgcactctctgtggaaggaggtgcaagggcactggaggaggtggggctggttttcattctgaccctgccatttcccagctgtggtccctgtgtgtgtcacttgacccctccagcaccaagaaatggatgaaaagtagcgtctcctttgtgggttgttgtgggttcaagtgtcagcctag

SEQ ID NO: 638206 - DNA, 417 bp, Homo sapiens
ttatgcagaaggaatccttgaatgccgcacatatcgatcttgaatacacgtgtcctatacttcccttcggtactctaaggagcttatgtgtttgtatgtctgtaacgctgcagtcttgaagaagcaagtaaacaatccgctcttcgcagtagggtgaagtgacttagtcttggctccataagcatgcactcagtgtaatatcaccttcataatactaattcaaaaaaggttaactcctaataactttgtcatacaaccgcaagagataacttcagtgacagtcccaaagcatgtgttcagcaacgtggtgtccatgctgtcgcagcagggcgctcctttcaactaaggagctccgggtgtctgtgtagaaccatcctcaccctagaaaggggcaaactccatcgcgcggcccccgcg

SEQ ID NO: 638207 - DNA, 423 bp, Homo sapiens
  misc_feature (218)..(218): n is a, c, g, or t
accatagaaattcaggcttctattctctggcccacagcctgtagctgtttctagtctcacaagctcccatccttttagacctttttaggtgtgactttcgatttgaggggtgattattttgctaataataatgaaacataattgtcgtaacagtaacattaatactcattagtctccattgagtacttggttggagaaagcactttagaggtatggantcacgcttagcacctcctaggagataagttaactgttgccatcactgttttacaaagcactcggaaactcggaattttcctttcccaagatccactagcctttggtaaagccagaagactgacttgaaaactcaagctctttcctatgctgaactgctgcttctatggaattttgtatcattcgattagaacataatttcatttt

SEQ ID NO: 638208 - DNA, 410 bp, Homo sapiens
ctggtatccccacccaactcttttaaagtcgtgctgcgggatgggatatggcgtgcgtggggtaagggtgattaggtttaatgagacggtaaggggtgcatgatcggtcgccaaggagggagtagaggtatcttatacttgtgggttaaggtggggggatacaagaggaggatgcaaaggaggcttgggatagggaagaagggcggcaatgagatatagctgtagtccaggaatagtcagggaagcagataatttagttaaagtgtctcagcctaataagggaactgggcaggtggggataactaaaaaggagtgctgaagactgatgctgcccgatcgcctcagaagccacgtagaccatcacggatgccgagctgtttcccccccccccccacaacagcacacgcgga

SEQ ID NO: 638209 - DNA, 946 bp, Homo sapiens
  misc_feature (28)..(28): n is a, c, g, or t
  misc_feature (62)..(62): n is a, c, g, or t
  misc_feature (66)..(66): n is a, c, g, or t
  misc_feature (96)..(96): n is a, c, g, or t
  misc_feature (99)..(99): n is a, c, g, or t
  misc_feature (108)..(113): n is a, c, g, or t
  misc_feature (195)..(195): n is a, c, g, or t
  misc_feature (260)..(260): n is a, c, g, or t
  misc_feature (324)..(324): n is a, c, g, or t
  misc_feature (389)..(391): n is a, c, g, or t
  misc_feature (400)..(400): n is a, c, g, or t
  misc_feature (730)..(730): n is a, c, g, or t
  misc_feature (760)..(760): n is a, c, g, or t
  misc_feature (767)..(767): n is a, c, g, or t
  misc_feature (769)..(769): n is a, c, g, or t
  misc_feature (779)..(779): n is a, c, g, or t
  misc_feature (790)..(790): n is a, c, g, or t
  misc_feature (795)..(795): n is a, c, g, or t
  misc_feature (798)..(799): n is a, c, g, or t
  misc_feature (829)..(829): n is a, c, g, or t
  misc_feature (922)..(922): n is a, c, g, or t
taaaacactgcttcttaaagttcaatgngcatacaaatcacctgaggattttgttaaactgnagantgatttagtaaatctggggcagggcctaangtnttgcatttnnnnnntttttctttttttttgacgcaggatccaaagcagtagagattttgcatttcaaatataagattcccgggatgatgctgatgntttcttgtaaggttctaaagggtgttaaattagccgatgactcgaattagcagaaaaagggatgngccaactgtacacataatccaaaagcccatggggtagacctcatgtgcatggctggatccaganggccacataatgttatctagtgtaatgatatttggtcatttctcaggttggactttctttgtgtnnntttcattcncaagcaggctctccccaggtggtggcaaagatgatcgccattagctccaggcttacatcctaccagctcaacaggagactcattctcaaagtgctagtaagctggcttgcatcacatgaccaattactgtggccaggggagagactactttgactggccaggcctgggtcatgtgaccatctctggagccaggggatggatgagtgactaggggagggtcatccacgtccttggtccagcagtggtcacagaacccatagggaatggaggagaggctggagggaagctggggttccagttcttcaccttgtgaatcccctctcccgatangggggccttctcggaagtgatcctggcaanaaaaaanangaagcaaaanctggtggccancaaangcnntgccaaggaggcccgcttgggcccagccancataaggtccccacaggctccgggaaaaagtttcccagttccttgttggtcctgggggctcggtcccttcgcctgggacgtggtagggtgcanctgtagtcacgttgggcaatgtgc

SEQ ID NO: 638210 - DNA, 422 bp, Homo sapiens
  misc_feature (47)..(47): n is a, c, g, or t
  misc_feature (64)..(64): n is a, c, g, or t
  misc_feature (415)..(415): n is a, c, g, or t
aaagaagcttgaaaagtccttactaaagtttatttagcaaatctggnacacttgactaaaaaancctttaactcacttgttaaggggcgataagacttggcaatttgattacgcacaaatatgttatccaacgagtatttattgctggtctgaggcttgccttgtttacacttaagtagatttacgttgtttccacaaatggcagatatcaacatttaaaggaatttaatagtgacctattcaataaggcaatcatcttggtagcaaacttttatttaatcttactaactcaagctttataaaagccaacataattgaaaattgggttctccctctaagccttaagtattcaagctcaaaacagttaatttaaaaatagcaaacaataaaacaaaaaaacctgccgcagatctgntgaatat

SEQ ID NO: 638211 - DNA, 190 bp, Homo sapiens
caggtgtatcacagacgtctcgctcgtctgcacgtggacttgcctggcgcttgacgtgtgtgcctcccgtttctgggcctccccagtgtgacggcctggcccttgcccaccatgacctgggtgctctgagcccacggttcccacggcgctgacttctccggggtgcctgtgccctacattcaacccggct

SEQ ID NO: 638212 - DNA, 770 bp, Homo sapiens
ggtaaacccagcccatgacccctaacaggggccctctcagctcgctcctaatgacctcgcggcctatgccatgtgatttcacttccactccataacgctcctcatactaggccgtactaaccaacagactaaccatataccaggtgatggcgcgactgtaacacgagaaagcacatagcaaggccaccacagaccacctgtccaaaaaggccttcgatacgggataatcctattgtattaccgtcagaagtttgtttcttctgctaggatttttcgtgagccattttaccactccagccttagccgcctagcccccgaattaggagggcactggccccggaacaggcatcaccccgctaaatcccctagaagtcccactcctaaacagcatcgcgtgattgactcgcgtcaggagtatcaattcacgctgagctcaccatagtctaatagaaaacaagccgagaaccgaaataatgcaatgcactgctcattagcaattttactgggtctctattttaccctcctacaagcctcagagtacttcgagtctcccattgagcatttccgacggcatctacggctcaacattgttagtagccacaggcttccacggacttcacgtcattattgggctcaactttcctcactatctgtttcatccggcaactaatatttcactttacatccaagagatcactttggcttcgaagccgccgcctgatactgacatttggtagatgtggttggacgtatatctggtatgtctccat

SEQ ID NO: 638213 - DNA, 186 bp, Homo sapiens
tcctcacctccctgtcgggctagtggggccgactagccgagagggatggtctgacccataccggagcccaagagaaggggcatcttccgtcagattgacagtggcagctcctcaccattcatcaccagcccccagcatagtcccagtacatgacaggggctagtgctggtggggctaggtcggggg

SEQ ID NO: 638214 - DNA, 136 bp, Homo sapiens
tctcacgactccccgtacgcgcctgggaacgacgggcgccagcttgacgggcaggatcctgctcaacccccaggacaaggatggctcattcagtgtggtgctcacaggcctgaggaaggaggatgcagggcgctga

SEQ ID NO: 638215 - DNA, 439 bp, Homo sapiens
gagctgcatcaatcatcttgtgaccttaaagagacaagcctgaggataagaagacatggaggagggcagagcgaaggccaggaggaagcctggatcctgaccatacggctgagctacagatcagtttctaaggccagacttctggctatgttagggattgattgagttatcacccaaaccaggatccttttcagaatggaagtgggtactatcagaaatagcacaataccaacatggcacagtgggacatgtggtcagccctatgtgaggtctcggagtgttattattgctgtcacaaatattctactacttgcaacccaaatcagtcctagcttatatatatataatatataaattatatattttaattatctatttatagcatacatatggctaaaatatgtataataaatatgcaataaaatgtatataataacat

SEQ ID NO: 638216 - DNA, 431 bp, Homo sapiens
  misc_feature (1)..(1): n is a, c, g, or t
  misc_feature (41)..(41): n is a, c, g, or t
  misc_feature (76)..(76): n is a, c, g, or t
ncgaattaatggcattcaacagcaaccctggatggaaatgnagactattaattcctaaagtgaaagtaactcaggnagagaaaacccaaacatgtttggtatgttctcactcataaatgggagctaagctatgaggatacaaaggcataagaatgacaagaatgtctgggcacaagtgcacgcctataatcccaccattttgggaggcgaggcaggtggatcacctgaggtcaggagtttgagaccagtctgggcaacatggtgaaaccctgtctctacttaaaatacaaaaattagccaggtgtggtggcgtgtgcctgtagtcccagctacttgggaggctgaggcaggaaaatcacttgaacccaggaggtggaggttgcagtgagccgagatcacaccattgcactccagtctgggtgacagagtcg

SEQ ID NO: 638217 - DNA, 108 bp, Homo sapiens
agcagcagtagccaccactccgccgaggccgcaaccccggctcggcctcccaggccccggcccttgccgcagttaattggcttccttattgggttgaacggaacgctt

SEQ ID NO: 638218 - DNA, 221 bp, Homo sapiens
actatcccataaacatagtatgataatgcagccgcagggttgacaaggactaacatatttgaaatcagttctactgtgcataaactactatcaaacagcctctcatgtccaaagaaatctttagtaaaaggacgagtcaattgatatgagaaacttcagtattgtcttattttaataaactgtcacagccacaccagtctacagaaaactccatcctgacc

SEQ ID NO: 638219 - DNA, 137 bp, Homo sapiens
  misc_feature (36)..(36): n is a, c, g, or t
ggtcgaagcccccatcgctgggtcaatagtacttgncgcaggtctgtgaactaggcggctattgtacaatacgccctacagtcattctctaaccccctgacaaaacacatatgcctaccccttccttgtactctccc

SEQ ID NO: 638220 - DNA, 849 bp, Homo sapiens
agcgggccgccgccgtcgccgacttaaacttggagggggaaaaagagctactggcgcctggcgacctccctgccatagcggggaatgggtgggtgaatcacggcatcgcacgaacagaatcacaacatgtgatactactgcagattgcggtgagagacccttatataccccacatacaagaactcgagggaccggagaatgaggaataaaacgggacggtcgagggtaacagaagataacacacaatgaacactatggacatcaaacaaaggaacaggcatgaacacatgagcattacaggctcgaactcagcaagagagctgcatagacgaggaggacaaaatgacacaaaaacagaaaattaaatagtacaagacaagaaaaagaaaaaaaaacacaaaggcaacacaacaagaaacaaggcaacaaaataagaggcacacaaaagcagcagacagagagaaagaagtacagatgttagaaaagaaaacaagaaacaaaaaaattaacaccaccaaacagaacaactcagagaaagaacaaaaaacaagaacaagataaactcacagaaacacacgaagaacaacgaggcacaaacaaagaagccaaaaaacaagagaacagacgtacaaagaacaaccataatcataacaccgaacaagaaaacaaaaaagaaaaagaaacaaagaaacaacaagagaaaacacaagaggaaaaaagtaaaacaaacaacacagaacgaaactaaacacaacagtaacacacacaaatacaggacgaaggaacacaccaacagagaactgagacgacaagaagacacaacgaccagacaccacaagcaaaaacaga

SEQ ID NO: 638221 - DNA, 218 bp, Homo sapiens
ggtggagtgcacttaattgaacgctgagcttctctgtgtggcctgcaagctgattccccaagcttcagcatcctctactggctgggcaatgaaaaccttcattgagcacctcccaggccgactgtgggaggggagcaccagccgggaacgtgggagcacaggtacgcagctgtgcaaggccttggtgctggagcagctgacccctgccctgaacagca

SEQ ID NO: 638222 - DNA, 175 bp, Homo sapiens
tctagaggatcccgagatttatctatagatgcatcacttttccttttatagatgtactgttccatctggcatcaagattggtgcacctaagtgggttcctgctgcaatgaacttaaggacatcctcctccttcatttctgctacatctcaggtactcctattacgtgtccggcca

SEQ ID NO: 638223 - DNA, 163 bp, Homo sapiens
tgcttgccgtccccttggcctgccgattgaatatgcctccacggcaggggctgccttgtggccgaacgtaggaagttcaaaacagtcatcgttcctttccccacctgccaatcacaccctcctccacctcctcagcctggcgtctccccttgggcctccctct

SEQ ID NO: 638224 - DNA, 585 bp, Homo sapiens
  misc_feature (54)..(54): n is a, c, g, or t
  misc_feature (97)..(97): n is a, c, g, or t
  misc_feature (156)..(156): n is a, c, g, or t
  misc_feature (173)..(173): n is a, c, g, or t
  misc_feature (177)..(177): n is a, c, g, or t
  misc_feature (181)..(181): n is a, c, g, or t
  misc_feature (192)..(192): n is a, c, g, or t
  misc_feature (232)..(232): n is a, c, g, or t
  misc_feature (240)..(240): n is a, c, g, or t
  misc_feature (253)..(253): n is a, c, g, or t
  misc_feature (259)..(259): n is a, c, g, or t
  misc_feature (295)..(295): n is a, c, g, or t
  misc_feature (373)..(373): n is a, c, g, or t
  misc_feature (397)..(397): n is a, c, g, or t
  misc_feature (450)..(450): n is a, c, g, or t
  misc_feature (534)..(534): n is a, c, g, or t
  misc_feature (571)..(571): n is a, c, g, or t
  misc_feature (581)..(581): n is a, c, g, or t
ccatgcgtgagtgcatcatccatccacgttggccaggcatggtgtccagattgncaatgcgtgctgggagctctactgcctggaacacggcatccanccgatggcagatacaagtgacaagaccattgggggaggagatgattccttcaacacctncttcagtgagacggggnctgncaanatgtgcccggnagtgtttgtagacttggaacccacagtcattgatgaagtncgcactgncacctaccgccanctcttncaccctgagcaactttatcacaggccaaagaagatnctgccaataactatgcccggagggacctacaccattggcaaggagatcattgacctcgtgttggaccgaattcgcaanttggccgaccagtgcacgggtctncagggcttcttggttttccacagctttggtggggaactggttctgggttcacntcgctgctcatggacgtctctcagttgattatgcaagaagtccaactggagtctctattacccggcgcccaggttcacagctgngtgagcctaaactcatcttacaccaacacctgagatntattgtcctnatgt

SEQ ID NO: 638225 - DNA, 503 bp, Homo sapiens
  misc_feature (263)..(263): n is a, c, g, or t
  misc_feature (267)..(267): n is a, c, g, or t
aattcggcacgggggaattgacctgcctgcctcttttaatgggcttgttgacttggtgagctctgcatttcaccgggactctccaggggaactttgcattacaccagagcacagcttccaaatgttggaggtgactgaatgaagttttaccgtttatttggtttaccttggtagaagtactgacagaatgacctgcagtgattgaaacaagttgcttccatgtttcctaaagtacttccaattcaataacaggccttgtacangggntcacgctgtcatcccagcactttgggaggccaaggtgggcagatcacaaggtcaggagtttgagaccagcctggccaacatggtgaaaccccgtttctactaaaaatacaaaaattagctggccttctggcgcatgcctataatcctagctgctcaggaggctgaggcaggagaatcacttgaacctgggagatggaggttgcagtgaatggagattgcgccattgcactccaacc

SEQ ID NO: 638226 - DNA, 342 bp, Homo sapiens
gtaactatgagtcctgcctagtatgacagtctgagataggctctccaaatgaatgcagaagctgagattgcactgcctaccttcaaagagaagtagttcttcccactctcctatttttgtggcccaaaatgtgcgcactcttagggcgtaagcataaattcgggttctgctggttttctggtggtacacagggtcttcgtgtgtagcacagattcaggagcctgaaatttgactacccacaaatggtgaaactcattctgagatgctatcattagacctgttttgcgagctgtgcattgtgtcggtcccagaattgtaaaacctggataactccctgcacta

SEQ ID NO: 638227 - DNA, 1165 bp, Homo sapiens
  misc_feature (565)..(565): n is a, c, g, or t
  misc_feature (734)..(734): n is a, c, g, or t
ggggggcctccccttggggtggtcgagagcaggtgtgcagccgtgtcgtacgccgggtgtggtggtcgttgtctcacggtacgccgtgccccactcgtgttggctaggttgtttcttcgtgtgttgtgagcgcgccatgtatgttgtacgcgctcggggggtcctttccttgcattggagggcgcatctctccttccccctgcgcagattatttttctcggggccagtccatcgcgtcttgtgggtggggttacgtaatctgttcgcctgcccctgttcgcgcgggatagtgtgtcttttccgcatgggggggtgcatacccccgcccccgcgcgtttttttttattcgcgtcgttcgggggggggcgcccccaagacagcgcccacccaactgtgggggggggggcagcttcgcggtctctcgccatcactagtgtccagctgcagcgcgcgtccgctccatattgttgaccatcttcgtcgctccgctgctacggtgtgttgtttctgtccgctcccaacgcataggatgcagcgttacacctctcgtcgttggtggtaggcntctgcgcatcgactccttgcatcgctagctgttgtttgtaatcccagcgggtgtaatctggcctcacgtgtcacgcgatacttgcggcgtgttgtggccactcgaccacacgtcttctctcggtcgcgggaggagagatataactttctcattgcgcgcgcggtcttcncggcaccgcgccagagtctcttctctcgtctctagagtaaaacatcgtctgtggtgcgcgtcaccgcatcccatccattcgccctcgctcctgcgcgtggtggttggtcctacactctttggctcccacgcctctcggcgtctcccaccacccgcgccgcgtcgcagaaccgccgcaccagaacatgaattattgtttgctttgcgcaagccgcacctcccatcatcgtcccgcggggtgatcacccgccctcaggagcattggcgtctctgttctcaccccctccgctcccgccgcctccctgtgtggccgccccccgcccgggcgcgcgtggttgcacatgtcttctcccgccgggcccctttttccccccccccccccccccccccgtgttgtgtcaaacaaaagagtagagttttttttttttttta

SEQ ID NO: 638228 - DNA, 1369 bp, Homo sapiens
ggggttggctaccggggccatcccacgtggtggggttcatttccccgctctgtgtgggactgccccaaacgtgggtgggtaggggcggagggctagactagtagtcatacgccctggtacatgttttctctcgcagctgccttgacttagttgtttctagtcctggggctggtacctgcctggtgctagctagatcgacccccgtctcacatctgcgccgccgccttgtcggcaacttcctcataatacatctggcgcgtgtgtgttgttgcgagtagtttgttcaaactaccgtcgggggtcttcttgttcgtagccaatcatcctctgctctcccggcgggtgggtggtttgtttttgacgactccggtaggtgacgcctgctgcagaaaggtgtttgaccgccctggcgcagttattgttcttcccgcccgcccgcttcttctttccctatgcggctgtgtgggttgttgagcagcgacactggctgggttgtgctgcgacattagttcagctaatgccacacacagctcggtgttgtgcggtgtgtcgttcggcttgtttactcccgcagacgccggcgcgctgctctcaagaagtggtggtgagtccacacaccctttcttttgggttgggcagcacaacaacacgcgtgcttcccaggaagtcagcccacacagttcaacagggggtggcaacaacttctcgaggggcgacggtgttgggtgccgtctcacgaataggtggtttctcacaagacggttgtgctggccaaaggaatgagggttgatttgtggtcttggtgatctcgctcttcatataggtatcttatatagttagcgggaacactgttggggggtgcgactacacccagaagtgagcttctgtttgaccgagggctttttgttttgtccgcgcggtttgtccctcgtggctttctttgctcccgcccgcacatttagtgagccggcggccacatatatgccgcgcctctcggagaataccgcctgcggggcctctttgtccactctccgctctctgacggcttttctctggctacatgggagccaccccttttcggcgcactgctgcattccttgcgctagcgacgcatttttgccccacccaagatggagcttctctcttcccgggggcgccacccctgggatccataccccccgctggagacaccttcccccatgggtgtttttcctttctcttggaactttttttggaggttccatcgtcttttgggttcctcggggcaaaattaacccatagccttttggtgactcccctttttttttttttttttcaagatattggaaggggtggggaaatatataaataaatcatgaccatccaatta

SEQ ID NO: 638229 - DNA, 692 bp, Homo sapiens
  misc_feature (1)..(1): n is a, c, g, or t
  misc_feature (14)..(14): n is a, c, g, or t
  misc_feature (75)..(75): n is a, c, g, or t
  misc_feature (78)..(79): n is a, c, g, or t
  misc_feature (108)..(108): n is a, c, g, or t
nctagcatctacanagggacggtcttgagaatggacagagggaagacccataagctaaactgaagggggagaaanctnnaaacgctgggggggggtacaatacaccanaactcatttttggaccataacagcactaggggaatggagcaacattaaatagcaaacgtgaaacaccacgggaagtcaagagacagaccatggaatggaaaaaaaagctttatattttattactttagggggggggggtttcctggtttttgaacaaggagctaaacattttcattttgcaccgagccctgcaaatgatgtagctggccctgtctttaagtattgagaagctgtcaaggttatagggggggatacacattttcaaacttctgattttaactgaaaagctcaaattttatcattggggcacaaatactggcagttttggtccttgaagtgacaagctcacttcacccttttttgagaaaatggctgccaaattccctagtctgaataacccaggttccttcaagacaaaaaataacatttcatgaaaaaaagggggcagttcagctctcaacatggccacagcctacaactaccctttcaatggacagaaatgctttatggatacttcctacttacacatagtattaaaaagacatgggcccccgaatcaagattgaatagaaattgataattct

SEQ ID NO: 638230 - DNA, 151 bp, Homo sapiens
atgtgagacaagaaacgctgtatttaccgtgcacagacacggtcacttgtcttcctcagaaagtcatccatacccaggatggcaatgatatcctggagggatttgtagtcctgcaggatcttttagcaccccacggagcaacatcagtaat

SEQ ID NO: 638231 - DNA, 613 bp, Homo sapiens
  misc_feature (335)..(335): n is a, c, g, or t
ggggcttgggaaatgctatagcactttatgctggaataaaacagacaatatttaattgtacatatatgtcagaatttctctcatcagattcaatctagattagttagaaggaaggataatcacaggatgattctgcacacaattaacgtgacagtaactggtaattatcaagactatatatgaatgtatgatgataggccaaaaagaaaaaaagccaatacaaaactatctattcatcaaactgctaaccgtggttacctctggcaagggaaagggaggcgggaaactgcatgttttctttatatgcttggagtgttgattttacataggccctnttgtaatttttctaattcaaaagaactaattacatatttgtgtgtcctgtgattatagctatgtaaaaattgtgtatgcatatgaacaacaaataaataggaatatggaaaaatgaaacagtggttatgtggtgagattctaggtctttagtttttttcttgggttaaattcctcaaacgttaaatatgtttaatgttacacaatgttattaatgttaaaacatgtcataatgttatgttacaatatgttactgttacacattaacaaacgttatacc

SEQ ID NO: 638232 - DNA, 464 bp, Homo sapiens
aggtggagaagagagtaaaagatgccgcttacccatttcaattggtgagatgtccttggtgctggcttggtccgacgacccaggtctgctggtgtatctttctcctgtgagcaaagagcagtgaggacaggcgattgatctcccaatgaagggcccccaatctcaatgtcacagcacaccatgtcacgcgcatcaatttgaagagagtccaacaacaggctttgtgtgagcaataaagctgtttatttcacctcagtgcaggtaggctgagtcttgtttgcttgcaggtcctaagacccctccatcccagagagagtcctgccccgtactcagaaggaaggaatgctgcagagaaaggtccagaagaatctacactgacaggacttgctgggtttccccactcaggttattggccttctggtccaatcatatttctttttgcgcggttagcccttttttggaaa

SEQ ID NO: 638233 - DNA, 284 bp, Homo sapiens
gaggatcgtcggaatacacagcgtcatttatcctgtagctaaataagactccaacaccagaaaaaaaaaaaaaaaaggagggaaaaacgggttggtaaggtaaaaacaaaattctatctgtataagtcttaactggtacaagtctggtacacagtcagaacgggttagggcctctggcagaagccaaaacttcagaagagggggattaaatgggtcatcacaggtccccccaacttggcttggggggatatgtacattcacggagaccaacagtgaagagaatt

SEQ ID NO: 638234 - DNA, 518 bp, Homo sapiens
  misc_feature (13)..(13): n is a, c, g, or t
  misc_feature (98)..(98): n is a, c, g, or t
  misc_feature (101)..(101): n is a, c, g, or t
  misc_feature (120)..(120): n is a, c, g, or t
  misc_feature (128)..(128): n is a, c, g, or t
  misc_feature (140)..(141): n is a, c, g, or t
  misc_feature (157)..(158): n is a, c, g, or t
  misc_feature (170)..(170): n is a, c, g, or t
  misc_feature (188)..(188): n is a, c, g, or t
  misc_feature (200)..(200): n is a, c, g, or t
  misc_feature (210)..(210): n is a, c, g, or t
  misc_feature (238)..(238): n is a, c, g, or t
  misc_feature (256)..(256): n is a, c, g, or t
  misc_feature (260)..(260): n is a, c, g, or t
  misc_feature (274)..(274): n is a, c, g, or t
  misc_feature (276)..(276): n is a, c, g, or t
  misc_feature (280)..(280): n is a, c, g, or t
  misc_feature (309)..(310): n is a, c, g, or t
  misc_feature (320)..(320): n is a, c, g, or t
  misc_feature (327)..(327): n is a, c, g, or t
  misc_feature (342)..(342): n is a, c, g, or t
  misc_feature (346)..(346): n is a, c, g, or t
  misc_feature (371)..(371): n is a, c, g, or t
  misc_feature (426)..(427): n is a, c, g, or t
  misc_feature (429)..(429): n is a, c, g, or t
  misc_feature (449)..(449): n is a, c, g, or t
  misc_feature (512)..(512): n is a, c, g, or t
cccagccaccagntcagcgggttccagggccttctcctcttttggtcccttctagttccagaggctaaggggaagactggccaggccccaggccccanccntcaaaaccagcctcatttntggttttnttggggaggtgnntttgcttttagaaaanngggggcaaggtngggggggcgccccccctntccttgctcccngccccctggncccgctccgcgacggcgcccgtgagggnccagggcccaggcccggntgcnggccggcttcactntntctnggggtttggctactgttggcctgggtgcnncgagagggcnctgaggngggccagttggcggnggancaggtgacggcagcatcggggacanaggtggggccactcactggtactggccctttagtgctttgccttgcccttggctnnangggtggcaccaatggcggcncagtggcggcgctggctgtggtggtggcaatgcgcggagaacggcgggttccctgcgagtatnggggga

SEQ ID NO: 638235 - DNA, 1014 bp, Homo sapiens
aagcagtggtatcaacgcagagtgcccattacggccggggagtgcgtacattacctcgacctcattagctatgtcggggacggtaaccgggcaccggatgtcatgctcctgtcgccttcgcctcctaatccctagccacatatgcagtgagtgcatctccatccacgattggcaggcatggatgtacagagtaggcaatgcctgctgggagctctacatgcctggaacacggtatcccagcccgatggccagatgccaagtgcacaagcaccattgggggcaggcagatgacatccattcaaccaccattcttcagcgagcacgggcgctggaaagcacagtgccccgggctgtgtacgtacgaccttggaagccacagtcatccgatgaacgttcgcactggacacctacacgccagcatcttacaccctgagacagctcatcacaggcaaacggacagatgcatgcaataactatgccccgaggagcacatacacccagatggacaaaggagcactcctggaaacgtggctgtgggcaccgaccttcggcaacagactggccggcaccagatgacacacgagatcattcagggccattcaaggacaaacaaaagcatcgcgcgcgcgggcaacgtgggtacatgtggttacaagccttgcgcgtgggctcattgtgaaaggtaatcctcaagcatgaattaatggggatgaacgttccgacagcctaggaagatttttaccatttataaccgtggacgcaccggggttatacacaaggacatggatagctcggagccgccacaaagaagacagtaccacaaaccatcccacacagcccacaaacaccaaacaaaaggggcaggcaaactactgaacttgtgtgcaccattgcaaggggcaagagaacaacagcagggcccaacataaaggacacaaaaaggcagaaaagaaaagcacacaacatagacacacgccaaaacccaccactacagctgtaacagggcagacaaag

SEQ ID NO: 638236 - DNA, 429 bp, Homo sapiens
gactatggcatatcttttagaaagctgtctccttatttaaataaaatagtgcttgtctgtagatcagtgctggttcaatcggggggggtattctgctctaatctttcagaaactttgtctgcgaacactctttaatggaccagatcaggatttgagcggaagaacgaatgtaactttaaggcaggaaagacaaattttattcttcataaagtgatgagcatataataattccaggcacatggcaataaaggccctctaaataaggaataaataacctcttagacaggtgggagattatgatcagagtaaaaggtaattacacattttatttccagaaagtcagtggtctataaattgacagtgattagagtaatactttttcacatttccaaagtttgcatgttaactttaaatgcttacaatcttaga

SEQ ID NO: 638237 - DNA, 503 bp, Homo sapiens
  misc_feature (74)..(74): n is a, c, g, or t
  misc_feature (95)..(95): n is a, c, g, or t
  misc_feature (229)..(229): n is a, c, g, or t
  misc_feature (372)..(372): n is a, c, g, or t
  misc_feature (431)..(431): n is a, c, g, or t
ctcgtgccgaattcggcacgagggaacaatacttgatgtgtccttactgtgttccagggttggtgacggcaaanccgagtaccacgggaagtaanaaatataacaactgtgctagtaggcttggtgctagtgtggtcgtttccaaaatgtggtcctggggtcatgaacatcaccgtcactcctctaaaaacatgcattctgaggcttcacctgggacacattggatcanaatgtctcctgggggtgggcctgtcatctctgctgtaacaagccctcccgacgatgccaattcactctaacactgagaacactgggtatatttcccaagtgaatgaagatctcttattgcacttctgttatttcctatttgantaaaatctttgtggtttttactgtatatttaacctgaatgtggctccaggaacaaaatnaccatttctttggggggcaaaagatgaatatttgcctttgaaccctttgaacattcctgcttgttaaaattt

SEQ ID NO: 638238 - DNA, 194 bp, Homo sapiens
agggcagcatcgcccgccccttcccccaaatgttgcttgcagccccccccctaaagccccctccaaatagccatacttagcctcagcaggggcctggcctgtaacttataaagggcccctcgcccccgcaagccccagccccgagggccgtccatggcccttatttttatatgagattaataaagatgtttgca

SEQ ID NO: 638239 - DNA, 472 bp, Homo sapiens
atatagcaagacccatctctaaaagacgaaacaaaacgaccaagacgaagcgaagcattccagcctggaaaccatggcaaagccctgtctactaaggatacaaaaaattagccaggtgaggtggtgcatgattgtaatcccagctactctggaggctgaggtgggagaatcgcctgagcttgggaggttgaggctgctgcgaactgcgattgcaccgctgcactccagcctgggcaatcacagtgagaccttgtctcaaaacaagcaaacaaacaaatgaaaaaccttagccaggcatggtgacacatgcctgtagttctagctacttggaaggcagaggcaggaagatcgcttgagcccaggagttcaaaactgcagtgagctatgatcacaccattgcactccaagtctgggcaacagagggagaccctgtctggaaagaaagagagaaagagagagagagagaaagagg

SEQ ID NO: 638240 - DNA, 413 bp, Homo sapiens
gatcgagctcggtacggaggagcatcctaagcagatctgtatggcttgaaatcgtgcgaggtgggcagaagctcaaagccgtccgatgaaccgaagctagggagaggctctatatgctacaagcagtacctcctcactgcaggtagtctgcgccttaaccctctgcagggagactgactgtagcaccaagtacctggctttttagactctacataggaattccaccataattaagatgtataaacttgacctacagcctaaagcccaatatgcttccctcaagaacataacagtgttcaagcttagcttggttacagaaaatgaggtagggtgcggtggctcacatctgtaatctcagcagtttgggaggccaaggcaggcgcatcagctgaggtcaagagtttgagaccagc

SEQ ID NO: 638241 - DNA, 415 bp, Homo sapiens
actgagccacttaatgcctaaagactctggggagcagatgttacctaaggtagtgaccctgcattgtggtgcctgagccctggcagaagctcttgtaaaatttgttaattgtttaaaccacttcttttggagagcaaggggaaggtcaagaaggcagttttatcaatattgtgtcagtcaccacaaagtaggccagataagttaaaaaaaatttttttttaaataataattgaaacttatctcaaatggagattttggtgggaggaggagataccaagtgcctgtaaaccacacactataacgggtgacgaatgagttgtgcatatctgtacaggtgattctttgactaggattagcctcccaattattgctcatagctgaataaacatcgcgatgttattcatctactttagaa

SEQ ID NO: 638242 - DNA, 264 bp, Homo sapiens
gcctgggggccccccccccccttttttttccccccaaaaaaaacccgggggcgtttccccccccgggttttttctttgggccgggggggggaaacattttttccccgggaaccccttttcccctttgggcctttttgggggcccctttaaaccagtttttgccaaaaaacgggggggggccggggcgggttttcccgggattttttgccccccggggccccccccgggggggttttttccccccttaaaattttttttttccca

SEQ ID NO: 638243 - DNA, 140 bp, Homo sapiens
atacccagtaacgaagtaccagtagactcagcggttcaactttatataattattatataacctgttaatttatctgtacaatgccagcatttggactttttgtataatcaagtaaatttcttattgatggcaactaacat

SEQ ID NO: 638244 - DNA, 438 bp, Homo sapiens
cgggctacggatgtgggaattctgctctccctcaggatccgcttcacccaggtaagatatgactccctcagccctgtgacaggcctgtataggttggactgtaggggctgtaagtgagacacagctaggatttgctgctatgagctcgcatttaaatagggcaataatgtttcagaaacacatgataaagccaagtaacacagcaattcaaggtaaactgagttcattccacacattagtaaaccgctatagatgactgaaaggtccccagttcctcccctaatttctgcaagcactttgcaggcatttctaacacttggaaatactgtgcttctaccatagcttagaaactgacatttgtatgttttaatggggtccctgctgttcatcaggcagacacttgtgggctttaaacaggtcgttgcttggacctttgct

SEQ ID NO: 638245 - DNA, 412 bp, Homo sapiens
gcacgagggcatgtagatctgccttcatgcaagcataaaatttagactatcccaagaaatcaagaagttggacattctttagttaattctcatgaatgttcttgtgaatctgtgcttttattattattttgctgttgttttaaaattaaggtgtaacatacacctagtaaagtgtgtagagaccagctaatttcaagtatatagtttggtaaatatttacatctttaaacacttgtttaaaagtaacacccagatcaaaatttagaactgtgtagcagccattggctccctcatccttattcccaaccgatatctatcacttctctgacttctggcacgactgatcggctgtgcttctaagtgggatgcatatataaattgaaccatacagtatcacttttctttcagtctt

SEQ ID NO: 638246 - DNA, 123 bp, Homo sapiens
aaatgatttactgctgcacggctccacaaatggacaaaacgggtccccgggctggtaaggcatgacatggtgggcacgggtctggggtgcatgaaattacgatacagcctttctgaaccctgt

SEQ ID NO: 638247 - DNA, 226 bp, Homo sapiens
tgtaaaaacagagttgcctttgattaagagttccactatttttataagcaactagactttatggggaaagtagctttaagacatttttgttttctgtgtgtatgtgtgagatggggtctcactctgtcacccaggctagaatgcaggagcacaatcatggctcactgcagcctcaaccttctgggctcaagcaatcctctcacctcagcctcccaagtagaagagg

SEQ ID NO: 638248 - DNA, 191 bp, Homo sapiens
ggttttattttgagcccccattccccccccccagttttttggggcacaagggtttgggcatgtcccccaggaccccccgtggggagccgatggggaggggatggaaaaacaaaacagggtttttttcaggcccaggggccggtcacccaccccagggccccccagccaataaaccgaaagtgttccaccca

SEQ ID NO: 638249 - DNA, 296 bp, Homo sapiens
tgtcagtcccaggaagttattgaacgtgttcaggcatgacacagtgagacccgtgtctctagcattgcagcccaggaggtcgaggctgtagatgatccagtgatggtgccactgcactcgcacctgggtgacagaggaagacccttggcctcattggaactagagcgaagcaaaacatacaccaagagtgtcgcatcaggtcctaggccgtctactatcatcacctcttgccatggactgcaaactctagaaataattgcttataaatatcatacatgaaaaattcttcaatgaaa

SEQ ID NO: 638250 - DNA, 613 bp, Homo sapiens
  misc_feature (45)..(45): n is a, c, g, or t
aagaagacccttcaacttacttggtattaaaatatactggaattngagcaaggatctggagcggttactaattaagctccgatgcgggtagaaccaaatgtctttttatctgagtatcttactgtttagtgtggctgtgatgtaatgagaaatgtgtttggactttgttctctgttcctgacgtagagcttttaaatcccttggaatttacttagtgataagagtgtcttttgttgcaatgacatacttcttgcctggacccttaaatagcttcaggttgggactggccaccagaaaaatcaaggcatgattacaggttaattctgtacctttgaggagttagggtggagtagaattaccagaagccaatgattaaatcaatcatgctgtgaaaataaagcttacattaaaaatactctaaatgatagcattcagagtcttctgttggtatgtgcacctggagaagacacaagaacgtactatcttcttaccctcatgctttcccctatgcatctctcccatttggatttcctaagttgtattcttttatgtaaatcagagattatatgcaaaatgccttcttgagttctaggacagccaggactatacagag

SEQ ID NO: 638251 - DNA, 537 bp, Homo sapiens
  misc_feature (418)..(418): n is a, c, g, or t
  misc_feature (446)..(446): n is a, c, g, or t
  misc_feature (506)..(506): n is a, c, g, or t
ttttagctgattccagacatagtcaagttgaaaaccaacataaggatcacagactataaaagattataaaggtcttttgaagttgggctaaatgcattttgggttatgatttggccatgcaactgtaggagccagggaagggaatgtggtgattaaagtgagaaatgtccctcctagtcttgaattggagcagtcagtgtccagtgtggtgctgtgtgggcgcacattgctagaagtgtgtacttggatttgggctgtgagagctcaaggcctcggctaccttttggtttgtcctctctctccgtgcttgtggttgaggagtgagctgaagtttttttctctggctgcttgcatgttagccttctaacgcgctttcccacctcagggaccattaaccccaataaatgcttccctctcnaagttgccctggtccagggatttatccnggcaatagaaagattataataccccagttttcaggggatatgcctagaagtgatgtagcncgggttatttggtggtgcccggttttagcct

SEQ ID NO: 638252 - DNA, 1098 bp, Homo sapiens
  misc_feature (469)..(469): n is a, c, g, or t
tatttgtaataattaaacttgatgttgagaaatcaaaaaaaaaaaaaaaaaaaaaaaaaaaaaaaaaaaaaaaaaaaaaaggggggggggttaaaaattttcctgaggggggccaattgtgggggcccctttttttggtgaaaggggggccctaaaggggggttttaaaagggggggggggggggaacaaccggtcgtgagtggtgggaaaacgggcgaccggtgggatatcttgggggaagggaccccttatactgggtggggggggcacaatatagttagcaaaacattaccatcagaaattttaaagcgctttaagggataaattattaacattttgacaggtgatattgtggtgttaacacagacgcggtaatatatggcaggcggcagaaaaatttgggcttaggagaattagtatttatggaaaatacttattataaccacgggcggctgcggtgcataaccnagcaggaacagattgtatatcacgtcacgggcaaataaggaacagatagaacgaacggacaggaaacagtcatcgacaagagacatacagagagacatagacagaagacaaaaacgagagacagtaatacacaagaaatagaaacgaaacagataatacaaaaaacgaaacgacaaaagaacactaaacgaacacgccagagacgataacacatacgcagaaaaaagacctgaacaacacgcacaacagacaacagcaacacaaccatacacaacacaaaaacatataactaatatacacaacaataaaaaaaacttcatcagaaaaatactcaaaaggaaagagatgctttgaggagaacagaacaaagacagaaaaaagaaaggtaaagtaaaagagacaaggaatataggacgaaaaaaaaaaccaagcaaagaacaaagagaagaaagggagaacagtagcgtgaagaaagagagatagaaaaagcaagaagagcagaattgatcactacggtgagttaatgaaagagaggggtagggaagcatgatatgagaagaagcactgaagaggcagtgtgaagaggcgaaggagagagtggtagaatagagatagagcaaggactcacc

SEQ ID NO: 638253 - DNA, 1998 bp, Homo sapiens
tgctgtatcctgtggcggattctgctggttccggaagtgctgggttcgtgatattcagcggcctgtggtgctttcgccgaatctcagaagtgccgtgttaagcagatcactgaagtcggatggtctgttagaagaaaatgcatttgatccttcagaaagatcacaaggcagaacagtgttcataacttattgctccaacaactggcaacttgtcaaatgagtctatgtgctgctcccacaagttctgaagagcaaaagcacagaaatggactatcaagatgaaaagagaacaaaattgaatcaccccagtttaactgaaagccccgaatctacaacaaaagacaatgatgaattcatgatgttgctatcaaaagtcgagaaatgtcagacgcacatcactggagatcatgcacacaatcttacagtagtatacaggcttggcagggcagcaagagagcttgacaaatctcctcggaatctcctgtgcatcacatttcttcaaccagacgaacttgcagaagaccaaagaacttatgaccacagtgactaaccacacactgttcgaacagagttcaggacttcctcacaaagcatcacgttcatctcgacagctaataattccttaaggcatttcaacgacggctacgaagcatgatcacatgggacaatcggattgccgagcaattacggaccgacatccgaaccgcggccacatacgtcgtcagcggcggcgtctaacactgacgactacatcagccgcaaccgacacgtcggcgagcacagagagatcaacacgctcgtctttctctcttctctcttatttttatttctcccgggcgcgagcaaggcaggagacaatcagacgacgcagagacgggaagacgggggaggacggaggagagagacgccggcagagggaggagggagagagagagaggaacagaaggggacggaggagagagagagcaagagcgaggcgggacgcgacgaagaagagcagacgacgcaaacgagacgagcgacagagagaggagacgaacagacgaacagcacggaagaagatagagacggcacgacgaaccgcagacgcgcagagagcaacaccgagacgcgagagagcgacgcgagtccgcacgcagggcggcccgcactgcaaaggcgtcacgacagagcgggcagcacggacacgggagtcgcccgccgaagcggcgcgcagaacgcatcggacccagcgaagccgggccgggagcggaaggaggcaacgagcgagaagggcagcgagggacaggacgagcggacacgcgaccaggcggggaacgagagagacagagcgagtcagagacgagcgggaagcggccggcggcaggaagcgctcaggcggcggcggcagggtgcacgggacacgacagcccacgcgacgcactgaggccaccggagcgacagagaaccacacgacgcaagagacacacagcgcacgcgacccgcgagacgacaaaagcgaccagcaaaacacaaaccagcgaggacgacacaagagacaccacacgcgacaaacggcacaaaccacacgctcaagagacacacaacacgcgaagcacacacccgaccaccgacacgacaacgacccaaagctcgccagacccagccggggcgaaccagacaccggcaacaacagcagggtgacgagaagacgtggagaaaagacgaggaacgagccaacgcacgagccgcgacacggcactacagacacaccgaccaggagagcccagccacgacacgacgcagccagtgcacgagagcagaccgacagagccagccggacgagcaagccaggacggccacgcgacgacgcagacgacgacagagacacgacgacggaggagccagaacgagcagaagcagaagcaaccgagcggcgaaacaagaacacgcgacagagatgggcacaccgacgtcgcctccacgcgacacgacacagacagaaccccgcgcgcgcaa

SEQ ID NO: 638254 - DNA, 120 bp, Homo sapiens
ccctggttgtcattgctctgcttgtcctgctctgcttgtactgtctctgcttttatctagcccaacttccacatgttagggattatgattaccacagcccagaggcaggacaagcaggga

SEQ ID NO: 638255 - DNA, 441 bp, Homo sapiens
  misc_feature (434)..(434): n is a, c, g, or t
tgatgcagagaaccaaatttctacatttaatttttttttcaggcggggagtgatggctcacatctgtaattccagcactttgggaggccgaggcaggaggactgcttgcagccagaagatcaaaaccagcttggacaacatagtgagaccacatctctagaaaaaaattttttaaattaccaagcatggctaggcatggtggctcacgcctgtaatcccagaacttggggaggctgaggcaggcggatcacaaggtcaggagttcaagaccagcctggccaacatggtgaaacccagtctctaaaaatacaaaaattacttgggcatggtggcgcatgcctataatcacagctactccagaggctgaagcaggagagttgcttgaaccagacccaggaggcagaggttgcagtgagccaagatcatgccactgnaccccaa

SEQ ID NO: 638256 - DNA, 408 bp, Homo sapiens
  misc_feature (27)..(27): n is a, c, g, or t
  misc_feature (30)..(30): n is a, c, g, or t
  misc_feature (38)..(38): n is a, c, g, or t
  misc_feature (50)..(50): n is a, c, g, or t
ctaggcgggtctgaactgcagagcatncancggttggntagcggctggangcaagccggacaggtcccgcagcgcgtcccgtagacccgtcccagacacgtcttttcattccagtccaattcaggctgccgtgcactttgtcggatataaaataaaccacgggcccgccatggcgttagccctttcttttgcagatgcgtctgggaaggggccccggacttcctcgagagaatgtgctatagacaaacccctgtcttctttggcgggggttatattgtccgggatctggataagaattttgggggcttcaaaaaaccgacgttggatttgggcctacttgggggggtaggagtttccaacaatttatttttccaaaaggacctttccccccaagggcttggttttggg

SEQ ID NO: 638257 - DNA, 1163 bp, Homo sapiens
  misc_feature (533)..(533): n is a, c, g, or t
ttgatgaatgcgcagacccaattttgcagattgacaatgccaggctggcagccgtgtgacttcaggtaccaagtatgagacatgagcgtgtgcggcctgacgatcaaactgtgtgagtgccagacgtctagatgagtcctgcgactcggagtgttggatgagctgaccctggccagtgactgacctgcgattaagtgttcgatatctgaaggcctgagagggaggatctggctctaccgtgtaggcaagaaccacgatggaggagattgcttgcttctgcacgtaggtcagagccggcggagatgctgaacgtggatgatggatgctgtcacctggcggtggatcctgtaggtccgcactcctgacatgtgagatgcgtgatccagatacgagcaggatggctaggatgaagagatcgcagaagtacgctgatgaccttggttcctgaggtcgaggacccgatggagactgatacctagataggaaggtggcctccagatcatgcgaatcgtgggttaacgagcaggctaggnccagctaggttgatcggtgacggggagcttccgcgcacgtgggtgcgtccagggccatggtaagattcgtagtctgcagtcgccatcgtcagtatgaaaaggcgagtcccctggacgaacagcgcttggcagagagaccctaagagggcctgggtacttgagattgctagcttgtccccagatccaggcacctagacttaggtcacgtcgtaggaaggcatccatgcttggcccaaggtacggctgctggagatcggatgcaagctggagcccagcgagtacccacgaatctttgctgggaatcgtgggaagaccgctgggttttggaggcaaggaaagatttgctcattcctaacggtcggccttgtttcgtaatggcctgagggattggacctactcttttctgtccgcaagcaaggctatcatgggccgcagtctcgtaattcgttccccggcgaagggctcatttcaccctttccttccttccggtccttactttcgagaaggctcgggtcaggacacccgggccccatcccttccagggtaggcacgaacgtgcattccaaagtttccatgccatgtggcccagagcttccgtagaaactggaggttggcttcttattcataggc

SEQ ID NO: 638258 - DNA, 110 bp, Homo sapiens
tcggccataaccgtcagaaacactggggctggcacaaactctggattcttcaacaggagaatcttactgtgtctctttcggttccatagtgtggagacattcctgggcac

SEQ ID NO: 638259 - DNA, 341 bp, Homo sapiens
agcatgctcatagcagcttcttctaccgtttctgcagcttcacatctgccttcctgtctgtcaagtgccccaaggttctttcgagtggtcgtaacagtaggactatcaactttgcaggctctgtaccggccgccatactctccaaccgatgtcccatcctttggcttacctttgcatacttctctttcttcagcatgcatccagatgggttcattttcatcgtctacagaaccaaactccctttcatgtgcacgagtgcgaatctcttagtacagcgtttctgctcgcttgaactttccttgtttcccctagcaggatgccaggttatctaccgtcttacc

SEQ ID NO: 638260 - DNA, 161 bp, Homo sapiens
tttagcatgcgaattcacatctttatcaggctgatgggtcttgcacgtcatctgccacctcagttcagttggagaggattcttttgcattgatatacacttccagcccatcgaagggcggctgctggctaccgtagctcgatattctcttatcgttcgatc

SEQ ID NO: 638261 - DNA, 235 bp, Homo sapiens
tacccagggtaagacctttcatttatttgtgtatattattatatattgtgtgtatatatatttatatttatgtatagattttgtgtacatatttatatatttatatacatatttatgtatatatatatttatatattatatgtatatatatttatgaatatttatgtatattatgtatatatgtatatatatttatattcttccatctatattcacttaagtgggtagtcacaga

SEQ ID NO: 638262 - DNA, 309 bp, Homo sapiens
  misc_feature (138)..(138): n is a, c, g, or t
  misc_feature (259)..(259): n is a, c, g, or t
gcacagctcagtaattttgtatattactagagatggggtttcgcatattggcaggctggtctcgaactcctgacttgtgatccaaccaacttggctcccaaagtgctgggattacaggcatgagccaccgcgcccggncaattttttagtgtatatacctagaggtggaattgctggatcaaacagtaattccacatttagttttttgaggaaccaccacactgtttttcacagcagctgcaccattttacgttcccgncaggaatgcacgagtgtttcagtttctccacatgcatgcacccagggggt

SEQ ID NO: 638263 - DNA, 116 bp, Homo sapiens
gccgactatcactggtagatgccttgacttacgtgtgccgacccatggtgacgatgacacaccctggtggcatgcccgtgtatataaggtcttagcgttgtctgcattgttctaga

SEQ ID NO: 638264 - DNA, 187 bp, Homo sapiens
cttgtggagatatcattgtgtatcattgcaatagtattacattgtgagagtgtgtgtgtgtcattgtgacaacatggatgaacctaaaggacattatattatgcaaagtaagctaagcacagagagacaaatactgcatttctcactagtgtggaatctaagaaagttgaccccacagagagagcgt

SEQ ID NO: 638265 - DNA, 319 bp, Homo sapiens
gctaaataagatgcaaaagcttagatctgaatcccaatcaatatgacttctcagctaaagcctgtatggtttgttttgtttgaggttaagtctcactctgtcgcccaggctggagttcggtggcatgatcataactcactgcaacctcaaacttctggcctcaagaagttcctcccacctcagcctcccaaatagctgggactacaggtgtatgacaccatgcctggctaatttttatttttaagttttcagtagagacaaggttttgctaagttgcccgccaatcgaagcgatccgcgccccactcaccaaccatggg

SEQ ID NO: 638266 - DNA, 89 bp, Homo sapiens
agaaggagcgcttgaagccaggagttggaagctgcagtaatccgtgatcggaccgttgcactctagcctgggcaacataacgtcctttg

SEQ ID NO: 638267 - DNA, 554 bp, Homo sapiens
ggcctggcagggtggttcatggttgtaatctcagtacttccggatggccagggtgtggggcttcatgatgaccgtggtccaagaggccttctgtagaggcgcatggttcctggacagcccgcaggcttgtctgtgggacaggggccgtgccgtcactttctcatcattccatggggtgtgtctgccttgggccaactctgcgatggacaggcctggctggggacagtccgtgactctgtccatccctcctgcccctttcaccagacccagctctagtgtctgtgtctgaattgtggatcgtgcagtccatggtcaattgtgcgcacatgtggaatcttgcacggcatagttaatattggccctatatcttgacgcgaggggcttgcacgtgcacaagggcaggccagtgttgcgcattttccttacagatataaagggatcatttaaacaaactcaacgacgtcttatatgaacacacacatctgtggggatggcaacctccccaggagcaccccatcgggtcacacatctctacggtcacttggtgaccgaac

SEQ ID NO: 638268 - DNA, 1179 bp, Homo sapiens
  misc_feature (175)..(175): n is a, c, g, or t
agcggaggggatgccgaattgtgcgggcgcggggaattatgggggtgggggctgggagggtctctcacagtggggctccgatgcccggagtaggatctaggcagggccgaattcctgtccctccgagttagtcatgtgccactcggtgctggcgtgagaccctctgcagccctcntggcccaggtgcccggcgttggtcccaccggtcgaggcaccttctggaggtctacgtgggatgggcgttgcagcgcatgccgctagggctgagcgagggaagcatcgcggcaggaacgaagggagtgaatcaggactgaccatgacgtgagctgcctagccagctggtagtgacagtggtgactaactcgccccgtgccgtgagcgagggcttgatgcagccgtggcgcgtccgctgggggcgcgcagaagattaacctttggcgttggcccactggcacgtcccccggaggtccccgctctctcatgccgtccagggctccgcgactgagagagagcgttggcgcttcggagtactttgcgtgaggggtgactctgaggcgttgtgacgagcggagccgagaccgagcctgctttgcgtacgctatgtgcgccagtcgttgccgatttccgggaggccgcggacccccgggtccggaggagggcccaaggcgttgggttgcaaaccactggtcaaccaattccttgggctaggtaatccgcgtttcgggacgttgggggaaagccaaaataggggccggtccagaggagaggttggacaccagttgccttgtggtaggactcccgagcacgacactaaggtttcgattgctaccttgcatcgacagggttgggacacggaagtaagaaacagcttactaattcccaagagggccacaccctagaggatatgcgtacaacgtgtggatacctccctataatactatctaggagaaacagcttgaagtgcggtaaacgtatcggcggacgcaggaatagttcgagtacaaccattggtttggaggaacttctcgcacaaagttataccttgggggtaaaccaggagagcccacacgagtttcgagacagaaacagctcggggattgtcccccgcgagataaggcagttgtgcacctctcccccggaaggccgacaggagagttccccggggtgaccactctcgag

SEQ ID NO: 638269 - DNA, 104 bp, Homo sapiens
ttcgattggcgggaacttatccatctgtttttggccaaccttgatgagacctgattttgaaaaactgacactgctgaatgaatgtttcaacatacagattgatg

SEQ ID NO: 638270 - DNA, 367 bp, Homo sapiens
gcctgctgcccttttccctttgggggtgtgggtaagaagtttccagcttgtgtgcagcatttaaaatcccccttaaggccggggccagtggttcccccctttattcccagccctttgggagggccaaacgggtgggttcccttggggtcgggggttcaaagaccagcctgggccaccatggtgaacccccccttttttttaaaatacgaaatttagccgggggtgggtggtttgtgcctgtattcccagctactgggggggttggggcaaaagatttgttttaacccggggggcaggggttgcagtgagccaagtttgtgcccttgccttccccccttggggggggggtgttttttccttcccccca

SEQ ID NO: 638271 - DNA, 636 bp, Homo sapiens
cggacgccgtgggtcgacccacgcgtccgaaaaaaaaaaaaaaaaaaaaggaaaaggaaaaagattaaaaaaaaaaaaaaaaaaaaaaaaaaaaaaaaaaggggggcccccaaaaaaaaacccacaaggggcccaaaaaaaaacaaaacccacttgggaaaaaagggggcgccccaaaaagagacgcggccagaagtaataaacgaccaagagcacggccacgcgttatcaccacagcgcgacggggagaacacaagtgaccacaggggaagtcctgggcaacaagagccccttcaatccggggggcgagcgacaagtggagacacactaccaacacaacaaagtgaaagcgcccaaggagcaaacacaagagattcaaggggttatagaggggataccacaacagcgtccaatagaacaggagctcacaagcacaaaatgcggccactagcggagaatcaataatcaattgaacgccacttatctttctacccgcgcgcgcactccaccgaaacgaaaccacaccaaccagacgaaggccgagccaacagaccgacagcaaccacagaacagacaaatcaatacggacaacacacagcgaccaacacgacaacacgcgcaccctccaacgtcgac

SEQ ID NO: 638272 - DNA, 123 bp, Homo sapiens
actgctgccttatcttctctggatatctcacgtagctgtctttagctcgtgatgtgtcgtggccaaccacatgtcgatgaaagcgcatcctttggtcagatttttctctcacccaaagcaggt

SEQ ID NO: 638273 - DNA, 81 bp, Homo sapiens
taggtaggcacagaaaaaactcttctagtggtatgattaagaagggtataatcaagtgtttccctctcctcaatattgaca

SEQ ID NO: 638274 - DNA, 1113 bp, Homo sapiens
  misc_feature (1)..(1): n is a, c, g, or t
  misc_feature (993)..(993): n is a, c, g, or t
ntcgcagttgttgtctcctgcagcggttcttcttgtctgtcggtcgttcctgttttgtggctctttttcggtgtcctcgtttctcgtgtgattccgggtcgtttcttgtggtgcgttcctcacgtgttgggtgccttaacctgtttctaacacctcctgttgggtgccccaaatttgcccgtgttggtgtgggtacattccccccgccacagtgattctcccctctctaacttcggggactctcttccctctgctgggaaacttctgggctgtctcctgggatggcccctgaggacccctgcctcctcccggccctttacatctcctggccacagattgccctggagcccctgtgcccctgacttgctgctctccaggttcccgatcccgagcccgtgccccagctggacatctgctcccgagtgcacatccgcaagtcgctggactccccgggccacccacaccgaggagcccgaaggcccacagaggcccagtggcatgcccccaaggagactccggagagtcctcaggtgagggctagccccccccaggacccccagccccaggcccccaggaccagcccccaggcccaggctccccaggacccagccgggccagagactgcgccattagggttggaacttgggccacccatgaagcacccagaaggcccacccggccacccccgctttctggccttccacggacacctgaccacacccctgtggggtgtgttctagggaccttatggggaaccctcacttctcacgccgccacggtggagcacccccgttcccccaatgcaccaggctgacccgccacccacccccagggggacccccgccagccaccagccccagcccccaggtgggcccgaaggtgacccccggcccctcttttgcctcccgtccatccggctggtccagctgtggtccccggtgcctccgaggcccagatctctatgggggccagtgcccagatcctgagagccgnctgagacgctttcccggagccgaccgaaggggactcggagctcccagcctgcccgacccctcgccacgcctgtgctttgcccccccctttccatagatggaacttgcttgctctttttta

SEQ ID NO: 638275 - DNA, 176 bp, Homo sapiens
aggttccagacgaaggcaggaggcagcatacttagttttatttcaaacaaacatggctggaggtgctggcaggacaggcctggaggagaatgaaaatggcctagtggagctggtgcccaggaccagggcacaggaggggcactgtggccaacatgttcatctcagaggagcaggag

SEQ ID NO: 638276 - DNA, 100 bp, Homo sapiens
gcggccgcctactactactactgctcgaattcaagcttctaacgatgtacggggacatgttcccttcttcttagcaccacaaataatcaaaacccaaaaa

SEQ ID NO: 638277 - DNA, 314 bp, Homo sapiens
ctagcaggatccttatggctacctgctgaggtgaacgaagaggatagcgggcgagatggagctggggctgaggaagcagacgcacaacaatgccgtggttaaagatgcttgcctccttcgtccgggagaactcccgacggggaccgcagaatggttgacttcttaggccctgggatcttgggagtgaaccaaatttcccggtgtgcttgcttgggtgacaaattccggtaagtggggaaacaacgaagaaacgggtggacaattgcacaaacaaaggatctaacggccatttccctatttggaaactacattgg

SEQ ID NO: 638278 - DNA, 459 bp, Homo sapiens
ggctctgctgtatcccagcacgttgggaagccaaggtgggtggagcacctgaggtcaagagtttgagaccagcctggccaacatggtgaaacctggtctctactaaaaatacaaaaattagccgggtgtggtggcgggtgcctgtaattccagctactagggaggctgaggcaggagaattgcttgaacccaggaggtggaggttgcagtgagccgagatcatgccactgcactccagcttggaggacagagcaagactccatctcagaaaaaaaaaaaaaaaagatttttttaaaaatttggggcaaaaaattttttaactcttgaaggtgaaagggaagggaaaaccagccaagggtcagtgaggtaggaggaaacacacgcatgttgggttcctatcggatgtcaagagaaacacactttgttccaggaaggagggcaccgttgaaccatggggga

SEQ ID NO: 638279 - DNA, 246 bp, Homo sapiens
  misc_feature (103)..(103): n is a, c, g, or t
  misc_feature (114)..(114): n is a, c, g, or t
  misc_feature (119)..(119): n is a, c, g, or t
  misc_feature (123)..(123): n is a, c, g, or t
  misc_feature (132)..(132): n is a, c, g, or t
  misc_feature (143)..(143): n is a, c, g, or t
  misc_feature (162)..(162): n is a, c, g, or t
  misc_feature (189)..(189): n is a, c, g, or t
  misc_feature (202)..(202): n is a, c, g, or t
  misc_feature (206)..(207): n is a, c, g, or t
  misc_feature (218)..(218): n is a, c, g, or t
  misc_feature (225)..(225): n is a, c, g, or t
  misc_feature (243)..(243): n is a, c, g, or t
atttggaatgaacccaaaagatagcggaaagttgggtccattccaaatagttttgtgccattgaaaaacttgaccttcaaaaaaatttgtttttcagaatagnacacaataggncagtnactnacagttgtnaaaaaggaagngaatcattaaaggaaaagnaaaaagattttaagaccgcttgaaatncaattatcaaganacgnncctaaaacacnctatggntttgactttgttattgancca

SEQ ID NO: 638280 - DNA, 750 bp, Homo sapiens
ccgtcctcgtttttatttcattccggggctgcgttccctttaattacctggcgcgtggctgacacattaccaccaggggctcgacagcgactgcaggcccgaaggcagcacacccgcaaaaagtagcctttgtcccctgtccctgtaccccccaccccttccctaaatctaggaccttaggacggtgctcgaaagagcctataggaccctataccagactagcgtagaagcaaaccataccccaggatctactaggctatacagcacgcacagaggggcaggtaggcagaccctagggagccctattaccctatactaggacggcaagcacagagcgctcagaggaacggggaaagcgaagatagcaggagaggaccaaagcccagggacctactagcttagaagcagttaccactaggggagagctggagaactaaaggacctagtacatacgtgtaccgctagccctgacctcccgctatagcgcaccctataggcaaggcgccaccttccaccttatccccgagaagccgacgtacagctaggaggggagacaggataccagcccgaactggatacggaaggtagtagcaacctgatgggatttagggaaatgggttatccctaaagctttatccttgcttaggctaagctagtgagaagtggatacatatcctctggtaccttctggagactctgtaccccatatcttgctgctggtccctcaccggttcttgcaggatccctcct

SEQ ID NO: 638281 - DNA, 407 bp, Homo sapiens
tgggggcctgttccccccctctttccaaaactgggtttggcggggccgtttctccgcgccccctggccctttccccttaacttggaatgctttttgtttgttcggcctgcccccagcccctggccccaaaacccccggggcaacggttttccccgcctgccctggtcaggccctgccccccaacctttttttttcccgaggaaggttgggaggtggaggcccccccttcccccccaattgccccctcccccccccaagttcccaaccccgggttttcttaaagcccccccccccccccgggcccctggggggttgggttccccctttccttttgggcccgggcaaggggggggttttttttagggcggggggggtttttcccttaaaaaaacccccggccccgttga

SEQ ID NO: 638282 - DNA, 1253 bp, Homo sapiens
atgaaggtgctccttccgccgccctcatcgcgtgggtcctgtcttcttcctgctggctgccgggaccttctgtcggccgatgagacagaagaatggggcccaaagtcaccgtcaaggtgtatttatgacctacgcaattggagatgaagatgtaggccgggatgatctttgtgtctcttgcgggagaaggactgttccagatagacagctggagtaagtctatgtgtgagccatttagctaacagagtagcagacacggattttagagctaacatagaaaacacgctaatattccaatcgatgtagatctaagggcacatttgcagtgaatcactacgggactgtgcacggacttcgaaccaagtgggacgcattgtgcaactaagagaagcgagaacgacgccacttcgtaaaccgggtttgacggcagccctttccccccggaattgaacggaatctcttccaataaaagcattgcgataggtcaacccgttaaaccgaggtgtccccgttagggcgttgaggggttggatggccctaacttgtggccccaaaactgggcgaagaggccataagacggtacccagctcaaaagtctggcggcgattcaccccacattcttttgctttgcccatttacacagacggaacaccacggttccggaaatggaaagccagaggtcaccctttgtggggacctttgaggtgcaaacttgagatcaccaacacaggctgggcacacatctttgacttagcgcgcggtggcatttattctgaggtgtgccccaaagacgagatctttctgcatttttagagacacacgtcgagagcccccaacttgcggggccaggcaggtctctgggcgacattggtcccggcgcgtaacacatacgagaggtgacttgcgcgtgcactaggagaaggaagccagactctcccacaaacgacgacgaaagaccgataatggccacagcgccacagggaagatccccaggacggcaggtaaaccttctcacaaattaagcgggcccccaccccgtctgcttcagccaaggccggggagctttgtgtctttgggctaagagtttccgataattctcaagggttgcggaatgatggaacccatttggctccatgtgtgggtcccccaacgatttatggcgtaactttgccccggcaaaaggtcgcggcgttcgggcgcgtcagcagtgcaacacaacaggggtcccacgccccgtattatataatggtggc

SEQ ID NO: 638283 - DNA, 392 bp, Homo sapiens
  misc_feature (199)..(199): n is a, c, g, or t
  misc_feature (333)..(333): n is a, c, g, or t
atgtttactttacggaatgacatctttttcttctgtcatataaatattagtttttaacccctttcatctggctggctcccacttgcaattcaaaggtcaaggtagcctcctcaaaactccgcggcgaggtgcgcgtcccttgagcttccacatctgggcctccctctcccagggctaatcgcgctgtcatgtatttctngagagatgtcgcatgtcgcccctggcgcgctgtgggctcttccaagccaacagcatggtcttggtaccaaccgtgtcctcggtctgctgtactttcaagtgatcggaaagtgatgcgacgatccggggatcccnccaggctcagagatacccctggttagggctccgacaagtcgttcccctcaaaggctctc

SEQ ID NO: 638284 - DNA, 792 bp, Homo sapiens
  misc_feature (120)..(121): n is a, c, g, or t
  misc_feature (129)..(129): n is a, c, g, or t
  misc_feature (133)..(133): n is a, c, g, or t
  misc_feature (138)..(138): n is a, c, g, or t
  misc_feature (140)..(140): n is a, c, g, or t
  misc_feature (145)..(145): n is a, c, g, or t
  misc_feature (152)..(152): n is a, c, g, or t
  misc_feature (165)..(165): n is a, c, g, or t
  misc_feature (374)..(374): n is a, c, g, or t
cggacgcgtgggctccttacaactagacactgacactgtgtggcatgtccattcattagatcttacattcgggaggactataaatggtccccttgataaaaaaaaaaaaaaaaagctttnncagagaantgtntttcncngaaancaaaggntctctgttctaanagctgggcattgagataatttgcctctgcacggactctgggttgagaattatgccatggttacagatacagggggatttccatgcccagcaaatctggctgggcagaagcccgtgagcattttcctcccaagggctggctgtaacggagttgaaagccagttctaagatgtctggcccccaagggccaggtttggggcagtgggcctcnagtccactggctcgtggctcggcgtcaacaacaggtttttgggccccatggaacttatgggcctacctcattccatggcctggagatgtgaacgctcacagcactgggagccccaatctgtgtccacggggaaactgattccacgcaacaagagcacacttctctggcctcgggtttaggagcctcagggaaaagcctaaaccctctcttcagaacacgtgggcgccgtggaaacattcaggaacatagcagccaacgggaaattcgcgaatttcacaatttccacacaggtttattgaactttagccatagcgggccacacgtattaatacagactccttaaaaaggcccatttcagaacacaccatagggtcagaccaatatgtgtgaaactctaacgggaagcactggtttataa

SEQ ID NO: 638285 - DNA, 285 bp, Homo sapiens
gactgtccgggagccttaccctcaaagtgcttagctgtgaacccagcagtgtctgggcctccagtgtggactgcagctgcggaacttcagttggagcctgccttagcccttcctgccatgaaacagaagccaaaccctaccatgctcagaaggcaatagccacgttaagcaatccaacaaccagtgttccagcaacagcatcagcagcccatcaattcatgccatgcacccacattcacagtctctttcgcgcatcatcgtcaggcaggccccttcaacccacct

SEQ ID NO: 638286 - DNA, 115 bp, Homo sapiens
ggatcacttgagcccagttgttcaagaccagcctgggcaacacacgtgaaaccccatcatctacaaaacagaataaagaaaacttagcctatgtgtctgtggcatgatgtgactg

SEQ ID NO: 638287 - DNA, 415 bp, Homo sapiens
  misc_feature (32)..(32): n is a, c, g, or t
  misc_feature (77)..(77): n is a, c, g, or t
  misc_feature (253)..(253): n is a, c, g, or t
  misc_feature (275)..(275): n is a, c, g, or t
  misc_feature (327)..(327): n is a, c, g, or t
  misc_feature (354)..(355): n is a, c, g, or t
  misc_feature (404)..(404): n is a, c, g, or t
ttttcagtagagatgaggtttcaccatcaggngatccacccgcctcggcctcccagtgttaggattacaggcgttanactgcacccggcccaccttaactttacataggacaagagttccaaacatacaaactgatcacgaagttaacatatacacctcagacaggaaactggtagccaacagcctgcaagttatctactagatgtttagatgtttccaaacaagctaggtgtcatcgtgtattaagtgtggntgttagttctgctgctgaggtngcagcatcacctatttccacaccagttacagctccctgggtgccttaatacnggcacccggcagaggcatgttgattanncagattctgacttggtccctgaagctgcttctctggggttgttatggcnatagctgccaa

SEQ ID NO: 638288 - DNA, 341 bp, Homo sapiens
tcatgtatgaaccctctcggtctccatatctctatccaaagcgttcagactctacctgttattcacagtgtgctacttcctatccaataaccatcacatagtgcaagcattcttgtgtaggaaaggccattgatatcaaagtacctgcttcctcatgctgtgcgctctctctgatataccctctacccttcatataccatccaatttcatatctcctcagcatggtgtcgtgcaagcttgtgccgcttactgtggcgacatagcggttcgaggcacttaaggtgactctcctggtgtctcccccagtgcgacttctacatggagctccactgacacctgag

SEQ ID NO: 638289 - DNA, 306 bp, Homo sapiens
tgaggatcccccaagctatctagtgacagcgatatataattaatataaccatattatatgtttggtgatatattgaactatgctcactcactccttatgactctacgtgcgctcaccttctagtatattgggagaaacgcatattcacagcttaacttctgtgatgcagaatactgaacatttctaaaccaagagtctaggacttcatatgcagaatgaatggggggattttataccttttagaagattcaaacagtattttttatatcagtctgaagttagaaactagaaattgttttgttaaaa

SEQ ID NO: 638290 - DNA, 136 bp, Homo sapiens
  misc_feature (66)..(66): n is a, c, g, or t
ttgtgcccagaacaggtgtgtgtgtcgctgtcatcagagcaggcgtgtggtgtgcgctgatactgntactatggaggctaggtgggcatcacttgagccgggagttgaggctgagtgagctatatcatgcactgtg

SEQ ID NO: 638291 - DNA, 726 bp, Homo sapiens
accgggctgtaggaattcggcacgagacgagatattttttgtttttttttacaaaaagtcaccatggctgattacgtggcgagcaatcttggttactgagaatagaagtggcgcggaatactaagctctatactgggcttgtggattaaacctatataacaaaagtgaaaaggggttatggtctaagagactcacaactattttagaggagtccaagttcacatggtggttacctttaagtttatcacactgtaatggctgaacaggcttgcagatacagacatgaacaatgcgccgagaatctggtattatcaaggactgggtgtgaaaggcctcattagtatatgtacagagctttaatgccctatgcttatttaaagaaagtgtgtttgttatttattgcgcaacttacaaataatttctcagagatgtattcgcttttaaataggaacttataccaaactttctaacccttggcgagagaacacatggaaaaaagcccaagctatatttgtcaatcggtttttataaggcccacaaaatcagtaactttttcgtggcaatgtatctcgcgcgcgaatttgggacgaggggacccttagttatgcctgaagtatgtggactaatggatgccgggacacctacactacaccggctcgcacgtaactggagaagtttcatgttgcctgtggaggggggtcttccgttccttgccagggacctagg

SEQ ID NO: 638292 - DNA, 977 bp, Homo sapiens
ggctaggaatgcttcgcccgtgctaactcgcagccatgcactgaggctgagtgtgacactcgcaaaggcctatgccccttgccgagttgccacctcaccaagaagctactggcaccgacgctccgtcagacatgtacacgtagtatgcagcttcggcataaaggtagcctagatggagtgtcctccagcacacgcctcacataggggtgcggtctcgtcgagctgctattcccgtcgatggcttggtctgactgctccggagccctagcatcggcaggtagtccattccatcgccccacctgtcccgcgttgctagttttggaaatgattggcgattttcgttgcccccctatccgatgtccttgatcgactgcttcctatacgtcaggtgctccgtcgtggtgcaagtacggtctcggatggcgagtcggtccagggccctagtccatcgtggcatgctctcatagtcgcacctgagtccaaaacgcacaaggcctcggactaagtcttggacaaactgatcgagaattcctggattgcgcgagtcctacgtcgagttccgtagtaacgaataaaggcttcgtgttacatctcaagaccatgctggggctctggccatgtgctcgcacttcgtcgagggtttcgcccgctcgtgacggcttggggatttcaatatctatcgtaggtgtttagtatttgatacgtccttacttccacgtgatcatcttgatttggtggattaaagaacgttgtctcgaatgggacttgcgatcttgccgtgcacttctgggacgtgggaagcccaggacctggttgcactctgttccgctccatccccctggttccaaatcaacacttgacaacagtttctcttctggatttggctagtctggccaacttctggtccaaatccccaaagcagaaaaacacccgtggatgcgaggagattctggggccaccacgtgacaaaaagtcgg

SEQ ID NO: 638293 - DNA, 294 bp, Homo sapiens
  misc_feature (282)..(282): n is a, c, g, or t
tccttacagctatgcagagaatagccactactcattacctccaaagctagtaacatatcatctcctgccggaatattacaactgtgctaaatgcaattttcaggtattttctgttgcaagcattttgaaaccactactccacccttccttcaatttgtggaagatgacatacaaagatagccaccatcaattcctctctcggtacatgcatgccactctaccaactaaagatggagtctatttccatatctcccctgaatctgagctagcctgatgactggnctcacgaattcc

SEQ ID NO: 638294 - DNA, 163 bp, Homo sapiens
atcagaagagagaaggagagaagtgaggcagaggggagaaaaaatcagtagaaggaaaatggagaattcaggagacaggaggtaagcatgttagagtgaggacagggtgaaaagtaaatccgtgccaaaggtgaaggttatgcttcctgggcaaggaacagcc

SEQ ID NO: 638295 - DNA, 2331 bp, Homo sapiens
caataaccccagcattggagagagtggagcagcccttcaagaagttccaacctctgcccaggactggttttaccaacttcactaggcttagaatcgtaggaagtctatttgggacttgcgagtctcacgtattcctgcctaaatgtttatggatacctgtttagagctgaaatcttttcagctcccataatatgagggaattaggtctcaaagaagatcatgtattttgatcagaccttatagctgagcagtggaaagaaaaaaaatcagtgtgagatctcccagggttccgcagagttggcttccttagtccaactggcagcctatcctgggaatattgcctggggagagaggttagttgcttttcctggtgctaggaactgaatggttttacatattgatcaatgaaaatacttatttggcctacaataggtgcaaaaatactgctaattactaacagtatctcttctttgctgcgtgccagacactccactgggcattatgcagttaatatgtaccatgaatttcccgtggttagcaatgatgtcaggcatagaaaagacatgaaattgtgatgtcaaatgaataaactggaaaaaggaatttcttgaattttctccagctgtcctaagaatgtatctatactttgatcctggcctaccttttcaacatctaaactttattcccccaagcttctagatattcaaagttaagtattaaataaaatcagtaaatatatacaagcttgtttggccattctgaataaggttatatttccaccacacaatctccaaattctctagcagaagggatcagtatgttatagataccccctttccttccctccctggcaagccaccacatctgttatgggtactcaatgcagtggctgcacctgggcctcactcattaagcagttgttgattgagtgactgaattgaatgcctgatgagctcgcaagtaagattcagactgtgcctgcaaactaataggatccctctgctttttattcactactgctgaggtagatctcaggccagcctgaagtttaggtctactgagaaataataagcctcaaaaatcgagctttgcttcacccagtctcccagtaaacactaagaaatgttcacattatttacacatcctagactgcctgtcttatggaccaaatgtttgtgttctccccgcaatttatacattggaatcctaaccctcaatgtaatagcattaggtgctggggtctttgggaggtgattggctaatggacctggagccctcatgatgggatgagtccccttatcagaagagacctgagaaggcttgcttcctctccctgtgctcttcatgatgtgaagacacaagaagacagccatctgtgggccaggaagaggtcctcactggaacccaaccatgctggcaccccaatcttgaatttctagcttcaagaacttgggaaataaatgtaagccagccagcttatggatttgttacagcagcctaagctaagtcagagtctctagaacagctggtctggggcagcggtgaagggaggtgggtgggcatatgaccctgccctgcacatgaatggcaaaggcaactggagagcctctcccttttggtgagatccccagtccacaagggcatgttcatccatagctttacttcccgaagcaaattctggttcctggggcctgtgcctccatagatggcatgatctgcagcctcctgtggtaatttaccctcttcctaaatttctgagtcttcacatttaagcaatcctagttagatatccctcctacctgtatcccatggctgtctttcagtcacattacagactcattgtgatgacccatgtagggacaatgtgatttcagaaacatggcctcatttgattttaatgtaaatataaatcagtgaagcagaaaaggagaatctccagaaaaacaagggatgaggctgtacagcaagttaaagtggaatcagaacccaactgtagtccattatttgtttcaatcctgctcttttctaccatatcacccagtttccaaatcgttcagcaaattgccatggtcaatgggattaacctttcccttttattctcaggaaatctcccttgtccattttgcaagactgtgtgattctttctactgttacaaggaataaaagccttcctaaaaaggtctttggtgcctttattattttacggatcatttctgagggaattattgaacttcattatgtaccaccccttggttcaccttgccactgcctagacagagccatttatccagacaggagattgcaatggagaagagaattcatgcagactgg

SEQ ID NO: 638296 - DNA, 302 bp, Homo sapiens
gcgcagtgtggtggattcagacacactccacctccagcacgcgacttctcaggacgacgaatcttctcaatgggaaaacggctgagctccagccaccccgtcagtcactgatctaggtcgacatcttccatgagctgacatcgacaactgcacacagggtctataacgtgttccatacattacactaggtgggctcatggtggtattagttcgaaacaaagcacctgtcctctgacaatggtcgaacttgacgtaagcattaaggtgactctgtcatgctgcgtccccaccagggaggtgca

SEQ ID NO: 638297 - DNA, 273 bp, Homo sapiens
  misc_feature (52)..(52): n is a, c, g, or t
  misc_feature (72)..(72): n is a, c, g, or t
  misc_feature (90)..(90): n is a, c, g, or t
  misc_feature (93)..(93): n is a, c, g, or t
  misc_feature (115)..(115): n is a, c, g, or t
  misc_feature (127)..(127): n is a, c, g, or t
  misc_feature (148)..(148): n is a, c, g, or t
  misc_feature (183)..(183): n is a, c, g, or t
  misc_feature (196)..(196): n is a, c, g, or t
  misc_feature (228)..(228): n is a, c, g, or t
  misc_feature (232)..(232): n is a, c, g, or t
aattttttaaccatcagccatgtgctgctatttatccggcttccaggctttntcccttacctgagagattanggactccacagctgcctngcngtagggcctggctgagagacancggtagcagcangcggcaggctgttaaacgacnggctgcccccggagcctggagcaggtggaaacacngtggaagaaaccngccacagccctgctttacccggctcacctctncggnattccagcacgcggctgatgcaggagaatctccagcaccaa

SEQ ID NO: 638298 - DNA, 271 bp, Homo sapiens
  misc_feature (42)..(42): n is a, c, g, or t
tgggttctgctgagcaaaaaacagaaaaacaaactttgtggntagcagtgcgtgcaggcaaaagaatcagctcataagctggcagcagagatctatatatgcaagtacagacatttgtaagactctcatgctactggggagccaggttatgtgccccaaagacacccagttcagggggaaaggggacaggccagatagaatgtgcagtgtgagttggctactgttgactgcattttggaatgctatcacagtaaggaggaaagaactggct

SEQ ID NO: 638299 - DNA, 2173 bp, Homo sapiens
caataaccccagcattggagagagtggagcagcccttcaagaagttccaacctctgcccaggactggttttaccaacttcactaggcttagaatcgtaggaagtctatttgggacttgcgagtctcacgtattcctgcctaaatgtttatggatacctgtttagagctgaaatcttttcagctcccataatatgagggaattaggtctcaaagaagatcatgtattttgatcagaccttatagctgagcagtggaaagaaaaaaaatcagtgtgagatctcccagggttccgcagagttggcttccttagtccaactggcagcctatcctgggaatattgcctggggagagaggttagttgcttttcctggtgctaggaactgaatggttttacatattgatcaatgaaaatacttatttggcctacaataggtgcaaaaatactgctaattactaacagtatctcttctttgctgcgtgccagacactccactgggcattatgcagttaatatgtaccatgaatttcccgtggttagcaatgatgtcaggcatagaaaagacatgaaattgtgatgtcaaatgaataaactggaaaaaggaatttcttgaattttctccagctgtcctaagaatgtatctatactttgatcctggcctaccttttcaacatctaaactttattcccccaagcttctagatattcaaagttaagtattaaataaaatcagtaaatatatacaagcttgtttggccattctgaataaggttatatttccaccacacaatctccaaattctctagcagaagggatcagtatgttatagataccccctttccttccctccctggcaagccaccacatctgttatgggtactcaatgcagtggctgcacctgggcctcactcattaagcagttgttgattgagtgactgaattgaatgcctgatgagctcgcaagtaagattcagactgtgcctgcaaactaataggatccctctgctttttattcactactgctgaggtagatctcaggccagcctgaagtttaggtctactgagaaataataagcctcaaaaatcgagctttgcttcacccagtctcccagtaaacactaagaaatgttcacattatttacacatcctagactgcctgtcttatggaccaaatgtttgtgttctccccgcaatttatacattggaatcctaaccctcaatgtaatagcattaggtgctggggtctttgggaggtgattggctaatggacctggagccctcatgatgggatgagtccccttatcagaagagacctgagaaggcttgcttcctctccctgtgctcttcatgatgtgaagacacaagaagacagccatctgtgggccaggaagaggtcctcactggaacccaaccatgctggcaccccaatcttgaatttctagcttcaagaacttgggaaataaatgtaagccagccagcttatggatttgttacagcagcctaagctaagtcagagtctctagaacagctggtctggggcagcggtgaagggaggtgggtgggcatatgaccctgccctgcacatgaatggcaaaggcaactggagagcctctcccttttggtgagatccccagtccacaagggcatgttcatccatagctttacttcccgaagcaaattctggttcctggggcctgtgcctccatagatggcatgatctgcagcctcctgtggtaatttaccctcttcctaaatttctgagtcttcacatttaagcaatcctagttagatatccctcctacctgtatcccatggctgtctttcagtcacattacagactcattgtgatgacccatgtagggacaatgtgatttcagaaacatggcctcatttgattttaatgtaaatataaatcagtgaagcagaaaaggagaatctccagaaaaacaagggatgaggctgtacagcaagttaaagtggaatcagaacccaactgtagtccattatttgtttcaatcctgctcttttctaccatatcacccagtttccaaatcgttcagcaaattgccatggtcaatgggattaacctttcccttttattctcaggaaatctcccttgtccattttgcaagactgtgtgattctttctactgttacaaggaataaaagccttcct

SEQ ID NO: 638300 - DNA, 582 bp, Homo sapiens
  misc_feature (176)..(176): n is a, c, g, or t
cgggaatattataaaacgtaaacggccaagctgtgccgtcaagcgaagatgtctgccgtaggtcagagttataccattcaccgtggaacacgagatacacgccaggctacgcagcagcccaagtcaggagtaacgcttcatccccgaaagtcgaggaagcagtcatccaaagtagngccatgcattccagctgggacaacaagagcgaaactccatctcaaaacaaaccaaagcaaaataaaccaaaccaaaaaaaaaaacccaactaaaatgtctaaagaagtcctaaagcttcgttggggctggacgcagtggctcacgcctgtaatcccagcactttggcaggccgaggtgggtggatcacctgaggtcaggagtttgagaccagcctggccaacatggtgaaaccccatctctactaaaaatacaaaaattagccaggcatagtggcatgtacctgtaatcccagctactctggaggctcaggcaggagaatctcctgaacccggaaggtggaggttgcagttaactgagatcacgccactgcactccagcctgggcgacagatcgagattccatctc

SEQ ID NO: 638301 - DNA, 250 bp, Homo sapiens
atcagatattaagtctatcgattaggtatacagcacagagactttcttcacctattgtgttaacacattaggctcactctcactgaagagaggatcaatcatgacattaccttaccagcgacaggcaggcaacctgaatgtgcatcgatatggtacaacgtctgtagcgggattacaatacctgaatctttacttagctggttcaagtaaagccagcagaggacgtcaccattgcaactcttaccggtcg

SEQ ID NO: 638302 - DNA, 103 bp, Homo sapiens
  misc_feature (28)..(28): n is a, c, g, or t
  misc_feature (66)..(66): n is a, c, g, or t
  misc_feature (85)..(85): n is a, c, g, or t
ttctttctggagtaatgtaaatgttctnaaattaattgtgatgactgcataaatctgaatatactnaaaatcattaaactgtacnctttaaatgggaaaaaaa

SEQ ID NO: 638303 - DNA, 417 bp, Homo sapiens
  misc_feature (16)..(16): n is a, c, g, or t
  misc_feature (42)..(42): n is a, c, g, or t
tcaaggaaggggatanccagacataaggcttgttgcaccccngccttggcattcacgttgtgtctgcatctgtcagaccccaggaccccagagctcctgtacccctggagagtgagcatctcagagccgtggtctcagccttgtcacaggtgggcacgtctgggtcttgggatgtcagaaggcattggtagggaacttggcctggttgcccctgaattcctcctccacctcctggtccatgacgcaagccctgcctgatagggccgccatcttttttcgggaagctcccgagctgtgggggaccaaagccctcagaggaccggcaggaaagccaggggatggatcagggtgaggccgggagggagagcgagggccttgtgtgcctgatctgtgtgaggggttgggggccgcacccac

SEQ ID NO: 638304 - DNA, 748 bp, Homo sapiens
attcggcacgatgggggaggtgcaagatgagcctgcactaccttttgtcacggttgctatggaaaagattaagagcccggatagcccttcctcctctgggggcctgggcatcagcaagtcggatggcagtggaaggtggagaaatggaatcctgctgggggctcaggaggcctgcccccgtgatgctgccgtgcactgcagatgtccttgatgaagagaatgaatggaagctgtctttctcaatggcaaaagggcatactgctgttattgtcagtgaggggtcagtagtttaaatgatgaaactctggggatcagcgtaaagtaaaccaacatactgcatgtaaattcctcattcttactgctgtgagaacaattgttaggagccaaaaacttcagagctttcaaagaactgtaatgagatagcacaatgcaggcaaaaagccagtgttaacggagcaagaaacttcccagttctgacattcacagcatgacctagagcatgcggattcccctctctgagtcactggtttctcacctgcaaaagaaagcggggacagggaaggaggaagaagcttcgagaggctggaacagttgagggagcgctgacacggtaaaggccactttgctcatcatcaccaggcgtgctgccgaaaatttccactctgtttactcccaagaccttactcctactatgtggagacacatttgaataaaaaattggcctcttttcaaagtcaaaattctgaaa

SEQ ID NO: 638305 - DNA, 368 bp, Homo sapiens
gattccttgaggtatcccctctgttagggagattagttattttgaaatggagtttcactcttgtttagcctggctgtaggtactgtgtcacgatctcgactcactagaatcctccacctcctgggttcagagtgattctcctgtcctcagacctccctagtaactgggattacccgcacctgccaccacacctggctaatttttatatttttattagagacagggtttcaccatgttggtgaggctggtctcgaactcctgacctcaggtgatccgcctgccttggccttccaaagtgttgggattacaggtgtgagctaccgtgcctggcctatttttttttagtataagaagtctttttagcaggt

SEQ ID NO: 638306 - DNA, 950 bp, Homo sapiens
  misc_feature (496)..(497): n is a, c, g, or t
  misc_feature (596)..(596): n is a, c, g, or t
  misc_feature (634)..(634): n is a, c, g, or t
  misc_feature (769)..(769): n is a, c, g, or t
  misc_feature (884)..(884): n is a, c, g, or t
  misc_feature (940)..(940): n is a, c, g, or t
cggcttcctggggcggaactgtttcgcttttccccgtcccagtggagggtggggtgggggggtcgcagccctaagcctctgggagacatggagcccaggagggcggcgcccggggtgcctggctgggggtctcgggaggccgcggggtcggcatcggccgcggagcttgtgtaccatctagccggggccctgggcactgagctgcaggatctggcgcgccgtttcgggccggagtggcggccgggctggtgccgctagtggtgcgggcgctggagctcttggaacaggctgccgtggggcccgccccggactcgctgcaggtgtcggcgcacgcggagcaggagctgcggcggctgcgggaggagaacgagcgcctccgcaggagctgcgcgcggggccacaggaggagcgcgcgctgctgcggcagctcaaggaggtcacggaccgacagcgggacgaactccgggcgcacaaccgcgacctgcggcaggcggcnnggagaccgaggcgttgcaggagcagctgcagcgcctcctgctggtgaacgctgagctgcggcacaagctggcggcatgcagacccagctgcgcgccgcnagggacccgcgagagggagcgccacagccctggcgaangccgactccgcaggctaaagagcgagcgcgggggcaggccgggcggcccgggcaccagcacggacaggagcccgaatggcgacccgccggcgcaggcgccccagggaaccctgaggacccggcggaggcgcgcanaggctcggggcgcccctcggaggcagggcagtgccgcttcagtcgggaggagtttgagcagatccttcaggagcggaatgaactcaaagccaaagtgttcctgctcaaggagganttggcctacttccagcgggagtgctcacagacaccgggtccccggccttctgctcnaggcatgaag

SEQ ID NO: 638307 - DNA, 1009 bp, Homo sapiens
attcggcacgatgggggaggtgcaagatgagcctgcactaccttttgtcacggttgctatggaaaagattaagagcccggatagcccttcctcctctgggggcctgggcatcagcaagtcggatggcagtggaaggtggagaaatggaatcctgctgggggctcaggaggcctgcccccgtgatgctgccgtgcactgcagatgtccttgatgaagagaatgaatggaagctgtctttctcaatggcaaaagggcatactgctgttattgtcagtgaggggtcagtagtttaaatgatgaaactctggggatcagcgtaaagtaaaccaacatactgcatgtaaattcctcattcttactgctgtgagaacaattgttaggagccaaaaacttcagagctttcaaagaactgtaatgagatagcacaatgcaggcaaaaagccagtgttaacggagcaagaaacttcccagttctgacattcacagcatgacctagagcatgcggattcccctctctgagtcactggtttctcacctgcaaaagaaagcggggtgcgtgtatttatgggagtagggtgggttttggctaagcacaggagtcatctgggtggcttcatacacagataaagggctcatcccaccaggtcgggcttttgaacccgaaatgtttggcgtgacggtgggggcacctattctgagaaactacctctccaggggttgcagtcacacagcccttgccaatcagtgtctgggaaccagggacctgatcatctctaaggtgcctccaagatccagcacttaattccattttaggacagggaaggaggaagaagcttcgagaggctggaacagttgagggagcgctgacacggtaaaggccactttgctcatcatcaccaggcgtgctgccgaaaatttccactctgtttactcccaagaccttactcctactatgtggagacacatttgaataaaaaattggcctcttttcaaagtcaaaattctgaaa

SEQ ID NO: 638308 - DNA, 715 bp, Homo sapiens
cggacgcgtgggtcgacccacgctgtcgccgtagagtcgtcggggtttcctgcttcatcagtgcttggacggaacccggcgctcgttccccaccccgagtccggccagcccatagaccaggcccatccgatcacctcattcaccgcaccctcggactgccccaagggcccccgccgccgctccagcgccagcgcagccacctgttctgccgccgccggacctctccttagtcagccgccatgacgaccgtgtccacctcgcaggtgcgccagaactaccaccacggacatcacgaggcctgccatcaaccgccagatcaacctggagctctacgccatacctacgtttacctcgtccatgtcttacatactttgaccgcgcacgatagtgagatacacagcacagaacttagccacaatacatattcttcaccaatctcatgaggagacgggaacccatagctgacacacacctgactgacctcctgcccacacccaaccgaccgtgagacccgcactctacccttcaggcatatccaagaacaccatacctgatcatgcacctcgccccacaaccgcacatgacctcgcactgcactcatgcactacaaatttgcccaaaacaaacgatgaactacaaccaaccccccgcacctcccaccaacctggccacttgcacccaacacaccccacaaacgatctaactaacaacgccc

SEQ ID NO: 638309 - DNA, 378 bp, Homo sapiens
ctactactactaaataaacggccgctcgacgccagcgacagatctcgggaatatccacgcgccgctggtacacccgcagcggttcgctgatgttgatccgatcatcaatgttctggtccagcagcagttgaatccgttcgcgactcaggctcatggcctcctccccggccggcacccagacaaactcgcaggccgcaaagatggcgtcatccgccacgtccatgccgaagtccgtcactgaagcggacgatgtactgggcggccttgtgattgaagccgacaaaacccttgagttggtcggcggcctggcagataagctcggatgtgatcgacatggtaaaccccgctttagagccacaaggctcagtcgacgcggcc

SEQ ID NO: 638310 - DNA, 337 bp, Homo sapiens
cgtgtaggggaactaagaagccacagaccatagagatagagtacaaggcgtggtaactagcatacacttagttaaccttggcaagacctaaccctctatgagtctcagcttatactcatctttaaatgggataatatttatcacatggaataactttgaagatagcctaattcagcattccatgacacagtcgtcactctacaacatgttgcgctgttattttccaccctaatgctaggcttaatgctgtgatctgtgtgctgcggggataagagaaaaatagcagaggtcctgctctctctgtcctcattcaggactacggaagtttgctaaggaa

SEQ ID NO: 638311 - DNA, 183 bp, Homo sapiens
gttaattgacccttagaaaattatatttttctgcttgcaaagtcttcatttaaaagagggaatttttaaaataattttattagtataattgctattccaaactccattttttaaaaaccaattttcatttatgggagatttttcacaaaatcgcacaaacagggattaagcaagatgaaagct

SEQ ID NO: 638312 - DNA, 757 bp, Homo sapiens
ccgctcctcccgggggggtgtaatcaagggcctttttgtgccgctagtctcctgtggaggcgcacaaccccgtgttggtgcgcccactcagtgaaccgcgggggggttaaccccctctggggtgtttttcttaccccggcgggggggatatatttttctccccgcggaagcaggctagtcgaccagtatggtggcctcttttttgggtgcaccacatgtaagaccacgtggttgtgtggcgcacaacagaacgggggggtggttgctccttgcgcgcgtagtattctccggcgcggttatttttcgctggccccgcgccggcgcgtttgcttgtctgcccccccccaaagtgtgggtttccccgccccgatcaaaccacagctgactggattggtgtgtgctttcgaccaccccctctcgtctgttttatccgtcggttgcgtcagttttatttttgtggggcgcgcggcgacgcgggggacaaggttgtgtcgccacttttctcctcccttctgagggggttcttctcccccccgggcggccctgctatgaacgaacccattttcttctttgtcaccccaccagccggtggtgtctccttctttttttgggcgcgcacacattttttttccgcccaccgagtttgatgatttgatcccccccccctccccccccccccccccctcttttttttttccccctttttccccccccttttttttcctcttttttcccctttttttttttatttttttta

SEQ ID NO: 638313 - DNA, 243 bp, Homo sapiens
caggtactccaggaaggacgaggtgtagagcatctaccactggtatgactttaccagctcgttgtatatcctggtcaacctctcagcgacctggagagattcgtcgagctcccgccgaagcttagcctgggaggggaagtaggtggaacagtccacagacaagatctcccggcacttgtcacactggtccttcatccgcaggcatgccgtggagttgtggcggatctcccggtacacagtcct

SEQ ID NO: 638314 - DNA, 354 bp, Homo sapiens
atccgcgctgatgatgcatggtgaaaccgggaaacatggcgaagccggtttcgccattgtttccctccaatctacctcccttcatgctgttgagccattgagttaatccacagaagatttctgtccagcaatagatgatgaccagactgcaattccctgtatagcttcaggacgttgaagttcacatagtgcttctaccaccattataatggttacttccaattcattcccctgtacaacgcattcagaatagttagtcagcctataccattatcacattattccctataaaatttaccactgatcacagtctgtgcctgcttaaagccaaatgtatttaactattattttcac

SEQ ID NO: 638315 - DNA, 181 bp, Homo sapiens
atgtatttgttacaacacacgtatctttgtaactagaaaataaagatttaaggccgtacgcagtggctcaagcctgtaatcccagcactttgggagcctgaggcgagcagatcacctgaggtcaggagtttgagaccagcctggccaacatggtgaaacccattctctactaaaaatacaa

SEQ ID NO: 638316 - DNA, 170 bp, Homo sapiens
  misc_feature (101)..(101): n is a, c, g, or t
ggcacgatgtgctgcgacttcatcgattgtccccctgatgatgagaagcaccacctcccacagagccgtgactcctaggccatcttctgcaccccactctntgtttccaataaagttatgtccttaaaaaaaaatgtgggttttttgttttttttttttttttttttttt

SEQ ID NO: 638317 - DNA, 942 bp, Homo sapiens
ggcccctgggctgggacagcccactgttccatgctgcccaagaaggctcagcacaggcacaaaccattgcccggcactggcccgtgctgcctgagaaggattggctacgggtcacatgaccatctgcccccacctgctcctgacgccatctacccactggaaggctcggctatcgggcaccaaccacagtctccaactgcaccccatgctgccgtgagaaggcactgcacggacaccccacaagatggccagactgtcccttacccggaggcagcatgcgaggcggctggaactctgctggccgttctgctgccctggtcttgagcaccactgggggcccttccccagtaatacttgatcccgcaggaccttaactcacgtgtgaagccaggagttccctaaaactcataaagaccattgatcccacggagtcctccaatgcaggcacataccgtgttgcatatcagtctcgacaactgcacgagcgaacattgtgcttgttcaaggagtcccggatcacacagggccctagtttccagatagtgaaaggcctgaaatatgatgctggaggtggaacattggcgaactaacccagagacaaacagaactgcgtctggatgactgtggagtaccaacccaaccgcacatgaagcagactctgagctgtactctgaagcactgggtcgtgcctggctccagcactacgaggtgccagtactccgaagtcattgacccgcctcttcagagaaccggcatgaacacacggggagcatgtccttgccgtaccgcgaggcaaaacagacagagacgcgcagggctaagaggaaggtgacgaccggtcagacgcagagatgaaggaccgaagtgagcgatgtcaagaagaaaacgtgagcccaaagacacggggcaaagagagcaagagagcaagacggcagtgcaggc

SEQ ID NO: 638318 - DNA, 848 bp, Homo sapiens
agcggaaagagcgaacctgtgtcgcaggttctgcgtggtgagaagacataatgtatgctgagcgtaagttggtcagtactcactacgaaacagtctcccatgaatcctgaacacttctgttagactgaatcctatactctgtcggagatcttcccagggaaatttagccctgagtccgaggaggacgcacctatgcaccagtacggagctctgcgctcaacccagtatctgtaggcccaaggtcgcctgatctctgctgaagtgcccactgcccgacgttcgatcagcccgtgccatatccctttctatgtagttctgttgtatatctctagagactgtgagtgctgtgcatcatgtcgggcgccagggctggacgtgctagtggcgaccagtcgtttggcgtcaacttcaatcatccgggctccaagggttcaaggtgatttcctcctgccgtccttgtcctcccggatgtttagctggggattacatgtgcgacccgttcagcgttaccgtggcgtaggtgtgtgttgatacgtttcgtcagtagaggcaccggggattcgaccgatgttcggcctagggccttggtgtcgccagcgtcctgaacctcaggttgaatctcatacttcgggccattcaggccggtccccaaaacgttgcgttgggcagtttaacagacgttgttgaagccctgcacggctgcaccctggagcgcccgttaatgtcgttagtcataacagtgcgagacaggtaagcaatcggaatggagaaaaaatttaccaagaaaaagcacatcggccatttttagcttaaagcaaccagcgggcaaggaggcatggttctcccgg

SEQ ID NO: 638319 - DNA, 118 bp, Homo sapiens
aaggacatacggctaagactgtacgaccaggtaaggcagcactagagaaccgcagaaacggctgtaagtaacaaaaaggagatagactacagactagccctatagtagcatactagac

SEQ ID NO: 638320 - DNA, 839 bp, Homo sapiens
  misc_feature (26)..(26): n is a, c, g, or t
  misc_feature (87)..(87): n is a, c, g, or t
  misc_feature (98)..(98): n is a, c, g, or t
  misc_feature (104)..(104): n is a, c, g, or t
  misc_feature (118)..(118): n is a, c, g, or t
  misc_feature (120)..(120): n is a, c, g, or t
  misc_feature (122)..(125): n is a, c, g, or t
  misc_feature (131)..(131): n is a, c, g, or t
  misc_feature (140)..(141): n is a, c, g, or t
  misc_feature (157)..(157): n is a, c, g, or t
  misc_feature (174)..(174): n is a, c, g, or t
  misc_feature (216)..(216): n is a, c, g, or t
  misc_feature (218)..(218): n is a, c, g, or t
  misc_feature (227)..(227): n is a, c, g, or t
  misc_feature (230)..(230): n is a, c, g, or t
  misc_feature (234)..(234): n is a, c, g, or t
  misc_feature (259)..(259): n is a, c, g, or t
  misc_feature (272)..(272): n is a, c, g, or t
  misc_feature (292)..(292): n is a, c, g, or t
  misc_feature (310)..(310): n is a, c, g, or t
  misc_feature (353)..(353): n is a, c, g, or t
  misc_feature (390)..(390): n is a, c, g, or t
  misc_feature (443)..(443): n is a, c, g, or t
  misc_feature (518)..(518): n is a, c, g, or t
  misc_feature (592)..(592): n is a, c, g, or t
  misc_feature (612)..(612): n is a, c, g, or t
  misc_feature (666)..(666): n is a, c, g, or t
  misc_feature (682)..(682): n is a, c, g, or t
  misc_feature (751)..(751): n is a, c, g, or t
  misc_feature (837)..(837): n is a, c, g, or t
cccatccctttccctctgtccttgtnccaggactgcaccagaagtagaggatggaacaatgatcttcccaccttctgaaggcaactntctcatatggnacaganctggtaccagcctngngnnnnggaggngtcccatgnntcagtcatcatctgtntcactagggcccatgtnctggcagatggcatcgtagtgaagctccaccacctgattttntnttggcagtngcnccanagcccggctccgtgctctgtcccgnctcagcaaatttnccaaacatatccagtttgtnggcccagcaccaccatcncacggtcaccctctgccttgggaaccagggtctccagcatgtntttcctcaggcctcccaggactcggccttcatctgtncgacaaacacaggtatctgggcttaggacaccttcaattattatcttggtgtngtaatattggcctcctttgtacatgtggtccacaaaccgcacacgcaggtccctgtgcaaccagtgctgacttcngggggctgctttctcactcttggctgcaggccatcctgtcggtctggaaggtgtttccgcttcctctctgagtngtcctgctggatgtagagtncttgattccagagggtcttccgtgatgaggcagttccgttctgttgcctgaganccaaggtgttcttgtnaaactcctgctgggagacaggccgcagtagtactcactaacagttaccacccggctcccacagccagangaaccatggcccgaacattgttaggatcaaggccttccaccttcccatagaggcctcggtgagggccagaaagaaccaccacagcncc

SEQ ID NO: 638321 - DNA, 216 bp, Homo sapiens
cccccccccggggggggggtttttttggaaaaaccccctttccgggtccgggggggcccccccccccccctttttgggggttcccccccgtttttttttaaaagtttggggggggggggggggttcccccctggggggggtttttccccttttgggggtttttttgggttttgcccccttttggggggggtttttttttttaccccccccccctta

SEQ ID NO: 638322 - DNA, 441 bp, Homo sapiens
aagcgcctccagggtctttggagtgtacatattgccactgttggaggaggtggatgcggctatgaatgcgaagctcacacaatgtgggtggaagagttgtgcgacacgcaaaggagagctgtctccagataagattctcaaagaccacgtgcccacttgactgtgaaaaagatattctgttggtggcattaaagaagacactgaagaacatcacctaagagattatttcgaacagtatggaagaattgaagtgagttgaaatcatgactgaccgaggcagcggcacgacaaaggggctttgcctttgtaacctttgactaccatgactccgtgaactagattgtcattctgaaataccatactgtgaatggccagcaactgtgaagttagaaaagccctgtcaaaacaatatatggctagtgcttcatccagccaaagagg

SEQ ID NO: 638323 - DNA, 228 bp, Homo sapiens
gttgcagtgagctgtgactcacgccactgcactctagcctgggtgacagagtgacactccatctcaaaaaaaacaagaaaagaaacgttttctgtaaccaaatttattttgtttttttttaaaagacagggtctggttctgtgccccaggctgaattgcccgggatgggatcatagctcacggcagcctcacgtttcctggcctcaagcgatcctcctgcctcactgt

SEQ ID NO: 638324 - DNA, 150 bp, Homo sapiens
acatagagtcattttagaggctgataccaaatgtccaaaggcttctgcctcctcctctcttcttccccttcaaatacaatgtaaatttatatatttcctgcagttaacatgcagaagcaatcatttgctcttgttatgacatatttatta

SEQ ID NO: 638325 - DNA, 277 bp, Homo sapiens
gaagtatattatattaatagtttactgcattatttatgaaaactgtgagtcatcatgtaaagttatttccctgtcaaccattttatagcctgtgaatttcagatatttaggtgagtagaaaccttaagattaaatatatggttattttactaaataattcaatatttaactgttttcattaaaacaggtattaacgtgcttatttatccaaaaattacacaaagcaggaaaacttacccaaggcaaggatcattctggtgttgggcgataaacataa

SEQ ID NO: 638326 - DNA, 81 bp, Homo sapiens
caggaaatacattccgttaaaaatccccttaaatgtaggtaataaaaggtcagaaatgcctggtacccaaaacaagtgctt

SEQ ID NO: 638327 - DNA, 903 bp, Homo sapiens
gctggaagaaagcctgccagctggttcctggactaagtccggctcgttcaagaacataagctaccaccttctccctcccccacccactccagtgccctggggcatgaaacagccctgaggacagacaccagggtgctggacttcaccagctgcagggtctgcttttactctggaggtgggaggggctgtgtgtgctgacacctgaaccctcccacacccgcacagtgctcgtgggaggggtcccactcactcaaagtgcactctaaatgcaaaccagacttttttgcactacagccaaaccacaccgaatgtcacccttagccccaagggcccctgaggtgtaccagaactacccttccacggccatagtccggcccagtagatattatcaaaggcgttgtaattgtgagacacaagatctatagagaagtaggcacagtccctgatgcacttctgagaggggttgttgagagcatgggcggactcgccacccaactcgcacctttcacctccaaacatgtggcgtcctacgggcgcacctttgcgtgtgccatcgtcacttaacacaatgataacagatataatcaggaaatgcttcaagcgttgtactacacaagatacttgggtggcttgccacaccaagggcccggcacaatgcaacgcaccgtacgacagtctcaacaacggcaacttctttggcacgcggcttatgtgatcacccaactacacttacgacatacctacaatgagacccacaccatctaactgtataggtgctggcgccccagacacactaacaacacagtaccacccccccacacacatgtgcggaccccacaaccacgtcttctcctggcgtatacaaccaggatgccgattaccttggatacacaacaagtgttg

SEQ ID NO: 638328 - DNA, 362 bp, Homo sapiens
cgaccgaagagtctacaggcgtgtaacggcatgggatccaaccggaagggatgaaaaatgtgtagccctgcttcagctcaagttctttggcatcgttccacacggtctcccccgaaagatttcactcttgtttggccctgacagcacccactcctacgtacagcgccaaattgtgcagcgttggaggaatcagccaaaaaatcttcccacccccggaaaacatggtaccaaaacggaagtgcctccaaagtcgatgtggaagtcggtgaaacaacctttcacgctcatcagacagtactttttcactttcgggtacttcattctctgccaatgggcggtttcgtggggcctttcctggtctt

SEQ ID NO: 638329 - DNA, 829 bp, Homo sapiens
caaattggatgagagcaagtttggtgtcctcagggaggaactgctatccttcccctcacccctcagccaggagggaaagggcattctttcatcttgaaaggcattgtgggctctgctctttgaaaagctgctttacaataaaaaaattatataataaggaaagaaaacaaaaacaaaaaagaaaaaaccaaaaaaaaaaaaaaagagcgaggcgcgcgaggcgcccccaaagaagacacccccggggggcccaaaataatcaggacaccccagggttctgttgtgaaccaaaggggcgccaccaaatagaagaagagactccaactattataacaacaaccggaaaacagagccaccagcagtttacacagacgatgaatcagatacaggcgaaaacacaggcgacaacgacgatgcgagaacatttacgaacgaaaggaaccccaaaaaactagcaggagagcagaagacacaaaaaaagagggcaccaacacacgaccccacacccaggagaagatctctaacaacacaccctcctacctaggaggcgcgaacaatacatactgcacgagagaagtccgcggtcaagagagaggggagtacatcagacagtacggcggtgggtatacaccacgaacagcgccggcggaccaagatctactgacgacgctgcgacaggaggcacagtagagggaacgaagcagtatagagagacagcacaacacaccagagtcaggtaccgtaacgaacgaaggacagccgacggaaccaaccagtactaagtaaacgcaagcaccgcgcgtgcgcacctcgttcgcggaagacagat

SEQ ID NO: 638330 - DNA, 306 bp, Homo sapiens
tccatacatagcgtgagctcccccatgacttgagagaacacatcctaaccagtcggcacaagtatgggcctcgccagtaccttcatagaacacatcttacgtcttgtcacaataccagtctttatagacactcaggtcggctctcaggcttcgcaagcacgtgaagagtgcttcggcatcagcgtctgcagcgtttggatcagaggtataccagtcgttgcacgatagttagtgctgtggagtataatgccttggagaagcagttcacgactcatgctgtcttgatatgtatgctctcggtccggg

SEQ ID NO: 638331 - DNA, 162 bp, Homo sapiens
aagtatgatatgagtcggagtaggaagtcatattcaatggtagactcctgagaagaaatacgtagtatatcgtatatagagtagaagactgcatcaatgaaaggcccgattcctgagaagttctgggtaatcagttagggataaccagggtccatcatctgt

SEQ ID NO: 638332 - DNA, 826 bp, Homo sapiens
ggtggcgccccccctttcattaattgcgcggaagttatgtatgagtcttatgacaggagagaggtcccttccattctgtagcacagggcgaggtattaaataatatgcatatcattacagagaggctcttgccgttgggcacaaatagatgcagacactcgtatggagttgtcattctcatcgtgtacagagagggggggttccacacccttccgtagagagcccacaaaatatgcaacaacacaattgtatctaccctctcgcgctgtttcgttgtaaagactgcgccaaaaacgccatccatctgtccccacacagtaagcatacaagaccaatcttgaggataggtcgcgtatatatagatggcccagttcgtcttctctacagtcgttcgatactgtcccagaaacgcttgtagtcgcaaccctgttgtgcgccgtaatatatctcgctttgatactcgccccgggacactctctctgggaacggcaggactccccatgtggtacccgcacacggaagttcattggagggcgagctccacgctcctcgtgtgccgcttccacagtatctatatatttggagccccgctctcgttcgctctccccacaggtcaacttgcgtatagcaacggttgacgcacctaagagtctcactcgcgactctttaggagagagccattgcgacgccagagtgatgtcctctccggacgtccaccccagagagggggtcagtcgcgccgcaggcagaccacgtggaacaaagacgggtgggcccccccttcgagcgccaccaaggagcgagagcccctggcccaccatagcag

SEQ ID NO: 638333 - DNA, 890 bp, Homo sapiens
  misc_feature (890)..(890): n is a, c, g, or t
tgattcttcctgcctcagcctcctgagtagctgggactgcaagtgcgtgagaccacgcccagctaatttttgtatttttagtgaaaccccgtctctgcaaaaataaaaaaattagctggacatggttgcgtgtgcctgtggttccagctactcgggaggctgaggcgggaggatgacttgggcatggggggttgaggctgcagtgagccatgatggaaccactgcgctccagtctgagtgacagagcgagaccccatctcaaaaaaaaaaaagaaagtgactaagtaggtatatcagataatgtggtagggaatgctgctctgaagaacatgacatttaagcagagacttgattgacaagagggatccaaccaggcaaagaacagagagtgtctagtgccgcggagacagctagagcaaagcctgtgtagatgggacagtctccaccatagcaagaatcaagaaggcctgcgtggctagacacgttaatgaccagggatagcagaagtccagggtgtacgcacagggatgtaggcagaggcccaacaatgggcttggcctctacctgtgttcctcttggttgcctcctgctactacaaagacgtatatcttgctcctccctactgtggggtagctttagccatttcagttcaggtccagtcatggggacttattacgcacgtgggaccaaagaagacaaaatctttgcccttggtggaacggtgtactcctaattagggacgcacgactgtgcacacatgtccttactaaactacgtagtgttcgacacacacacagggttgtaatctggcacaacacaaaaacaaaggcgcgccgcatataaataacacagggggccaaataatccagtccacgttctgacaaatgggn

SEQ ID NO: 638334 - DNA, 422 bp, Homo sapiens
ggccaaatagctttctgggaagtggagacactcaagacaattgacttgtacttagcaccacagccctgcatttatgaagcaaggaataggaaaaagatggcaaactgaaacttaagccagccatgggcaaagggaggtggctatgcagcagggtggccacagtgctggatctgctctgctctctccagagggcctggggctggagctcacatcatattttgggccttcatgggcaactcagtcaggaagcttcagggaaaaagattctcccagaaatgccacagacctttcagagccctgtctagaaactccaaaaccaggcactctccaatgctactctgctaataacattatggtccagcagaacccaggactgatgaaaaggtacacagctgagctgcccatagcacaggccactgctc

SEQ ID NO: 638335 - DNA, 548 bp, Homo sapiens
  misc_feature (222)..(222): n is a, c, g, or t
  misc_feature (279)..(279): n is a, c, g, or t
  misc_feature (334)..(335): n is a, c, g, or t
gcattcccggactttgtctacaagaggatcaaagctcgcaacaggctggcggagatccacggtgtgccccgtgggctgtatgacggggcccgtccacgaggtgatggtgcctgccaatgccagggagtggctgctccgggcccgtcgcgtcactgctcgcgaggcaacgatcgtccgtaccactacctgtgtcgcaatccctacgatcgagttgctggcggntgtcgagccgtgatcgtgcgggtctgccgaggccgtgaattgaacgcatcaattcgnctcgcgtacgtcagctaggcagcatgcaagtgatcagtgtggcagccagccctgnngcggccgtcgtccaagcgatcacgtctctcgtcattccgtagaacgtcccaagggacctggtcccgcgccatggtgagtcccgtgtcgtggtccctcagcgccgatggcctgtcgaggggcacccgaggggcactgcgctccctccgtcctttaggcatgtttgcttgttaggtaggatagttgatctctggaacggggtctttgggactggg

SEQ ID NO: 638336 - DNA, 180 bp, Homo sapiens
gttatttctgacccagacacttgtttttccaatatattcttatctcatgagaactccaataatgagatatatgaaatcacagtgttctgggtctgctcctctggtatttaatttcttatataataatttcccctttaatacctttctactttcccatgccttcccttctgtcgtcttctc

SEQ ID NO: 638337 - DNA, 1021 bp, Homo sapiens
ggacaatgcgcgagggctaccgagcgtctcctgaagatgcaaaaccatgcgtggcggaccgcgtctctcttccaggtacatcaacgaagccagctgtagagatgagtggggtagaagcccagacgccatgaagagctgccatggtgcctgtgagaaaaagctgaaccatggcccttttggagtcgttcatgcaccatgggttcatgcccgcgagcaggtagcccccatctcgtgtgacttcctggagactcacttcctagtatgaggaagtgaagtcttagtcaagaagatgggtgaccacctgaccaagccgtcctacaggctgggttggcccaggaggctgggctgggcagagtatctcttcgaaaggctcactctcgaagcacgagtaagagccttctgagtcccagctgacttcgtgaagggccccttgcagaagtaagtagggcttctgccgtaagccatctcccatcacaggccaataggcatgctttcttaactatcctaacaagccttggaccaaatggaaataaagcttcatgcaggacaggctgggtaaagaaaagaaaaaggacccacaacgaaacacaaaaaagaagaccaacccacacacatcgccacccaagacaacacacaaaaaaagagcaagcccagacgaaggacccaggaaaaccagacagaagaacggcacacaaacaagagacgcaggcaccaagcacaggagaaccccacatcaaagaaaagacagaaaaacaatgagagggaagaaagagaaagaggaagaagaaagaaacaaagagagcagagaagaagagagtacaaaagaaagaaaaggcgaaaagagaacaaggaaggagaggagagcaccagaaagcaaacaaaacaagaaaaaaaacacgcagcaaaagagagagagagagaccaaagtgagaggaaaagacaggaaaggccacaagggaagaagaaagagaggaggagaaagaaaaaaaaaaaagggaagagagaaaagacaacaaaaaaa

SEQ ID NO: 638338 - DNA, 233 bp, Homo sapiens
gacactagagaagccccacagcagcatacacaacatacccccggcagggatatagacgggattgcatatagtttaccagttaactgcagtcttcctaagacatgcattaaaatcagagcccatactatacatgacagcacgctgtgtgggcacacatgtaaagagtatctattactacaggaatcattgtcgtgaaatcaagggaggcagctgagactccatgagtgagatca

SEQ ID NO: 638339 - DNA, 106 bp, Homo sapiens
taagcaactgacccgcccagctccccaaatcggggaggtgatcatttgacttggggcgatcctgtagggtagggggagaataaaaataaatgcatcgttgcccgta

SEQ ID NO: 638340 - DNA, 181 bp, Homo sapiens
  misc_feature (6)..(6): n is a, c, g, or t
  misc_feature (27)..(27): n is a, c, g, or t
  misc_feature (46)..(46): n is a, c, g, or t
  misc_feature (68)..(68): n is a, c, g, or t
  misc_feature (123)..(123): n is a, c, g, or t
  misc_feature (129)..(129): n is a, c, g, or t
  misc_feature (140)..(140): n is a, c, g, or t
gccccngaaaactttgtggaggggctntgttgtggcaccttggggncctgattctccttcctccgaangggctccttgatggcctggccacaggggcagctccccattggctgttaggacctnaatttnaagaagaagtnaaatataaatatgtatacatatataaatatatttttaatta

SEQ ID NO: 638341 - DNA, 456 bp, Homo sapiens
aggctgtgatgacggttgcatcgcggtgcatgggaaactccagatgccaggttcaagcgattcttctgcctcagcctcctgagtagctgggtttacaggcttgtgctgccacacctggctcatttttgtatttttagtaaagacggggtttcactgtgttggtcaggctggtctcaaaccgctgacctcaagtgatctgcctgcctgtggctcccaaggtgctgggattacaggtgtgagccaccgcgccgggctgtttccagttttctaaaagttattcagacttattttgtggcctactaaaaggtctattctggagaatgttccatatactgatggaacaaatgtatatgcggcaactgttggataaaatgtgctgtaaatgtctgtgaggtccattttgtgtaaattccagtttaaattcaaggttgttttcttgacttccggtctaggagc

SEQ ID NO: 638342 - DNA, 230 bp, Homo sapiens
aggggggtcagcggctcactaggagaacaaccatatcaggacaccacgcacatgaagtgcgatccttcaactaaacagcaccagatatatacactctccagcagagacactctcgacaggatactcagcgctactcctgggtagtgtgatgacagatggctcttccttctcttattttattttttaagagacggcgtctgactatgtagctcacatgggtctcaaacgcc

SEQ ID NO: 638343 - DNA, 353 bp, Homo sapiens
  misc_feature (280)..(280): n is a, c, g, or t
ggtgggtagtgacgagctggccccgtgtcgtcgcgtcgccgacatgggcggggtggatctagagaatgctgggggtgtcgggcgcggaaaacgacatcggtgtcctgcacagggggggaggacgcacaagatatgaactcttctgtccggtgtgtgacgcatatggatatttatgtgggtgacaatctctccctcatctacgaggtatatgagggtctcggggggggaggtgagaacatcaaggcagcacatctgtgtgagtctctccaacatcatccangtggggggtactatcattgagagctctcgctaaaaggtcttcaccaccagggaggggcgccgagaggcgccta

SEQ ID NO: 638344 - DNA, 83 bp, Homo sapiens
ggcttctcgggggttgcaagactggcgggccaccagtggaactgatgagccgggtttccggggagtaggctgtcatgtggcag

SEQ ID NO: 638345 - DNA, 145 bp, Homo sapiens
tactagccggacagctccatccttaaccaggaccgccctatagggctagttagggccccgatagcccgacaggcttgaggggagtgaggcaggaggatagcataggggcctgtgggagccagagagaagctagaggtcaggaggt

SEQ ID NO: 638346 - DNA, 801 bp, Homo sapiens
  misc_feature (254)..(254): n is a, c, g, or t
  misc_feature (304)..(304): n is a, c, g, or t
  misc_feature (309)..(309): n is a, c, g, or t
  misc_feature (318)..(318): n is a, c, g, or t
  misc_feature (347)..(347): n is a, c, g, or t
gtttcctgtgaatcggtcagttcttctatattcatcggatcattggccgtccttcgcgtaactcttccgccatttaaccgaagaacacgtgggagtgactaagtcgctttgtagaatagctagcatttttgatagcgtcaagagaccgatcacactgttaagattctagattctaaaacactttatgtgaagcttcttgatgtcaatatacggagtcgaggaactgagacagcgattctacgcctaatccgatngtatagaaaccaccatttgattcaggtattatttttcatatttcaggttngactngttcttttnagaaggctaaagtcagaggaatgggggcngggccactcccttggagctctcagatctacagacaagctgtgtgaatgcatagatgtaatcttgtctcaaatactaatacagtggagatttggtttatgttaccattaagttcctctaaaaagtttttcttcctctcttcagagccaaaataaaagtgaactacactgttcagataaggtcacaatctgatgctgtcagtttgaccgagctggttttgcttatggtcatgctgcaatttgttagaataatagggatcaagttttaaatcctcctccttcccttttttctggagtcttgagggccagagttttagtaaagtatgggttattttttcctgctgtgctactgtttcggggtgtcgaaaaggtggttaaaccctgagactaattaaacacttccttgaccttcttgttggctgtcatttttgtgccaggaagtagtgcccagtgtatg

SEQ ID NO: 638347 - DNA, 292 bp, Homo sapiens
gtctctttctaactcccctgtctccaccggactcggggtacccctgggtggtgtggggctggtttcccaacaagctgaccatcctggcaacacggtgaaacaccatctctattaaaaatacaaaaattagccgggcgtggtggcgcgtgcctctaatcccagctacttggggggctgaggcgggagaaggcttaggcgggagaatttctttaacccaggagacgaagttgcagtagttcagatcacgcacttcactccggtcttgtgacatgagagattcctttcaaaaata

SEQ ID NO: 638348 - DNA, 245 bp, Homo sapiens
cagtctcaccactcccaagaaatggactaggaccaacaaaaactaaaactgcaggtccagatcatacagaaattactctagaaggcttcagcacaacagtggagtatgtagatcgtgtctaatactcagaatccaagcggagagagtcagcctctagtttcagactgcagttaccgtacattgaatcgcccttaaggactagcattcactgatgtggatatcgataccatccaaattgcttggga

SEQ ID NO: 638349 - DNA, 118 bp, Homo sapiens
accaggtcagcatcagtacgcagcgaatcggacgtgtaccgcgcagtatggaacaccgtcaaggggtcgatgggcaacctcgtcgagtagttcgacgtgtacacgtacacgacgttcg

SEQ ID NO: 638350 - DNA, 124 bp, Homo sapiens
tagaagacgacagaagggcaactccagaagttctagtgcaggaagagagtttgagaagtaacagattatttctgtgtgaggcacatttcccttctgttgtctaagaaatgggcagctgggaggg

SEQ ID NO: 638351 - DNA, 286 bp, Homo sapiens
  misc_feature (249)..(249): n is a, c, g, or t
tcgcttaggtagaatcagagtgtaggactatctcatggctcctaatgaatgctaaataacaaatggaaattgctgtgagtgtcatgaagcaatcttaggaatatattattatgttgctgcaggaaataattggcagaggcttaagttgaattgaggccaagaaatttggtggtgttgatgggaggttacagggatagagcttatcaacttaatcaacttatctcatgctttgtgatagaagttcattcnagctttttttctttttggttttccttttttttttttt

SEQ ID NO: 638352 - DNA, 626 bp, Homo sapiens
  misc_feature (178)..(179): n is a, c, g, or t
  misc_feature (188)..(188): n is a, c, g, or t
  misc_feature (193)..(193): n is a, c, g, or t
  misc_feature (195)..(196): n is a, c, g, or t
  misc_feature (217)..(217): n is a, c, g, or t
  misc_feature (219)..(219): n is a, c, g, or t
  misc_feature (245)..(246): n is a, c, g, or t
  misc_feature (255)..(255): n is a, c, g, or t
ggcctcagcagcgcgaggtgctgcggcgctgcgtagaagtatcaatcagccggttgctttgtgagaagaattccttggactgcggcgtcgagtcagctgaaagaacactttgcacagttcggccatgtcagaaggtgcattttaccttttgacaaggagactggctttcacagaggtnngggtgggtncagtntnncttcagaagaaggacttcggnantgcactacaacaggaaaaatcatatnntagatggantaaaggtccaggttcacactagaaggccaaaactctccgcaaacactctgatgactgaccaccgacaccgaccacccgacgactgcagcctactaactaacgtctcacactaacctgacgcacccacccccaccaccacacacaccacgacgcacaaccccaacacaccttgcgtgacgcgcgcgcaccggagccgactatgacaacaacgtctcaccaccgacaccactcagcacacatcgcgaccccgcgacccccccagaagacggcaccacccgcagacaccggcgacaacccggcgcacccactaccagacccagcgccaccgaccaaacgcctgccacccccccccccccaaaacaccgcacgag

SEQ ID NO: 638353 - DNA, 929 bp, Homo sapiens
agaggatccggagccgcgtgcatggcccgaggcttgggggccccccactgggtgcgcgtgggcacgtgctgacgcgtgggcgagcttgtggcttctgggtggctggactcggggcgtcatgacgacctgcgactgactgatctgcgggaggacgttccatgtgcctacgtgccgacatgtgcactcacatgtaagatttccaccatggtcatgggcatgcccatggtcatggccatctagctcaccgagagctatctggcatggacatacaccatgatcacgaccatggtgcattcaccattgaggcgatctatcacacagtggccgataggtcagtggcttacctccctattgagtagccgtcttactcaccatgaggacattggacccactgacccatgaatgcactacgtgcaatggacggcctaatggaggagatctgggcgctcctagtgccttccatgcatggaccttggatgctggtctcgtctactggcgcttagatgcgcttgtggtggccacatgtgcttgactctccaggcatgctccattctttggtcctctatccgttatacgcgccgtgggagttcgagacgtctctcccgtgcgattcgactctgcgtactttcgggactctcggcgtctacgttctttgccttccgagtggtgctcctagggacgaagtgctgtccgtgtgacttcatttccttcattgcatctttgaactcatcgatcctttaccacgaatgtctggagcagagcccaggacgattgcacacgtccgcaccatgtgtgaccatttggggccgcatatctggtcatcgctgggacgttgctgggttcctcaagttgcgcgaatctgatggcgcttgcctagtggcggaggaacattgtgtgagacaatgttgacatggagggacaatgggcaa

SEQ ID NO: 638354 - DNA, 316 bp, Homo sapiens
caaatactgatttgtagaggagagtaacataacctaggggctaggacaacgctatgtgtcacactcacacctgtaagcaggcccaggcatgagaggagagtcacatcaagtaagtactgggccatgcgatatatcacaaatccccatatggcaggtcccaggaagaatatcaactattttgctgggcccagacaacttgtgacaaatgtctcttataggcaaacacagggtaggagcgaggaggggctaacatcaaacatctgctgagacaagtgatatgttacaatgccccctgtgggcagggtcccggctgaag

SEQ ID NO: 638355 - DNA, 169 bp, Homo sapiens
caccactataccactacctctattatcccacctcaatctcatgatccattcttttaaacacttttgaaaataactgcacttgtgctaccttatttgtatacccaatctgcctagcaatactctctgatagggttcaacccacatctagtttctttgctctggtggtata

SEQ ID NO: 638356 - DNA, 909 bp, Homo sapiens
aggaggaggaggatgagggaggatgaggaggatgtgggccacgcaggggctggcggtggcgctggctctgatcgtgcgtgccggtgcagactgggccgctagggcccgggcgactgcgaagtttgtattctcttatctgggaagattttaccaggacctcaaagacggagatgtcacattctcaccagccactattgaaaagcgaatcttataaagttctgccgggaagcaatgaggccaacggagaactcggttgtgctactatatcgggggccatagatgtattgcagccaccaaaatctatcaatgaggtatcaagtgcctcttggcccaacctatatccctgtggagaaagatctgtgagaagctataagaagaagggacggccaagatattgtgagccttaattattgacaagcaatgatctgactagagccactaggtggacctagaaagaaaggctccagaagtaaaggagctggaagaagattcgtgggatgacgtgggggggaggaatattgcaaaagggttgttgcaagaaaaaagttcttggaacataacattccgggggaaggtattaaaatttgaaacttggatggccgttaaatttattgcccccaaaagggcaagccagtgcacgggacctgaattgggtaaggtcgtgtctacaacttccttcttgttgtggcacccttagagggggggacaaaaaaacaatgtttcaatcgtggctttatctccccaaaaaaagaggctttttgtggtaaattctcaaactctgctaaacggggtgggggggcttcccctttggagacaaaatacactggttatccacggattgttgaacgcgctgggggctttccttgattgatagttgggcccttaaagtaacccccattgaggggattc

SEQ ID NO: 638357 - DNA, 843 bp, Homo sapiens
tggaaacagattttcactctgtgtggctcaggctggagtgcaatggcatgatcttgcctcacaacaacctctatctcgcaggttcgagtgcttctcctgtctcaacctcccaagtagctgggattgcgggcatgtgccaccacgcccggctaatttggtgttttatagtggagacggggtttctccgtgtgggtcaggctggtctcgaactactgatctcgggttatccatccgcctcggcctcccagggtgctgggattacaggcgtgagccaccacgcccaggcaagaattattttttttggagacgcagtcttgctctgttgcccaggctggagtgcagtggcgcagtctcggctcactgcaacctccaccaccggggttcaagcgattcttctgcctcaggttccggctgctggggaggctgaggcgggagaatggtgtgaacccagggggtgaagcttgcagtggcgtgatctcacaggggcgtgatctcagctcactgcagctctgctcccaggttccaacaattctcgtgcctacagctcctgagtagctgggattacaggggtctaccataacacctggctaattaggtattgcgtagagacgggtttcaccatgttagccaggtggtctcaaatcctgactcgagtgaacaccgcctcagctccaaagggggggattcagggcatagcctgggctcagcctaattggtttctggaaaaccttaaatttttgggggctttggtccacatactacaacaaggttttgggtcaccactcatggctctccccaccactgttggaaggaagagaccacagggccgggctgcgaacacag

SEQ ID NO: 638358 - DNA, 821 bp, Homo sapiens
ggaggcgtaatggtctcccctaaggcttgagcgcggcggtgggctgctgcgtgcggcggtgtggcgtgcgaggctgttgtgctcccggctctcgtgatttcccctcctgatcgcgttgggaggagcgccaagcggtgctggtcgcgctcacccttcctttcctctccgagtgtttctctccctgggcctctcagctgctgcacgtgtctctccgacgcaagactgtcccggcccgtatatggctcgttggacagcataaaattcagtctcagtagaaaagtgccaaaaatgcaagtctggacaaaagcaagaggcacgtggacatgatcataatggcttgcttgccaatagttcgtgtctttgatatataccctgtcacttgtctgtaggcacacaatgtgccagaccctaagagcttcaatgcagcactttggaggagctagatgcattcctattggactccaagttcctccagaatataggtgatgttcagggcataatggttgtgcaacaggtgaatttcattgacatccattttgtagctcttccgtgacttgtcatcagaccttgaggggatttccctagtacctctcgattgtgcctcttgcatagccagatgacctgggtagccaacagtgttcttggcagaacagatggactccttaggcgagggcccgaagtcgtgccctgtgaagaactgggaaaagaatatatgcttgtcagagatttggttaacctcatcaagagcttaaactgcaggtttaacgagggttggcaacacagttactcaagtgaaatataagccctgttattcgtacgaa

SEQ ID NO: 638359 - DNA, 383 bp, Homo sapiens
  misc_feature (13)..(13): n is a, c, g, or t
  misc_feature (46)..(46): n is a, c, g, or t
  misc_feature (65)..(65): n is a, c, g, or t
  misc_feature (195)..(195): n is a, c, g, or t
  misc_feature (301)..(301): n is a, c, g, or t
atctcgagctcgngtaccctctctcaatctatccaggaagatcttntaaaaaagagaagcccacnaatggcaccagataaaaaaggaaaactgtttgccactgagggaataagatgcttatttggagaacctgtggttaataatgaaggaaaagaaatgatcatgctagcttttaaagatcagaaacacttaacnctttgcctttgttagaagggaagttaggattcacttagagtagcattaatagagttatgtgttatgaaaggtcttagtgtctgttactgaaaggttcaggattctntcctgaccttcatgtattcatacagaggtgttgataataatggaggtcagttacgtgaaaaaccgttagaggtcactcattt

SEQ ID NO: 638360 - DNA, 178 bp, Homo sapiens
taccagatctaatccccggatctgggtactaccccatgcgttacagtcactgcacctccatcctaccctcctaccagctattcctctacacagccgactagttatgatcagagcagttactctcagcagaacaactattaggcaaaccgaagcagctattggacaggaggagtagcta

SEQ ID NO: 638361 - DNA, 310 bp, Homo sapiens
  misc_feature (26)..(26): n is a, c, g, or t
tacatagcaaagcattcaaacagtgnaaaagtaaatgcttaaaagtttgttttccagcccaggtgtggtggctcacttctgtaattccaatgctttgggaggccgagggaggtcaggcatttgagaccagcctgggcaacatggtaaaaccctgtctctacttaaaatacaaagattagccaggcatggtggtgtgtgactgtagtcccagctacttgggaggtggaggcaggagaatcacttgaccctgggaggcagaggttgcagtgagcagaagtcacaccactgcactggtgtgacaggctgggtg

SEQ ID NO: 638362 - DNA, 126 bp, Homo sapiens
attctgctacaccaaacaggtactgcagcgctttcgggtagtcgcccttagtgtcttgctggatataatagtacagggacttgccgtactttctcattgaattcagaccgtaattttcaacactgt

SEQ ID NO: 638363 - DNA, 4271 bp, Homo sapiens
agcggcaagttaaccccaggagaggtgccagtcagcagataatctgcaaacgaacgtattctcctcctcctacgaggatatgagcctcacgaaataatcttttcatcctgaatctccctgccgcagtcgagctgccttccgtccaggtagggtcccctccccgcccgggtcccctccccctcccggtcccctcccccgcccgggctcatctctgtctccccctcccggactgcgtcctcgctccgccgggccctcctagccgccagcttgtgaatgagacgctcagtttctcaatggagccgcggggggctcgggcggccgcccgagcggagcccggctgaggcagccgcgcaggtcgcagggccagcgtccgcgaggacggcccggctgggcggccccgagctctgtggcgctgtggaggagcgggagcgcggccgaggaagcggggcgccgagggggtcggcggccttcgggaaatttccgccgacccttcgctcccggctctaaaagttcctgatttcctatttccttttaaatcccgagtggctgttagctcttcgcctgcactttttcttccccaggagataagggggagtgtgaggaacggagcgaataatataaaaaaggatttcctcccggaagagagcggcagttcggagagatttttcttaaggaagcagaagcggcgtttgcggccgctgcaggcgccgggccctgccggccacactatgcgcgagccggccccgggctgctgaggcgcggggacgcggaagcggaggccgagcgcgccgggctcccgcgctcgcgagcgagttttgtccgcccggcggcggtggcggggggatggagcccgcgaccgcgccccggcccgacatggcgccggagctgaccccggaggaggagcaggctaccaagcagtttctcgaagagattaacaagtggacagttcagtacaatgtttccccgctgtcttggaatgtggctgtcaagttcctcatggcaaggaagtttgatgtgctccgtgccatagaattgttccactcctacagagaaactcgaaggaaggaaggcattgtaaagctgaaacctcatgaggaacctcttcgttctgagatcctcagtggaaaattcaccatcttaaatgttcgggacccaacaggagcctccattgccctctttactgccaggttgcatcatccccacaagtcagtccaacatgtggtacttcaggctctgttttacttgctagacagagctgtggatagctttgaaactcagaggaatggactggtgtttatctatgacatgtgtggttctaattatgccaactttgagctggatcttggcaagaaagtcctaaacctgctgaagggagcatttccagctcgtttgaagaaggtgctgattgtgggggcacccatatggttccgagtgccctattccatcatcagtctcctcctgaaggacaaagtccgggagaggattcaaatattaaagacatctgaggtcacgcagcatctgcccagggagtgtcttccagaaaacctgggtgggtacgtcaaaattgatctcgccacttggaatttccagttcctaccccaggtgaacggccacccagatcccttcgatgagatcatcctgttctccctccctcctgccttagactgggactcagtacatgttccaggtccccatgctatgaccatccaagagttggtggactatgttaatgccaggcaaaagcaaggaatctatgaggaatatgaagacattcgtcgtgagaaccctgttggcactttccactgttccatgtctccaggaaacctagagaaaaaccgttatggggatgtaccctgcctggaccaaactagagtgaagctaacaaagcgaagtggccatactcagacagattacatcaatgccagtttcatggatggctacaagcagaagaatgcttacattggcacacaaggtcctttggagaatacctatcgtgatttctggctcatggtatgggagcaaaaagtcttggtgattgtcatgaccacccgctttgaggaaggcggcaggagaaagtgtggccagtactggcctttagaaaaagactctcggatccgatttggcttcctcacagtgaccaatctaggcgtggagaacatgaatcattataagaaaacaacgctagaaattcacaacacagaggaacggcagaaacgccaggtgacccacttccagttcttgagctggccagactatggtgtcccttcctcagcagcttccctcattgacttcttgagagtggtcagaaaccagcagagtctggctgtgagcaacatgggagcacgctccaaagggcagtgccctgagccacccattgtggtccattgcagtgcaggcattggcaggacaggtaccttctgctcactggacatctgcctggcacagctggaggagcttggcacccttaatgtgttccagacggtgtcacgcatgaggacccagagggccttcagcatccagacccctgagcagtactatttttgctacaaggccatcctggagttcgcagagaaggagggcatggtatcctctggccaaaacctgctggccgtggagagtcagtaactctcctacgaacctcctacctgttggccagccttccttaaactaccctggacaccgctgagcctataggttgccatcagttacgctgaagccatggatcaacttctttcttgtgtctcccagcacacgtgtgcacgcaaggcagcctttccctttggctagataaatgtggtgaaattgccactagaaagggccagtagcaatgtgttcttaattcctagcatctgctatcaaactgtgccttattaaaaccaaattgtggctattgatttttgctagggtccccgaggtaagtggggaaggaacctccctcctcctttctcccgccattctttttctgaggtctcctgtctcccactccttccctttcctaggattttatggggaggtttgatgagcatttgcctttctccccagagagcttgaccaagttacatattctagagatcgtcctgagtgccaagcacgtttataagtagggcgtgtattccagtcctttctgtcattctgtgtgtgtgtgtgtgtgcacttatgtgtatgggtccatatgtacgtgtgtatataatatatattgtatgtgataatatgatcgtattctataaatacatatacacacgatactcctttccagaagttcctggggctccgtgttgcagttcaggactccttgcttcttggaccctactatttatcctggactagcttgggttggtgatcatgtctcctcttgtcaggctacagagtggtggaagaggacacacacacatctcctccatgttcctgccacagggccccttccttaagtaatgacttatctccttccagttgccacctgttggagccaagaatgtattagtttgtggtgacactgggttagctcagcatggatttcccttatccgatgatttttctacatttacttggccaatttggggaacagacctccactgtgattccatactctctctttgctttcactatcccagggatgggaggcggagggtagagatgaactcactgagcagccagagccaaatgcaatcggtacgaatcttagaaggaaggagggggagcccaggtatgagaaagaaaaaaccactaagaaaatacctccctgggaggatgagctggggccctttttcttttgctggatggttcctttatgcagcttggccctgtctaccgagatgcccatctcttcctgcctgctagcctgctagaccctcaaactgggtgggttctgtgtcaataaaaagcttcaccccctggctgagtgaggtggtcccctgcaatcactgtttgtcccctacccacccaacctgtccctgcctgctcccagcccactcatccttatgtgctagggataaatcaagagtcctcagcactccacattcccaaaaaatcccaggaactcctaaaccttcccctgtgacagaagatgaggttggcagctgatcagacctcaataattttatactgtaataagctctttgaatgtgtatattattattttttacaatcatttcattttgtatttaatatcaatggactgagtctgattcagaaaataattgtaatgttcatattcaatatcttacagtgatacagttttgtatttacatataaatataccgacatgatcaaaa

SEQ ID NO: 638364 - DNA, 101 bp, Homo sapiens
cagtattaattctaccaaatagtagagcataccacttgaagacggaaagaaccgaagagcaacaaaagttctgcgtaatgagactacaccttttctcgctg

SEQ ID NO: 638365 - DNA, 1250 bp, Homo sapiens
agcggcaagttaaccccaggagaggtgccagtcagcagataatctgcaaacgaacgtattctcctcctcctacgaggatatgagcctcacgaaataatcttttcatcctgaatctccctgccgcagtcgagctgccttccgtccaggtagggtcccctccccgcccgggtcccctccccctcccggtcccctcccccgcccgggctcatctctgtctccccctcccggactgcgtcctcgctccgccgggccctcctagccgccagcttgtgaatgagacgctcagtttctcaatggagccgcggggggctcgggcggccgcccgagcggagcccggctgaggcagccgcgcaggtcgcagggccagcgtccgcgaggacggcccggctgggcggccccgagctctgtggcgctgtggaggagcgggagcgcggccgaggaagcggggcgccgagggggtcggcggccttcgggaaatttccgccgacccttcgctcccggctctaaaagttcctgatttcctatttccttttaaatcccgagtggctgttagctcttcgcctgcactttttcttccccaggagataagggggagtgtgaggaacggagcgaataatataaaaaaggatttcctcccggaagagagcggcagttcggagagatttttcttaaggaagcagaagcggcgtttgcggccgctgcaggcgccgggccctgccggccacactatgcgcgagccggccccgggctgctgaggcgcggggacgcggaagcggaggccgagcgcgccgggctcccgcgctcgcgagcgagttttgtccgcccggcggcggtggcggggggatggagcccgcgaccgcgccccggcccgacatggcgccggagctgaccccggaggaggagcaggtaagcgggcccgaggccgccgcgttgggtgtgtccgggcccccgaggcctacgccggcctctgcctcccgagtgccggctctttgcagccacggggccgcagccccccgctcccgtgcccggctcgcgggcctccctcaccggcgaccgcgccccaggccgccaccccctcgtcgggggacccacgggaccctactcccgttcccgccgcttctttcgccgaggcttaccagcctcagacggtgccctccgcaccccaccccctattccaggggcaaagttccttggatccaggggccttcttcccgagatttgcagaaccgctgcttgcccccggcccttcc

SEQ ID NO: 638366 - DNA, 787 bp, Homo sapiens
  misc_feature (217)..(217): n is a, c, g, or t
  misc_feature (219)..(219): n is a, c, g, or t
  misc_feature (223)..(224): n is a, c, g, or t
ggagtctcatgatgttacccaggctggtctcaaactcctggtcttaggtgattctcctgcctaaacctcccaagtagctgggattacaggcatgcaccactatacccagctactatactgtttttgtctctgttcacccagtatttatcccacatatgtgagacgtactattgcgtattaggagaccaaatgctgtagtaagtgctcagtaactgtntncttnngagtacatgcagctttagctgtgagtacatttgtttagaatgaagaggtttcctttcctttctgctgagaatcaatggtgtaagttagaagcaatgcaagagatgatattgctgcctgggggtatatcaggtctttggggaagccaggttactgctgtggagaggaacgatggaaggcttaccttgctctgtgtgtcttcagctttgaggaaggcggcaggagaaagtgtggccagtactggcctttagaaaaagactctcggatccgatttggcttcctcacagtgaccaatctaggcgtggagaacatgaatcattataagaaaacaacgctagaaattcacaacacagaggtaaatccaggtttcttttttctcaccttgttgaaacagggggagaataattactgtaatgaaaatctccagagggaataggtaggataccagggaagttatgagttgcttctgtttttctagggacaggatgaggatatttaactcacagccagtatagccatattactgcagcacgataggaactaatatgaagtataaagcgttgag

SEQ ID NO: 638367 - DNA, 1125 bp, Homo sapiens
tggggcctgcagggcactgccccatggtgtttcgcatttcccccgggggtgtcccccttggagaaaaatgtgtgtcaatgcaaggggcccccttggagtttttgacagaatttaccctgctggggtttgtgttcagagcaacaccttttgcctacaccctattcggtactagtcctccgccgacattctatgacacgaagttattgatctacagatggctatcattgctttactataagggatatcctcctctacaatactttctattggccccccaaatttgcttaaagtattgggtgtccccttggggggaactgacacgggggacctagggcgtttcaacctccatgatattgggaactatggaagcgcgattctttgcggggaaaccttgctgttggtgtgtccccacggtgtaatttctccggtgttttccccggtgtaaaaactgggacgttgctagggaataagactagtgtttctccgcacaaattcggctcttttgtaaattctcccaatgtccatattggtgcccttatgtcccatctctcaggggcttcccccatgtgacaagagggtggtccacataggctcatttcgtgagccttgactagacgatttcggctttctggtaacacttttccgaagcagtacccttagtgatgttccctatcttggcctgcactttttaagaagtggccttgttccactggcgagaacatgtatgtatgttctagtctagtgttcttctatgggtgtgtttatctagctttttttttgttttcattaaagaaattttcaaaatcaaattccagaatgattattacggagatatcgccaggaaaattaaggcttctcattaaacagctaaaagaggcaatgtaaattgcattgttacgcaaaagtggaatatgagcatattgctctgatagcttattttcattattggcttgggctgagcagtcacgagagacactggtcgtcgtcttgactttggcaaatgagccggagccccttgggcaggtcacacaacctgtcccagacgagggaacaccgagatggcccattcatgtacatccatggtgtgactggcttaaaatgtaattaatccttgggatatactcc

SEQ ID NO: 638368 - DNA, 277 bp, Homo sapiens
  misc_feature (203)..(203): n is a, c, g, or t
cttagagatcaccgcattgtgtctcagaagcaaatgtcagacagaccgcgaaaatgacatgtctgcaagcaacaatgtggttgctattcatgttccaccaaccacctgaaaacaagcacaaaggtgcatgtgctatcaagaacatcctaagcgcattttcttcttcttcccctagtaagggctgtcgtatacgtgacattttnccagctgtcggcagactttaaaatatgatttggcacgttgctctgttgtcacaataaaccacaacccacaaaag

SEQ ID NO: 638369 - DNA, 230 bp, Homo sapiens
actctgcacacgccgagtacccaaaccttaaagaactagaaaggcaacaacaaaccaaaccaaaaattaatagaagaaagaaacaataaagatcagagcagaggctgggctcagatggcacacgcctaaaatcccagcactttgggaggccgaagtcacagtggacgaagttgttgcgcaacaacttcgtccactgagattttaagaagtgtatggttactcggcgtgtg

SEQ ID NO: 638370 - DNA, 4218 bp, Homo sapiens
agcggcaagttaaccccaggagaggtgccagtcagcagataatctgcaaacgaacgtattctcctcctcctacgaggatatgagcctcacgaaataatcttttcatcctgaatctccctgccgcagtcgagctgccttccgtccaggtagggtcccctccccgcccgggtcccctccccctcccggtcccctcccccgcccgggctcatctctgtctccccctcccggactgcgtcctcgctccgccgggccctcctagccgccagcttgtgaatgagacgctcagtttctcaatggagccgcggggggctcgggcggccgcccgagcggagcccggctgaggcagccgcgcaggtcgcagggccagcgtccgcgaggacggcccggctgggcggccccgagctctgtggcgctgtggaggagcgggagcgcggccgaggaagcggggcgccgagggggtcggcggccttcgggaaatttccgccgacccttcgctcccggctctaaaagttcctgatttcctatttccttttaaatcccgagtggctgttagctcttcgcctgcactttttcttccccaggagataagggggagtgtgaggaacggagcgaataatataaaaaaggatttcctcccggaagagagcggcagttcggagagatttttcttaaggaagcagaagcggcgtttgcggccgctgcaggcgccgggccctgccggccacactatgcgcgagccggccccgggctgctgaggcgcggggacgcggaagcggaggccgagcgcgccgggctcccgcgctcgcgagcgagttttgtccgcccggcggcggtggcggggggatggagcccgcgaccgcgccccggcccgacatggcgccggagctgaccccggaggaggagcaggctaccaagcagtttctcgaagagattaacaagtggacagttcagtacaatgtttccccgctgtcttggaatgtggctgtcaagttcctcatggcaaggaagtttgatgtgctccgtgccatagaattgttccactcctacagagaaactcgaaggaaggaaggcattgtaaagctgaaacctcatgaggaacctcttcgttctgagatcctcagtggaaaattcaccatcttaaatgttcgggacccaacaggagcctccattgccctctttactgccaggttgcatcatccccacaagtcagtccaacatgtggtacttcaggctctgttttacttgctagacagagctgtggatagctttgaaactcagaggaatggactggtgtttatctatgacatgtgtggttctaattatgccaactttgagctggatcttggcaagaaagtcctaaacctgctgaagggagcatttccagctcgtttgaagaaggtgctgattgtgggggcacccatatggttccgagtgccctattccatcatcagtctcctcctgaaggacaaagtccgggagaggattcaaatattaaagacatctgaggtcacgcagcatctgcccagggagtgtcttccagaaaacctgggtgggtacgtcaaaattgatctcgccacttggaatttccagttcctaccccaggtgaacggccacccagatcccttcgatgagatcatcctgttctccctccctcctgccttagactgggactcagtacatgttccaggtccccatgctatgaccatccaagagttggtggactatgttaatgccaggcaaaagcaaggaatctatgaggaatatgaagacattcgtcgtgagaaccctgttggcactttccactgttccatgtctccaggaaacctagagaaaaaccgttatggggatgtaccctgcctggaccaaactagagtgaagctaacaaagcgaagtggccatactcagacagattacatcaatgccagtttcatggatggctacaagcagaagaatgcttacattggcacacaaggtcctttggagaatacctatcgtgatttctggctcatggtatgggagcaaaaagtcttggtgattgtcatgaccacccgctttgaggaaggcggcaggagaaagtgtggccagtactggcctttagaaaaagactctcggatccgatttggcttcctcacagtgaccaatctaggcgtggagaacatgaatcattataagaaaacaacgctagaaattcacaacacagaggaacggcagaaacgccaggtgacccacttccagttcttgagctggccagactatggtgtcccttcctcagcagcttccctcattgacttcttgagagtggtcagaaaccagcagagtctggctgtgagcaacatgggagcacgctccaaagggcagtgccctgagccacccattgtggtccattgcagtgcaggcattggcaggacaggtaccttctgctcactggacatctgcctggcacagctggaggagcttggcacccttaatgtgttccagacggtgtcacgcatgaggacccatcctggagttcgcagagaaggagggcatggtatcctctggccaaaacctgctggccgtggagagtcagtaactctcctacgaacctcctacctgttggccagccttccttaaactaccctggacaccgctgagcctataggttgccatcagttacgctgaagccatggatcaacttctttcttgtgtctcccagcacacgtgtgcacgcaaggcagcctttccctttggctagataaatgtggtgaaattgccactagaaagggccagtagcaatgtgttcttaattcctagcatctgctatcaaactgtgccttattaaaaccaaattgtggctattgatttttgctagggtccccgaggtaagtggggaaggaacctccctcctcctttctcccgccattctttttctgaggtctcctgtctcccactccttccctttcctaggattttatggggaggtttgatgagcatttgcctttctccccagagagcttgaccaagttacatattctagagatcgtcctgagtgccaagcacgtttataagtagggcgtgtattccagtcctttctgtcattctgtgtgtgtgtgtgtgtgcacttatgtgtatgggtccatatgtacgtgtgtatataatatatattgtatgtgataatatgatcgtattctataaatacatatacacacgatactcctttccagaagttcctggggctccgtgttgcagttcaggactccttgcttcttggaccctactatttatcctggactagcttgggttggtgatcatgtctcctcttgtcaggctacagagtggtggaagaggacacacacacatctcctccatgttcctgccacagggccccttccttaagtaatgacttatctccttccagttgccacctgttggagccaagaatgtattagtttgtggtgacactgggttagctcagcatggatttcccttatccgatgatttttctacatttacttggccaatttggggaacagacctccactgtgattccatactctctctttgctttcactatcccagggatgggaggcggagggtagagatgaactcactgagcagccagagccaaatgcaatcggtacgaatcttagaaggaaggagggggagcccaggtatgagaaagaaaaaaccactaagaaaatacctccctgggaggatgagctggggccctttttcttttgctggatggttcctttatgcagcttggccctgtctaccgagatgcccatctcttcctgcctgctagcctgctagaccctcaaactgggtgggttctgtgtcaataaaaagcttcaccccctggctgagtgaggtggtcccctgcaatcactgtttgtcccctacccacccaacctgtccctgcctgctcccagcccactcatccttatgtgctagggataaatcaagagtcctcagcactccacattcccaaaaaatcccaggaactcctaaaccttcccctgtgacagaagatgaggttggcagctgatcagacctcaataattttatactgtaataagctctttgaatgtgtatattattattttttacaatcatttcattttgtatttaatatcaatggactgagtctgattcagaaaataattgtaatgttcatattcaatatcttacagtgatacagttttgtatttacatataaatataccgacatgatcaaaa

SEQ ID NO: 638371 - DNA, 4120 bp, Homo sapiens
agcggcaagttaaccccaggagaggtgccagtcagcagataatctgcaaacgaacgtattctcctcctcctacgaggatatgagcctcacgaaataatcttttcatcctgaatctccctgccgcagtcgagctgccttccgtccaggtagggtcccctccccgcccgggtcccctccccctcccggtcccctcccccgcccgggctcatctctgtctccccctcccggactgcgtcctcgctccgccgggccctcctagccgccagcttgtgaatgagacgctcagtttctcaatggagccgcggggggctcgggcggccgcccgagcggagcccggctgaggcagccgcgcaggtcgcagggccagcgtccgcgaggacggcccggctgggcggccccgagctctgtggcgctgtggaggagcgggagcgcggccgaggaagcggggcgccgagggggtcggcggccttcgggaaatttccgccgacccttcgctcccggctctaaaagttcctgatttcctatttccttttaaatcccgagtggctgttagctcttcgcctgcactttttcttccccaggagataagggggagtgtgaggaacggagcgaataatataaaaaaggatttcctcccggaagagagcggcagttcggagagatttttcttaaggaagcagaagcggcgtttgcggccgctgcaggcgccgggccctgccggccacactatgcgcgagccggccccgggctgctgaggcgcggggacgcggaagcggaggccgagcgcgccgggctcccgcgctcgcgagcgagttttgtccgcccggcggcggtggcggggggatggagcccgcgaccgcgccccggcccgacatggcgccggagctgaccccggaggaggagcaggctaccaagcagtttctcgaagagattaacaagtggacagttcagtacaatgtttccccgctgtcttggaatgtggctgtcaagttcctcatggcaaggaagtttgatgtgctccgtgccatagaattgttccactcctacagagaaactcgaaggaaggaaggcattgtaaagctgaaacctcatgaggaacctcttcgttctgagatcctcagtggaaaattcaccatcttaaatgttcgggacccaacaggagcctccattgccctctttactgccaggttgcatcatccccacaagtcagtccaacatgtggtacttcaggctctgttttacttgctagacagagctgtggatagctttgaaactcagaggaatggactggtgtttatctatgacatgtgtggttctaattatgccaactttgagctggatcttggcaagaaagtcctaaacctgctgaagggagcatttccagctcgtttgaagaaggtgctgattgtgggggcacccatatggttccgagtgccctattccatcatcagtctcctcctgaaggacaaagtccgggagaggattcaaatattaaagacatctgaggtcacgcagcatctgcccagggagtgtcttccagaaaacctgggtgggtacgtcaaaattgatctcgccacttggaatttccagttcctaccccaggtgaacggccacccagatcccttcgatgagatcatcctgttctccctccctcctgccttagactgggactcagtacatgttccaggtccccatgctatgaccatccaagagttggtggactatgttaatgccaggcaaaagcaaggaatctatgaggaatatgaagacattcgtcgtgagaaccctgttggcactttccactgttccatgtctccaggaaacctagagaaaaaccgttatggggatgtaccctgcctggaccaaactagagtgaagctaacaaagcgaagtggccatactcagacagattacatcaatgccagtttcatggatggctacaagcagaagaatgcttacattggcacacaaggtcctttggagaatacctatcgtgatttctggctcatggtatgggagcaaaaagtcttggtgattgtcatgaccacccggaacggcagaaacgccaggtgacccacttccagttcttgagctggccagactatggtgtcccttcctcagcagcttccctcattgacttcttgagagtggtcagaaaccagcagagtctggctgtgagcaacatgggagcacgctccaaagggcagtgccctgagccacccattgtggtccattgcagtgcaggcattggcaggacaggtaccttctgctcactggacatctgcctggcacagctggaggagcttggcacccttaatgtgttccagacggtgtcacgcatgaggacccagagggccttcagcatccagacccctgagcagtactatttttgctacaaggccatcctggagttcgcagagaaggagggcatggtatcctctggccaaaacctgctggccgtggagagtcagtaactctcctacgaacctcctacctgttggccagccttccttaaactaccctggacaccgctgagcctataggttgccatcagttacgctgaagccatggatcaacttctttcttgtgtctcccagcacacgtgtgcacgcaaggcagcctttccctttggctagataaatgtggtgaaattgccactagaaagggccagtagcaatgtgttcttaattcctagcatctgctatcaaactgtgccttattaaaaccaaattgtggctattgatttttgctagggtccccgaggtaagtggggaaggaacctccctcctcctttctcccgccattctttttctgaggtctcctgtctcccactccttccctttcctaggattttatggggaggtttgatgagcatttgcctttctccccagagagcttgaccaagttacatattctagagatcgtcctgagtgccaagcacgtttataagtagggcgtgtattccagtcctttctgtcattctgtgtgtgtgtgtgtgtgcacttatgtgtatgggtccatatgtacgtgtgtatataatatatattgtatgtgataatatgatcgtattctataaatacatatacacacgatactcctttccagaagttcctggggctccgtgttgcagttcaggactccttgcttcttggaccctactatttatcctggactagcttgggttggtgatcatgtctcctcttgtcaggctacagagtggtggaagaggacacacacacatctcctccatgttcctgccacagggccccttccttaagtaatgacttatctccttccagttgccacctgttggagccaagaatgtattagtttgtggtgacactgggttagctcagcatggatttcccttatccgatgatttttctacatttacttggccaatttggggaacagacctccactgtgattccatactctctctttgctttcactatcccagggatgggaggcggagggtagagatgaactcactgagcagccagagccaaatgcaatcggtacgaatcttagaaggaaggagggggagcccaggtatgagaaagaaaaaaccactaagaaaatacctccctgggaggatgagctggggccctttttcttttgctggatggttcctttatgcagcttggccctgtctaccgagatgcccatctcttcctgcctgctagcctgctagaccctcaaactgggtgggttctgtgtcaataaaaagcttcaccccctggctgagtgaggtggtcccctgcaatcactgtttgtcccctacccacccaacctgtccctgcctgctcccagcccactcatccttatgtgctagggataaatcaagagtcctcagcactccacattcccaaaaaatcccaggaactcctaaaccttcccctgtgacagaagatgaggttggcagctgatcagacctcaataattttatactgtaataagctctttgaatgtgtatattattattttttacaatcatttcattttgtatttaatatcaatggactgagtctgattcagaaaataattgtaatgttcatattcaatatcttacagtgatacagttttgtatttacatataaatataccgacatgatcaaaa

SEQ ID NO: 638372 - DNA, 948 bp, Homo sapiens
  misc_feature (46)..(46): n is a, c, g, or t
  misc_feature (70)..(70): n is a, c, g, or t
  misc_feature (117)..(117): n is a, c, g, or t
  misc_feature (128)..(128): n is a, c, g, or t
  misc_feature (161)..(161): n is a, c, g, or t
  misc_feature (181)..(181): n is a, c, g, or t
  misc_feature (183)..(183): n is a, c, g, or t
  misc_feature (188)..(188): n is a, c, g, or t
  misc_feature (191)..(192): n is a, c, g, or t
  misc_feature (201)..(201): n is a, c, g, or t
  misc_feature (216)..(216): n is a, c, g, or t
  misc_feature (272)..(272): n is a, c, g, or t
  misc_feature (279)..(279): n is a, c, g, or t
  misc_feature (329)..(330): n is a, c, g, or t
  misc_feature (332)..(332): n is a, c, g, or t
  misc_feature (368)..(368): n is a, c, g, or t
  misc_feature (375)..(375): n is a, c, g, or t
  misc_feature (394)..(394): n is a, c, g, or t
  misc_feature (570)..(570): n is a, c, g, or t
  misc_feature (620)..(620): n is a, c, g, or t
  misc_feature (762)..(762): n is a, c, g, or t
  misc_feature (823)..(823): n is a, c, g, or t
  misc_feature (882)..(882): n is a, c, g, or t
  misc_feature (945)..(945): n is a, c, g, or t
cattccccatcgtctccacatacactcagacaggcttacagaagantttcaaatatcaaatagagaagcngtcaattcacgcacctcatgactccagtcaattcttccagtctttanacttcagaccngccaataacactaaactcaataccgtgtttgtngaatctgtcaatcaactttntnttggnaanncccgccccncgcgtcaagaccccncccgcctcaggcagacgacaagcatcactcagaagactcatggctgcctgacccanagccatnggggtagccacacagccagcctctggtcctttcacctgagtccaaatctnnanatttggtttgttctcatctgtcccagtccctcggcngtctccntgaccaaagaatgtcagcntgaatcaggcagcatcaatctgtttttgtgtcgggcctcgtcttgaaaaatagccaaaggagaagaaccatgggaatcttatgagaagttgccttccaattccaaacctcacaaagaacaaaaagaaaagtcctgcaaacatcagcttaataacagaggtgatgcctcccacagtnacatacgcagcatactgaactggtgattcctctaaattttcatacaagtnacgttgagtcctccttacaacagacacatcagatcccataaaaggaatggaataacctttgagttcccgacaataagaaattggccaccttctcttcaattttggaccaatgagcgggacaggtttcagatttgatacattncttagttttctcaaattactctgatctccaaaaccataaattgctgacttccaggtaccancatgaatgctcaacccctcaggtcctgaatgtatagtcaggaaactttccacagcagtnaaagtaccattcattttatttctggtatatattactcccagaactgctggaatggagttaaancgc

SEQ ID NO: 638373 - DNA, 4194 bp, Homo sapiens
agcggcaagttaaccccaggagaggtgccagtcagcagataatctgcaaacgaacgtattctcctcctcctacgaggatatgagcctcacgaaataatcttttcatcctgaatctccctgccgcagtcgagctgccttccgtccaggtagggtcccctccccgcccgggtcccctccccctcccggtcccctcccccgcccgggctcatctctgtctccccctcccggactgcgtcctcgctccgccgggccctcctagccgccagcttgtgaatgagacgctcagtttctcaatggagccgcggggggctcgggcggccgcccgagcggagcccggctgaggcagccgcgcaggtcgcagggccagcgtccgcgaggacggcccggctgggcggccccgagctctgtggcgctgtggaggagcgggagcgcggccgaggaagcggggcgccgagggggtcggcggccttcgggaaatttccgccgacccttcgctcccggctctaaaagttcctgatttcctatttccttttaaatcccgagtggctgttagctcttcgcctgcactttttcttccccaggagataagggggagtgtgaggaacggagcgaataatataaaaaaggatttcctcccggaagagagcggcagttcggagagatttttcttaaggaagcagaagcggcgtttgcggccgctgcaggcgccgggccctgccggccacactatgcgcgagccggccccgggctgctgaggcgcggggacgcggaagcggaggccgcgccccggcccgacatggcgccggagctgaccccggaggaggagcaggctaccaagcagtttctcgaagagattaacaagtggacagttcagtacaatgtttccccgctgtcttggaatgtggctgtcaagttcctcatggcaaggaagtttgatgtgctccgtgccatagaattgttccactcctacagagaaactcgaaggaaggaaggcattgtaaagctgaaacctcatgaggaacctcttcgttctgagatcctcagtggaaaattcaccatcttaaatgttcgggacccaacaggagcctccattgccctctttactgccaggttgcatcatccccacaagtcagtccaacatgtggtacttcaggctctgttttacttgctagacagagctgtggatagctttgaaactcagaggaatggactggtgtttatctatgacatgtgtggttctaattatgccaactttgagctggatcttggcaagaaagtcctaaacctgctgaagggagcatttccagctcgtttgaagaaggtgctgattgtgggggcacccatatggttccgagtgccctattccatcatcagtctcctcctgaaggacaaagtccgggagaggattcaaatattaaagacatctgaggtcacgcagcatctgcccagggagtgtcttccagaaaacctgggtgggtacgtcaaaattgatctcgccacttggaatttccagttcctaccccaggtgaacggccacccagatcccttcgatgagatcatcctgttctccctccctcctgccttagactgggactcagtacatgttccaggtccccatgctatgaccatccaagagttggtggactatgttaatgccaggcaaaagcaaggaatctatgaggaatatgaagacattcgtcgtgagaaccctgttggcactttccactgttccatgtctccaggaaacctagagaaaaaccgttatggggatgtaccctgcctggaccaaactagagtgaagctaacaaagcgaagtggccatactcagacagattacatcaatgccagtttcatggatggctacaagcagaagaatgcttacattggcacacaaggtcctttggagaatacctatcgtgatttctggctcatggtatgggagcaaaaagtcttggtgattgtcatgaccacccgctttgaggaaggcggcaggagaaagtgtggccagtactggcctttagaaaaagactctcggatccgatttggcttcctcacagtgaccaatctaggcgtggagaacatgaatcattataagaaaacaacgctagaaattcacaacacagaggaacggcagaaacgccaggtgacccacttccagttcttgagctggccagactatggtgtcccttcctcagcagcttccctcattgacttcttgagagtggtcagaaaccagcagagtctggctgtgagcaacatgggagcacgctccaaagggcagtgccctgagccacccattgtggtccattgcagtgcaggcattggcaggacaggtaccttctgctcactggacatctgcctggcacagctggaggagcttggcacccttaatgtgttccagacggtgtcacgcatgaggacccagagggccttcagcatccagacccctgagcagtactatttttgctacaaggccatcctggagttcgcagagaaggagggcatggtatcctctggccaaaacctgctggccgtggagagtcagtaactctcctacgaacctcctacctgttggccagccttccttaaactaccctggacaccgctgagcctataggttgccatcagttacgctgaagccatggatcaacttctttcttgtgtctcccagcacacgtgtgcacgcaaggcagcctttccctttggctagataaatgtggtgaaattgccactagaaagggccagtagcaatgtgttcttaattcctagcatctgctatcaaactgtgccttattaaaaccaaattgtggctattgatttttgctagggtccccgaggtaagtggggaaggaacctccctcctcctttctcccgccattctttttctgaggtctcctgtctcccactccttccctttcctaggattttatggggaggtttgatgagcatttgcctttctccccagagagcttgaccaagttacatattctagagatcgtcctgagtgccaagcacgtttataagtagggcgtgtattccagtcctttctgtcattctgtgtgtgtgtgtgtgtgcacttatgtgtatgggtccatatgtacgtgtgtatataatatatattgtatgtgataatatgatcgtattctataaatacatatacacacgatactcctttccagaagttcctggggctccgtgttgcagttcaggactccttgcttcttggaccctactatttatcctggactagcttgggttggtgatcatgtctcctcttgtcaggctacagagtggtggaagaggacacacacacatctcctccatgttcctgccacagggccccttccttaagtaatgacttatctccttccagttgccacctgttggagccaagaatgtattagtttgtggtgacactgggttagctcagcatggatttcccttatccgatgatttttctacatttacttggccaatttggggaacagacctccactgtgattccatactctctctttgctttcactatcccagggatgggaggcggagggtagagatgaactcactgagcagccagagccaaatgcaatcggtacgaatcttagaaggaaggagggggagcccaggtatgagaaagaaaaaaccactaagaaaatacctccctgggaggatgagctggggccctttttcttttgctggatggttcctttatgcagcttggccctgtctaccgagatgcccatctcttcctgcctgctagcctgctagaccctcaaactgggtgggttctgtgtcaataaaaagcttcaccccctggctgagtgaggtggtcccctgcaatcactgtttgtcccctacccacccaacctgtccctgcctgctcccagcccactcatccttatgtgctagggataaatcaagagtcctcagcactccacattcccaaaaaatcccaggaactcctaaaccttcccctgtgacagaagatgaggttggcagctgatcagacctcaataattttatactgtaataagctctttgaatgtgtatattattattttttacaatcatttcattttgtatttaatatcaatggactgagtctgattcagaaaataattgtaatgttcatattcaatatcttacagtgatacagttttgtatttacatataaatataccgacatgatcaaaa

SEQ ID NO: 638374 - DNA, 4155 bp, Homo sapiens
agcggcaagttaaccccaggagaggtgccagtcagcagataatctgcaaacgaacgtattctcctcctcctacgaggatatgagcctcacgaaataatcttttcatcctgaatctccctgccgcagtcgagctgccttccgtccaggtagggtcccctccccgcccgggtcccctccccctcccggtcccctcccccgcccgggctcatctctgtctccccctcccggactgcgtcctcgctccgccgggccctcctagccgccagcttgtgaatgagacgctcagtttctcaatggagccgcggggggctcgggcggccgcccgagcggagcccggctgaggcagccgcgcaggtcgcagggccagcgtccgcgaggacggcccggctgggcggccccgagctctgtggcgctgtggaggagcgggagcgcggccgaggaagcggggcgccgagggggtcggcggccttcgggaaatttccgccgacccttcgctcccggctctaaaagttcctgatttcctatttccttttaaatcccgagtggctgttagctcttcgcctgcactttttcttccccaggagataagggggagtgtgaggaacggagcgaataatataaaaaaggatttcctcccggaagagagcggcagttcggagagatttttcttaaggaagcagaagcggcgtttgcggccgctgcaggcgccgggccctgccggccacactatgcgcgagccgccgcgccccggcccgacatggcgccggagctgaccccggaggaggagcaggctaccaagcagtttctcgaagagattaacaagtggacagttcagtacaatgtttccccgctgtcttggaatgtggctgtcaagttcctcatggcaaggaagtttgatgtgctccgtgccatagaattgttccactcctacagagaaactcgaaggaaggaaggcattgtaaagctgaaacctcatgaggaacctcttcgttctgagatcctcagtggaaaattcaccatcttaaatgttcgggacccaacaggagcctccattgccctctttactgccaggttgcatcatccccacaagtcagtccaacatgtggtacttcaggctctgttttacttgctagacagagctgtggatagctttgaaactcagaggaatggactggtgtttatctatgacatgtgtggttctaattatgccaactttgagctggatcttggcaagaaagtcctaaacctgctgaagggagcatttccagctcgtttgaagaaggtgctgattgtgggggcacccatatggttccgagtgccctattccatcatcagtctcctcctgaaggacaaagtccgggagaggattcaaatattaaagacatctgaggtcacgcagcatctgcccagggagtgtcttccagaaaacctgggtgggtacgtcaaaattgatctcgccacttggaatttccagttcctaccccaggtgaacggccacccagatcccttcgatgagatcatcctgttctccctccctcctgccttagactgggactcagtacatgttccaggtccccatgctatgaccatccaagagttggtggactatgttaatgccaggcaaaagcaaggaatctatgaggaatatgaagacattcgtcgtgagaaccctgttggcactttccactgttccatgtctccaggaaacctagagaaaaaccgttatggggatgtaccctgcctggaccaaactagagtgaagctaacaaagcgaagtggccatactcagacagattacatcaatgccagtttcatggatggctacaagcagaagaatgcttacattggcacacaaggtcctttggagaatacctatcgtgatttctggctcatggtatgggagcaaaaagtcttggtgattgtcatgaccacccgctttgaggaaggcggcaggagaaagtgtggccagtactggcctttagaaaaagactctcggatccgatttggcttcctcacagtgaccaatctaggcgtggagaacatgaatcattataagaaaacaacgctagaaattcacaacacagaggaacggcagaaacgccaggtgacccacttccagttcttgagctggccagactatggtgtcccttcctcagcagcttccctcattgacttcttgagagtggtcagaaaccagcagagtctggctgtgagcaacatgggagcacgctccaaagggcagtgccctgagccacccattgtggtccattgcagtgcaggcattggcaggacaggtaccttctgctcactggacatctgcctggcacagctggaggagcttggcacccttaatgtgttccagacggtgtcacgcatgaggacccagagggccttcagcatccagacccctgagcagtactatttttgctacaaggccatcctggagttcgcagagaaggagggcatggtatcctctggccaaaacctgctggccgtggagagtcagtaactctcctacgaacctcctacctgttggccagccttccttaaactaccctggacaccgctgagcctataggttgccatcagttacgctgaagccatggatcaacttctttcttgtgtctcccagcacacgtgtgcacgcaaggcagcctttccctttggctagataaatgtggtgaaattgccactagaaagggccagtagcaatgtgttcttaattcctagcatctgctatcaaactgtgccttattaaaaccaaattgtggctattgatttttgctagggtccccgaggtaagtggggaaggaacctccctcctcctttctcccgccattctttttctgaggtctcctgtctcccactccttccctttcctaggattttatggggaggtttgatgagcatttgcctttctccccagagagcttgaccaagttacatattctagagatcgtcctgagtgccaagcacgtttataagtagggcgtgtattccagtcctttctgtcattctgtgtgtgtgtgtgtgtgcacttatgtgtatgggtccatatgtacgtgtgtatataatatatattgtatgtgataatatgatcgtattctataaatacatatacacacgatactcctttccagaagttcctggggctccgtgttgcagttcaggactccttgcttcttggaccctactatttatcctggactagcttgggttggtgatcatgtctcctcttgtcaggctacagagtggtggaagaggacacacacacatctcctccatgttcctgccacagggccccttccttaagtaatgacttatctccttccagttgccacctgttggagccaagaatgtattagtttgtggtgacactgggttagctcagcatggatttcccttatccgatgatttttctacatttacttggccaatttggggaacagacctccactgtgattccatactctctctttgctttcactatcccagggatgggaggcggagggtagagatgaactcactgagcagccagagccaaatgcaatcggtacgaatcttagaaggaaggagggggagcccaggtatgagaaagaaaaaaccactaagaaaatacctccctgggaggatgagctggggccctttttcttttgctggatggttcctttatgcagcttggccctgtctaccgagatgcccatctcttcctgcctgctagcctgctagaccctcaaactgggtgggttctgtgtcaataaaaagcttcaccccctggctgagtgaggtggtcccctgcaatcactgtttgtcccctacccacccaacctgtccctgcctgctcccagcccactcatccttatgtgctagggataaatcaagagtcctcagcactccacattcccaaaaaatcccaggaactcctaaaccttcccctgtgacagaagatgaggttggcagctgatcagacctcaataattttatactgtaataagctctttgaatgtgtatattattattttttacaatcatttcattttgtatttaatatcaatggactgagtctgattcagaaaataattgtaatgttcatattcaatatcttacagtgatacagttttgtatttacatataaatataccgacatgatcaaaa

SEQ ID NO: 638375 - DNA, 772 bp, Homo sapiens
tgccctttagctgccatcttgcgtccccgcgtgtgtgcgcctaattctcaggtggtccacccgagaccccttgagcaccaaccctagttcccccgcagcggtctccttattcggcgtccgagcaagatgacacacgaacacaagtcatgaaccaggaaaaactcgcgcaaactgcaggcacgaagtgcgcattggtgggaacaggcaacgtgctcgccgaatgaagaaggtggttcatagaacagccacgagcgagatgacgaaataaacttcagttctccttaaagaagttaggcggtaaacacatatctctggtattgaccgaggtgaatatgttgacaaaccaaggaacagtgatccactttaagaaccctaaagctcaggcatctctggcagtgaacactttcaccattaactggccatgctgagacaaagcagctgacagaaatgctacccagcatcttaaaccagcttggtgcggactagtctgactagtctaaggagactggccgaggctccttgcccatacaatctgtggatggaaaaagcacgcattgctactggacagggatgatgcatcgatgaagttccagatcttgtgaggacttttgatgaggcttccaagaatgaggcaaactgaattgagtcaacttctgaagataaacctgaagaagttactgggaagctgctatttatattatgacttgttttaagaaaatcttgttatggatctgataaaatctagatctctaatattttaaagcccaagcgc

SEQ ID NO: 638376 - DNA, 2646 bp, Homo sapiens
  misc_feature (217)..(217): n is a, c, g, or t
  misc_feature (219)..(219): n is a, c, g, or t
  misc_feature (223)..(224): n is a, c, g, or t
ggagtctcatgatgttacccaggctggtctcaaactcctggtcttaggtgattctcctgcctaaacctcccaagtagctgggattacaggcatgcaccactatacccagctactatactgtttttgtctctgttcacccagtatttatcccacatatgtgagacgtactattgcgtattaggagaccaaatgctgtagtaagtgctcagtaactgtntncttnngagtacatgcagctttagctgtgagtacatttgtttagaatgaagaggtttcctttcctttctgctgagaatcaatggtgtaagttagaagcaatgcaagagatgatattgctgcctgggggtatatcaggtctttggggaagccaggttactgctgtggagaggaacgatggaaggcttaccttgctctgtgtgtcttcagctttgaggaaggcggcaggagaaagtgtggccagtactggcctttagaaaaagactctcggatccgatttggcttcctcacagtgaccaatctaggcgtggagaacatgaatcattataagaaaacaacgctagaaattcacaacacagaggaacggcagaaacgccaggtgacccacttccagttcttgagctggccagactatggtgtcccttcctcagcagcttccctcattgacttcttgagagtggtcagaaaccagcagagtctggctgtgagcaacatgggagcacgctccaaagggcagtgccctgagccacccattgtggtccattgcagtgcaggcattggcaggacaggtaccttctgctcactggacatctgcctggcacagctggaggagcttggcacccttaatgtgttccagacggtgtcacgcatgaggacccagagggccttcagcatccagacccctgagcagtactatttttgctacaaggccatcctggagttcgcagagaaggagggcatggtatcctctggccaaaacctgctggccgtggagagtcagtaactctcctacgaacctcctacctgttggccagccttccttaaactaccctggacaccgctgagcctataggttgccatcagttacgctgaagccatggatcaacttctttcttgtgtctcccagcacacgtgtgcacgcaaggcagcctttccctttggctagataaatgtggtgaaattgccactagaaagggccagtagcaatgtgttcttaattcctagcatctgctatcaaactgtgccttattaaaaccaaattgtggctattgatttttgctagggtccccgaggtaagtggggaaggaacctccctcctcctttctcccgccattctttttctgaggtctcctgtctcccactccttccctttcctaggattttatggggaggtttgatgagcatttgcctttctccccagagagcttgaccaagttacatattctagagatcgtcctgagtgccaagcacgtttataagtagggcgtgtattccagtcctttctgtcattctgtgtgtgtgtgtgtgtgcacttatgtgtatgggtccatatgtacgtgtgtatataatatatattgtatgtgataatatgatcgtattctataaatacatatacacacgatactcctttccagaagttcctggggctccgtgttgcagttcaggactccttgcttcttggaccctactatttatcctggactagcttgggttggtgatcatgtctcctcttgtcaggctacagagtggtggaagaggacacacacacatctcctccatgttcctgccacagggccccttccttaagtaatgacttatctccttccagttgccacctgttggagccaagaatgtattagtttgtggtgacactgggttagctcagcatggatttcccttatccgatgatttttctacatttacttggccaatttggggaacagacctccactgtgattccatactctctctttgctttcactatcccagggatgggaggcggagggtagagatgaactcactgagcagccagagccaaatgcaatcggtacgaatcttagaaggaaggagggggagcccaggtatgagaaagaaaaaaccactaagaaaatacctccctgggaggatgagctggggccctttttcttttgctggatggttcctttatgcagcttggccctgtctaccgagatgcccatctcttcctgcctgctagcctgctagaccctcaaactgggtgggttctgtgtcaataaaaagcttcaccccctggctgagtgaggtggtcccctgcaatcactgtttgtcccctacccacccaacctgtccctgcctgctcccagcccactcatccttatgtgctagggataaatcaagagtcctcagcactccacattcccaaaaaatcccaggaactcctaaaccttcccctgtgacagaagatgaggttggcagctgatcagacctcaataattttatactgtaataagctctttgaatgtgtatattattattttttacaatcatttcattttgtatttaatatcaatggactgagtctgattcagaaaataattgtaatgttcatattcaatatcttacagtgatacagttttgtatttacatataaatataccgacatgatcaaaa

SEQ ID NO: 638377 - DNA, 4738 bp, Homo sapiens
  misc_feature (4287)..(4289): n is a, c, g, or t
  misc_feature (4295)..(4297): n is a, c, g, or t
  misc_feature (4299)..(4301): n is a, c, g, or t
  misc_feature (4304)..(4316): n is a, c, g, or t
  misc_feature (4319)..(4320): n is a, c, g, or t
  misc_feature (4328)..(4328): n is a, c, g, or t
  misc_feature (4330)..(4333): n is a, c, g, or t
  misc_feature (4358)..(4358): n is a, c, g, or t
  misc_feature (4368)..(4368): n is a, c, g, or t
  misc_feature (4379)..(4379): n is a, c, g, or t
  misc_feature (4387)..(4387): n is a, c, g, or t
  misc_feature (4390)..(4390): n is a, c, g, or t
  misc_feature (4395)..(4395): n is a, c, g, or t
  misc_feature (4400)..(4400): n is a, c, g, or t
  misc_feature (4406)..(4407): n is a, c, g, or t
  misc_feature (4417)..(4418): n is a, c, g, or t
  misc_feature (4424)..(4424): n is a, c, g, or t
  misc_feature (4445)..(4445): n is a, c, g, or t
  misc_feature (4448)..(4448): n is a, c, g, or t
  misc_feature (4450)..(4450): n is a, c, g, or t
  misc_feature (4455)..(4455): n is a, c, g, or t
  misc_feature (4481)..(4481): n is a, c, g, or t
  misc_feature (4483)..(4483): n is a, c, g, or t
  misc_feature (4493)..(4493): n is a, c, g, or t
  misc_feature (4499)..(4499): n is a, c, g, or t
  misc_feature (4503)..(4503): n is a, c, g, or t
  misc_feature (4522)..(4522): n is a, c, g, or t
  misc_feature (4524)..(4525): n is a, c, g, or t
  misc_feature (4562)..(4562): n is a, c, g, or t
  misc_feature (4578)..(4578): n is a, c, g, or t
  misc_feature (4591)..(4592): n is a, c, g, or t
  misc_feature (4594)..(4594): n is a, c, g, or t
  misc_feature (4606)..(4606): n is a, c, g, or t
  misc_feature (4608)..(4608): n is a, c, g, or t
  misc_feature (4610)..(4610): n is a, c, g, or t
  misc_feature (4614)..(4614): n is a, c, g, or t
  misc_feature (4622)..(4623): n is a, c, g, or t
  misc_feature (4626)..(4626): n is a, c, g, or t
  misc_feature (4633)..(4633): n is a, c, g, or t
  misc_feature (4639)..(4639): n is a, c, g, or t
  misc_feature (4650)..(4650): n is a, c, g, or t
  misc_feature (4660)..(4660): n is a, c, g, or t
  misc_feature (4666)..(4666): n is a, c, g, or t
  misc_feature (4668)..(4668): n is a, c, g, or t
  misc_feature (4724)..(4724): n is a, c, g, or t
agcggcaagttaaccccaggagaggtgccagtcagcagataatctgcaaacgaacgtattctcctcctcctacgaggatatgagcctcacgaaataatcttttcatcctgaatctccctgccgcagtcgagctgccttccgtccaggtagggtcccctccccgcccgggtcccctccccctcccggtcccctcccccgcccgggctcatctctgtctccccctcccggactgcgtcctcgctccgccgggccctcctagccgccagcttgtgaatgagacgctcagtttctcaatggagccgcggggggctcgggcggccgcccgagcggagcccggctgaggcagccgcgcaggtcgcagggccagcgtccgcgaggacggcccggctgggcggccccgagctctgtggcgctgtggaggagcgggagcgcggccgaggaagcggggcgccgagggggtcggcggccttcgggaaatttccgccgacccttcgctcccggctctaaaagttcctgatttcctatttccttttaaatcccgagtggctgttagctcttcgcctgcactttttcttccccaggagataagggggagtgtgaggaacggagcgaataatataaaaaaggatttcctcccggaagagagcggcagttcggagagatttttcttaaggaagcagaagcggcgtttgcggccgctgcaggcgccgggccctgccggccacactatgcgcgagccggccccgggctgctgaggcgcggggacgcggaagcggaggccgagcgcgccgggctcccgcgctcgcgagcgagttttgtccgcccggcggcggtggcggggggatggagcccgcgaccgcgccccggcccgacatggcgccggagctgaccccggaggaggagcaggctaccaagcagtttctcgaagagattaacaagtggacagttcagtacaatgtttccccgctgtcttggaatgtggctgtcaagttcctcatggcaaggaagtttgatgtgctccgtgccatagaattgttccactcctacagagaaactcgaaggaaggaaggcattgtaaagctgaaacctcatgaggaacctcttcgttctgagatcctcagtggaaaattcaccatcttaaatgttcgggacccaacaggagcctccattgccctctttactgccaggttgcatcatccccacaagtcagtccaacatgtggtacttcaggctctgttttacttgctagacagagctgtggatagctttgaaactcagaggaatggactggtgtttatctatgacatgtgtggttctaattatgccaactttgagctggatcttggcaagaaagtcctaaacctgctgaagggagcatttccagctcgtttgaagaaggtgctgattgtgggggcacccatatggttccgagtgccctattccatcatcagtctcctcctgaaggacaaagtccgggagaggattcaaatattaaagacatctgaggtcacgcagcatctgcccagggagtgtcttccagaaaacctgggtgggtacgtcaaaattgatctcgccacttggaatttccagttcctaccccaggtgaacggccacccagatcccttcgatgagatcatcctgttctccctccctcctgccttagactgggactcagtacatgttccaggtccccatgctatgaccatccaagagttggtggactatgttaatgccaggcaaaagcaaggaatctatgaggaatatgaagacattcgtcgtgagaaccctgttggcactttccactgttccatgtctccaggaaacctagagaaaaaccgttatggggatgtaccctgcctggaccaaactagagtgaagctaacaaagcgaagtggccatactcagacagattacatcaatgccagtttcatggatggctacaagcagaagaatgcttacattggcacacaaggtcctttggagaatacctatcgtgatttctggctcatggtatgggagcaaaaagtcttggtgattgtcatgaccacccgctttgaggaaggcggcaggagaaagtgtggccagtactggcctttagaaaaagactctcggatccgatttggcttcctcacagtgaccaatctaggcgtggagaacatgaatcattataagaaaacaacgctagaaattcacaacacagaggaacggcagaaacgccaggtgacccacttccagttcttgagctggccagactatggtgtcccttcctcagcagcttccctcattgacttcttgagagtggtcagaaaccagcagagtctggctgtgagcaacatgggagcacgctccaaagggcagtgccctgagccacccattgtggtccattgcagtgcaggcattggcaggacaggtaccttctgctcactggacatctgcctggcacagctggaggagcttggcacccttaatgtgttccagacggtgtcacgcatgaggacccagagggccttcagcatccagacccctgagcagtactatttttgctacaaggccatcctggagttcgcagagaaggagggcatggtatcctctggccaaaacctgctggccgtggagagtcagtaactctcctacgaacctcctacctgttggccagccttccttaaactaccctggacaccgctgagcctataggttgccatcagttacgctgaagccatggatcaacttctttcttgtgtctcccagcacacgtgtgcacgcaaggcagcctttccctttggctagataaatgtggtgaaattgccactagaaagggccagtagcaatgtgttcttaattcctagcatctgctatcaaactgtgccttattaaaaccaaattgtggctattgatttttgctagggtccccgaggtaagtggggaaggaacctccctcctcctttctcccgccattctttttctgaggtctcctgtctcccactccttccctttcctaggattttatggggaggtttgatgagcatttgcctttctccccagagagcttgaccaagttacatattctagagatcgtcctgagtgccaagcacgtttataagtagggcgtgtattccagtcctttctgtcattctgtgtgtgtgtgtgtgtgcacttatgtgtatgggtccatatgtacgtgtgtatataatatatattgtatgtgataatatgatcgtattctataaatacatatacacacgatactcctttccagaagttcctggggctccgtgttgcagttcaggactccttgcttcttggaccctactatttatcctggactagcttgggttggtgatcatgtctcctcttgtcaggctacagagtggtggaagaggacacacacacatctcctccatgttcctgccacagggccccttccttaagtaatgacttatctccttccagttgccacctgttggagccaagaatgtattagtttgtggtgacactgggttagctcagcatggatttcccttatccgatgatttttctacatttacttggccaatttggggaacagacctccactgtgattccatactctctctttgctttcactatcccagggatgggaggcggagggtagagatgaactcactgagcagccagagccaaatgcaatcggtacgaatcttagaaggaaggagggggagcccaggtatgagaaagaaaaaaccactaagaaaatacctccctgggaggatgagctggggccctttttcttttgctggatggttcctttatgcagcttggccctgtctaccgagatgcccatctcttcctgcctgctagcctgctagaccctcaaactgggtgggttctgtgtcaataaaaagcttcaccccctggctgagtgaggtggtcccctgcaatcactgtttgtcccctacccacccaacctgtccctgcctgctcccagcccactcatccttatgtgctagggataaatcaagagtcctcagcactccacattcccaaaaaatcccaggaactcctaaaccttcccctgtgacagaagatgaggttggcagctgatcagacctcaataattttatactgtaataagctctttgaatgtgtatattattattttttacaatcatttcattttgtatttaatatcaatggactgagtctgattcagaaaataattgtaatgttcatattcaatatcttacagtgatacagttttgtatttacatataaatataccgacatgatcaaaaaaaaaaaaaaaaaaannncccccnnngnnnggnnnnnnnnnnnnnggnnggttattntnnnntttttttatttattgttgggaaaantttttttttnttttttttttntttttttnttnttttntattntaaganntgtttatatnntttttntttttttaaagtttttatttngtngnggttntagtttttttgttgttgggttttttnangttttatttnattttnattnaagtttttttttttttttngnntatatttatttttttttttttttttttttttattttnattttttttttttttngatttagagattnngnaaaaaattgggntngntatnttttgagnnatntaagatnttgtgnttttttttttnttttgttttntgttangnttttttttttttttttgttttattttttatttttttttgttttatttttttaaaanttttttatttattg

SEQ ID NO: 638378 - DNA, 153 bp, Homo sapiens
aaatattggcccttttgcccccccctccccctttttttttcccccccttttaattttttaagggtttttttttcccccggggttggttgggcccccccgggttttccttttccctttcttttgccccctttttttaaagttccccccctttta

SEQ ID NO: 638379 - DNA, 3242 bp, Homo sapiens
agcggcaagttaaccccaggagaggtgccagtcagcagataatctgcaaacgaacgtattctcctcctcctacgaggatatgagcctcacgaaataatcttttcatcctgaatctccctgccgcagtcgagctgccttccgtccaggtagggtcccctccccgcccgggtcccctccccctcccggtcccctcccccgcccgggctcatctctgtctccccctcccggactgcgtcctcgctccgccgggccctcctagccgccagcttgtgaatgagacgctcagtttctcaatggagccgcggggggctcgggcggccgcccgagcggagcccggctgaggcagccgcgcaggtcgcagggccagcgtccgcgaggacggcccggctgggcggccccgagctctgtggcgctgtggaggagcgggagcgcggccgaggaagcggggcgccgagggggtcggcggccttcgggaaatttccgccgacccttcgctcccggctctaaaagttcctgatttcctatttccttttaaatcccgagtggctgttagctcttcgcctgcactttttcttccccaggagataagggggagtgtgaggaacggagcgaataatataaaaaaggatttcctcccggaagagagcggcagttcggagagatttttcttaaggaagcagaagcggcgtttgcggccgctgcaggcgccgggccctgccggccacactatgcgcgagccggccccgggctgctgaggcgcggggacgcggaagcggaggccgagcgcgccgggctcccgcgctcgcgagcgagttttgtccgcccggcggcggtggcggggggatggagcccgcgaccgcgccccggcccgacatggcgccggagctgaccccggaggaggagcaggctaccaagcagtttctcgaagagattaacaagtggacagttcagtacaatgtttccccgctgtcttggaatgtggctgtcaagttcctcatggcaaggaagtttgatgtgctccgtgccatagaattgttccactcctacagagaaactcgaaggaaggaaggcattgtaaagctgaaacctcatgaggaacctcttcgttctgagatcctcagtggaaaattcaccatcttaaatgttcgggacccaacaggagcctccattgccctctttactgccaggttgcatcatccccacaagtcagtccaacatgtggtacttcaggctctgttttacttgctagacagagctgtggatagctttgaaactcagaggaatggactggtgtttatctatgacatgtgtggttctaattatgccaactttgagctggatcttggcaagaaagtcctaaacctgctgaagggagcatttccagctcgtttgaagaaggtgctgattgtgggggcacccatatggttccgagtgccctattccatcatcagtctcctcctgaaggacaaagtccgggagaggattcaaatattaaagacatctgaggtcacgcagcatctgcccagggagtgtcttccagaaaacctgggtgggtacgtcaaaattgatctcgccacttggaatttccagttcctaccccaggtgaacggccacccagatcccttcgatgagatcatcctgttctccctccctcctgccttagactgggactcagtacatgttccaggtccccatgctatgaccatccaagagttggtggactatgttaatgccaggcaaaagcaaggaatctatgaggaatatgaagacattcgtcgtgagaaccctgttggcactttccactgttccatgtctccaggaaacctagagaaaaaccgttatggggatgtaccctgcctggaccaaactagagtgaagctaacaaagcgaagtggccatactcagacagattacatcaatgccagtttcatggatggctacaagcagaagaatgcttacattggcacacaaggtcctttggagaatacctatcgtgatttctggctcatggtatgggagcaaaaagtcttggtgattgtcatgaccacccgctttgaggaaggcggcaggagaaagtgtggccagtactggcctttagaaaaagactctcggatccgatttggcttcctcacagtgaccaatctaggcgtggagaacatgaatcattataagaaaacaacgctagaaattcacaacacagaggaacggcagaaacgccaggtgacccacttccagttcttgagctggccagactatggtgtcccttcctcagcagcttccctcattgacttcttgagagtggtcagaaaccagcagagtctggctgtgagcaacatgggagcacgctccaaagggcagtgccctgagccacccattgtggtccattgcagtgcaggcattggcaggacaggtaccttctgctcactggacatctgcctggcacagctggaggagcttggcacccttaatgtgttccagacggtgtcacgcatgaggacccagagggccttcagcatccagacccctgagcagtactatttttgctacaaggccatcctggagttcgcagagaaggagggcatggtatcctctggccaaaacctgctggccgtggagagtcagtaactctcctacgaacctcctacctgttggccagccttccttaaactaccctggacaccgctgagcctataggttgccatcagttacgctgaagccatggatcaacttctttcttgtgtctcccagcacacgtgtgcacgcaaggcagcctttccctttggctagataaatgtggtgaaattgccactagaaagggccagtagcaatgtgttcttaattcctagcatctgctatcaaactgtgccttattaaaaccaaattgtggctattgatttttgctagggtccccgaggtaagtggggaaggaacctccctcctcctttctcccgccattctttttctgaggtctcctgtctcccactccttccctttcctaggattttatggggaggtttgatgagcatttgcctttctccccagagagcttgaccaagttacatattctagagatcgtcctgagtgccaagcacgtttataagtagggcgtgtattccagtcctttctgtcattctgtgtgtgtgtgtgtgtgcacttatgtgtatgggtccatatgtacgtgtgtatataatatatattgtatgtgataatatgatcgtattctataaatacatatacacacg

SEQ ID NO: 638380 - DNA, 440 bp, Homo sapiens
tggcccggatgcactgcaacatagccacatcacccaatgtttggactgtttgaacaggtacaataagagagtttctacagcaggctgagtatctgtccatattcgttcacagaaataaagaagtgatgtatttcctctcctcaagaaagcccatcttggccaggcacagtggctcacacctgtaatccctgcactttgggaggccgaggtgggcagatcacttgaggccaggagttcgagatcagcctggccatcatggcgaaaccccgtctctactaaaaatacaaaaattaattgggcatagtagtgggcacctgtaatcccagctactctggaggctgaggcaggagaattgcctgagcccaggaggtcaacgctgcagtgagccatgttcacatcactgcactccagcctgggcatcagaacaagaccgtacctca

SEQ ID NO: 638381 - DNA, 146 bp, Homo sapiens
aaaagccattactactaaagatgcacggatggccgggcatggtggcgcgtgcctgtgaaaatcgcttgaacccaggaggcagagatgcggtgagccgggatgcgccagtgcactccagctgggcgacagagcgagattccatctcg

SEQ ID NO: 638382 - DNA, 294 bp, Homo sapiens
tgaaagagaaacagacacactaaataaaatacgaaatatattaaaaaataattttctttttcttttttttggagacggagtcttgctctgtcaccaggctggagtgcagtgacacaatctcggctcactgcaaactacacctcccagattcaagcgattctcctgtctcagcctcctgagtagctaggattacaggcctgtgccaccatgcccagctaatttttatatttttagtagagatggggtttcaccatgttggccggggtggtctcgatctcttggaatcatgatcca

SEQ ID NO: 638383 - DNA, 949 bp, Homo sapiens
gatttcccagaagttggtaaccccggaagtggtccttcggaacgggagcgttttacaaaggccaactaaatctttcttcaagaaggggtgtcttcctactttgtgtacacccgtgtggtcccccccctggcaacatggggttggcccccgcgtgaccacacgggctctggtcacaccgccacagaagttaacgtggcttagaaaaaaataacccacaatcttcaggggcctttgacaacccgcctttgcgtgtgcagtaatcccccaatttgggcgtacctgcactttggcaatatcgagtaatgccgtagtacacgtcaccccttatgccccccaaaatatcggggtccaaataacaggcagtaccaccggaaccagaccattgtttgcctaaatatcattgttcttcgagtgccccgcctttccccacttctttgagaggcaatattttagcacaggggcctgcagtcccacccacgcacgggcatctatcaggagggcattccgtccacactccatataggtggggggaacccccacaaagtttcttctatgaccacacaagtcacacacacctgttgtgtgcccacaagattggaacttcttcatacaattcttccacccccaaacaagttgcttctaaaacattcaaccagcgctcacctaaatctttagctctccccgtattacacatcctctccccattacacattaggcgaggaacaaagtttaaaaaaaaatattccagcaccgagtgtcatttgagtgaaaactttgatgtataaacagtgaaatttcactccgttttagtcacacatagaaaaactctaaccagttaccattcttataaagaccacgttagactaagatcacaggccttggtgtttcggcgtaaatttgcttatttttttgcccccaacaaaaacaaacataaaacatccccaaaaca

SEQ ID NO: 638384 - DNA, 523 bp, Homo sapiens
ggctggaagagaaggttcaaggcttgggtgcctctgtgagaaggttccagcaattggtgcagccggcaggcaccctggacggcgtggcaggcctccttctgcagctgtcccaggcggggcgggaggccatgcagggcccctggccacactgaaggatgcctacctggaggtgacactgcggcccctggaggaggtgtggcgggagcgagcagaggaggccatgcggcggctgcaggcctgggtgcccgggatgccaggcaatgggggtccaaggcccatcagggcggccctgggggccatgaaaggagccctggagctggccgcccaccagatgctgtcttgggctgaggccacgttctcacgggcactgaagaggctctgcaaaccactgctggacctgtacagcctgtcggccaggaaccgctcagtggtggtgatgctgccactgttgcctgcgggggacgagcccctggacgtggcccgggtgaccagctacctcatggaggagaagctgctgcggccg

SEQ ID NO: 638385 - DNA, 599 bp, Homo sapiens
ggctggaagagaaggttcaaggcttgggtgcctctgtgagaaggttccagcaattggtgcagccggcaggcaccctggacggcgtggcaggcctccttctgcagctgtcccaggcggggcgggaggccatgcagggcccctggccacactgaaggatgcctacctggaggtgacactgcggcccctggaggaggtgtggcgggagcgagcagaggaggccatgcggcggctgcaggcctgggtgcccgggatgccaggcaatgggggtccaaggcccatcagggcggccctgggggccatgaaaggagccctggagctggtgagtgagcaaggatggggcgtagttggcaggtgaggatgactgagccagctctcactgtcccctccctctccaggccgcccaccagatgctgtcttgggctgaggccacgttctcacgggcactgaagaggctctgcaaaccactgctggacctgtacagcctgtcggccaggaaccgctcagtggtggtgatgctgccactgttgcctgcgggggacgagcccctggacgtggcccgggtgaccagctacctcatggaggagaagctgctgcggccg

SEQ ID NO: 638386 - DNA, 765 bp, Homo sapiens
gaggtcttttcccttgtcgcgaaagaattgcccgtagccagaggaactggacccaacagccttgtggtgcttggtcaccctggcctgctgtaggagggaaactctccgacggacctgagcatctaggggcttgcgatgtctctcccaaagggatccttcagctaggaccaccctaaggaacacctgggaagtttcagaatcgcattgttgggtgggccgtgcctagcctgggcaaggctacgtgtacaagtgttggcgcctctatttggagtcataccctgccttcccgacgccctgccccatagcccagccccagtcactgtccagggtagggccaggccccttgcaatggcctcgcagagtggccgtgggctaggtacagctcgcacctactgctgctgcgatcagtggtacccacgcgccttagagtccgcctaagggcactggaagggtgggaggtatgtactagggggcagtgtctcttccagggggaattcctcagctcttgggaaccccctatgactgcccaggggagagggaaacctttttcattcaacatatgtagggggcaagctttggtgcgccccctgctgaggagcagccccaggaggggaccagaggggatgcatgcgtcgctgcctgggatcttggggttggcctttgcatgggaggcaggtggggcttggaatcagtaagtctggttcccgcctccctgtctgagagaggaggcaggagccaatacgcccgggttgtgtttgtacaatt

SEQ ID NO: 638387 - DNA, 366 bp, Homo sapiens
  misc_feature (43)..(43): n is a, c, g, or t
  misc_feature (142)..(142): n is a, c, g, or t
  misc_feature (228)..(228): n is a, c, g, or t
  misc_feature (242)..(242): n is a, c, g, or t
  misc_feature (279)..(279): n is a, c, g, or t
  misc_feature (340)..(340): n is a, c, g, or t
agagcaaccaacagacaggtgaccttcttgggttgtgcttcanaatggactgggaaaaacatctttgaaatcaggaaatcaggccgggcgcagtggctcatgcctgtaagcccagcactttgggaggcggaggcgggtgganccatcgaggtcaggagctcaagaccagcctggtcaacatggtgaaaccccgtctctactaaaaatacaaaaaaaaaattagctggncgtgttggcgggancctgtagtcccagctacacgggaggctaaggtggganaattgcttgaacccgggaggcggaggttgcagtgagctgagattgcaccattgcactccancctgggcgacagagcaagactctctc

SEQ ID NO: 638388 - DNA, 118 bp, Homo sapiens
aaatcaagtgggtagaagacgaaaaccaagtatttcccacgtataatcagttaacttcatgctccttaaatttctccatacgctcacagtctagttccttcccagttaggtgcgctga

SEQ ID NO: 638389 - DNA, 957 bp, Homo sapiens
  misc_feature (205)..(205): n is a, c, g, or t
gcgaagcatgggtgggcctacccctactagtgtcagtctaccaacacatatggcctagactacgtacataacctagacctactccaatgctaagactagtcgtcccaacaattatattactaccactggacatgatcgttttgccaaataggacacataattggaatcagcatcaagcagcccacagcctacattagtttgagcntactctatccgctcgtactattttattaaacccatacattcaatcatagcaaaccttatcttagactgttccctccaaatgctctttgcgtctcgaaccgccgcataatgaagccccctctcgcgtagagtactgagagctaaccgtgcacatccttaccgcctcacaatctataggctaaggagcgaaacgacctagactagtccgaagttgaagcccacgttatcatcggataacaaatactcatattctcctgcgtaatatctacaatcgtcgcctagaagatcgtcctgaatctcataagatgcaggagaccacagaaataatcatattttatatctttcttcgagacctacacattataacccaactttggcatatctatcacctcgattgaggctcagccatgacatgaacgcctgaatgcatggcacgatacttccctagtctacaccgctaggtagagatgcccttcccgcttaggtcatcgcactagagtttacactcacaaaccctaggctcactaaacattctactactcactctcactgccaagaactatcaaactccttgagccaacaacttaatattgactagcttacacaatagctttatagtaaagatacctcttaagggactccacttatgaatccctaaaagcccatgtcgaaagcccccatcgctgggtcaaagttactgccgcagatcttaaacaaggcgggataggaaaaaaggctcaaggattttaaccg

SEQ ID NO: 638390 - DNA, 1771 bp, Homo sapiens
  misc_feature (935)..(935): n is a, c, g, or t
tgtggatcaatgtggggtgtgttcccccgcggacgacgctgtgttacgtctctcggctgtggcgtgagtagcttctgttgcagcgacggggctgtggtttgtctgtgatacggcatgcgtggcaccacgctttcttgcggggaagatgtctcgtggtgtgcccgcactgagtttcgcgtggccgacgcagcgtgtggtacgccgcgcacccccccggggtgtctgctcgcgcgcgagggtggttcccccccgcccttggtggtgtggaaatgtgcccccgccgtgagatattgttgtgggcgtttgtggccccttggggggaggcgcccgcacctcggggggtgtctgttgacgttgtccgacccccgcgcgtgtggtgtgtggttggtccgcggtggccgcactcggccgcttctggagggtgcgccactggggggttttgcaattctgtgtcgaccaagagcgccacgtgtgcgtgggcccccgcggtggtggtggggtcgcccccccccttcccgacggtggagatgcgttctccgtggtgttgggggcggctcttcgctaccgacgagtaggcgtctgtttggttgtagagagcccccttcggtgggcctacggtggaggctcccaccacctgcggcggtgtgtgttaataaggacggggtgagtgtataaaggtagtggttctcctctcttgggggaagtctcctcaggggcccccggggttgattatggctcccaccgcaccgccgcagctttggtgcgtggtatcgtcaaaagagcgattggtgccctgtgtctgcctgctcgtggcgcaccgccagggggtggagacacccacctctttggggggcccgccaccccccgtgtagtgggggccactccgcgtcgggtgttgcgcctcctcgcttctccccccgcggaggatggttgtntgatatacgtgtgtgtggacaagacgcccctcttgggagcccgtctgggagttggtgcctcctctgggtttcgtggagaccgcgctctcctcgcgtggtattatcatgtggctcgcctcttttggagacatctcgagagcgtttttgagagagggagagagagagctgttcgtagaggttgggctagagagagagagggggcgccgcgcgcaaactgtctttggcgtgtagtgtgctgacgccagggaccgtctctcctcgtggtgtgtgtcgacacagtgttgttgctctcttgggagggccatctcccctctatagttctgagatagtctgtggagacatagtggaggccccgcacactctctgcgactggggctcacacacacaggcggcccgacgactctccctcgacgaattgtttcccacagtgtgcgtgtgttcttgagacctctcacaaggggcgttgcgcacacccacgcgcgaagaaaatgggggcccacgcgggagacccacacatacaagaccgtctgttctccctctgtgccggggtttctggtgtcccacccttatacctggccccacactggaaggcatatcgtcacccccaaagtaagaatgttatagaaaacctagaaactatatcgaaccacaactttttacaaatcctaatttttccccacaaccagggccctctgcaagcccacacctttccttccctcctttgggaaacccaccatacccccggccccagccccttactgtcacgccccaactttttgggagaaatatgaaagcctgtggttctaaaatttcataaaacaaaaattataaataaa

SEQ ID NO: 638391 - DNA, 485 bp, Homo sapiens
  misc_feature (5)..(5): n is a, c, g, or t
  misc_feature (44)..(44): n is a, c, g, or t
  misc_feature (72)..(72): n is a, c, g, or t
  misc_feature (307)..(307): n is a, c, g, or t
  misc_feature (314)..(314): n is a, c, g, or t
tccgnaacaatttgagcccccaaaaaagtacctaattggatttngaattcaaagaattaaatacccatgatncccatactgctaataaatgaatcagataagagagaagagacaaatctcccaggcagaagaattccagattatttatttatttatttttatttaattttttttttttacacagggtcttgctctgttgcccaggttggagtgcagtgatgtaatcttggcttactgcaacctccacctcccaggttcaagcgattcttgtgcctcagcctcccgagtagctgggatcacaggcatngctgccnacgcccagctactttttgtatttttagtagagacagggtttcatcatgttggccaggatggtctcttaactcctgccctcaagtgatccaccagagaggagatcctcggcctccccaagtgctgggattataggcatgagccaccgtgcccagcctactttctaattaatt

SEQ ID NO: 638392 - DNA, 110 bp, Homo sapiens
ataatatactatatatacattagcaaatgtcggtcgttagtagacactgagcagagaagcttgaagcaacggggatcctctcctgatgggcagagcgagccccagcttcc

SEQ ID NO: 638393 - DNA, 404 bp, Homo sapiens
  misc_feature (289)..(289): n is a, c, g, or t
attgagttaagaatccagtctctgttagtatcgaatcctctggtaataggagacttcactctgagaatccgagatgtcctttgaaacactgcaaaggttcataattctaaaaggggacctgggctgaggcactagccatattaccctgctcaaaggttgacctttgagggttgccacctggggtgtatactacttggccacctgaggtgtatactacttggggatccgtgcacgtaaacgattacaaggactatgcagaaaccagagagtttaagaataccggattggnaaatcaccaacaaaccatcacatccaccacaacacatcttactattacaatatccctcaccctacacaagtacaccacccctccatcacccaacaccccctaactaccaaaaaat

SEQ ID NO: 638394 - DNA, 157 bp, Homo sapiens
tctgtctgagcagtatgtgatttaacaaaaaaccaggtaacatggggtttcacattttagccatttttcctttttctttttatttttttggagactgattttcactcgtgtggcccaggctgcaagtgcaactggcacaactacctggctcagtcca

SEQ ID NO: 638395 - DNA, 784 bp, Homo sapiens
ttggccctacaatgctggatcatgaaggataagaagtcccaggaaagcgaggttacaagctactttggagcagcaaaagatttgcctggtgtttagagagctgtttgaaaaagaacctcttcctcctcccagaaagacacgtggtgagctcatgaaggcaatctgattttgcatgttaactactggttaccgtaagatgaagatgatggtgttattgtgcctttggcaacaggaatatgcaaaagaaactcagcagccgcacgttagtggaaacagtggcacaagcaaagcacgagcaaggctcagtgctggcaacgaggaccaaaaggaagaggaggcgtgaagagggaggaatcatgatccaagattctatgctacctctaccgaagaggagtcaggacgatggcacggcagtccgaggcaccatcaggaggggacgacaggcagcctacttcccttgctcgatcgatcggcatgatatcgatgcagcacgcgaggagattgaggatggcctggtgcgaaggaagaaaatggaactcctccagaagtatgcaagcgagaccctgcaggcccaaagtgaagaaaccagaaggctcctgctgcgtattaggacccagctggggctctccttgagagattcttccatcccccaggtggtacctcaggacccaggggctgctgacagcatggctgtgtgctgcgaagggcttcctggccccatttctcaggcttccttgcctctccttgttctcatgttgaccggagggtaggggtctgtccctgt

SEQ ID NO: 638396 - DNA, 321 bp, Homo sapiens
ggtgtgtgcattgtgtgctgtgtcttagtgtgtgtgtgtgtgtgtgtgtgtgtatgtgtgtgtcttggtcctcctttcttttggggaatcctgtaatgtgacggtagcttattttgtctattaattagggtgctggatgttagagaattttgtcagtcaaactatatacacacagtagatagctgttcttaggcgaaggtaactcttctttatatccgttgtaacattccattatattccattgccaaagacaatcattaagaaactttgtatagctatagtaaagaaagcaaataattttttaaagaataaccattttaa

SEQ ID NO: 638397 - DNA, 412 bp, Homo sapiens
  misc_feature (73)..(73): n is a, c, g, or t
  misc_feature (97)..(97): n is a, c, g, or t
  misc_feature (103)..(103): n is a, c, g, or t
  misc_feature (105)..(105): n is a, c, g, or t
  misc_feature (184)..(184): n is a, c, g, or t
  misc_feature (203)..(203): n is a, c, g, or t
  misc_feature (297)..(297): n is a, c, g, or t
  misc_feature (337)..(337): n is a, c, g, or t
  misc_feature (389)..(389): n is a, c, g, or t
ctgccgttactggctcactcacctcctccacaccacctatatatctacgctcagcgctcactacttctcccgngactgacgacataaacaccgacantctctntnaacataccctttcactgtcagtcacacaacccaacaaccattcaaatgtcgcgcgagatataccaaatataacacggcncgatgggcggtggcccgcngcgccaatcgccaattccgacaatgtccattgatccatattccgcgtcatcacagcccacaagtatgtcaacgacacccgtcacgatttgcgcncacgtcgacgcgcatattgctatcccggatattactgcgnttttcgtcgagcgtcatccgttattgacccgcacgactcatgcgtgtacgantcactatttcagcgatcggcgcg

SEQ ID NO: 638398 - DNA, 228 bp, Homo sapiens
gtatctattattttatcccctggttccggcagtggctccctatacagccttaatgtccatatatctgtcaaggatatttatcactaagccgcattgatataacagacataatctaccagagtacaaacacaaatatgcctatcatctggagaagctactgtgggatagggataggtttaccgaagccactaggatgggcgccgtggctcatcacctgtaatctcagca

SEQ ID NO: 638399 - DNA, 188 bp, Homo sapiens
aattaccgagtattggagttcagcacggtgctcacgtgatcgacggaacttgtacagggaggcatgcaccgtatgttgtgaatacacgtcgaccaggctccagcttaacgatatttggaggtcagcacggtgctcacgtgtcgatggaacttgtccagtggatgcatgcaccgcagtggtgaatacac

SEQ ID NO: 638400 - DNA, 116 bp, Homo sapiens
cgctttatacttcctcaagttatacttcctcaacgctttatactttctcaacgctttatacttcattagctctagaggtccaggcatacttaatattagaagtataaagcgtggag

SEQ ID NO: 638401 - DNA, 386 bp, Homo sapiens
gggttcatagaattcatatttgcttgctcccagactgtgcggctgggcagaggcgctccccacatcccagacgatgggcggccaggcagatacgctcctcacttcctagacaggatggcagccgggaagaggcgctcctcacttcccagactgggcggccaggccgagggtctcctcacatcccagacgatgggtggccaggcagagacgctcctcacttcctagacggggtggtggccgggcagaggctgcaatctcagcactttgggaggccaaggcaggtggttgggaggtggagattgtagcgagcagagatcacgccactgcactccagcctgggcaacattgagcactgagtgagcaagactccctctgcaatcccggca

SEQ ID NO: 638402 - DNA, 875 bp, Homo sapiens
gtagccgcttgtggattgctgggtgtgtgttgtgtgtgtgtgcgctgacgtgcagtgctgtgtggtagtctcattgctaggatgacctcgtggtgcacccccctgaatagctgtcatcagtggggcctgtctatgcgcacatggttgctgggtcatatcgtaaatcatctccagactcttgtgtctaggagaggacgtcctgtgtgggtggagtgatgatgctaggagattctgaagtggaattccctctggactctctggagttgctctcgctcttcattcgtgagcaccagttcgtgttggcgtcggcgggcgtgtagaggccctgaatattctcgcgtgtgtagtattacacggtgacttgccaattaggtcgcccattcgggtcaactctgggatcgaatcatgcggtggtaggccgcagagagaggggttgggtgcttgccaagaggaaatggtatgatagtttcctctcttgcattctttgttcccataatggtagagatttagtgtgattgcacctgcttagtgttcaatagcagtaactggtttgtgtatattcatcaataatcagaccagatatttctgccggtaatgtagaaatctagcggtgtctatgaagaagagtgaagtctcccacatagcgctacgtagctaatgtcccggctttgtcaaccatgattactagggcagcgcgggtactgttgcctatggggaacgtcttgactactattctgaactcggggaaggacaatctgcttcggatagagttgccgtactttgtttcctatgtccggggcataatcctttaccctagggaccgccggggcctaaaagggaaggggctcccggaaacaatttcacggggcccatgc

SEQ ID NO: 638403 - DNA, 397 bp, Homo sapiens
tgaggaatttgatcatttatatcagaatggccatattctgaggccagtttagcgttcattcaatgacgatttactcctcttttccattgaaggtcatattgaggttaaatcaatgactgaagtttttcattgataaaaacaaatgactattgaaagtgcaagtcggtatcgtgcataaatttactggtctctgtggtgattttagaagggtgtgcctatttctacttttaccccatactctttaacccgatacccaagtactgtgctgtagtcaggatggccgagcggtctaaggcgctgccttcaggtcgcagtctcccatggaggcgtgggttcaaatcccacttctgacagatgtttagttcctctcaggagtcatgctgcgaagcgtcgacgc

SEQ ID NO: 638404 - DNA, 324 bp, Homo sapiens
ttcgatttgggctacagtcagcacaattggtgtcaggtggcgtaagctctcaaagacgggccaagatatttgtctggaaagtgagaagacctaagagcagctgaattgtgttgccaagggaagatctgcctgccgctaggagatgttaagaatagatggagagctctcctgtagggcatggctaagtgacaggcttccctgggggaagatcgatgtagccatatgacctgtggagatccctcctagttctcaggaccataaatttgaagaatatagaagaatctcaaactttccagtattcacacacagttggccttatccgag

SEQ ID NO: 638405 - DNA, 137 bp, Homo sapiens
ctggaagtcttgtaggtcgtagtgtgggtggtgtagttgacagtgtagttgtacccagggcgcaagtccacgagctggttgccctggcacctgctgctccagatagtcacagatgctggcttcatacggcagtccag

SEQ ID NO: 638406 - DNA, 142 bp, Homo sapiens
gtgacaaacgtcgcacgagccccagacaccaccaccccgaggagcaggcccgacagtcctctcaaggagggagtcttccctctgaggaaaagggactcccccaggaggaatctgaggagtcaaactcagcatggccatttag

SEQ ID NO: 638407 - DNA, 336 bp, Homo sapiens
  misc_feature (288)..(288): n is a, c, g, or t
  misc_feature (297)..(297): n is a, c, g, or t
gagaggtggccgccatgcttctgtgccgaccacgccccaggacctccggagcgccctgcagggccgggcagggggacagcagggaccgggcacagccttcccccttcgcccgcggcacagtgcacgcggcttgttgacttgcaagcccgggcggagcccttccgggcgggcgtggaggaagggaggcggcctccatgcactttatgtggagactactggccccgcccgtgccttcgtgctccgcagggcgccccagcgccgtccgcggccccgccgcagaccagctgncgggtgtgnagaccaggctcctgacccagccatgcatgcagcgccacc

SEQ ID NO: 638408 - DNA, 130 bp, Homo sapiens
tgcactccagcttaggtgacaaagtgactctgtctcaaaaaaaaaaaaaaaaaaaaagttaagggataggggttgagagaatggcaaagaggcagggatgatttctgataatttgtgacaacctggagct

SEQ ID NO: 638409 - DNA, 104 bp, Homo sapiens
acgtgctcccacctcagaaagaggttacaaacgttctctttgctttttgagaacccattttgtagttcattgttgcagattgtaattctaataccaggattaga

SEQ ID NO: 638410 - DNA, 1296 bp, Homo sapiens
  misc_feature (141)..(141): n is a, c, g, or t
  misc_feature (560)..(560): n is a, c, g, or t
cacaaccagctggaaacaatatgaaatgatctgcgtgacatgtgctcttgaatgccctaggattcatcctgatcattctcaccgtagggtgaggcgctgacatgagcagcttgtaattatgcaaacttcattcactagacnatcgtagctacacgagcacgtactagcgttggtaagctcactaccaggctatgtccctaatcatgtagcgacgcttgtatctggccaatcaatagtgcgaagggcttcagtgtcaccttgcatttatcccacgtacttctcatggcgtacaccacgtgagatccaaaagctaacgacagaaaactccatgttcgagctattcatagtacgatctggcagtaaatctaatctctttcgttcccacaactgattctctcgtgcctatccggaatggaccggacagtagggcgtcaggaactacccacgatgctatcacaccaacaatgacatacatcgctatctatcttggagcgctcgatctcatttcatctacacagccagtaaattgttcactaagtactttcatgattgtgatgaangctcttctgcattcaggaatgcctgaaataaggtcccttaaatatgttaaaatagaagcacacttcaccattgaaaacgcatagtgaatgtgaacttagttattgggaattgcccgcactctcaaccatatcacagcaactagtttcctgaaattgaagccccaggttagtaacctaattgataactcgtaagaaccagaaaacattatgggaaggggattccgaaacccccctcgcaaagatagaccttggctgtttcttaaacgccggatacccccccactgggtgccttcccaggtagtacttgttttccgagccaaatggcgattaaggtaaattggtatcaaacgttttaccacaaaacatgtatttgcggtcaacgtcgctcaggtcccttcaaaaaaaaataccttgggaggaaaacagaggtttcgaataagtgctacgacgcctggcgcccctccaaccagggattgacggccgcaaccacggtgtccaaacacacaggtggccgaaaaaagaaagagacagccggggcggaacacgaaaaaaaagatcgcgcaggggagatattccccccgaatggtaaaaaaggcggccccggggggggcaaaccctggccggcgtcttcggacgaggccaacagccgccgagagaggggaagtacgtgaagagcgagaacaagacggggggaccgacacacacggggggcatcccaacggacaggcgatatgaa

SEQ ID NO: 638411 - DNA, 1026 bp, Homo sapiens
tcccctgcccccccccccgggggggggggaaaaaaccccccctcttaaaaaggggggaaaagaggggccccaaaaaaagaggggtgtggcgccctcctttcttatatcaaaaaaatgttgtgtgattatgttgtgtatgaaacccccgggtctattgtgttccataataataaaaattttgtggaacaaccccctctccccctgggaccccgagaggacacccaaaattcgcctctttgtggtgctttccagagggcgtcggttgtttatacaacgagtgatcttgtggcgacatctacgacagaagaagagaagaaagagtggcgcctatttaaaaaaaaacacaccagcgcgcgtgactatccaccggaaagaaagtgtatcccgagggcgtaacaagacaggccggccgagaactaaacactctccgcgggggagcggggtctttctcctcgcccgcgaggaacacacagagtgtgggtcgctccccgggcgccaccaaaaaaggtggacgcacaacagagatgtgtgagaccccccccgcttgtgtgtgtgtctcacacaaactcaccccgcgagatggagtataacactcgcgtcgacgcgcacgagcgactcatcgcgtgggtgtggtgtgttcctactctacaaaaacagccgcaccaccatcctagatatacgatggggagaaaactcctcttttttgtgtctcgtctcccccaagagggggtcgccccaacactcgcgcgagcaaaagacacatagatgtatggggaaaacaatctaatccccccccggagtgagggtttgcccaaactaatttgtgttctgctcagacacacgcaggttgtcgtcccaaaattgttgctcgcccgaatcgtctggttgtgcaaacacaccattagtaaagagggtcggcgccaccatttattattccccctcccagagggtctgtctctggtaaaaaaattgataattgttgtagaaccccccttttgttttgtggcaccctctctagccccttga

SEQ ID NO: 638412 - DNA, 122 bp, Homo sapiens
  misc_feature (72)..(72): n is a, c, g, or t
  misc_feature (83)..(83): n is a, c, g, or t
  misc_feature (93)..(93): n is a, c, g, or t
atcatctacttcccagtcgctcggtacctcagaaagcggcagcgcccaggctggtgtggacctgctggcctntggtgatcctnctaccccggnttcccaaagtgctgggattataggcatga

SEQ ID NO: 638413 - DNA, 331 bp, Homo sapiens
ctgtcatatggagaaggcagctacaggcaatatgaaaatgaatgaatatggtagttttcccatttatgcacactgaaatttggatatcgtataatttttattgtcatgaaacataagcctccttttgattcttttcccagtcatttaaaaaacatgaaaatgtattcttagccaatgggccctaaatgaacagatggccagacagatttggcccactagccattgtttaattgctcttcctccatggtggtagatcccttatcttggccgcacatcagaatcaccatcccaggtaaatctaattatacttcttgtgattgagatccctgaa

SEQ ID NO: 638414 - DNA, 108 bp, Homo sapiens
cgtgaaggagatgccccatctcgctcgggctcagtcaccgtgtactcccgggtggaggaggaagtgatcactgaggtggagtagtggtacagctccgtgtagggctca

SEQ ID NO: 638415 - DNA, 198 bp, Homo sapiens
ggggacagcatcttgtgtagagaatcggcgcccgacaaagcatatgcgctgactttggctcataggcgagctcgctttagccgaacttgagcctcaagtgggagccgtaatgccttgacactttcgtcccaagccagagccttcccgacagcccatggactgcagcatcttgttgccaattgttacttgtgtgtcaag

SEQ ID NO: 638416 - DNA, 470 bp, Homo sapiens
catctgccggcgccggtcaatcgtagaatgatgggtacagtgtaaatgtcaggtctcttacttggactctggcatataccatcaggagcattttaccttgattctgacttaactgccttttcccttatctcctttgtcaagcctcaaaaattctaccggttcttactgcggctgggtataacttactagtaatatgcatttacgtctcctttatgtctgggcatggtatgatacctcatttctttctttcttccttccttccttccttccttccttccttcctttctttctttcttttctttcttttctttttttgatagtgagaaagcccaggcgggcgtgcagtgcgagcatcggatcacggcaacctcggcctccggggatcaagtaattctccggactcaggaccccaagtagctaagactacaggcccacaccatctggcccggctaatagttggtatagaaaga

SEQ ID NO: 638417 - DNA, 115 bp, Homo sapiens
ggatcccccaagtaaacagctatactatagaggttaaaattattcccataacggtcatctgactagagaataatctatttgatataagaacacagaagtgccacggtttaaaaaa

SEQ ID NO: 638418 - DNA, 421 bp, Homo sapiens
cgcgtcgaccatgaactcatcatttttttatggctgcatagtattccgtggtatatatgcgccacattttctttatcaagtctatcattgatggacatttgggttggttccaagtctttgctattgtgaatagtgccgcaataaacatatgtgtgcatgtgtctttatagcagcattatttataatcctttgggtatatacccagtaatgggattgctgggtcaaatggtatttctagttctagatccctgaggaatcaccacactgacttccacaatggttgaactagtttacagtcccaccgcatctagcctgatatagtaacattgtagtacttatgttaggaagtgaatctttattcgataattggattcaccataaaatttttctgaaatgttctaagtcaattcttcgtcgacgc

SEQ ID NO: 638419 - DNA, 900 bp, Homo sapiens
cggcgcccttttgtttttttttttaaatttacacagaagttgaatatagcttaatttacacgagcagggatttttttctattcagtctccagtggtgcctagataacttccttgagtgcaagatatgcccttttaaaagaaatctatgcgaacatcctaagattaacagatgttggtgctcctcaatgaagaggcaagcttgaatatatcagcagctctctaatgcctcagttactcagaagcaattcttgtggcagtctctacatcccatgattttagaagacaaggccagtatagactggcattcctatcaaagcccatagcacataggtttcctatcttggggggtatcctgggactagaaacggggggctccagcaatagcactatgtgcccaaatgtcgagctgtctgttggaacatttcgggatttgtgtttggacggatttggctactaaacagcatccggtggatcatctgggctctgcaagttgccaatagtgctttgccgtgacaataataccgtgcggagagtcattgcagctgcccattggatcttacaggaatatccaaaaaatagcccctgtgacggacgtaatattaggatgcataatttagttgattaaacgcggaccttagggggatacacatgggaatgtgctggaataataaatctcaagggggattatccctcctacaaatgggtgcatgaggccggataatcctctaatctggaaattcattagcagatctatttatgagatggcgcttccggatttagactcttgagaccgagacgtgccgaaatgatattgccgattattaaccgctcgtcgaaaacgaacagcttttacggcctgtatggaaagtaaacggggttgaagccaaggacagaacttat

SEQ ID NO: 638420 - DNA, 332 bp, Homo sapiens
  misc_feature (257)..(257): n is a, c, g, or t
cgtcgacggcagcttacttgggaacaacatcttttgtggtttaagaaaatgtggggttggctgggtgcggtggctcatgcctgtaaccccagcactttgggaggccgaggcgggtggatcacctgaggttggaagttcaagatcagcctgaccaaccctgtctctactaaaaatacaaaattagccgggcatggtggtgcacgcctgtaatcccagctactcgggaggctgaggcaggagaatcacttgaacctggnaggcggaggttgcggtgagccgagattgcaccattgcactccagcctgggcagcaagagcgaaactctgtcttta

SEQ ID NO: 638421 - DNA, 510 bp, Homo sapiens
cttcctttgtcccggtactcagccttgggtgatggtgggccttgggctcagggtcccaaagacagcaccccttcccccacagagcctggtaccagcccctccttgaagtgggtccttggaagcccctcaagaaggttctccccacactgcaggtcaggaagcaggcacagcagggcccagggcacccccgcaggaagcaggagcagggcctccagcacaggccctggggtcagccgccaactgtgaagccccggctcggcggctgctctgtgcacccggtctcagcgtcaccatctctcagggctggcttggcaccctctccttccctctctctgctaacgtcctgcacccccgagcccccaggtccaccgtccagggtgagcatgaacacccacaaagtctccgaccctcgcccgcacagctcttccgaggcgcccagaatctcagtccaagcctggccctggtcgcctcgcactgcccaccgcactctgctgggcaccttgaggttct

SEQ ID NO: 638422 - DNA, 1393 bp, Homo sapiens
aacagccaatacatatcccaaagtacctacatgggattctgagaactatgccagacatcacctgatcatcgtccaatatcatttcctacaggacagtacatcaatcgaactcaaggaacttatcagacaaagactcatacattaatcaataatccatcacaaacacatgatccaacggagatacaggagaagcacgacaaaatgagaaaaagaaaacgaaatacagagaccacaagatcacagacggaacagaaacacagaaacaacacgaagagaccaacaaccactgcacaacggaacacaacaaacaaaaaccaaaaacacacaggagtcaaaacaaaaaggaaacgaagcctgctgacacaatgaccaaccgggaaacaaataaaatagcaacacagcaccaaaaaacgacaggcaaagcaacatgggcacacacccactgcgcgaggaactaaaaaaaaaaacaacaaccaaaaagctagcacaccacacaccagcaggcacactcaaacaacttcaataatcaaaatgagaaaataaaaaaacaatacgcatacaaaaaacaaaataaaaatataaacctaccagcaataacaacaccacaccacatatctatcaacagtcaatatatcaatatccaacaccatacaaactacttcataaaacagaacatgcgcccataccacacaaccacaactagagagagatgcaatacgaagcgagaggaaataaggggacgagacgtcagcaagtacacagaagaatgaacgagaaagcaacacacacagcaagcgcagagccaccgagataaactaaggcgacgcaacacaagaacagaagaaacaagagagagcaaacaacaaaagacacagagaacaaggagcagaacgggcgcgcagcaaagagcagcacacaggaggctcgcacggacaccaacagccacggcacaggcacacacagaagaaaagaaacagcacagaaccgcccaccaacaggagacgccgcacaaagaagaagaacaacaccagagcagagacgagacgcaaacataatcacaacaagatgtcaacccagaacccaacagagacaaagagaacacaaagagaaatagaatgagatacagaggaagccaaacacgaccggaacactggatacagacaaacacgcccgacaacaccaaaaagcagacccgagcgacgacggaccacaacgaagatgaacagagaccagaggaacaaccaatgcagggagagagacaagcgcagaagcagcacaaaacagcaagaaacgccaaacaaacgagacgacaggcacacgaaaagcagtacaagctcagagacagaagcaagcacacgccgacgacagacagatcaaaaaaactcaaaaaaga

SEQ ID NO: 638423 - DNA, 214 bp, Homo sapiens
cttatttcccttctattgtattggttgcaatgatgtggctgatggtttcgatactactagtatggggagtaggggtgtaggtttgccttgtggtagaagtgggcatcggcattattaagtcttagagcgacagcctatcatcactgcgcccgctcttccggcgatagccatagcttggtctcatcgattgatgggtcgttaggtgtacagtcag

SEQ ID NO: 638424 - DNA, 279 bp, Homo sapiens
  misc_feature (1)..(1): n is a, c, g, or t
nagaggtagcagtctgtctgagtcgtcaggcctccagcagccgccccgtatatgccccggtcactgaagtcgggacacaatcggctttaaccaatggatgacgggcgtggccatcagtgagatggggagaggagtctgaactaaacccctagctttcgtgcacactgcatacgtttcagaactcctggatggtgaccatctctggagtgcagcgcttgctgcaggtggaaatgatcaggaatactggccgtgttttctcttggcctcccgagggttccc

SEQ ID NO: 638425 - DNA, 797 bp, Homo sapiens
ggagaactagtcgcgagtttattttttttttttggcaaattagggcttgtttatttaaagggctgatctatgtaatcacagaggccagttatgtacagacaaatggggaggtatattcctgggtctcttcctccgtgtggataaagtcttgatgatctcctccttctgggcctggaggcgcgtcttcagggtcgctggcgtgcttccctggggtctatagaacctgcgggcctcgagccgggtcgagccaggagcttctttgcgggcctgtatctgcctctcagctcggtgagatgtgtgccagtgagaactccgctggttttctgacacacattcccctatcaccttcgaggtacaggctgtgatcactttgtggggagcgatcttcttagatccagggtatcttctggagcagcgccggcgcaaaatcgtcgatttctcctcgatccagtgtgaccttctcgggcgacttcgggctgtgggctgtacccttccggtttacctatgcccatgtggctgcccttccggggggccaagggtgttttcccgggatcgagcccgggatagggacgcgtcacaggcttgcggatgatcagccatcttgtgatgagctctccggatctgctgacgggagtgggcatgggcggattccatgggtctcattggggtctaaccagaccttcttctttgccccagcggaggacccctagaggggaggcttttttgaagctgagcattatcatggggggggcgccgttccccccatttttttgggacacccaggggatcgggctgat

SEQ ID NO: 638426 - DNA, 111 bp, Homo sapiens
gtctagcaatgcttgcagtggacaggtagcctgggggagttggggagctgcagggcagggtccattgtgtgcaaaatctgtctcgctgacttcctctgggcaaaatgttgc

SEQ ID NO: 638427 - DNA, 243 bp, Homo sapiens
cccgatagcccgacagctgaacaggtcccaccctgtggggtacgaggagacccgctcaggcctggactgctgtgccctcagcccctttgtggccaagtggcctggcgctgggcgtgggcttgggctctcccgtctgtgggcgtgcatcgtgcctgacgggtgacaacaagcttgcgccttagtgctttgacgcgtttccaggtgcccggtgacatgtggcgacatgattgtccgtgatggaca

SEQ ID NO: 638428 - DNA, 305 bp, Homo sapiens
ctaaatgattcttgagagatctggatggggggtcacatctaagaaagtcttgtcctaaggtcaaagtcacaaagattgttgtgatcctgtgtttgcttctagaaattttatgctttcaggttttacatttgtatctatcatccattttgagttaatttttatatatggtacaatatgtagattgaagttatttggttttgttttcacatatggatattcagttgttccagtgactgggaaaaataatcatttctccaatgaactgccctcttgcttttgtcaaaaatcaattgtccacatatgtg

SEQ ID NO: 638429 - DNA, 100 bp, Homo sapiens
ctaccattagcggacagagatgcagagaaagaagactacatctgtgtgcgctgtactgtgaagggacgcaccaagccgaaagtaaaaacacaacacaaca

SEQ ID NO: 638430 - DNA, 593 bp, Homo sapiens
  misc_feature (37)..(37): n is a, c, g, or t
  misc_feature (67)..(67): n is a, c, g, or t
  misc_feature (71)..(71): n is a, c, g, or t
  misc_feature (73)..(73): n is a, c, g, or t
  misc_feature (103)..(103): n is a, c, g, or t
  misc_feature (106)..(106): n is a, c, g, or t
  misc_feature (108)..(108): n is a, c, g, or t
  misc_feature (116)..(116): n is a, c, g, or t
  misc_feature (118)..(118): n is a, c, g, or t
  misc_feature (133)..(133): n is a, c, g, or t
  misc_feature (141)..(141): n is a, c, g, or t
  misc_feature (148)..(148): n is a, c, g, or t
  misc_feature (150)..(150): n is a, c, g, or t
  misc_feature (152)..(152): n is a, c, g, or t
  misc_feature (165)..(165): n is a, c, g, or t
  misc_feature (193)..(193): n is a, c, g, or t
  misc_feature (268)..(268): n is a, c, g, or t
  misc_feature (332)..(332): n is a, c, g, or t
  misc_feature (384)..(384): n is a, c, g, or t
  misc_feature (427)..(427): n is a, c, g, or t
  misc_feature (430)..(430): n is a, c, g, or t
  misc_feature (437)..(437): n is a, c, g, or t
  misc_feature (446)..(446): n is a, c, g, or t
  misc_feature (492)..(492): n is a, c, g, or t
  misc_feature (533)..(533): n is a, c, g, or t
  misc_feature (551)..(551): n is a, c, g, or t
tcttatacctatctgagtattacagaagttgcttatnccttccagagctcatggtggaaagagtgtntaancnattttgataaggagttgaaaaacaatttgntantngttttctnanagagaatcaggtggnagattttncttcatntngnttggtcttcagtnattgttctggaatgctgtttcacttgtntcgatgtcatgttcctggttcaatttcttgaactccaccacttggtagatgacgtgctcaaggatatgtttggcntcctgttggtcctttggtagtttactggttactccaagaatttcaccacacttcctgacataanattccaggtcttcttcagtacacttattggtaatctgagccagccgtgcctnctcagaggagaacgtttcatctaaatcaaatagctccagaggnggnggtggtnactcccggnaactgggaggaaaaaccgccgctgaagggttggcgcggcgtctccnactgaggttgggtgagctggagtggttctgtttcccctttngctgctcgtgagcctcgntgacgctgtggggggggggtggtgtccgcgcgtgggggggtg

SEQ ID NO: 638431 - DNA, 369 bp, Homo sapiens
  misc_feature (1)..(1): n is a, c, g, or t
ncacatggcaaatgcttaataaatggtggttcccctctgaccctgacagtgccaaggtgtggggtgacctgtggatgattcaaatgtcccaactcacacacacaagtcttcctgtatggaggtcttcttatgctctgactttgtctatctgtggcaatatttataagttttcctctaaacttccttctcttctggtctacctgtcttccattacttttctctatcagtatctttaactattcttattatcacaattttgttctctccctttctacctctctttctccctctctgtctgtcgtgtgctcttatgctctctcttctatctcattctctctatatttcatacctttcttctctttatttatc

SEQ ID NO: 638432 - DNA, 423 bp, Homo sapiens
cttggcataggcgatagtcccacttctggcgataggcgatggtcccatctgggtcgccaagatgtgtctggaattggtgggttcttggtctcggtgacttcaagaatgaagctgtggacccttgcggtgagtgttacagttcttaaagatggtgtgtccggagtttgttccttctgatgttcagacatgtccagactttcttcttctggtgggttcatggtctcgctgacttcaagagtgaagccgcagaccttcgcagtgagtgctacagctcttaaaggtggcacatctggaggtgtttcttcctcccagtgggttcatggtctcactgacttcaggagtgatgctgcagaccttcacggtgagtgttacagctcataaaggcagcacggacccaaagagtgagcagcagcaagatttatg

SEQ ID NO: 638433 - DNA, 1724 bp, Homo sapiens
taaaaaaactttataatttttaagggggaaataaattattcccaaaaactttctggggcttaacaattggaataacaatttttttatatcttcaaaaatatggggatttttatattataaaaatacacccttgtgtacgccactggatatgcgccaaagtggtatgggtgttacccatgggcccaaatattcaaaatataaatatcccgctatattaaacacctggctctgggttaggtggctccggaggttagaaacaatgtatctctctccacgctgtgggagaggggagggcgtgcatgtgggagtaaactcacgcgtcgcttttgagaagcgcgatagatatactctcctgtgtgctgtgggtagaaatatggcgctatgtgggatatcctgtggctcagagagacaacaccccacactatcatcaagacactgtgacagcaggcggcctccctgtgagatcttctcacaagagggcttatctcaggatgagacacaggggagcaccccgcggagaatctgtgagatatgtgacacactagttaatatatatctcctctcagaaacagcgcacaaaagacgatacttgtgattttctcccccaccacacacagaggggaaatctccctctcagagtgtgtctctgtctacaagatgtgtgcgtgctgtggggacgccacctctctccccaagagggtgtgttgttagtgtgcgctctctatgtgagagtgtcgctgtgcgccgaggatgtgtgagagagggggattctgtgtgcccccgctgtgtgttgtatacctatcacagtgtctccggggtgttctcccacattctcaccggtgtgtcgcgcggaagaaatgcgtggacaggagaaacaaaggtgcgagagacactgtgcacaacacagaaagtgttccccactgtggggcacaaacatcaaccaaaaggaaaaaaccagtagcaatatttgggtgtggttacccccagaaagatttagaggagggtccccccacacccgtgtgggccccccacatgttgtgcccccacaaaaagaagaggccccgagagaaaaccactctcccgcggagacctccccaagggataaaaccccacccataagacagagggtgtaccccccgcgggggagagaaacaaacacgcgaacgaggatgtctctaatcgaggagaaacccccccgggatgaggaaacactacccttgagggacggaagacgctctgcggaacacaacacacgcgtcgcaaaagatcgttgttggtggtccccccaacaacacacgcgcaggggtgaggccccaataccaagaaatctggagccccctgatttttgtaaggaggacagaatacagagggccgctctgtctcacagaggagagccccccacagggagtagaaaaaaccccccgaaagtagtttaaaaaacggggccacaccccagcggcgtgtgtgaacaccaccagcgaaaaaaaacttctacagagcccccccaaacgcggatggtggggaggcgacctagcagaaccccacgagagaggcgaccccagaaaaagggggcactagatcagcgaggatatagcaaccaccacagaaaagagtatgacttatactgacacggcagagaaacaccaacacaactaggcgtagacgagctgccgcacccacgacggaccacccgcgaactatgataaagacgtatacgataagac

SEQ ID NO: 638434 - DNA, 1097 bp, Homo sapiens
tgccgcgagcgcagctgagggggcggatgactgggtgggttgcatagtgagtcatagactgggtgtcacttatgggtagagtgcggaatagtagtgaccctatgaatgtcaaaaggacgtatggacaataccatctaacccatgtaaagataaccaccaatacgaagacaacaggacaatcgatcaccgaacatgggaacagacaatggaagaaaaatctggacacacaaacacttctacaagtgagctgcgtgtggctcccgaggagcaccccgtgctgctgaccgaggcccccctgaaccccaaggccaaccgcgagaagatgacccagatcatgttgtgagaccgttcaacaccccagccatgtacgttgctagtccaggcatgtgcatatcgcctgatacagccatctggaccgtaccactggcatcgtgactggactccgagtgacaggaggtcacccacactgatgcccatctacgaggggtatgccctcccccatgccatcctgcgtctggacctggctggccgggacctgactgactacctcatgaagatcctcaccgagcgcggctacagcttcaacagcacggacgagcgggaaatcgtgcgtgacattaaggagaagctgtgctacagtcgccctggactacgagcaagagatggccacggatgcttccagatcctccctggagaagagctacgagctgcctgacaggcaggtcatcacattggacatgaggcggtatcagtgccctgagggcactcttccagcactttccttcctgggcaatggagtcctgtgagatcacgaaactaccttaactccatcatgaagtggtgacgtggacatccgcaaagaaccgtacgccaaacacaagcagcatgagaagaccacctgtaccagggacatggcggacggaagcaaaggggagaaaggccggaaccagaacatgagaacaagacatgacacccgaagagagaacacagagacggagagaccaagggacacgagcacctacaaatgatgaaaacggaaagacaacagacacaagccagaaatcggaaaaaaagagcgcatagaaaaacgaacaaag

SEQ ID NO: 638435 - DNA, 104 bp, Homo sapiens
tggaagagctagatcacgggacagaggcctggggtgtgtacagcacccgcagagcttgggcggggcaggcgtgggtgacggctgtgggacggcaggaccacaca

SEQ ID NO: 638436 - DNA, 114 bp, Homo sapiens
ccccatgtctctcctgttatcagcatctctcaagaggatgagtcacttccttaattcgccacagatcgagagaccaagatgcaactggtcacccacaaccactacttgtaatag

SEQ ID NO: 638437 - DNA, 616 bp, Homo sapiens
tggtaaatccattcattgaaatggtttctaaactgtataatgtaattgggagcctatttagtaataaaataaaatgtcctatgtagtgctacaattttggaataaaaagtgatcaattgtaaaaaaaaaatttaaaaattcagcccagaaaaacaaaatagtgtattaaattagtttaaggtaaagggaatttataagatttttttcctcaatatagatacctcattggaaaagaaagcacagcatacttaagagtagttctagtaaacatgtcctagaaaacagttgctaaatgtgaggacatctttggaggaatagtttatgagaaataaaattttactggttttactatcctgtagaagtattggtttatccggataattttaagccaacatagtagtcttaaattactttggaattcctaatctggtgaaggcggtaaatgaaatatctggttctgcacctggtgaaccaaataatgggctacatggaccatatttaacgttcaaacactttggccaatgatgtacagttatagggtaaaagtcgctgtggtgggttgcatacatgaacacagaaaacggtcctctacctccgtgaactacctatctcatag

SEQ ID NO: 638438 - DNA, 128 bp, Homo sapiens
aaaacaagaagtaccaggataggaaactaaggaaactagaacacagaaaaagaaggacatagacagaagtagtaagacataatctagatagaacactaataaatagatacacatactagtaataacct

SEQ ID NO: 638439 - DNA, 211 bp, Homo sapiens
ctccggggttcacgccattcaccgggcctctccaccaggcatgtctttggcagtcccaatataaagggcagagtcatgagaacttcacacggcaagggtgaggggacgaatcttggtaggggtatagtctctgcaggtatggaggctaatggtaagggagctgtgtcccttgaccggggttctagtctttggagagttcggccaacggtgc

SEQ ID NO: 638440 - DNA, 275 bp, Homo sapiens
cctgatttcctgatagtcgtctctagagtatccaccctagcatatatcctaatctggatcgcaaatgagccgatctcagctcactgtagcctccacctcccaggttcaagcgattcccctgtccttagcctcccgagtagctggaattacaggtgtgcgctaccatgcctggctaatttttgtatttttagtatagatggggtttcaccatgtttgggaaggctgttttcgaactcctgacctcaggtgattcacccgccttggcctcccacagt

SEQ ID NO: 638441 - DNA, 790 bp, Homo sapiens
  misc_feature (179)..(179): n is a, c, g, or t
  misc_feature (188)..(188): n is a, c, g, or t
  misc_feature (191)..(191): n is a, c, g, or t
  misc_feature (449)..(449): n is a, c, g, or t
  misc_feature (554)..(554): n is a, c, g, or t
  misc_feature (570)..(570): n is a, c, g, or t
agcggtcttgactaaaagtacaaagattggccgggcgtggtggcaaacgcctgtagtccctagccactcgggaggctggggcaggagaatcgcttgagcccgggaggaggaggttgcggtgggctgagattgcgccaccgcactccagcctggacgagacagtgagactccgtctcaanaaaaaaaanaanaaattttaagtgaatttagaggcaggtgacacaattcaaccgctaacttagaccctaatcaaacccttccactggtgtctgtggagtttgtttctttttcatgcctcccgtttttatcttctctgtgtctatctgtacttctctaaccaggatctttacagccataatgcctatggtagcagcgggactgataatagatgaccccacactgcagcctgtccgacgacttgtttcccttgtaggcactgtgtgtgtttngggtttgtttgagctgcccccttggaatgtctgcttcggctactgctggggctgacctgtctccccctggccacttaagctgcatggccgccacctgtgtgctcnatttgacgtggatgtngagtgtgatttcagctgtgccactggctgcgctcggtctactcgagcgaagcctcagaattctcgggtctgtcaccgataattcttttagtctcttctgtatctgtgttaaaagcaccttgcccatgatccagtaaagaaggtccttttaagtgacgggttaggtaatcaagcccactggggcccgagtgacactaaccctatgttttgatgtgcacctg

SEQ ID NO: 638442 - DNA, 257 bp, Homo sapiens
cccacttccacctttattaccagcacaaccttaggccaaaccatttacccaattaaaggtttagggcggttagaaatttgaatcccttggcgcaattagatttaggtacccgcaaggggaaagattgaaaatttattacccaagcatatttataggcaagggacttaccccttataccttctcgcataatgaattaactagaaataactttgcaaggagagccaaagctaagacccccgaaaccagacgggctacct

SEQ ID NO: 638443 - DNA, 115 bp, Homo sapiens
ggggaaaacttggtctttccaagcttccactggcagccactttcttccattgttgggcatcgggagacaatccgttatgccctggtcttcccacctattgcttttgtcccttcgg

SEQ ID NO: 638444 - DNA, 914 bp, Homo sapiens
  misc_feature (26)..(26): n is a, c, g, or t
  misc_feature (28)..(28): n is a, c, g, or t
  misc_feature (31)..(33): n is a, c, g, or t
aacccacccagacacgagtcgggggngnagnnntttaacaagcattggcaatcttggcaaaaaccttattgaaaactttcaatatccaagccactggcaacaccgaaatgtaggcaaggatgcgaattagcaggagctctaatccattgctggtggaaatgcaaaatgatacagaccctttgcaaaacggttcagcaactccataggaaaagagtatgctgacgtgctgttctatctcattgttgctatcatttagaaccactctaaattcacataattgttagaacatccaacacaataacactaaccacctcccttatttttcacatatcacccaccctccgtatataatactctcaccatatacttcctcccccaaaagaacctcaaacaccttacgcaatgataccacaagctctccacttcaacatctatcattacaatactaatcaccatccaccatatcaccccaatattatagtcatctattccctcaacactgcattactatctcattaggcctcaactacacattgtcatcgcgcacgtccacactaaccacgaccccccgccctatattgaaatcctcgcgctactcttttataatgaaaaatgctttatattaagagtaacaatacatcaaatctaaatacagtattaacaatctaccccgtccttcacgtttcccttgcaatacttcataccattttattcatataactaattagaacaactaaaattctctattccacaccaccccctcctcaactcttattcacctctaattatgtctatccattattaacactaactcttctagtctaacccaactacgatactaccaaccccagactaacaatttgtacatatcaacccacaaatgcacccattaacgaactcaaatcatactaaag

SEQ ID NO: 638445 - DNA, 191 bp, Homo sapiens
ggggggtgccatttagggatcgtggggacggggtccaccccaagaggaaagaaaggcccgtccacaggcccggctctaggcacgtgcccggaagaaggtgtttccagagtaagctaaggctttcccaaacaaccagcaggcgtggtgcttcttcttgcctatggcaccagtccagttccagccgtttgctt

SEQ ID NO: 638446 - DNA, 745 bp, Homo sapiens
cgagaggacagagagaggaggagagaggaggaggagaggagaggagagaggaggaggagggagagggggaggctagatggggcagaggataggaaaggagagaagagaggatcggcagagatggactgggacaggagagtggcggagcggcggagggaacagcaggaggcggtagagtgaggcatgtgaggagagcgcggagcaggagatgacgacagtagcctaggcacgaaaagcgcgaccagaccataagatgggcggcgatgatgggcgaacaattaggtgtacaggtgccgtcagtaaagtgtgtaaggtgtgtgagagtaagtgtgtgacaacatgcatacaacattatagtatagatagtggcactgcgctaaaaagctgctttggtcgtgcctgtaatcccaacgatttgtagggctgaggtaaaagggttgcttgaggtcagaagtttgagagcagcctgggcaacataggaagagcctgtctctacaaaataaaaattaaagaattacatatgtggtgtggtgtgcgtctgtagtcttagctacttgagagactgaggtgggaggatcacttgaggctaggagttcaaggttacagtgagctatgtttgtgccaccgcactccagcctgggcaacagagtgagaccctgtctttaaaaataaaacaaaaacaaagatgtggataaaagatgtagagcgtccaacctgggcagcatagtgagaccttgtctctaac

SEQ ID NO: 638447 - DNA, 312 bp, Homo sapiens
aataagatcgagcgcggacctacagagaagagcgtccggaaacttcagtcgtcttattcaaagtctgtatagatggctggccagcaagagtgtcttcccggtgctgtcacaatacccttctctggcgaaatgtcccactagcagcactggaaggtaaacggtcccgggccaggtagaatatcctcctggagccctacctcttctggcagatcttaaatggccaactcagccaatacccggggtcctactcagacttcaggactccttagacacagtcttgatcttcggaactgccggtgtgtgtattaggct

SEQ ID NO: 638448 - DNA, 1430 bp, Homo sapiens
gctctttcccatcttgcaagatggcggcgcttgaaagaagtttatacacgccaggataactagagagaatagactcgtaaggcctatgcaagagttcgagtagtcttgcgctggtcagggtgtaactagagaggtaatcgtcaaagctaacaaggtccttacgaaagtgggcaatgtcccccaattggcacgtgcgcagacccgtgatccttgctcaacagcgagattgagccggtattcgacgatctgtccattgtcattccatcaacaggtcctagtgtaccagacgacggaacgtacctccaaggccgactgacaagtcacagcgcgattgaaatgaagacctaaacgacaggtagaagaagctatcgtctgactaattatgaattagcacacacatacgatctttgagcagggattgaaccacagtccattgcaggggaccgatggcacgcacagcgggcgagatgggccgtaaaagatgactgtgcccaggctggacagattgctcccgtaagaaaatacgtacaaaatcaatctataccaatgccaacacgcccatcggatggaagccatccgctggcaattcgacctcggctttggggacagactccacaaagttgcggtacacatacaagaagtcgcaattccgaagagtgcaaaggccatgggtatgcacgaaataacatagcactctccgcatcccagatgacaccacatcagcgaaagaatccatcgcggcgcgcatccagttatcgttacagaccaagattttatcccatacgggcagttttcccaacctatctcctctcaagatggatcgaacgaatacggagaccccacacaaagagagcggccgcactacattttaccgcgtcgtccgacgttatccgatcgccgcatctttgcccataagcaacccacacgtattgcgaccctcagattgaggacattcacaagattgacagcggatagtgcccgaccactttggtcggaacgccacttctatcgagagttacccatccacaataggatcggcaggcgtttcgtggtccttaacgaggtaaagacgtgaaaaacacccagtagccaaatatagaggaagtaatgagcgacaccacatgtaggcactaggccacctaacactgagaccacacataccagattgcgcaactcacatgccaacggaaaatatgaactacgcatactataacacgccggacaagatatgacacgttccccatacaacaacgtggatcggtgtacgcgcaacacgattctcacaccggcaatgagccaacgctaacttaccaactaggcagaggaaccagtgagaccgacgaggaacacaacacacacgcggacacgtacaacacgcgccaacgaacatacattgacactcacatacgaccacacacgcggacacaaga

SEQ ID NO: 638449 - DNA, 369 bp, Homo sapiens
ggtggtgagatgacgactttagggctggataatggagttcacaacgccaaaatcggttacggccatgaaaatgtgtcggttattcctaattgtcagttccggtcaaaaccagcacgttttaaaatttttactgccaaccagatagatgaattaaaagacctttctggactcttttacatcctcctttttcaaaagggctactggttgaattggaatgttcagagacaagtttgggattacctttttggatacttttaatttcacttcaattcaggattcaatgattgaaattctatttgaagaacaccagttttaagcacttttactagtaaatgtctgttttttaagggccattagtttttccggagc

SEQ ID NO: 638450 - DNA, 1428 bp, Homo sapiens
  misc_feature (983)..(983): n is a, c, g, or t
ggtaacaatatgctacttcaatactgtagaaccatggataacgaaggttgactgacttcacgctgtaggacagtgtgttaccaaaagatgtcatgaacaacgactccgcatcattgataagggctcccacgcccatcttaagctgtcctctgctcatgcctgcctctgttcacttgcgtcagtggatgactagccgggtcaccttagagaattgccacagtggtacgtagcgcttctgcagaggataacaaaccagcaggtgtccagcatatgctcactcttctaaaccatcccatacctttttagccgtaaaccactactgcaggggcgcaacatgctgggaccttcgtcgtcccgaatctctgccacttagcacggggctttccgtaaaattagtaaaattgaaacccacggggacgtatagtttgctcttgcttgttgctttccgctacgaggaacactgcatggggtattccctatcaacacgaggtacgggaaaacgcttgtacactctctcattacgctacaagaaggtgcctccccttatcacaagaccattggccacccaatttgttggggtgtgcaattggtgccttcttctaacacaccttttggcccttaaaatggcacgaacttatcacgctcggttaagacaatccgcttgggatcccaaagttgacaacttaaccttcgaaactatactaaggcgccacgccaagcattaacaccatagccactgggttatccccaaagcagaatgtctgcccctaaggcacgacgcatgacataaacccatcaattttcatccaaacctactcccctaacattttcccaaaccattacagaagtcttattccgccgcaccgactcacactcgtccagccaggcaccctttcaacgaataggcccccttcttccctattctcccacctcacacccctcttctctcaccgttgctccacagcggccctcacgcacttccnccgaccacaaacggcacttccctcaaccgcgacaccccctctgggaccggtcaactccacttctgtgtctcatcacaccacagaacatgccgccgacataccccccgcgcaagctggcgcccaccctcaacaaccagccgcctcccagccgcccagctccatctatcctacagcccaccatcactaaatgcgacggaagcacacaccgtgccccgtgcgaaacgcgatatcagaaaccgccgagaggacacaaagcggcgcacccacaaccagaaccacacaaatcctccaaagcaagattgacgcacgagaacgctacacaaggaaacgccgtcccacaacaagcaccaacaggggccgcggacctaatacgaccactcacaccagacagcagggtacacccgccaccgaatagccggcagaccagtcgcacaatcaaacaaga

SEQ ID NO: 638451 - DNA, 1243 bp, Homo sapiens
  misc_feature (41)..(41): n is a, c, g, or t
  misc_feature (108)..(108): n is a, c, g, or t
  misc_feature (119)..(119): n is a, c, g, or t
  misc_feature (526)..(526): n is a, c, g, or t
  misc_feature (557)..(557): n is a, c, g, or t
  misc_feature (613)..(613): n is a, c, g, or t
  misc_feature (624)..(624): n is a, c, g, or t
  misc_feature (647)..(648): n is a, c, g, or t
  misc_feature (693)..(693): n is a, c, g, or t
  misc_feature (701)..(701): n is a, c, g, or t
  misc_feature (705)..(705): n is a, c, g, or t
  misc_feature (749)..(751): n is a, c, g, or t
  misc_feature (790)..(792): n is a, c, g, or t
  misc_feature (813)..(813): n is a, c, g, or t
  misc_feature (822)..(822): n is a, c, g, or t
  misc_feature (826)..(826): n is a, c, g, or t
  misc_feature (1162)..(1162): n is a, c, g, or t
  misc_feature (1181)..(1181): n is a, c, g, or t
  misc_feature (1183)..(1183): n is a, c, g, or t
  misc_feature (1216)..(1216): n is a, c, g, or t
gcctggccagcgctccgaaccttgtcctcgctgcgcgccgntgcccctcgtgaatgccccagcatgccctgggtaatggagtgcctgcctgctggtgcctgttgctgnctcctgctctngcgcacagctggaaccctgcgaaccctggaaaatggctggctgctggctggagcctggagcctggatcctgctcagacctgggccccggcctggccagagccgctgggcatgtctggaggcgcggaaggggccggacgaggcggaggagagccagtacgactctggcattgagtctctgcgctctctgcgctccctacccgagtccacctcggctccagcctccgggccctcggacggcagcccccagccctgcacccatcctccgggacccgtcaaggaaccacaggagaaggaagacgcggatggggagcgggctgattccacctatggctcctcctcgctcacctacaccctgtccttgctggggggccccgaggctgaggacccggccccacgcctgccactnccccacgtgggggcgctgagccctcagcagntggaagcactcacttacatctccgaggacggagacacgctggtccacctggcagtnattcatgaggncccagcggtgctgctctgttgcnnggctttgctgcccaggaggtcctggacattcaaaataacctttancagacagnactncatctggctgtacatctggaccaaacgggcgcagttcgggcacnnntgctgaagggggccagccgggcactacaggaccggcatnnnaaaaaaaaactatcatgtggnctgccagcnccanacttggcctgtgcccgctgcctgctggaagggcggccagagccaggaagaggaacatctcactctctggacctccagctgcaaaactggcaaggtctggcttgtctccacattgccacccttcagaagaaccaaccactcatggaattgctgcttcggaatggagctgacattgatgtgcaggagggcaccagttgtaagacagcgctgcacctggctgtggaaacccaagagcggggcctggtacagttcctgctccaggctggtgcccaggtagatgcccgcatgctgaacgggtgcacaccctgcacctggcagctggccggggtctcatggnatctcatcactctgtgcangnggtctgactcctgctgcggatgtggagatgaangcccaggactgacttaggatccttgtc

SEQ ID NO: 638452 - DNA, 262 bp, Homo sapiens
aggaaggattcatatcagctatgcattggtggactcctcagatattctgctgctttgcgtggtgatgcagctttgatgctgtacaggtgaggtcagtcttgctacaggcgccacatgctcattggtcttcatgagcatgtctgggatctcccgaagctctgcagttcactgaatcaagctctgacccagccttattgcaaggttgggtgcctggtcagagcagcagggaaagacaggggatcctctacgacgtcgccctgca

SEQ ID NO: 638453 - DNA, 1111 bp, Homo sapiens
ccacctgttgttctgtcccttcttgaccccgggggaaggggtctgccacacaacacgtgatgtggggccacacaccaaacaggagttccccagaaacaagtgctagaagagaagtgtgacacaccacacagatctagaggtgtccaccatgactcatgagccgttgttggaacagttggggagaacaacacccaccacaccccggggtgtacaacaagtgtgatagaccacagagacacacccggttctaagctgggagaagcccacccccgggtgagaacacagggggcacccccagacacaacaacagagacgcccatacacaccacagaccgttaacagagtgcccccccgtctgtggtctaaaagagacaccacaaaatgtgaggtggagtgccacccccacacaaccgctggaaacagggggtgccacccagacggggggcggtccaagaggatgatcaccgctccccgccacgcggcccccgttgtacacacgctggcgtgctgcccacaccgtgccaacacaagaacacgttccgcggggttctcccgcggcactgcctgttgtatgactaaatacgcccgcgcgaccacgatccgctgtaggtgtgtcgtgctgtccacagcgtggacacacacaccagcggtggcgtcccagctgtgtgtatgacgtgccaccgcggccgctgtgtgtgtgtgtatgaggtgtcacccacgtggtggaagtgtccacacgcgggttgtctgccagtcgaaaggtgtagaccgtctccgcaagagcacaaccagtgtcacgagagccccgcttcctcgctggtggcgttgtcctaagagcacctggtggggtgctccgaggcgtcgtctcccccccccagaccgtcttgtctgtgtgtgaggtgcgctgtgtgtctgttgtgtccacgagtgtggttggtataaagagtggtggtgggggcacacacgaggaaccgtgcacccgctcccgctgcccccgtccgctccgtcccggcgggccgccgtccccgcacacacccacgtctgtgcgttataagttgcgtctggaaacccccgtcacccgtaagtaagaggttttcggcggtcccgtcag

SEQ ID NO: 638454 - DNA, 259 bp, Homo sapiens
tactgcacatgcctggctaatttcttaattatttaagtagaaagtggggtcccactagtgtagcccaggctggttacaaaccgctgggctcaagcctctttctttttctttttttttttttttttggactgggagttccgctcttgtggcccaggcggaagtgcaagggtacaatctcagttcacggaaacctccacctcgggggtacaagagatcctcgtgcatcagcttgccgagtacgctgggataacagggcttg

SEQ ID NO: 638455 - DNA, 725 bp, Homo sapiens
tagctataacaggacagcagaataagcgggccacaaggtatagacagaaaaccacgtctggatgttggcactagactgcagtgtgacgatcgcaagaggagtcacacccagatgatatcattgctctagttagtactccttgagggtagagaatacctccattacttcggcactccacagctaggtataattcccacgtccgacatgggtcagagatatcagcacattgcgaagccatctgtaaaaccaaatgtcggtgtcataggtgtctcactagagcataaatcacctctatccgaatgggcacctacacacctgacagatactcattctggcgactgatgtctgtggctcgtatccgaacacctatctgtgtctccattagtagccagctttccaatggccgatgtgagaataagcactgattctctcaataagcccactgtagatctcgcagtggtgatatcccagtactgaggtattcctgtataaggtagccacgaaagggtaagtgttaaataaggaacggttgattaacacctggatgatacagatcatgagtggcagctgcaattaagctcagcaagatatcccaaggagttacagaattggcaagctaggttcctttaagtaacagtgcatggcctgagtaacatccgcagcgtggactgcgttatggtaaggatttgactgtggaatcttcttgatcataactaacatctacg

SEQ ID NO: 638456 - DNA, 408 bp, Homo sapiens
gccggtaccgaatgtatcgtccaacacaatcctaaccaaaaagaacaaagctggaggcatcatgctgtctcacttcaaactacactacaaggttaccataaccaaagcagcatggtactggtaccaaaacagatatatagacaactggaacagaacagaggcctcagaaataacaccacacatctacaaccatctgatctttgacaaacctgacaaaaacaagcaatggggaaaggattccttacttcataaatggtgttggggataacatcacgtgatttatccccaacactctgtagaattatggtaacgtgatacaacatggcagctacaactaaggactttggacaaacagacctagatttaacatatgagtctgcaacttatttgtgttgggcgataacatca

SEQ ID NO: 638457 - DNA, 146 bp, Homo sapiens
cggaccgactgttctggtgagaagtaagcggcacgcatatcgcgccgctacttcatgcgatcaagtctttccgcgcctacgcagcgcgcgtagcctccgctcctgccgcattgtcctgccagtcgagcactgtaagataattgtcg

SEQ ID NO: 638458 - DNA, 141 bp, Homo sapiens
gttggcgacactgtactccagcgtggttagcagagcagacccacctcatacaaaaaaagaaaatggattaacggtataaaataaccgtgacaaatttacaaagtaacatggcattggccatccagtacagtgatcgaccaa

SEQ ID NO: 638459 - DNA, 114 bp, Homo sapiens
tggggtctgtagtcccagctagtatggaggctgaggtgggaggatacctgagcccggaaggcagagtttgcagtgtagccaagatcgcgccactgtacttcagcctgtttgtca

SEQ ID NO: 638460 - DNA, 1877 bp, Homo sapiens
  misc_feature (1819)..(1819): n is a, c, g, or t
  misc_feature (1841)..(1841): n is a, c, g, or t
ctatgaggtaagtcttgggaagtatcactatcgaatcccaactgagtattgtaccaaagtgagagctgtcctagactaaaggaacgatagcaaggaattgagcggtcaagagatccaagactggacttctagactagccatctagactgttgtgactggtaggcagacacgttactgtggtatggtacgggcggaggcccattactcaagattcaggacaccccatatggactgcgaagtagtccatctttgttgcaacacaggtgactatagacgaagaagctaacgccaggataactcaccataggaggaacggggtgccgaggacacagtttagcgataatctagattgaatcttaagcacatggaggtgtatatgccagacgtgcaggcatcatgtaatactgtatgcaagactcgtttaattttatggagcccgcaatgcaccctgtacacgtctgtgcccgtgaaaaaatggggtgagaagcaacgttcttgggatgctgtacgtagcatatgggcactgtaacatagcccctaagcttcctccgtcaggttcctagagcaaaaggaaatcggtttttccagaaggagagcctcagggggaacccgagcatttttgttcgtactacaccgggtttgaggcggacaaggtgaggtagaaattgcgctcctacaagggtaaattcaataggtaggtcttaatgtagctttgtgttttaggcgatgagcggaaaggatataacggcgctaattttggagaaaaggggcatttgggaacgttcgcaacgtccgacaactttagcaccttgatcacgttagggcaaacatcggcaccacgtggaactaacggcagctatcggtatatgaggcgaaccaaggcgcccggagtacgttacggtaccagcgcgcgtacaacggaggcgcatacaccaaggcggcagaattaacaaccctttggtacccgatcgtagaacccctcttaaaaggattcctccgttccgactttgggtgtggtcggattcataccacccgacagcctaatattttgccgcatagggcaacgcgagcccaaaccacattcgtttcagtcgagcaaccttgatgtctaatctacacggtcgcctaaaaatatgtcctccgtttggtcagtgtcgctgtacagattgacacatatttcaccttttccaatgggctgggcaacgatttatgggagggcgcaacactttagcatagcgcccctatacacgctctctcccctcggcgcgcccactacaagccacacatggcaaccttctttccaacgcgcgaatacatctatactgaatacaaccaaagtgagcacccattgacgaactccaacacgctaaggacgttggccttggcctgcttgtaaccgggggggatacttcccacacacgtttagagaatgatactgcaacgttttgtgtgatgagactaacagcggtttcttatgaacccgaacctttgcagtgtcaacaccatcctaacggctcctacaataaatagtggcccgcaacactgaaaccaggcaaacctttcttctcagacacaacattattactgcggcctctaaccggggtgcggagcaccgcccttcataagcttacatatgtaatacaccgcgcatggtcaccccaccaccagtgttatggtgctacgcaccggacgcttcaacagcactcgccggttgtgtgcaatcacgtggctaccaacataaatgattgatgactgcgactctgagttaatacacctaacagatctctagcagcactgatcgagactaatgtgccgaccngctcgctgccgcgtcgaacacnctaccgttataggaatacacgcccactaaacacatg

SEQ ID NO: 638461 - DNA, 294 bp, Homo sapiens
agcctggcccaagttatagaaaaaaaaagttacaaaaaataaaagattccgggaagctttgagctagggattgacaccataaaggtgatgtgaaaagctcatcattattttgttgtgacttcaagagtacaagatgtaacaggtagaaatatttccatgaagcattgctccacaattactgcattcttatctttacttttcattgctataagttctgccccactttctgcaacataatttgttgaatgcatggatatttacaatgcaatttttttccagcatcatatggctttc

SEQ ID NO: 638462 - DNA, 684 bp, Homo sapiens
  misc_feature (235)..(235): n is a, c, g, or t
caaaagcaaggacttttttggacagagttctatggtttgaaaaaaaagggggctaggttcaaaaactgtgtggcccacagatttctgcgtccaaatggaaaagcttgggttcgctacagtcaactttctgtcattctcaagacagaaaaggattgcctcacaaagtgttaaaaagaataaatgttggcacgccgaaatcagtaagctaaatggaaaagccaagctaaaacgtgcntagagaatatatgcatcccattctattccttaataaggaagttgctaagcttctcaaagagagaaagcaagtcagaaagcaagagtgccatgcttacctcataagaactttccctgtggccaaagaacagccagtactcaatctcgcggtccgttcactaacatatatgcatatgtgatgcctggaattggataggctgaccagccattcaaaagaaggcaaccttttgtttcttacaagcctatgacctggaggccccctccctgttttatgttgtcccgcctttctggcaagaccctcaatgcatctcacacgtgttgattaatgtgttatgttgccctaaaatgtagaaaacgaagaggtgccccaatgacctcgggaccattccaggtttactccccaaccagtaactccgtgtggtaagcaacatggctttgatgatcttcgtc

SEQ ID NO: 638463 - DNA, 185 bp, Homo sapiens
ggaccccatcatatcagtctcttgggcttcgtcaaccttagtcgctttcgacttgctatgcttgccttcagcgttgaatttacgtttgggcatcacataattcaaggccaattcccagtcctttgcctcggtccacttgataagaatttcaaagacttgatttacggtaaggacctttcgggtcg

SEQ ID NO: 638464 - DNA, 116 bp, Homo sapiens
ttccaggcaatttaaaactttcaaagttgggggtatccccagttcccccatttaaatttcatttattgaaaaatcccctaaataggaaatagaaagatgcctggggcccttcccga

SEQ ID NO: 638465 - DNA, 236 bp, Homo sapiens
tacatataaatcgagctctgtacctgaacattcgtgtcttcgtgtcctcatatgtgaaaggtcaggaagctctctggggtctcttttatttattatattattattatttagtgagacgaggtctcactctgttgcccaggctggagtgcagtggtgtgatcatagctcacggccggcttgagctcccaggatcaagtgatcctcccattcaggctctgtggtcttgactgttcaga

SEQ ID NO: 638466 - DNA, 941 bp, Homo sapiens
  misc_feature (258)..(258): n is a, c, g, or t
  misc_feature (272)..(272): n is a, c, g, or t
  misc_feature (291)..(291): n is a, c, g, or t
  misc_feature (348)..(349): n is a, c, g, or t
  misc_feature (364)..(364): n is a, c, g, or t
  misc_feature (377)..(377): n is a, c, g, or t
  misc_feature (379)..(379): n is a, c, g, or t
  misc_feature (384)..(384): n is a, c, g, or t
  misc_feature (386)..(386): n is a, c, g, or t
  misc_feature (396)..(396): n is a, c, g, or t
  misc_feature (444)..(444): n is a, c, g, or t
  misc_feature (490)..(490): n is a, c, g, or t
  misc_feature (536)..(536): n is a, c, g, or t
  misc_feature (551)..(551): n is a, c, g, or t
  misc_feature (573)..(573): n is a, c, g, or t
  misc_feature (581)..(582): n is a, c, g, or t
  misc_feature (658)..(658): n is a, c, g, or t
  misc_feature (662)..(662): n is a, c, g, or t
  misc_feature (671)..(671): n is a, c, g, or t
  misc_feature (678)..(679): n is a, c, g, or t
  misc_feature (730)..(730): n is a, c, g, or t
  misc_feature (737)..(737): n is a, c, g, or t
  misc_feature (744)..(744): n is a, c, g, or t
agcgggtctgcgttccgtgtccaggcaggtgcaggcgccgcggggcggatctccggcggccgagtccatctcctgggaaatggggcggacagtgtttccttgactgactattgtgagcgccctctctctccggcggagcggagaccatggcccccactcagggcccccgggccccgctggaattcggagggcccctgggcgccgcggctctgctactgctgtctgcccgccaccatgttccacctgctcctggcggcnccgttcgggccccngcgcgcctgctgggtccancccgcgtccctgcccgggctggaggtgctgtggagcccacgggcgctgctgctgtgnngtcgcctggctcggnctgcaggcggcgncntctancntactgccggngcgcaaggtggccgaggggcaggaattgaaggacaagagtcgcctgcngctatcctattaacggcttccaggccctggtgctgacagccctgtnggtggggctggggatgtcagcggggctgcctctgggggcgctcccnggaaatgctcctgcnccttggcgtttgtcgcacaccnctcaccgnntttcatcttcagcctctttctctacatgaaggcgcaggtagccccagtttcggccctggcactggggggaactcangcantccgatttncgacttnnttctgggacgagagctcaacctcgtatctgtttcttcgacttcaaatattnctgtganctgcganccggctcatcggctgggtcctcatcaagcttggcctgttgatgacggaggccaagttcgaggcggtcctcatggcctgtggtggcctggtccaggggcctcgtggggtgtgcccctgggccaggagccgcctccccaccacgggttccctgccggtggttcgcgggttgggcatgcgggggctcccagccgggcccc

SEQ ID NO: 638467 - DNA, 350 bp, Homo sapiens
ctcccaggttcatgccatcctcctgcctcagcctcccgagtagctgggactacaggtacccgacaccaagcccggctaatttttttggtatttcttagtggagacggggtttcaccatgttagccaggatggtctccatctcctgacctcgtgatccacccgcctcggcctccaaaagtgctgggattacaggcatgagctactgctcccagccccaaattctttaatgtggcgttcaaagttcctttctaccagccaggcgcagtggctcacacctgtaatcccagcacttggggaggccgaggcagatctgaaaaagaacgaaatatgttcagaagttagaaacataa

SEQ ID NO: 638468 - DNA, 299 bp, Homo sapiens
gcgttctagagtatcccggggtcgggacgtcctggaaacatgagcgcatcctaattgactggctaatacatgtaccatgcaattcaggttgttgcaggagaccagtgtacagtcactgtctccattattgctcggttcatgcatgaataattgtgtgcccaagaagatgctgcagcttggttggtgtcactgccatgtttattgcaagcaaatatgaagaaatgtaccctccagaaattggtgactttgcttttgtgactgacaacacttatactaagcaccagatcagacagataggc

SEQ ID NO: 638469 - DNA, 889 bp, Homo sapiens
  misc_feature (258)..(258): n is a, c, g, or t
  misc_feature (272)..(272): n is a, c, g, or t
  misc_feature (291)..(291): n is a, c, g, or t
  misc_feature (348)..(349): n is a, c, g, or t
  misc_feature (364)..(364): n is a, c, g, or t
  misc_feature (377)..(377): n is a, c, g, or t
  misc_feature (379)..(379): n is a, c, g, or t
  misc_feature (384)..(384): n is a, c, g, or t
  misc_feature (386)..(386): n is a, c, g, or t
  misc_feature (396)..(396): n is a, c, g, or t
  misc_feature (444)..(444): n is a, c, g, or t
  misc_feature (490)..(490): n is a, c, g, or t
  misc_feature (536)..(536): n is a, c, g, or t
  misc_feature (551)..(551): n is a, c, g, or t
agcgggtctgcgttccgtgtccaggcaggtgcaggcgccgcggggcggatctccggcggccgagtccatctcctgggaaatggggcggacagtgtttccttgactgactattgtgagcgccctctctctccggcggagcggagaccatggcccccactcagggcccccgggccccgctggaattcggagggcccctgggcgccgcggctctgctactgctgtctgcccgccaccatgttccacctgctcctggcggcnccgttcgggccccngcgcgcctgctgggtccancccgcgtccctgcccgggctggaggtgctgtggagcccacgggcgctgctgctgtgnngtcgcctggctcggnctgcaggcggcgncntctancntactgccggngcgcaaggtggccgaggggcaggaattgaaggacaagagtcgcctgcngctatcctattaacggcttccaggccctggtgctgacagccctgtnggtggggctggggatgtcagcggggctgcctctgggggcgctcccnggaaatgctcctgcnccttggcgtttgtcgcacctacgttcatcttcagccttctctactgaaggcggtgcccagttcggccgcaccggggactcagcaccgttacattttctggagagactcccccttcgtctcgatcaatttcgtaatggacggccatgtggtctctcactgctgtgtgagaggagtcgagagccccaggcaggggcagtccggcacgggagccggaagggcgcccaccgtaccaagggtgcccggcgggagcggcacaacgagcatggcacgaccggccgcgccacaaggacagggcaaaacaactacggacaacgaggggaaacgcgcacccgaggcga

SEQ ID NO: 638470 - DNA, 168 bp, Homo sapiens
gttgtacatagtattgatcagaccaggactttggtcgatggaccttgcactcaacgtgaggagacaggccatgcatttcaagtgcatgcagctcactgatttcatcctcaagattaccgcacagtgcccaacagaagtatgtccagacaagcctggaagaaggcagac

SEQ ID NO: 638471 - DNA, 1429 bp, Homo sapiens
  misc_feature (17)..(17): n is a, c, g, or t
agcggaggatgccgcgngcggccgcggggccgagggtttgaaccgggggtctgtcgtccgcggcggggctgcgtcggctgcggcgggtgtgggaggtggcgacggccggggccggggtcctgcccggctgcggaggcgggcgcgacgggcgcgggggtcgctgctcctgaggcgatgatgggcaaggaagaggagattgcgcggatcgcccggaggctggacaagatggtgaccaagaagagcgcgcgtttgtcaccctccgtctcccatagcatttgtcgccggcaacagtttggagtctgaggggagggagccatggatttgctgcgggagctgaaggccatgcctatcacgctgcacctgctccagtccacccgagtcgggatgtctgtcaacgcccttcggaagcagagctcggatgaggaggtcattgcactggccaagtctctcatcaagtcctggaagaagctcctggatgcttccgatgccaaagccagggagcgggggaggggcatgcctctgcccacgtcctcgagggatgcctcagaggccccggatcccagccgcaagaggccggagctgcccagggcaccgtcgactccgaggatcaccacatttcctccggtgcctgtcacctgtgatgccgtgcgcaacaagtgccgcgagatgctgaccgctgccctgcagacggaccatgaccacgtggccatcggtgcggactgcgagcgcctgtcggctcagatcgaggaatgcatcttccgggacgttggaaacacagacatgaagtataagaaccgtgtacggagtcgtatctccaacctgaaggatgccaagaaccctgacctgcggcggaatgtgctgtgtggggccataacaccccagcagatcgctgtgatgacctcagaggagatggccagtgatgagctgaaggagatccgtaaggccatgaccaaggaggccatccgagagcaccagatggcccgcactggcggcacgcagacagacctgttcacctgcggcaagtgcaggaaaaagaactgcacctacacacaggtgcagacccgcagctctgatgagcccatgaccacctttgttgtctgcaacgagtgtggaaaccgctggaagttctgctgacccctcgtgtagatgtgctgcagccttgggccctccccggcccacgtcctccgttgacacagcttctctggagaccctagaaggcggcatgtcctgccctcaacctgcctgcctggattgcacctttctgccctttccccctcattattaaatgtttctttttgccaaaaaaaaaaaaggggggcgtcaaagatcctcggggccaagtacgcgtaaccagcttctgtccagggcctatagggagcgataaaagaggacggcgtcgttacaccgcggacggaacagtgcggactgg

SEQ ID NO: 638472 - DNA, 157 bp, Homo sapiens
gtcgacctttcgacgatgtcttttttcctttgtaattaatgaataatccagttggtgacactgagcatgtcctggtgagctgtgtgactcctagctgataatggtggtttttctatgcctgttcctttctctttcacgttctattaggtctggcgtt

SEQ ID NO: 638473 - DNA, 1339 bp, Homo sapiens
  misc_feature (17)..(17): n is a, c, g, or t
agcggaggatgccgcgngcggccgcggggccgagggtttgaaccgggggtctgtcgtccgcggcggggctgcgtcggctgcggcgggtgtgggaggtggcgacggccggggccggggtcctgcccggctgcggaggcgggcgcgacgggcgcgggggtcgctgctcctgaggcgatgatgggcaaggaagaggagattgcgcggatcgcccggaggctggacaagatggtgaccaagaagagcgcggagggagccatggatttgctgcgggagctgaaggccatgcctatcacgctgcacctgctccagtccacccgagtcgggatgtctgtcaacgcccttcggaagcagagctcggatgaggaggtcattgcactggccaagtctctcatcaagtcctggaagaagctcctggatgcttccgatgccaaagccagggagcgggggaggggcatgcctctgcccacgtcctcgagggatgcctcagaggccccggatcccagccgcaagaggccggagctgcccagggcaccgtcgactccgaggatcaccacatttcctccggtgcctgtcacctgtgatgccgtgcgcaacaagtgccgcgagatgctgaccgctgccctgcagacggaccatgaccacgtggccatcggtgcggactgcgagcgcctgtcggctcagatcgaggaatgcatcttccgggacgttggaaacacagacatgaagtataagaaccgtgtacggagtcgtatctccaacctgaaggatgccaagaaccctgacctgcggcggaatgtgctgtgtggggccataacaccccagcagatcgctgtgatgacctcagaggagatggccagtgatgagctgaaggagatccgtaaggccatgaccaaggaggccatccgagagcaccagatggcccgcactggcggcacgcagacagacctgttcacctgcggcaagtgcaggaaaaagaactgcacctacacacaggtgcagacccgcagctctgatgagcccatgaccacctttgttgtctgcaacgagtgtggaaaccgctggaagttctgctgacccctcgtgtagatgtgctgcagccttgggccctccccggcccacgtcctccgttgacacagcttctctggagaccctagaaggcggcatgtcctgccctcaacctgcctgcctggattgcacctttctgccctttccccctcattattaaatgtttctttttttttttttttttttttttttttttttttttttttggggggccgggggggttttttttttggcacacaacccccgggggatctactaccctgtgggccccccc

SEQ ID NO: 638474 - DNA, 104 bp, Homo sapiens
tcaagcttctaacgatgtacggggacatggcagctcacgcctgtagtcccagcattttgggaggctgaggcgggcagatcatgctcataaggaaaggttaaaaa

SEQ ID NO: 638475 - DNA, 2845 bp, Homo sapiens
  misc_feature (17)..(17): n is a, c, g, or t
  misc_feature (1217)..(1217): n is a, c, g, or t
agcggaggatgccgcgngcggccgcggggccgagggtttgaaccgggggtctgtcgtccgcggcggggctgcgtcggctgcggcgggtgtgggaggtggcgacggccggggccggggtcctgcccggctgcggaggcgggcgcgacgggcgcgggggtcgctgctcctgaggcgatgatgggcaaggaagaggagattgcgcggatcgcccggaggctggacaagatggtgaccaagaagagcgcggtgaggggcgcgggccgccaggaccccgggaaccccgccccgccgagaccccgtcgagcccgccgacccccgttagggccggaagacgacctgaggggcaggacgagacccctccccggcagagactaaccgggacgcaggggagacccccacccgtggccgagacccctgccccgggccagccctgccgttcactcccgcaaccccggcagaggccgcgatcaggcctggaccttgtcccgggagagccacccgctctggactcagacccctccctcgcccgcagtcacaggctccgcacccttccctgtcccttaactccagacccccagcctggcccgtcgactccttccttggccctgtcccgcctctcggagcccccggggtgttcgggcctcctctgcgggccgcgccagccccttgccttcctccatcccggcctgggcatcctcacaggccgagccccgccccccaactcagccctctcccacgctccgtctcttacagcgtttgtcaccctccgtctcccatagcatttgtcgccggcaacagtttggagtctgaggttggatccccttttcttctggagcttccgtgcctcccctgcctcttcccagcccttgtcatcctccttcacaggccagccagatacctgtcttgcctgtgggcccattttcttccctgtctgtccccaccccacaagaaccaggtttctctaataaattctctcccttctttagccaggacttagcccgcagcaacttgggtgtgggtagttatgtggacaccctccgaaaagagccggtgtgcttatataagagccaggaggtcgggcaagcctcctctgggagtgtctgggcgctggagcctctgggccggctctgtacagtgcgggctgggcctctgtgttctgtgcggccacagagagactatggagagaggctgtgtgtgaggactttgaaggggccagnaggcagaaggaggtgatatgtctgtgagatctaaagtcctttatgaaggtcctccttctccttccaggagggagccatggatttgctgcgggagctgaaggccatgcctatcacgctgcacctgctccagtccacccgagtcgggatgtctgtcaacgcccttcggaagcagagctcggatgaggaggtcattgcactggccaagtctctcatcaagtcctggaagaagctcctggatgcttccgatgccaaagccagggagcgggggaggggcatgcctctgcccacgtcctcgagggatgcctcagaggccccggatcccagccgcaagaggccggagctgcccagggcaccgtcgactccgaggatcaccacatttcctccggtgcctgtcacctgtgatgccgtgcgcaacaagtgccgcgagatgctgaccgctgccctgcagacggaccatgaccacgtggccatcggtgcggactgcgagcgcctgtcggctcagatcgaggaatatatcctttgggtaggggctgtgggcctgggtttctggtggagtcaggaggctgcctggcctggtgccctctggtggctgctggatgccactgcccagctgtccaggggtcacctgcctgggtggtcacctgcctgggtggtcaggctgtctcacctcaggagggcccccggaccagctgaagggctgattctgtctgcttgtggggcctaggtcccctggggctgtagcctgaagctgggtctcagtcaggaatgggcctggggcaggcttggccctgcagcccttcacctctccaccaggtgtgggtgggcagaccgacccctgtgtggctgggcagaacctttccagcccccaccccaacatggcccccagcggggcaggtggtaggtggagggcagcgacgttgtcctcaggtgggtccttaaaacacttgcacgcatcttccgggacgttggaaacacagacatgaagtataagaaccgtgtacggagtcgtatctccaacctgaaggatgccaagaaccctgacctgcggcggaatgtgctgtgtggggccataacaccccagcagatcgctgtgatgacctcagaggagatggccagtgatgagctgaaggagatccgtaaggccatgaccaaggaggccatccgagagcaccagatggcccgcactggcggcacgcagacagacctgttcacctgcggcaagtgcaggaaaaagaactgcacctacacacaggtgcagacccgcagctctgatgagcccatgaccacctttgttgtctgcaacgagtgtggaaaccgctggaagttctgctgacccctcgtgtagatgtgctgcagccttgggccctccccggcccacgtcctccgttgacacagcttctctggagaccctagaaggcggcatgtcctgccctcaacctgcctgcctggattgcacctttctgccctttccccctcattattaaatgtttctttttgccaaaaaaaaaaaaggggggcgtcaaagatcctcggggccaagtacgcgtaaccagcttctgtccagggcctatagggagcgataaaagaggacggcgtcgttacaccgcggacggaacagtgcggactgg

SEQ ID NO: 638476 - DNA, 1807 bp, Homo sapiens
  misc_feature (17)..(17): n is a, c, g, or t
agcggaggatgccgcgngcggccgcggggccgagggtttgaaccgggggtctgtcgtccgcggcggggctgcgtcggctgcggcgggtgtgggaggtggcgacggccggggccggggtcctgcccggctgcggaggcgggcgcgacgggcgcgggggtcgctgctcctgaggcgatgatgggcaaggaagaggagattgcgcggatcgcccggaggctggacaagatggtgaccaagaagagcgcggagggagccatggatttgctgcgggagctgaaggccatgcctatcacgctgcacctgctccagtccacccgagtcgggatgtctgtcaacgcccttcggaagcagagctcggatgaggaggtcattgcactggccaagtctctcatcaagtcctggaagaagctcctggatgcttccgatgccaaagccagggagcgggggaggggcatgcctctgcccacgtcctcgagggatgcctcagaggccccggatcccagccgcaagaggccggagctgcccagggcaccgtcgactccgaggatcaccacatttcctccggtgcctgtcacctgtgatgccgtgcgcaacaagtgccgcgagatgctgaccgctgccctgcagacggaccatgaccacgtggccatcggtgcggactgcgagcgcctgtcggctcagatcgaggaatatatcctttgggtaggggctgtgggcctgggtttctggtggagtcaggaggctgcctggcctggtgccctctggtggctgctggatgccactgcccagctgtccaggggtcacctgcctgggtggtcacctgcctgggtggtcaggctgtctcacctcaggagggcccccggaccagctgaagggctgattctgtctgcttgtggggcctaggtcccctggggctgtagcctgaagctgggtctcagtcaggaatgggcctggggcaggcttggccctgcagcccttcacctctccaccaggtgtgggtgggcagaccgacccctgtgtggctgggcagaacctttccagcccccaccccaacatggcccccagcggggcaggtggtaggtggagggcagcgacgttgtcctcaggtgggtccttaaaacacttgcacgcatcttccgggacgttggaaacacagacatgaagtataagaaccgtgtacggagtcgtatctccaacctgaaggatgccaagaaccctgacctgcggcggaatgtgctgtgtggggccataacaccccagcagatcgctgtgatgacctcagaggagatggccagtgatgagctgaaggagatccgtaaggccatgaccaaggaggccatccgagagcaccagatggcccgcactggcggcacgcagacagacctgttcacctgcggcaagtgcaggaaaaagaactgcacctacacacaggtgcagacccgcagctctgatgagcccatgaccacctttgttgtctgcaacgagtgtggaaaccgctggaagttctgctgacccctcgtgtagatgtgctgcagccttgggccctccccggcccacgtcctccgttgacacagcttctctggagaccctagaaggcggcatgtcctgccctcaacctgcctgcctggattgcacctttctgccctttccccctcattattaaatgtttctttttgccaaaaaaaaaaaaggggggcgtcaaagatcctcggggccaagtacgcgtaaccagcttctgtccagggcctatagggagcgataaaagaggacggcgtcgttacaccgcggacggaacagtgcggactgg

SEQ ID NO: 638477 - DNA, 1467 bp, Homo sapiens
  misc_feature (17)..(17): n is a, c, g, or t
agcggaggatgccgcgngcggccgcggggccgagggtttgaaccgggggtctgtcgtccgcggcggggctgcgtcggctgcggcgggtgtgggaggtggcgacggccggggccggggtcctgcccggctgcggaggcgggcgcgacgggcgcgggggtcgctgctcctgaggcgatgatgggcaaggaagaggagattgcgcggatcgcccggaggctggacaagatggtgaccaagaagagcgcggagggagccatggatttgctgcgggagctgaaggccatgcctatcacgctgcacctgctccagtccacccgagtcgggatgtctgtcaacgcccttcggaagcagagctcggatgaggaggtcattgcactggccaagtctctcatcaagtcctggaagaagctcctggatgcttccgatgccaaagccagggagcgggggaggggcatgcctctgcccacgtcctcgagggatgcctcagaggccccggatcccagccgcaagaggccggagctgcccagggcaccgtcgactccgaggatcaccacatttcctccggtgcctgtcacctgtgatgccgtgcgcaacaagtgccgcgagatgctgaccgctgccctgcagacggaccatgaccacgtggccatcggtgcggactgcgagcgcctgtcggctcagatcgaggaatgcatcttccgggacgttggaaacacagacatgaagtataagaaccgtgtacggagtcgtatctccaacctgaaggatgccaagaaccctgacctgcggcggaatgtgctgtgtggggccataacaccccagcagatcgctgtgatgacctcagaggagatggccagtgatgagctgaaggagatccgtaaggccatgaccaaggaggccatccgagagcaccagatggcccgcactggcggcacgcagacagacctgttcacctgcggcaagtgcaggaaaaagaactgcacctacacacaggtgcagacccgcagctctgatgagcccatgaccacctttgttgtctgcaacgagtgtggaaaccgctggaaggtgggtgagcaggctcaggctgcccctcccagctccattctctggaggtggggtgtctcagcctctgtggggtctgtggtgtgaactggggatggccctgcccaaccagcctcctgggagtcttgggcatggtgggtggagagcccagccttgggtgagcctgtgcggccttccactctgggggatctcatgtggccacaaggctggaggcctcaccccctttctcgcagttctgctgacccctcgtgtagatgtgctgcagccttgggccctccccggcccacgtcctccgttgacacagcttctctggagaccctagaaggcggcatgtcctgccctcaacctgcctgcctggattgcacctttctgccctttccccctcattattaaatgtttcttttt

SEQ ID NO: 638478 - DNA, 1446 bp, Homo sapiens
  misc_feature (17)..(17): n is a, c, g, or t
  misc_feature (912)..(912): n is a, c, g, or t
  misc_feature (914)..(914): n is a, c, g, or t
  misc_feature (918)..(918): n is a, c, g, or t
  misc_feature (923)..(923): n is a, c, g, or t
agcggaggatgccgcgngcggccgcggggccgagggtttgaaccgggggtctgtcgtccgcggcggggctgcgtcggctgcggcgggtgtgggaggtggcgacggccggggccggggtcctgcccggctgcggaggcgggcgcgacgggcgcgggggtcgctgctcctgaggcgatgatgggcaaggaagaggagattgcgcggatcgcccggaggctggacaagatggtgaccaagaagagcgcggagggagccatggatttgctgcgggagctgaaggccatgcctatcacgctgcacctgctccagtccacccgagtcgggatgtctgtcaacgcccttcggaagcagagctcggatgaggaggtcattgcactggccaagtctctcatcaagtcctggaagaagctcctggatgcttccgatgccaaagccagggagcgggggaggggcatgcctctgcccacgtcctcgagggatgcctcagaggccccggatcccagccgcaagaggccggagctgcccagggcaccgtcgactccgaggatcaccacatttcctccggtgcctgtcacctgtgatgccgtgcgcaacaagtgccgcgagatgctgaccgctgccctgcagacggaccatgaccacgtggccatcggtgcggactgcgagcgcctgtcggctcagatcgaggaatgcatcttccgggacgttggaaacacagacatgaagtataagaaccgtgtacggagtcgtatctccaacctgaaggatgccaagaaccctgacctgcggcggaatgtgctgtgtggggccataacaccccagcagatcgctgtgatgacctcagaggtgagcccctgttggaggggctggagggctgctccctcggagcggtgggctaagccacgtcccggncnaggngatcnaagatggccagtgatgagctgaaggagatccgtaaggccatgaccaaggaggccatccgagagcaccagatggcccgcactggcggcacgcagacagacctgttcacctgcggcaagtgcaggaaaaagaactgcacctacacacaggtgcagacccgcagctctgatgagcccatgaccacctttgttgtctgcaacgagtgtggaaaccgctggaagttctgctgacccctcgtgtagatgtgctgcagccttgggccctccccggcccacgtcctccgttgacacagcttctctggagaccctagaaggcggcatgtcctgccctcaacctgcctgcctggattgcacctttctgccctttccccctcattattaaatgtttctttttgccaaaaaaaaaaaaggggggcgtcaaagatcctcggggccaagtacgcgtaaccagcttctgtccagggcctatagggagcgataaaagaggacggcgtcgttacaccgcggacggaacagtgcggactgg

SEQ ID NO: 638479 - DNA, 156 bp, Homo sapiens
gaggcagaggttgagtgacctgagatttacactgcactccagccctgatacagagggagactccatctcaaaaaagaaaagaaagaaaaaaggagagagaaagaaaaaaagaggtgaaaggacagaattggtaattgtgggttaatgtgagtagat

SEQ ID NO: 638480 - DNA, 2922 bp, Homo sapiens
  misc_feature (17)..(17): n is a, c, g, or t
  misc_feature (1217)..(1217): n is a, c, g, or t
  misc_feature (2388)..(2388): n is a, c, g, or t
  misc_feature (2390)..(2390): n is a, c, g, or t
  misc_feature (2394)..(2394): n is a, c, g, or t
  misc_feature (2399)..(2399): n is a, c, g, or t
agcggaggatgccgcgngcggccgcggggccgagggtttgaaccgggggtctgtcgtccgcggcggggctgcgtcggctgcggcgggtgtgggaggtggcgacggccggggccggggtcctgcccggctgcggaggcgggcgcgacgggcgcgggggtcgctgctcctgaggcgatgatgggcaaggaagaggagattgcgcggatcgcccggaggctggacaagatggtgaccaagaagagcgcggtgaggggcgcgggccgccaggaccccgggaaccccgccccgccgagaccccgtcgagcccgccgacccccgttagggccggaagacgacctgaggggcaggacgagacccctccccggcagagactaaccgggacgcaggggagacccccacccgtggccgagacccctgccccgggccagccctgccgttcactcccgcaaccccggcagaggccgcgatcaggcctggaccttgtcccgggagagccacccgctctggactcagacccctccctcgcccgcagtcacaggctccgcacccttccctgtcccttaactccagacccccagcctggcccgtcgactccttccttggccctgtcccgcctctcggagcccccggggtgttcgggcctcctctgcgggccgcgccagccccttgccttcctccatcccggcctgggcatcctcacaggccgagccccgccccccaactcagccctctcccacgctccgtctcttacagcgtttgtcaccctccgtctcccatagcatttgtcgccggcaacagtttggagtctgaggttggatccccttttcttctggagcttccgtgcctcccctgcctcttcccagcccttgtcatcctccttcacaggccagccagatacctgtcttgcctgtgggcccattttcttccctgtctgtccccaccccacaagaaccaggtttctctaataaattctctcccttctttagccaggacttagcccgcagcaacttgggtgtgggtagttatgtggacaccctccgaaaagagccggtgtgcttatataagagccaggaggtcgggcaagcctcctctgggagtgtctgggcgctggagcctctgggccggctctgtacagtgcgggctgggcctctgtgttctgtgcggccacagagagactatggagagaggctgtgtgtgaggactttgaaggggccagnaggcagaaggaggtgatatgtctgtgagatctaaagtcctttatgaaggtcctccttctccttccaggagggagccatggatttgctgcgggagctgaaggccatgcctatcacgctgcacctgctccagtccacccgagtcgggatgtctgtcaacgcccttcggaagcagagctcggatgaggaggtcattgcactggccaagtctctcatcaagtcctggaagaagctcctggatgcttccgatgccaaagccagggagcgggggaggggcatgcctctgcccacgtcctcgagggatgcctcagaggccccggatcccagccgcaagaggccggagctgcccagggcaccgtcgactccgaggatcaccacatttcctccggtgcctgtcacctgtgatgccgtgcgcaacaagtgccgcgagatgctgaccgctgccctgcagacggaccatgaccacgtggccatcggtgcggactgcgagcgcctgtcggctcagatcgaggaatatatcctttgggtaggggctgtgggcctgggtttctggtggagtcaggaggctgcctggcctggtgccctctggtggctgctggatgccactgcccagctgtccaggggtcacctgcctgggtggtcacctgcctgggtggtcaggctgtctcacctcaggagggcccccggaccagctgaagggctgattctgtctgcttgtggggcctaggtcccctggggctgtagcctgaagctgggtctcagtcaggaatgggcctggggcaggcttggccctgcagcccttcacctctccaccaggtgtgggtgggcagaccgacccctgtgtggctgggcagaacctttccagcccccaccccaacatggcccccagcggggcaggtggtaggtggagggcagcgacgttgtcctcaggtgggtccttaaaacacttgcacgcatcttccgggacgttggaaacacagacatgaagtataagaaccgtgtacggagtcgtatctccaacctgaaggatgccaagaaccctgacctgcggcggaatgtgctgtgtggggccataacaccccagcagatcgctgtgatgacctcagaggtgagcccctgttggaggggctggagggctgctccctcggagcggtgggctaagccacgtcccggncnaggngatcnaagatggccagtgatgagctgaaggagatccgtaaggccatgaccaaggaggccatccgagagcaccagatggcccgcactggcggcacgcagacagacctgttcacctgcggcaagtgcaggaaaaagaactgcacctacacacaggtgcagacccgcagctctgatgagcccatgaccacctttgttgtctgcaacgagtgtggaaaccgctggaagttctgctgacccctcgtgtagatgtgctgcagccttgggccctccccggcccacgtcctccgttgacacagcttctctggagaccctagaaggcggcatgtcctgccctcaacctgcctgcctggattgcacctttctgccctttccccctcattattaaatgtttctttttgccaaaaaaaaaaaaggggggcgtcaaagatcctcggggccaagtacgcgtaaccagcttctgtccagggcctatagggagcgataaaagaggacggcgtcgttacaccgcggacggaacagtgcggactgg

SEQ ID NO: 638481 - DNA, 985 bp, Homo sapiens
  misc_feature (17)..(17): n is a, c, g, or t
agcggaggatgccgcgngcggccgcggggccgagggtttgaaccgggggtctgtcgtccgcggcggggctgcgtcggctgcggcgggtgtgggaggtggcgacggccggggccggggtcctgcccggctgcggaggcgggcgcgacgggcgcgggggtcgctgctcctgaggcgatgatgggcaaggaagaggagattgcgcggatcgcccggaggctggacaagatggtgaccaagaagagcgcggtgaggggcgcgggccgccaggaccccgggaaccccgccccgccgagaccccgtcgagcccgccgacccccgttagggccggaagacgacctgaggggcaggacgagacccctccccggcagagactaaccgggacgcaggggagacccccacccgtggccgagacccctgccccgggccagccctgccgttcactcccgcaaccccggcagaggccgcgatcaggcctggaccttgtcccgggagagccacccgctctggactcagacccctccctcgcccgcagtcacaggctccgcacccttccctgtcccttaactccagacccccagcctggcccgtcgactccttccttggccctgtcccgcctctcggagcccccggggtgttcgggcctcctctgcgggccgcgccagccccttgccttcctccatcccggcctgggcatcctcacaggccgagccccgccccccaactcagccctctcccacgctccgtctcttacagcgtttgtcaccctccgtctcccatagcatttgtcgccggcaacagtttggagtctgaggttggatccccttttcttctggagcttccgtgcctcccctgcctcttcccagcccttgtcatcctccttcacaggccagccagatacctgtcttgcctgtgggcccattttcttccctgtctgtccccaccccacaagaaccaggtttctctaataaattctctcccttcttta

SEQ ID NO: 638482 - DNA, 471 bp, Homo sapiens
ccctggactcccaagggcaagcagtgctccctaaggcacatttcatcatctattaacatccaaaaattattatagaggccaacgtgggaggattgcttgagcccaggatttcaagaccagcctgggcaacacagtgaggtctcgtatacccatacccacaaaatctgccaggtttggtggcatgtactatagtctcagctactcaggaggctgagtgggaaggatcacttgagcccaggaggtggaagctgcagtgatctgtgattgtaccaccacactccagcccgggcgactgagtgagaccttgtctcaaaaaaaaaaaaaaaatccaaaaattattaaaccctacaaatattttaaaattctcacatttacttaaagcttaatgcctcataaaacatgctaaagttactgttcatcatttcttacgataagaatcattttgttaaatttatcaagcttgccataaaa

SEQ ID NO: 638483 - DNA, 424 bp, Homo sapiens
acattctctttatccaatccaccattgatggaccctaggtgattccacgtttatgctatagtgaatagtgctgtgattagcatacaagtgcatgtctctttgtgtaaaattatttattgtcctttgggtatatacccagtcatgagattgctgggtcaaatggtagttctattttaaattctttgagaaatctccaaattgctttccacagtggctgaactagtttacattcctacaaacagtatataagtattcccttttctctgcagccttgccaacatctgttattttttgactttgtaataatagccattctgattggtgtgagatggcatcttattgtggtttcgatttgcatttctttgatgttgatataatcaccaaaaacgtaaacatttcagttgctataggttacatattacgg

SEQ ID NO: 638484 - DNA, 323 bp, Homo sapiens
aaatgggtcaccatataagagaatatactattaaagaacttgatagtttagagtataactgttagagactaaagagtattattttaacagtgattaaaattgtggtttaactacactactattctttttaaagataactacctgggcatagaaataggatagggctgagactcctacgaacagatacgaggtggagattctattaggtagaaacaccgactacctggagccagtaaaagaaaatacacggtgggatgaaaacaccatgctagtcagatgggtaggaagcactaccagttctagacccctaggaaagacaccaa

SEQ ID NO: 638485 - DNA, 130 bp, Homo sapiens
ccaggcgcttgtttggtagattctgcgcattgaacccgtgattgaagccggcgtgtagccgtagggaaatgtgatcatgaattccccggctcctgcgtgatctgcagagggaaaggagacaggtgagggc

SEQ ID NO: 638486 - DNA, 409 bp, Homo sapiens
attgccaaaagctcgaaccacacgctttaccgagacgctaacaaggacgccactgagttcgtcgagcagaagctgcgcgacaacccctggatttatcctgacaagaatacggttgccacacttgttccgcttgaaccactaccgttgaagttagaacgaatccgcacgcgtgtgtggaccaaggtcaagagcggtacataacccgcttggcattcatctttattggcagagggttacatggctatttgcaaagaaaccaaagccgacagtcatcaattagtgacgctgataaagatggttgaggcctatgaggcgcaaagaacccatggcctcgcgtcactgggtaatgatgaacgactgctgaaccgcatcaaggcattgctccataaacatgatgggggagtcgctc

SEQ ID NO: 638487 - DNA, 221 bp, Homo sapiens
ccttttttttgggggggcccctttaaaaaactgtggccaaaactttttaactgggttaaaggccttttttgggggggggttttgtcctttgggcggtttttttccctgcccccaaccccaaaaggtttttttttttgggtgggggggcccagggcccttttttgagatattttttttttggcccggtttttagggtttccattaaatgggcccccccccca

SEQ ID NO: 638488 - DNA, 398 bp, Homo sapiens
agtgggggaacctgaggcacaaacccagaggccaagaaagcagtgccctgaggatatgtgacagagagacctggggagggagagacagagatggaggcccagagatgcagagaggcagatcctggagagtgagaggagctggcatagacagaaggaggaaccaagaaacactctagaaggctctgaacacacaaagacacagatacggagggaaatgaagataagaaattcagaggcagagggagagtttggaaacatcagcaagaggccgggtgccatggctcacgcctgtgatcccagcacttcgggaggccaaggcggctggatccctggagcccaggagttcgagaccaacctggacaacatagcgagaccctgtctctatgaaaaacaacaac

SEQ ID NO: 638489 - DNA, 416 bp, Homo sapiens
attgtatgctcccatgacaatgcgaaggttcttccaagttgtgagggctgtgcagacaacaggttggactgtgtccgcgagtcgatatgcgttttgcggcgttataagagacatttggctggcgttcacatctagtacttattggtgtgttgagacatacaaagtgactttatacgctaaatatcacaacaaaagctaagcagcaggctggtcgaaatgcggcgtcggttctggcaccctaccccgtcaattcaagtgggagcgcttggcgccagctagcgggtgacggtcttacgctcgtatgatcttgcgaggatcgcactactgatcggtacatgtggagagaagcttgcatgaggtagtaaaagggtgtaactagccgaacgcacccgagttcgtgccagtggtggtacgaa

SEQ ID NO: 638490 - DNA, 275 bp, Homo sapiens
  misc_feature (12)..(12): n is a, c, g, or t
  misc_feature (91)..(91): n is a, c, g, or t
gtcgacggcagnataggcgcttgtgaactgggtcaaggcaatcgcgccgccagccaggggaggatgtccacgccgagcaaggcaatgcganaaaacaccaggaacagctgcatcaacagcggcgtgccctggaacagctcgatataggtacgggcgacgttgcgcgggaaagccttggtgctgatgcgcatggtcatcaccagcaagccgatcacgccgccgccgataaacgccaccagcgacacgagcaaggtccattgcaagccggtgagcag

SEQ ID NO: 638491 - DNA, 318 bp, Homo sapiens
acactataacttggcttctgtattacaagagatgatgaggctggcttatttcttttatgttacttctacatgtattctagctgcaacgagaggccttcctctttctgttttataaaaagttttactgccattattggctttccattccctgtagccatcctcactgttacctgttttgggtttctggtctactttgactttcatagtacctccagcctcctcatacgcacagctttaggatgacctctgcttgagtttctccatatgtgcatgtacatctagcattctgccgttgttctgccgttgttcttcgacgaa

SEQ ID NO: 638492 - DNA, 239 bp, Homo sapiens
tgtcgatcaccggacttacagctactcaggaggccccgctactcgtaaggccagctactcaggaggcccagccactcaggagggatgtaatctgatttaaggttttttttttttggaaatggagtcttgcttaattggccaggttgaaatgcagcagcaggatctcgattcattgcatcctccatgtcccaggttcaagcgattctcccgcctcagcctcctgagtagctggggggatc

SEQ ID NO: 638493 - DNA, 170 bp, Homo sapiens
tgctgcatatacagctcagagccagtctatcgaggaagcgagggcggcttcagtacagtcaagaaggaagaagaggatgaaagctatactccagtgcaggctgccagtgccacagactctcaaccgtccctggccagagagctgttccgccaggctcttcagacgagctt

SEQ ID NO: 638494 - DNA, 786 bp, Homo sapiens
  misc_feature (159)..(159): n is a, c, g, or t
gacagtgagtccgagatcggtgccagtgcactcccgcctgggctacagagcaagtagtccattctctagaaaaatgagaagaagaggttaggggaattagtatatcgtgttataatgtagatatctttgaataatggcgttgacttggtagtcttgggnaactgattctatgagcggtcgtggatgacgcgaagtaaacacgagttatccattctattgagtgtatccctctttccgaaggaagaatgatcgtaatagcaggctaccagtgaattttgagaacttgcaaaaacagcttgcaaggacacatgaagcttcctattttcatagcagatgcattcacagcaagagcatttcgtgggaatcctgctgctgtttgcctcctagaaacatgaatcggatgaagacatgcatcagaaaattgcaagggagatgaacctctctgaaactgcttttatccgaaaactgcacccgacagacaactttgcacaaagttcctgctttggactgagatggtttacaccagcgagtgaggtcccactctgtggccatgccaacctggcttctgcagctgtgctgtttcacaaaataaaaaacattgaatagcacgctcacgtttgtcactctgagtggagaactaaggggcagaacgagccagaggatggcatcgtcctggaattgcctctttatccaagcccaaccccaggacttccatgaagtagaggacttgataaaggactgtcataggcaaaaagtggccagggacatctggtattctccagatac

SEQ ID NO: 638495 - DNA, 197 bp, Homo sapiens
atctagaggtcccctgtggagactggggtctcacacccttccagatgatttgggctgcgacctagggccgggacggggcgcctccttccgctggttataaccatgttcgcctacgagggcaatggattacttctgccctgaactgaggatctgcgctccttggacctgccgcggacacgtgctggctcatgatcacc

SEQ ID NO: 638496 - DNA, 734 bp, Homo sapiens
tcccaaaattgtttccaaaagtttatttaaaaacacacacatagggtcagatacaaacgccttttaaccacgggggtggggaagagtaaatctgatggcttccaatgatcatctcttccctcgtgcgtccacggtcgctcagagtctcagggagttatgagaggagtgtgtctcttcctttacttcccgtgttggtggtaatgagtccttcgaatgagagtaatatacgtgaccgaatttttccataactagttggtggattattaaagtttggcaggtggctggttttcctatgggtgtcttacaaccaagcatttcttcataattggggttgtggaaggttcattcactttaaatatacagttattattatatccttcttcttctccactactccgagcctcacacaggctgctaaggcgtatttctgccacatcagaagataatacatcataacattgagaggtaccttgatcgagaagctgactggtgaatttctgactgcagccaagtacttgtgcctacactgaagtggtcctcttcttcactcaaaaggtactggcaaattatctgatagttccaacaaagggtttaaaggagtcctataaatattctaacacagtattgcctttctctgaaactaggatggctgcgaagacattgtatgggttcccttttaacaagcaggtaaaaggcttttaaaggacttgaagtgttactggacaggaacagac

SEQ ID NO: 638497 - DNA, 185 bp, Homo sapiens
cccactacattcctctccggtggcagctcggtgctgaatgcagacacccacttcttatcaagggaattcacatccccagctgggggtcctgactggtcacgcaaacggttacagttcaaagcctgctgataaccagcactgattgctaggaattgcgctgcatcatacgcgtgatgctggacgaa

SEQ ID NO: 638498 - DNA, 389 bp, Homo sapiens
gatcagacagcaaagcagaacagtataaagtatcaaaaatacaagtgctagcactgaggagagtgagaagggttgggttgtggccagaggacctctgggacacaggattgaggacttgccacagctccaatggaacctaggcctgggggcctgtgcaggatccttggctgagggtggaagtggcttgagcggggcccaaccctgggccctgaaagtatgagaccagttgtgtgggcacttctgcgagcacggtctgtgccaatgctcccgaggggcctgcaaaaaagggaaaagtcagtggtggccagaacagctgcccaaagtctgtatttcatgctcaagaacccaaccatatcccagggctatagaggaaaaggtgagcattcccc

SEQ ID NO: 638499 - DNA, 801 bp, Homo sapiens
catgatctcggctcactgcaacatttgcctcctgggttcgaacaactctcctacctcagcctcctgcgtagctgggattacagatgcttgccaccatgcccggctaattttgtattttgatatatatatataattttttttattcttttttcttttttaagttaaagacgggatttttcaccatgttgtggccaggctggtctcaaaccccttgaccgtgtgtgatccccccgacctcacgcctgtacatcccagcatttttggtaggccaaggttgggtggcttcacgaggtcaggagctcgaaaacgagccttggatcaatatgggtggagcccccgttccgctactaaaatgtgccaaatttttagctgggccttgtgctggaccgcacccatgatggtcccagcatacttgggaggctgcggcaaagaaatcgattgaacctggctacggccaaggtcgcaggtgacaccaagattgtgccattgaccttccaagccgtggatcacaagagagagactcactctcgaactaaagacaaaccagcaacgacagcacacacgcctcacctgggagcgcccacggcccgcccgcagcagacgctttgacgcacaacttagttgtgcgcgccgcaccccaaatcgtgatttaccagtgcgacgcaccatgttcctcacggaactcgtgacgccacatactcgtgattcgcacaaatcaaacagacccggggcaacgcctcttgaactaccaagtgggtcgagcacctcgtccacaaggacaaacgaccgacattccccccc

SEQ ID NO: 638500 - DNA, 327 bp, Homo sapiens
aatttttttttttcaaagataaaatcctgctttgttgctcaggctggagtatagtgggacaattatggctccctctaacctccaactactgagctcaagggatcctttcccctcagcctctcgagtagctgggactataggtatgcccccctacaaaaaagtaatttttttttaatttttttataaaaacaaggtctccctatgttgcccaagctggtgttgaattcctcaagtgatcctccccccttggcctttttaagtgtttaaattacaggggtgagcccccgggcctggcccccaaatattttaaaataaaaatgtttttta

SEQ ID NO: 638501 - DNA, 298 bp, Homo sapiens
caaccagccatgaaacaaaagtttaaaagccactcatctggtttcccctttgttttcaaagaaggaagctagaaaattaagtgatgtatccccaaacacacacatttaattggagaaagaacccctaatcaattcttgaattcaaatttcaaattagctgaatggcatgaacctttcttcccctggaatagccttacagagacctcaccattaacagcatctgcaagagaagattaaagcacacgattactttactcactgtgtaacacatgaggaacatggacgagatgggaaaaag

SEQ ID NO: 638502 - DNA, 672 bp, Homo sapiens
gcggctcccgtcggcctccggcaggactgagcgctgggaggccggaaggcgggcgcgcacggcggagaggcgggcgggaggccggagcatattaatgaaaagtgccataaactgaaaaaccaaacatgagggtagcaggtgctgcaaagttggtggtagctgtggcagtgtttttactgacattttatgttatttctcaagtatttgaaataaaaatggatgcaagtttaggaaatctatttgcaagatcagcgattggacacagtgcacgttctacaaagcctcccagatataagtgtgggatctcaaaagcttgccctgagaagcattttgttttaaaatggcaagtggagcagccaagtggtgggacccaaaatctgctggaagataatgttaatgagtggtgttaagaataatgtcggacagagggatcaatgttgccttggcaaattggacaaaaacaggagacgtattagacactaaatatttgacactgtggggaggagatgtggcaccattctatgagttatgaagggccatacaagatggaacaatagtttacaatgggaacattacgatgatggagcaccaaataaatgatgaggccacagtggctcatgcgattgggggagaacatctattagtaaatttggtctacgagaaaatgggctg

SEQ ID NO: 638503 - DNA, 200 bp, Homo sapiens
aagcacagtacaagacaccattatacgagaccgagacagggccagaccaggacaacctactagagataacgaccacatctacaacgttatcgtcacagacccatgcatatgtaatcatcttcttcatagtaatacccatcataatcggaggctttgacgataccgtagtagatacggaagtcgagagaggggatcctcta

SEQ ID NO: 638504 - DNA, 1256 bp, Homo sapiens
  misc_feature (431)..(431): n is a, c, g, or t
  misc_feature (456)..(456): n is a, c, g, or t
  misc_feature (527)..(527): n is a, c, g, or t
catggtagttcattgtctgtagatcccagcacttttgtgaggctgaggacagagtagaattgcgtcttggatgcccaggagtgttggacactagaggctgggcagacatatggagcatgcccatctcgtacaaaatgaaacagagattataatattagcgcgttgccaggaaactggtggcttcacgacactatgatcctgaatgtattcgcgaggacctttattggagcaagactatggtatgatgcccaatagagcttcaactataacatgcctcggggctaagcgagtagtctagatagtttcacttcgtccataaataacatttgactataacattatagtccagtagcgatttagactggggctgcgaggtgctcttggtgtgtcaccagggtatcactgtatgagggcatgggcatgcgaggctncgctggaattatgtgtcgttagagnccgcacaaggaactgtccgagggctttcgtgaagcttctgggactcaatatccatctcgtagtcggccatngcatcgggctgatcagtaagacatagatctcccgtgtgcgttaactccctttccgcctctcagcacagtacttgcagcattcaaatagactagtttgaggccctaagtacttggggttcgagctaccagttgtccttgctcacgtgtctcacgagaaactatagcatacgagcgaaaagcgtccatgaatcaccagctgagagtggattcgaccttgtagaccctgggggagaggtgtcccaggacaccttgtcagaaatacgcccggttgattatgcgggtatcccatcccaccaatccccaccactttaaggttgcacccaggatttggaccaacaacgtttgttggcatctggatccaagattcttggttaccaacccttgccactggcttggttaaaccctgtgggcttgatggattacaggcactaaggcccttcctaagtattcccgttttgagtcgtttaaaacctcggcggaattagcaaagggaggcctgactggttgcctacggttccaggatatttccacttggtacaagagtgagggccttctggggatggaccaacatctaaatttccaaggttccctcaattttctgtatcctggcagggctctgcaagtcaaagatggtagcgcggaaacgtagagggtttccttctccatgttttggggaacactgcaatcttaaatctctaccaggacttcgacaaagcttggagaacttcc

SEQ ID NO: 638505 - DNA, 1457 bp, Homo sapiens
ggggatgagtgtgtggagttagatcatcgaactcatcgcattgtgtgggttaggaaatcaaaagtaactaaggaggttgtgatatagattggagtctgattttttataatggttaggttgtgtatattgtgttgatgtggtagatgtgaggattatttattgtgttatgtgtataggatggtgatagagagctatgttgctttagattgtgtggggagttgtgtgtgggatatatgtaggttttgtgttgttggatagatataatttgttgattgatttagtatgtaattgggtagttatagctatagttattgttcataagtaatgtgtatgtttcgtttgtgttttgttccgtcccctccctatgtggttgtttggtttgttctgcgctctctgcttcacttcattgcgttttgtttttggttgttgtgcgccctcgtttttatattgttcgtttctgtcctggggtcgaggactgtctgtgtggtgtatgtagatttgtagtggtagtcgttctggtggtactgagtgtggttgttctccacccctccgcgtgtgtgtaggtcgtgcacgctcgtgctggtcctcttcgacggccgcgcccccctgcgtggtgtgttcgagggtgtgacgctactacataactcacctcctctgcctccttcagctcaccaacaccagcaggtggatagatggtgttgtctcctccacagcactgcgattaggaaaataccaacacgtagtctgctcagatggtatcctctactagtacggtacgatatgatgtgtgtgagacaacaacaacaaagatgaagcaaatgcaccgactctcagggcgtctactcacaccaacagcaggaatagtagtaagagttgcgtgcaacacacacaacaagacaggaggaggagataggtgaggagatgagagagagtgcgtggctgtgtgtttgtactactctcttctctctctcccgcctttcgtcacactcggtgtggctcacgcagcgggtgtcacagagctggtgtggttgtgtgtgtagtgtctgtgtgggctctctagtagtattgtgtgtgtgtgtgtttgtgtgggtgtggtgtgtggctgtgtgagagacacacacgaagccgtctctgtagacgcgccctcctcctctgttgttctctataggctcacatcgcccacctcagtacaagaagagaagatctcttgtgtattgttgtgtagaacaccgttgctgtctcttccctccgcctcccccctcatcatcttcgcctcgtcggtatatgagtgccctacctctcggtgttgtgtcatcatagatagagaagaagtggggggaaaaaaagaaaggggatgtaatttgagaggggccacaggtttttagttggttgtttcccattgtgtgtgaaaatttttgtgggcgctgatgtgagaaaaaagaaaagaatgaaaaata

SEQ ID NO: 638506 - DNA, 208 bp, Homo sapiens
  misc_feature (197)..(197): n is a, c, g, or t
agttcgacggagactctctttagtacaattgcatacaatatccttttccatcctttcaattttaacccgtgtgtatctctggatctaaagggagtctcttgaagacaacatatagttggaatatgttatttattcattctgccaatttctgcctttcaatcagaagacttaatccatttacatttaaagtaattatngggtaccgagc

SEQ ID NO: 638507 - DNA, 477 bp, Homo sapiens
  misc_feature (406)..(406): n is a, c, g, or t
  misc_feature (429)..(429): n is a, c, g, or t
  misc_feature (432)..(432): n is a, c, g, or t
  misc_feature (457)..(458): n is a, c, g, or t
tgatgtataatagtattttgtataaatataccacaatttattttccattttattgttggtggacatgtggcttgcttaaatttgttgatattatgaaaattggtgctttaaacatccttttatatatgtattcttgggcacctgggagttagtggtatgggctgaattttgtctcctcaaaattctgtgttgagttctaacccccaatatgactgtatctgagatagggtctttaggaggtaattaaggttaaatgaggttgttaagagtggggccctaatccaataagcctgtggccttataagaagagtctttctgtgtgtctcatgtgaggacacgatgagaaggtggccatgtgcaaggcaggaacagagccctcactgaacctgaccatgctgtcaactgntgccagacttccaccttccaganctntgggaaaataaacttctgttgtttnnatcacccaaaaaaaaaaaa

SEQ ID NO: 638508 - DNA, 688 bp, Homo sapiens
ggacgcgtgggtcgaccacgcgtcggaacatggtcctggtgttgtgcagcatctctgtgacggcgctggtggctgctggggtcccggggtcctcgcgctggggacgttgctgtctgcggcttgcggcgcgttttctattccaaggacaatgaaggcagctggttcctgctccctcttagtatcacaaatgtggatccccgtgacacggatgccgcagtcctatcctgctgtccacgaaggcaaaccatgcaagctcctataagatccaggtttcacaatgtaaagcctgaatacctggatgcctacaacagcctctacggcaggctgttgctgcccaagccttcacctggactgacgacatacccagtgctcactcgtgcggcaactgggaacaccgttcgcgtatggggagcatggaccaggcatgtgacaccttgtggccgattcttcaaggtggctaccccagtccctccatggatctgcacttgatcgaagccctccaactgaccacataaaggaagttaccatgcgcagttcccgaaagggagccggaagccaagcactgctgctggtaccagggagaaaacccagcctggccttcctttgaggtacagctttctgggaattgagccacagccccagaatgggttccccaacattctattgacgctgaggaccatccagccta

SEQ ID NO: 638509 - DNA, 192 bp, Homo sapiens
aggagagctccgacatagcatagaacacgcacaggacagcacagaatagaatagaatagattagaacagaaccgaatagaaccgaacaaaacaaaacagaatagaatagaattcaacagaaccgaacagaatagtatcgaatataacagaatacaaccgaatagaatagcatagaatagcatagaatagaat

SEQ ID NO: 638510 - DNA, 114 bp, Homo sapiens
actctagaggatctctagtgatataggcgccagtctaacccaagtcactcaagtactatagttgtagcaggaatcttcttactcattctggttcacccctagcagaaaatagcc

SEQ ID NO: 638511 - DNA, 735 bp, Homo sapiens
  misc_feature (10)..(10): n is a, c, g, or t
  misc_feature (348)..(348): n is a, c, g, or t
  misc_feature (368)..(368): n is a, c, g, or t
ctcgtgccgnatggattatgttttgtttgctttatggaaactggcaaggaaacaaggaaaggttttggatttggggttatagagtgagtcatagatagagttaggatttcttgttgtgttcttttagtcacaagctcttgactatattcctgcataaaataacttgttgaatttcctttctgatgaggagaggtaaaatgcttcttgtacctccatgtaatttaactcagtattcccacattgcctgtcatttttggatcagtcttaaaatgcattacaagcatttgaatcaacttcaataaatcatttatattctataataatgtaggccgggcatggtggcttacncctgtgatcccagagtactnggattacaggcatgagccaccacacctggcctataactaatttttaaacagtggtttgcttggtttgctgtgactttcagtacctttttgtttcagacatatacatatcacacataattgctttcttttgggtttctgtactttttccgtctctgcagtagttaccttataccataccatgtcttattgataactgttcttttgttgtgtaatgatgcatgctattcttaaatatcttccaaagtcttggttccttttgcaaacttaatatattttgtgttcacttaagttggtcattaatgaaacattttagtatggaaagttcagaatatgaattaaaatagtccattgaatttcaacagaaatg

SEQ ID NO: 638512 - DNA, 219 bp, Homo sapiens
tgtagttcgatatatagtatgtgatagggtgtaggtgtgcttgtggtaagaagtgtgctagggcattttaatcttagagcgaagctatatcactgcgccgtcataatggatggcatggtaggttatagatagttgtgtggttggtgtaaattgagttgaggcaggagtccgaggagttagtttgtggcataaaaatgattaaggtactagtataagaga

SEQ ID NO: 638513 - DNA, 1133 bp, Homo sapiens
  misc_feature (1133)..(1133): n is a, c, g, or t
gctcttccgcctgagcccctggaaggttgatgtggctgcggaatcgcgggcctcgcaaatgtctgccatttacaattttcagagtctattgactgtaatcttgctgctaatatgtacctgtgctatatatacgatccttggcacccagcctccgtggacaagaaataaaactggatgtgtggggatatatcgcgggaaacgttgtgccagaaatgggttgacgggacaggagtcccttattgtggcagtagtgctgtcatagctaactgggccttccagcatcctctttcatacagtaagcttgggagacaaccttgccagacatgtatgttgcccatcagatttgattggtgacaccaagggaactgaacttgcagacaaaattacacgtggaccacaggattgtataaccttcttaacattcctccgaacatttggcattgagcataacattttccagaattgctgtacctctaatacaacttgttcacttgggcacccattgttcttgtattaaacgcaattaatgattgtaaccaatttaaaataagttcttgtaacaaattcaactcaaggtacgggtcattacaataattacatttctgcaagatgtgtatacgtgtggtatcaagattacaaaattttagttgaggaattctctaaacgtgcacatttagtaggaacaccacaacattgggtaacataccctcaaattttccctttcacgtggtcactttgtgggcacctgattttacctttttaataagaacttgagcaccccttttttgggagcctaagctttctatctcacaacagtgcgcaaccttgcgtgtcgcagaacgggttcgggctacagatgttaaacaaaggcggcattggtaatccacttagtggaacaccaaatggtgcaatataaccacaagaatgcccacacaatcttaacgaaccgactatgtgtttagcgcgtttttaaaacatatttaccaaacacgatatcgcgcgttcaagagacgacgaagatacaggatgagcccacaacatggtgcggcgacagtgtacgtaccaatatgatgggtgcacacacacgacagattataatgcaactcccgaatgaatatattggcgcaacgtgn

SEQ ID NO: 638514 - DNA, 442 bp, Homo sapiens
  misc_feature (54)..(54): n is a, c, g, or t
  misc_feature (75)..(75): n is a, c, g, or t
ttccccatggtacccaggctgctctcaaacccctggcctcaggggatccacccnccttggcctcccagagtactnggattacaggcatgagccaccacacctggcctataactaatttttaaacagtggtttgcttggtttgctgtgactttcagtacctttttgtttcagacatatacatatcacacataattgctttcttttgggtttctgtactttttccgtctctgcagtagttaccttataccataccatgtcttattgataactgttcttttgttgtgtaatgatgcatgctattcttaaatatcttccaaagtcttggttccttttgcaaacttaatatattttgtgttcacttaagttggtcattaatgaaacattttagtatggaaagttcagaatatgaattaaaatagtccattgaatttcaacagaaatg

SEQ ID NO: 638515 - DNA, 354 bp, Homo sapiens
ctaatatttaatattgcttctcctgcatgcattactgcctattctgctatttaaaaaccctcaatgactttattttctactgccgcctttttctgtgcaaccaaaaggtaaatgttatattttactgtgttgtacaaatggtacccaacacaaactgttttgtaattagtaatactctcgtttaaagtgttaagttcgcatttggactttttttgtaaggatgtatgttgtgtgtttaacctttatttactaacgttaaaagtctgtgatgtgtgcgtagaatattacgtatgcatgttcatgtctaaagatatggctgttgttgataaaattaaaatcagctttcatttttct

SEQ ID NO: 638516 - DNA, 517 bp, Homo sapiens
  misc_feature (10)..(10): n is a, c, g, or t
  misc_feature (348)..(348): n is a, c, g, or t
ctcgtgccgnatggattatgttttgtttgctttatggaaactggcaaggaaacaaggaaaggttttggatttggggttatagagtgagtcatagatagagttaggatttcttgttgtgttcttttagtcacaagctcttgactatattcctgcataaaataacttgttgaatttcctttctgatgaggagaggtaaaatgcttcttgtacctccatgtaatttaactcagtattcccacattgcctgtcatttttggatcagtcttaaaatgcattacaagcatttgaatcaacttcaataaatcatttatattctataataatgtaggccgggcatggtggcttacncctgtgatcccagcactttgggaggccgaggaccttgtttccccttttgtcaggcataattaaatttacctggcaacacgctattaaaagtgtgccttttgatattacgaatgtcaataccccacctttttgttatgaaaaaggaaatcctactttattgctgttagcc

SEQ ID NO: 638517 - DNA, 1059 bp, Homo sapiens
  misc_feature (884)..(884): n is a, c, g, or t
  misc_feature (1024)..(1024): n is a, c, g, or t
tgtggtggtgtgtgcctatagtcccaactacttgggaggctgaggcaggagaatgcttgaacctggtgggtggaggttgcagtgagccgagatcgtaccactgccctccagcctggtgtggacagagcaagactctgtcctaaaaaaaaaaaaaaaaaaaaaaagtgtcaaacccttggggggggcatacatgggaaacaggcgggaaatccccagaactttggggaggccaagggggggaaaaatccctttgggggccacaggagttcggaaacccagtctggggcccaacttggggggggacctcccctattttacacgagggaaaaacaaaactttttcaaaaaaaaaggggggggggacggcgaggtacatccctggtgggccccaaggcttaaaccggactacacgctgcagcgtgggagatgagttgcgctttgagccccaaaaaaggggtccacggggcttggaaagtggagagcaatggaatcatttgccagatgggcatattttagtcgtggggggacacaggatgttacgagccctttgttttctccaacaaacaaccgatcatcaaacaaaaacaacaatattgtgggcgggacgcagaggcacccacaagaaggaacgtttatcagaacacacatttgtgggggggagcgcggcgcccaacagagtataacgtacacacctgagcaacaagtgcgtcccaagaggacaacggtggccaaccatgcgtggggggattctccccacaaaaaaaaagcgccgccgacaccggcggtgttgacacaacaccagaggggggactggcagcccacatcgagcctctcaacacgggcccacaagagagcgaataaagatccaccagacggggtaggtanacgcagcagccagacacgaaacgcgagacacctcatagacagcagacgaagcaggtagcaggccatcaagacagacaagccggccaactcgacaacacgacgaccaagcacatgataagcaacggatagcacagatgcgncgaccgagaagagagcagcacccgacttaccggca

SEQ ID NO: 638518 - DNA, 814 bp, Homo sapiens
gggctcgctcgccctcggaaagctgcgaaagtgctttggaggcttcgtacaattcagcggactatctggcgtctactacgtcgtgggtggacctgtccggaaacacactttaagccccagtttgccgcatcctcactttctgacgatcatagattggaggacagcctcgaatatgctgcaaagattgagaatcagcctgagcggagtgtggttgtaaaggtggagtgtggacaggatggttttcggcacatctactgtagttcgcagcgataatgtctggacaatgtcaaggccgagaagccactgagaacgcgatgtgcagtggcaaggagagctatgggacacttctcgttctagccataggtacattaccagtggtgagagtcatgagagaagcgaccaggaaaaacacactagtgtgcaagcgtctcaccatggaacttgacggaggtctgggcaagcaggtcagttcgtgtccctggagtgtttgccgtccacctgcgtagacctcccaagtcattaaagcagaagaactaaaggcaatgatcctaatgtaaacattgtacctaaagatggcacagggtgggcatcaaaacaagagcaagcatgaagaagaataaaacaccagaagtgccaccagtacagcaaaaacgctggggttgcagctcccccagaagtagcgagctgtcccaaaatcatggggcagtaacaagcaaggtgggcaaggagatggaatccaaagtgaatagtcagtttcagcaaagaatttcccaacctggaggccagtgggggatcaggagacaaaaacgacacg

SEQ ID NO: 638519 - DNA, 733 bp, Homo sapiens
  misc_feature (407)..(407): n is a, c, g, or t
ccaaaggttcatgtttttaattccccatggaaaattgtggtcccagactgggaaactcttagtactcggttaagctgtgaaagatttcacactgtgatgttttccagccaatgttttaagtttaagattcacatttacttgtgtccagaattattattaagatgttgagcttttgttttggaaactagtttgtcacacatttgtgcataagcccagtgtttatattgtaggccaattgtgaatgtgtagacatatgttcattgtgaaggaacggacttattcatgggataatattgaatccagtctcagcttgccatcttcagacacttaagacctgcacatatcctatgttacatttaccacagacaagtttttttggctgacattagccagctttaaaagcatcnccctcaatgttgaaggtgctgcatctattagggtgcgcatattagtgttccaataagcatgtgattctgttaaggtggtggtagccgaaacatgaatataattacgttaggcctcttaggctttggtacatatattgggataagagtttatgctgtaggttgcaaggttcttcttggttgtcagtaaaaagcccaaagaacaaagcatgagtgagtaaatgacgtgagtagacagttccttttatgaccaacattgcactcgtccctatggtggttcgtacagtgtaggataacttgagcgttcatttttcaatataaagtaatat

SEQ ID NO: 638520 - DNA, 145 bp, Homo sapiens
gtgtggtcagccttggcgccttacataccgcagctccatgatagtacttgacctgtcacccctggaatgtgcagtgggacagctgagagtacgccttgaggatgtaggagagggagggaagggtagcagagagagagagacagaa

SEQ ID NO: 638521 - DNA, 335 bp, Homo sapiens
ggtgggggaaaacccccggaaaaagcgcccccccttttttttttgggggttcccccccccgggcccccccccccccgggcctttgtttttttgggcccttgggacccgggggggtttccccgggccccaaaggggccaaaggggggtcccccctggcccctttgggggggcacccccggggttgggggaaaaaaccccccccaaattttttcggggggggggggggggaaaatttcctttttggggggtttttttaaaaaatttgggccccccccggggggaatttttggttttttttgttttttaaaaaaggcccccccccccttttgttttta

SEQ ID NO: 638522 - DNA, 126 bp, Homo sapiens
ctggatcacatgttaagaacgggaagaatgggtggcaatggtgtgctcctggaagaagctcacccatgcacaggttgcccttgaagctcgggggcccttggagttcctgtcccctgggggataatt

SEQ ID NO: 638523 - DNA, 867 bp, Homo sapiens
taggtttcgaggggggaactgctggaaaattgtaatgggtatggaaacatgtcatataagtacatgctagggtgagtggtagagaagttttttcataggaggtgtatgagttggtccgtaaccggatatcggggtgttatgcttgttcccgatattcctataacaaaccacgggcagtgttcaacaatgtagcgtgttcttgggtgacaaaatattattgtttgttgtagatgttccaggggacgatgtgctgtcattattgtttgttccctaaggaacgtattgtcagtgcgtgacgggtgtgtctatattatattatattacaagtgttttgtggtgatattctcgggcttatgtggaaaacaaattatgggcgcagaaaggggcgcccctgcgcgcgtatattctcagaagtgttttagaaacgcctgtgacaacttatgttctcgagactctcccactgtctcgcgcacaggctccagaacaggggggctatccggatgtggactcctctgtgccatagtgtgttgtgcgacagatttaaaatctcacttattatatgtggcgccgacagggggctcatttagatgtgggccagagcacgtataaatcctcccacgaaaggggtgtcttccccctgtggtgtagtttgtgcagtgcaacatacaacggggggtgttgtgcaccgacggcgttttacacaggggaacgcccccagcttttatgtttacgactaaagtgtttcagacctacgttagcaaatgttggacttgccggccataggggcggtgggaacatttccttctaatttgcaagcaactttggctctggggggggccataaccgtggcctccgccacgtttgccc

SEQ ID NO: 638524 - DNA, 105 bp, Homo sapiens
gtggctcacagcaccagcacaaataaacagtgcaatggcagcagtagacaggaaggaaggaaggaaagaaaaaagaaaaagaaagacagggagcacagcagagca

SEQ ID NO: 638525 - DNA, 861 bp, Homo sapiens
tcacaggcctcgcgagatgtgcttcccccagtgagcccgccgtcgttgaccgtccgcccgccgtggatgtgggcagacaaaatggggaccttgcacaaatatagccccgcccccccggggaaaatgcaccacgcggcaagagtgttccacaaggggggggaacaccccgacatccaaggggcgctaagacccgtcctgtcacaataacacggaggtgtatcggccccgccccacagggcgagataacctttcggcgactcccaccacagggggccgctcccctcttgacaggcgcccctttggttgattcgaacacgcgccgggctatacaataatgtcgggacccccccggcgtccttggtgggtgcaccaccgatgccgacaccgcgtgggggaaccccactctgtgttctgtgcgagaaatatgttggaccacccgtgcgcccccgccacctattttgcgcggagttgttgtggtgtacgccgcctgattgcctaggccacgaatggtgcagattatattattcttgcttggtggcacacccgcacgttgttgttaatttctatgcatggcggctcgaagccctgttcacgttcagagggggcatagaacaaaacatgagagcaccgtcgggcggaacaacagccccacacaggggacatctttgggaccaaaagggctccgaacatcccgcaagccactcttctagacaggcgctcccctccccccctcgccgcgaacaccccctgggctccccacgccaagaggaggcgcaccgcggcgcacgccgagcgccaacaccaaagggtgcaaggcaacccccgccactgaaaaaaaaaaaagcccgccaacaaaaacaa

SEQ ID NO: 638526 - DNA, 774 bp, Homo sapiens
ctgttcatatgggatactccgctaacttgccatgcaattgtgatgactgtgtgtcctttacagatgtaccattgtgtggttcttgcaaggcaatcaaaggttttcgcattctccagtgggagtatagaccacagagctacgaggcgagtttgacaactattgaaaaccagagctccaacagttatgaggtagctttgcaggtttggtggaagtggcctcgttttccatgattgactgtagtatgagttcaaagtctagaggaaaggaagcatccctggtaattccatcacaagttgtgccttatcgggagccatactgcggcaagatatggaccagtgtccatggttgggtcagccgcaatgggtggtcattctcctatggctttaattgaacggagactggtatcttgtagacgaaggatttgcctctgcacagtttcccaatggtcctcagtttgcaagaagaccctcccagttgccttcaactcagttatcttcctcaccttttggagactatcgacaagtatcagtaggactctttcctaggattcttttaacagaaccgagttgtggtcccgagaaggtttcagaaggatccaggtcacagcctgtttctaaaccctaggtgggacagcaatggccaataggtataaagaccaattcagacctttgctatttaacggacaacccgcgcaggtggcaacgatattcttctttttccctgattgctttgccacatcagttctcctagcgcaaccacgtgaatcagcaagca

SEQ ID NO: 638527 - DNA, 320 bp, Homo sapiens
cagtgatgaagtagaactttccagtgaaaattaaaattttgggccggcgcagtggctcatgcctgtaatcccaacactttgggaggcgaaggtgggtggattgcttgagcccaggaatttgaggccaacctgggcaacgtggtgaaacctgtctgtacaaaaaaatacaaaaattagctgggggtggtggcacatgcctgtagtcccggcaactccggaggctgaggtgggaggatggcttgagcctgggaggtggaggtgggagtgagtcttgatggcaccactgcattccaacctgggcaacagagagataccctgtc

SEQ ID NO: 638528 - DNA, 84 bp, Homo sapiens
agcggagagtatcagcaagagtagcagcgagcagccgcgctggtggcggcggcgcgtcgttgcagtgcgccatctgtcaggagc

SEQ ID NO: 638529 - DNA, 225 bp, Homo sapiens
gctcattaccggtgagctgggcacacatgctgtgtctgtgggcaccaagcccgttaccaagtacatcagcgtcatgtaaccgtgtcccttcaagtgctttagtaaacccaaaggctcttttcagtgccactcaccttttcccaattggtgatatatattgacatgtgatgttactagaaactcctgcatgctgaattagccatgtttttccatgttagaatggca

SEQ ID NO: 638530 - DNA, 343 bp, Homo sapiens
cagtcttgcatcctgcaaagatcaaaagacccatacatcacagtatatgcactcaatacaggagcactagtattcataaagcaagtcctgagtgccggccacagagagttagagtacgtgacattaatgatgggagacttataacgccttgctgtcaacattagccggatcaatgagacagaaagtcatcaaggatactcaggaattgaactcgtctttgcaccaagtgatcataatagacatctacagatctctccacctcaaatcatcagaatatacatatttttcagcgacacacctcacctattccagaatggagctcatacttgtaagtacagctctc

SEQ ID NO: 638531 - DNA, 165 bp, Homo sapiens
  misc_feature (85)..(85): n is a, c, g, or t
tcccgtttattcaactgcgttgactcacaaatacagttcttggtctctttgtgagcctgagtctaaacgctgcatcatggctcancttgtacattttcagttgttggaagtaaaaggaagccactgccccatggcgtcttcacatcctcaacccccaccacagag

SEQ ID NO: 638532 - DNA, 679 bp, Homo sapiens
ccatttgcttggtaaattgtcctctatctctttattttgagcctatgtgtgtctttgcacatgagatgggtctcctgaatacagcacaccaatgggtcttgactctttattcaatttgccagtctgtgtcttttaattgtggcatttagcccatgtacatttaaggtaactattgttatgcgtgaatttgatcctgtcatcatggtgctatctggttattttgcccattagttgatgcagtttcttcatagtgtcattggtctttatattttggtgtgtttttgcagtggctgctactggtttttcattttttatatttagtgctttcttcaggagcttttggaaggcaggcctggtggtgacttccttagcatttgcttgtctggaaaggattttatttctcctttgcttatgaagcttagcttggctgaatatgaaattcttggattgaacattcttttcctaggaatgttgaatattggctcccaatctcttctgggatgtaagggtttctgctgagcccactggtagctcgatgggctttggttttgaagtgaactggcctttcttctttgctgccctcacaattttccttcattttgacctggaagatctgatgataaggcgcctggggttggaccttctaatggggcttttgggggcccctgattttctggtt

SEQ ID NO: 638533 - DNA, 594 bp, Homo sapiens
taaagaaaaaaggtccaaatcaataggtcttttatggcatcatttaaatatcacaagtaggtcttaagtgtcatcgggcatcttctttctgtagccgggtaactcttaaatcttatccatcagccgggcggaacagtccctttttcagagacatagatcccactccaaaattccctgcgggccaccatatcacaccccactcctaaaaaaaaaaaaaaaaaaaaaaaaaaaaaaaaaaaaaaaaaaaaaaaaaaccgcggggcggacttttggggggggggagaaaaaggggagcaagaagaagagagggcagcgaggagaaccacaaggaggtcgccgacagacccaccatgttgtctgtgagtgaaccaacgaaggggaacacctcgagcggcgggctccctcactcaaaagaggagggaggcgcctatatataattcttggacgagaacagccgcgagatgattctcccgcgcgtttcttatattataatcttcagtgacggaaacaaataaaagataaaaaaagcgaatccaaatagcggatacgaaacaagacgagacaaagaagaagaaaaaaaaaggaaaaatacat

SEQ ID NO: 638534 - DNA, 452 bp, Homo sapiens
  misc_feature (33)..(33): n is a, c, g, or t
  misc_feature (84)..(84): n is a, c, g, or t
gccccatcaagttggatgcaagtttcctccccnagtcctcgaagggtcctttaacattttgggccatgaatttttgcagcagcnggtacccagttggttccccttcccatgtttaagcatttcccttccaggagctcttttaagggcagtccctggtggtgacaaaatctctcagcatttgcttgtctgtaaagtattttatttctccttcacttatgaagcttagtttggctggatatgaaattctgggttgaaaattcttttctttaagaatgttgaatattggcccccactctcttctggtttgtagagtttcttctgggagatctgctgttagtctgatgggcttccctttgtgggtagcccgacctttctctctggctccccttaacattttttccttcatttcaactttggtgaattattcaattatgtgtcttggagttgctgtt

SEQ ID NO: 638535 - DNA, 126 bp, Homo sapiens
ccacagcatacacaccttggaaaccaagaagactctttgtgtgtgtatgtgtgcgagactgacgcgtctctacgcgctctatggggggagatttggttatttcggcgttacacctccggtgttctc

SEQ ID NO: 638536 - DNA, 795 bp, Homo sapiens
  misc_feature (51)..(51): n is a, c, g, or t
ttttttgtttgttttttttgtaatttttgcagtcaagttgatgctcagtgntttaggatcccgtagtcgatcaaccctatgcagcctcaggcagaaaccgcgcttatcaagatctggtaaaggcaaagcacatccccttgctctaattttcttccgtgcgtgcgtatagcgcacctactcgggcttgcttctacttatctgccctgccttcacctcatccgcataacctgccagccgatcctcaccatcatgaaatacagtgagcatcctaagcacggcctgggcgtctgccttgttccctgccaggctcagccgttccgcaatcctcatcagctctaccgctgaccacttgaggtctgaggcaatgccttggaggtcgcgcttaaggtcttggttgggtttagtgagggacatttatggctccaaactcagtgcgcggactgccattcaccagattccgcctcgtacctatcgaaagtctctctaagtgcaacaatatccagcggcgacttcggggtaatcgagccaggctcctctggaacaattccatcagcctccatcaattcgacgagctttttgccgcgagcaatgcccacgttcagatggcgagcaacaaaagctgcgcttaggtgcttccctgttagggctgcaataaccgctctgccgtacatagggtcggcagcgtagctgtcaggatccaggtagttttccagccatccagcgaatctgcattcggaaagaagacatctagatcagctatcgttgatcgagctacgggatctctagagtcactgc

SEQ ID NO: 638537 - DNA, 753 bp, Homo sapiens
  misc_feature (41)..(41): n is a, c, g, or t
  misc_feature (98)..(98): n is a, c, g, or t
  misc_feature (105)..(105): n is a, c, g, or t
  misc_feature (132)..(132): n is a, c, g, or t
  misc_feature (135)..(135): n is a, c, g, or t
  misc_feature (139)..(139): n is a, c, g, or t
  misc_feature (148)..(148): n is a, c, g, or t
  misc_feature (154)..(154): n is a, c, g, or t
  misc_feature (156)..(156): n is a, c, g, or t
  misc_feature (158)..(158): n is a, c, g, or t
  misc_feature (160)..(160): n is a, c, g, or t
  misc_feature (177)..(177): n is a, c, g, or t
  misc_feature (180)..(180): n is a, c, g, or t
  misc_feature (187)..(187): n is a, c, g, or t
  misc_feature (192)..(192): n is a, c, g, or t
  misc_feature (196)..(197): n is a, c, g, or t
  misc_feature (214)..(214): n is a, c, g, or t
  misc_feature (266)..(266): n is a, c, g, or t
  misc_feature (278)..(278): n is a, c, g, or t
  misc_feature (288)..(288): n is a, c, g, or t
  misc_feature (295)..(295): n is a, c, g, or t
  misc_feature (309)..(309): n is a, c, g, or t
  misc_feature (316)..(316): n is a, c, g, or t
  misc_feature (328)..(328): n is a, c, g, or t
  misc_feature (332)..(332): n is a, c, g, or t
  misc_feature (342)..(342): n is a, c, g, or t
  misc_feature (348)..(348): n is a, c, g, or t
  misc_feature (369)..(369): n is a, c, g, or t
  misc_feature (382)..(382): n is a, c, g, or t
  misc_feature (486)..(486): n is a, c, g, or t
  misc_feature (587)..(587): n is a, c, g, or t
  misc_feature (629)..(629): n is a, c, g, or t
  misc_feature (653)..(653): n is a, c, g, or t
  misc_feature (675)..(675): n is a, c, g, or t
gcagtgtggaaatcccagagctagaatttgaactgggaatngcagtcctcgggggcaagttcaccacactggaagggctgctgaaagacatccggganctggtgnccaacaatcctttcacactgggcgacngtnccantcctgcacngacggngngncncccggagtttcgccagnagntggcccngctcntcgnnggtcacatgcaggcccnctttcttatggatgatcccgcaggaaacagttacttgcagaatgtgtatgcncctgcagatgancctgagatgnaggtggngcgtcacacgcgcncctttgnccaaaatgaggngctngggctcaatnacatgnagacagagggctttgaggcanccctgctccgccncggtagcagtgggtggctcaagggccagcctccagcgctgctctttctgtaggttatttattagtattggatgaaggcgaaggctgggagtgtctttccccccngcccttgcccatggtggggaggacatctggtctgagtcagagatctgtgcacactttctaaacagcttgtgatgcaagtgtgagcctattgtgttacttgnccttattttggaagttttgaattggcctaggaggaaacccanaaatgaaccaggggtatgtcatcncttttttcatatcaagtcctcnccctccttccccataatgctctatcctttaaggttggaacttttaagttggagaaggtggaataaagttacccctgga

SEQ ID NO: 638538 - DNA, 350 bp, Homo sapiens
cgtctgcttatacttcctatctgccactgccctgtcaacagctgaataagctgaccagagctgctgatgagagtgacagaggtatgaaggttattgaaaaccgggccttataacgatcatcgaaacgattgaactccagttaaatccaactcacacagaagctaagcacattgcagaagatgcagattgtaagtcttaagaggtggctcgtaagcttggtgatcattcgtgggagacttgtcatgcacagatgaacgagctgagctggcagagtctaagtgttctgagctggaggaggagctgaagaatgtcaccaacaacctcaagtctcttgaggctcatgcggtgaa

SEQ ID NO: 638539 - DNA, 981 bp, Homo sapiens
taagagacaccagagaaatccctcacaattttctttgtttttccattttggaaacgggagtctggcttccggtcacccaaggcttgagccacaagggtggtgatcctcagctcatggcaacctcggcctcccaggttcaagagattctcccacctcagcctcccgagggggttacaccaggtcacgccagcctgggtctcaaatcttctggacctccaggtgatctggcccacctgggcctctggaaatgtcgtgggcgattaaagggtgtgagccactggtgccaggcactcccttacttctttcacaatggtgaggacacgagtaaggccatctatgaagcaggccctcacaccagaacaataaacatcgcgcaagtggcctggatccgggcaataaaatctatggtgggttcaaagcaaccccaagtctaagggtgaaacaatggtgcgaagtacgtgccaagagggcactaagcacagagccctatgggctatctagtgccgcgaatacacgccagtacaggagcacggtctaccagtttatcctaacctgtggtcctctattctacccttaaagcagagatatagagttcctctggactacaggttagttggggcaggggatactggtgtccggaggcccctcacaaggcaggcagtgaaccaataaccatataacgggggcacataggagcctcaataggcagaatcctctacaacaacaggacaggctggggatcagcgccacgtcagaagaaagagacccaaaaaacacgaccctcccataaaaaagcacgagcaaagggctgtgcacggaggcgacgcgaaaccatatggggcaccagcgatataaaaacacatggttgagaatatcaagacgacacgtagacgaaccggggtggcaaaaatggaacgggcagccaattagggggctgcatcacaccgcgacaggaccacccaccgcgtgggataagaaggg

SEQ ID NO: 638540 - DNA, 401 bp, Homo sapiens
gtatggtggctcacacctgtaatgtccgaactttgggaggccaaggctgggtggatcacttgaggtcaggatttcgagaccagcctggctagcgtggtgaaaccccatctctactaaaaataacagaaattggcgaggtgtggttgtgcacgcctgtggtcccagctacttgggaggctgagaaactgaggcacaagagtcgctttgaacccgtgtggtggaggttgcagttagcccagatcatgccagcctgggtgacagaacaagactgcttcttaaaaaagaaaaaaaaggttgtccggacctttggtgtcccattccggtattttatacttttatttttcctggaccaaattttctgggagtagaggtgcggccctttttttcccaggcgtgtttgg

SEQ ID NO: 638541 - DNA, 1188 bp, Homo sapiens
  misc_feature (210)..(210): n is a, c, g, or t
  misc_feature (213)..(213): n is a, c, g, or t
  misc_feature (220)..(220): n is a, c, g, or t
  misc_feature (224)..(224): n is a, c, g, or t
  misc_feature (237)..(237): n is a, c, g, or t
  misc_feature (246)..(246): n is a, c, g, or t
  misc_feature (249)..(249): n is a, c, g, or t
  misc_feature (256)..(256): n is a, c, g, or t
  misc_feature (261)..(261): n is a, c, g, or t
  misc_feature (265)..(265): n is a, c, g, or t
  misc_feature (268)..(269): n is a, c, g, or t
  misc_feature (314)..(314): n is a, c, g, or t
gggcagattacccccctacttattatccagatctggcagtctccttcgtgtgatctgcccctccctgcttctatacccttaccgtgctccagctatgacaatagggatgaggtacccgatagctcagccagccccatcaggactcttgtgaaaagagaggatatgttcacacctagcgtcagtattttccctgctagggcttttaggtcnctncccctcncagngctacttgggccnagctcctgntcnacagccntcccngccntgnnatctagagcttgatgccagtaggctcaactagggagtgagtgcanaaagctgagtatggtgagagaagcctgtgccctgatccaagtttactcaaccctctcaggtgaccaaaatccccttctcatcactcccctccaaagaggtgactggtgccctggcctctgtttgattgaaacctctaagcccaggtcttgcacaccagctgatcttgtcccttggagtcgtgtaaaccacagagctgcatgggggattctggaccatagtctccttccacagccccagcccttgctctcaacccagtgagcatccactctccttctctgtctcatgtgtgctcttcttcttgctacagtataattgtactctactgatatctaaatattgatttctgccttccttgctaatgctccattaggaagatattagtcttggggcgcacggatggagtttttcggcctcatgtgactttagacaacccccgcacacactggaaaacgcatatacctatagttcacaagatagtgagcattttgccaaaattgattaatataagaacctctcagtgataagtgatgtcatctgtcactataggtcatacaatccattcttaagagtacttgtctatcccgtttgcactgatatactgtctgtccttctccctccggggttgcatgtacctactaagggcgccgagtccctggtccaccacgcgcattgcccttagttaaaaggcttccttcgtttcccccttgttgggaccacccccgtagtctgtggctgacctggaggagcccgtctggctttggcgtgactttgctcacgcggtgattggccaattggctagggggactgccattggggggcgctttaaaaatgctaaaggaagtactaggggccggggaagcattggtacggccg

SEQ ID NO: 638542 - DNA, 131 bp, Homo sapiens
cttattgttgtctggtatacgggctcttttttggttcatttgaatcctaaagtagttcttttctaattctagtgaagaatgtcaatagtagtttaatgggaatagcaatgaacctataaattactattggg

SEQ ID NO: 638543 - DNA, 243 bp, Homo sapiens
ctatgttaagaaaaaagatagcaacaaggcttgatggagccagtgttctgtgctaattgtgatcattcaaattattaaacatcaaccttaacagtcttcttggtgcttaaataataactaaccattaacattacccttttttattagaataatcaagttctatatgaatatggacagaataatttatttcaaaactgtcaatcataaatgtcacaactttagttactagggggtaccgagctc

SEQ ID NO: 638544 - DNA, 544 bp, Homo sapiens
  misc_feature (210)..(210): n is a, c, g, or t
  misc_feature (213)..(213): n is a, c, g, or t
  misc_feature (220)..(220): n is a, c, g, or t
  misc_feature (224)..(224): n is a, c, g, or t
  misc_feature (237)..(237): n is a, c, g, or t
  misc_feature (246)..(246): n is a, c, g, or t
  misc_feature (249)..(249): n is a, c, g, or t
  misc_feature (256)..(256): n is a, c, g, or t
  misc_feature (261)..(261): n is a, c, g, or t
  misc_feature (265)..(265): n is a, c, g, or t
  misc_feature (268)..(269): n is a, c, g, or t
  misc_feature (314)..(314): n is a, c, g, or t
gggcagattacccccctacttattatccagatctggcagtctccttcgtgtgatctgcccctccctgcttctatacccttaccgtgctccagctatgacaatagggatgaggtacccgatagctcagccagccccatcaggactcttgtgaaaagagaggatatgttcacacctagcgtcagtattttccctgctagggcttttaggtcnctncccctcncagngctacttgggccnagctcctgntcnacagccntcccngccntgnnatctagagcttgatgccagtaggctcaactagggagtgagtgcanaaagctgagtatggtgagagaagcctgtgccctgatccaagtttactcaaccctctcaggtgaccaaaatccccttctcatcactccccccccgggaaaagattaggacaggacttcgttttacaaacctgtaacccagggtcgtgacacagctcattcgtgtgcctaggacgctgtaatcagagacatgctggggattttgctagtcctttccaaaccccacgctgctt

SEQ ID NO: 638545 - DNA, 489 bp, Homo sapiens
  misc_feature (210)..(210): n is a, c, g, or t
  misc_feature (213)..(213): n is a, c, g, or t
  misc_feature (220)..(220): n is a, c, g, or t
  misc_feature (224)..(224): n is a, c, g, or t
  misc_feature (237)..(237): n is a, c, g, or t
  misc_feature (246)..(246): n is a, c, g, or t
  misc_feature (249)..(249): n is a, c, g, or t
  misc_feature (256)..(256): n is a, c, g, or t
  misc_feature (261)..(261): n is a, c, g, or t
  misc_feature (265)..(265): n is a, c, g, or t
  misc_feature (268)..(269): n is a, c, g, or t
  misc_feature (314)..(314): n is a, c, g, or t
gggcagattacccccctacttattatccagatctggcagtctccttcgtgtgatctgcccctccctgcttctatacccttaccgtgctccagctatgacaatagggatgaggtacccgatagctcagccagccccatcaggactcttgtgaaaagagaggatatgttcacacctagcgtcagtattttccctgctagggcttttaggtcnctncccctcncagngctacttgggccnagctcctgntcnacagccntcccngccntgnnatctagagcttgatgccagtaggctcaactagggagtgagtgcanaaagctgagtatggtgagagaagcctgtgccctgatccaagtttactcaaccctctcaggtgaccaaaatccccttctcatcacgctcacaccaaagaggggacaggaccagcctatgacggacacagacgataagcaccaggtctagacaacagctgtcgaccctaggagcagt

SEQ ID NO: 638546 - DNA, 230 bp, Homo sapiens
attgtatcgttagcacatctttggggattcctctaaagattctaccaagcgtgcttacagcaccgccttgctccgtcgtgcacgactctcttctctggagacccccctcgcgttcccaggagagcacccttctttccctgctcctgaccctgtgggacaagagggctattggctcattcccagccaggctctgccactctttctctgttttcattctcctggatcaatcc

SEQ ID NO: 638547 - DNA, 210 bp, Homo sapiens
ggaatcacaccggggggtgccaactgtcatccattagccatccccaataaacccatgaatgttcagcctgaatcagcatagcaaagacctcgatctctacagaaagaaaaacacttcaataaatgtaaccaggtgtgagtggcacatgcccatgatactcaaggaggctaacgacggtcaggttcacctcgagcccatggatgaccgagg

SEQ ID NO: 638548 - DNA, 289 bp, Homo sapiens
caatttttttctttgtttcccgtcattgccatttagtataccagttttgctaacgttttaaaatgaagtcgttccctcataatttatggttttgtccagcccttatagaaataagctgttcttttgaagttgaaatcccccgtaaaatgttgaagaaggatggggggttttttcatatttggcgtttttgaaaccctttgggtttgctgttgtgtgaagattgccctttcccctgattttcctttgtttctgcagaacatagagaaaaataaaagcctaacgaatagta

SEQ ID NO: 638549 - DNA, 239 bp, Homo sapiens
  misc_feature (23)..(23): n is a, c, g, or t
  misc_feature (49)..(49): n is a, c, g, or t
  misc_feature (112)..(112): n is a, c, g, or t
  misc_feature (131)..(131): n is a, c, g, or t
  misc_feature (198)..(198): n is a, c, g, or t
  misc_feature (213)..(213): n is a, c, g, or t
  misc_feature (228)..(228): n is a, c, g, or t
aaaaactctcaccaaagcaagantcctgctagcaggtttcccgcctcanagattgaagcccaggtcgccacacaggaacaggctcctccccgctgcaaatggcgtgaacttntggaggccccaccccgttntcccagtgcaaagaaactcacattttttctatctcattacctgtggtcagaaattacctcatgtggnttcaacagggcattntgtactaaccatggnttattgaaaat

SEQ ID NO: 638550 - DNA, 118 bp, Homo sapiens
tcctagattagaaggcaggaagggactgaacattgaagcagcattcagagccggtgtctggcgcgacacacttgggagttaaagtccactttactgtgcgtcgaatgtggtccgcgct

SEQ ID NO: 638551 - DNA, 1885 bp, Homo sapiens
  misc_feature (255)..(255): n is a, c, g, or t
  misc_feature (984)..(984): n is a, c, g, or t
  misc_feature (1126)..(1126): n is a, c, g, or t
  misc_feature (1600)..(1600): n is a, c, g, or t
  misc_feature (1711)..(1711): n is a, c, g, or t
tctttattattattttatgggctggtggtttatcccctcggtcccggctacgggaaatttctttccagtgtataaaatttcatttctgtggttccccgaggccatagtttcaacagcacatacgtgaatgtgcaattctcagcatgtgtattttccaccagtggctcgtggtaagctgggtgctccagaagtgtgtgcatgtgagcgggtggaagacaacacctctcaccatgtgtggtgtctcgtggtgtgtgnaccctcatgtgtgctccgcgtggaagttatagtgccagcgcgacaacacgccataacatgtggcgcgtgtatacacaggggacacaaatctcgtgatgtgtggaatctcctcctatagagaagcacgaggagtgtgacgagctgtgcgcttctcttgtgtggtcacctgtgagcgccctgtggctctctgtggtgagcctgtgcccgcagtgtgtgacagtggtgtgacactgtgtctcgcagcctgtgcgtgtgggcgacgacgcctctgtgagagagtgtgtgtgcgcaagttgtggcacagaccacccggcgcgccctgtgcccacccggcggtgtatctcaaagtgagaaggggccccaagggggacgagagacacaccgtgcggcgatgggtgggcgacacgcccctccagagggacccccacagagagagacaagccccccagatcagggaagacaacccctctcgcgttgagagtgacgcacccgacgcgcagacgaaacctcgccgcaaagagagcccattcagttgacaacacacaagcttcaacaacacgaacaccgccggccccccaaaccaaaaggagaagcgagagccttcaacacagggagtactccccccgagagcaaaacactccaataaacccacacgtggtgtgccaactgcgaggctagaagaaccccactcccgctagacacacgacgactccactacccgcagcacantatgcaccggggccggtggcacacacacgcttagtggctactaccccacccagcggagacggcgcggcgcagcacccccaccctccacggtgggagcaagcaacccacgccgcccaacggacatctccaccccaccaacaanggcggcgttgcgccgacagaccttagataaccaccaccatccgcgcacgtcgacacacaactatcaccccccccatatcaccgacatcccacacacacttatcccgcactcttcaccaccctcaatacaagagaaccacaccaaaatacaccctacgccccatcatgcagggccaacaccacaagggcgccgctggtgcagcaaaccactcctcgggtgacactccctcacaacaacaccccccgggagggcaaagacacccccagagcacgcggaaccacacagcaacacagacacatcctcgaaactatatggaccaaacaccgtgcggcaccgaaacaaacaaccgaacctcagccgagacacaccaccgcacaccacacatacagacacaacagccaacaacccccaacgtactacataggggaactccacagagaaatactcacctacagcgacacaacaaaagcgtgngcagccgaccaacccataacaacggtagacaactgatacgaatccacatcccaaaaagcccgactctcaatcaactaccagatgcgacgcaataatccacgaagaagatcnaaactcacccactaacatgacgcacacaccctcatcaacaccgcgctcccccccctcataacgcaacgcagccacaccatgaactagctacaacacagacaaaacatagcagacaatcaactaacagacatcgtatccaaccaagcagaaccaacaccatccgcatacataaac

SEQ ID NO: 638552 - DNA, 534 bp, Homo sapiens
  misc_feature (6)..(6): n is a, c, g, or t
  misc_feature (79)..(79): n is a, c, g, or t
  misc_feature (142)..(142): n is a, c, g, or t
  misc_feature (274)..(274): n is a, c, g, or t
  misc_feature (279)..(279): n is a, c, g, or t
  misc_feature (490)..(490): n is a, c, g, or t
aagccnatattttaccgtgatcactggaggtaatcaagatcagaggattgcaagtgtgtaaaaccccaagttatgaggnaaattgtaggcactcctaccgtaatgaaaatctgcccttgcctgtccttcccatattgttaantcctactggtgtttgtttccccacccacacagtatggaaaaaatacatgttgctgtctccctccctttcctaaagctgtcccatctaaatacaaagcaagtttagaaatgttttctcttcatgccgggcgcnggtcncacgcctgtgatcccagcactttgggaggccgagatgggcagatcacctgaggtcaggagttggagaccagcctggccaaaaccccatctctactaaaaatacaaaattagctgggtgtggtgcacatgcctgtaatcccagctactcaggaggctgaggcaggagaatgcttgagcccaagaggtggaggttccagtgagccgaaaattncgactgcactccagcctgggtgacaagagcgaaatccgtctcaa

SEQ ID NO: 638553 - DNA, 1071 bp, Homo sapiens
gaatataaagccgtgtgtttatatgaagtgaccttatctgtttcctggataatacctttaagaattaatgttcctgagtcaggcgtgcgatggtgctgctgcatctagtcccagactatttgggaggctgaggcaggagaagatcgcttgagcccaggagtttaaagctgcagtgccctgtggttgcgacctgtgatagtaactgcactccagcgctgggcaagatatgcgagagctcactctccacaaaacagaagaaggataataaccagagaaaataggacatgatgttctgtatgagatggcctattcacttggagtgagtactcagttcttacagcgttctatcctagactcggggcattctaagatgtttgcaaatctagaacgagttctttacccaggcatcgctttgagagctgttgacctgtggtctgtgtctctatctaatgttgtctgtccctcgtgcttcctgtactttgggttccttctttgaacttctatctttcatctgtctttcggtcacttttgacatgcgtatatatgggcagggcgtgagagacagttactgagcacctgggtgagcacggcctggcttcaaagattggagaagagcttctggaaccagaagccctgtcttcctccagtgtctcaacacggtgtttgctcttcagtcataaccggaatctgaatcacagaacgtcatttttcaaatatccatgattactccctgtattggaggcttagcctgaatccatgctggtttgtgcctgtaaccaggtctcccaagtgcactcatccagggtcaggggttcagatgtgtttaacggagacccctatattcagggcacagttggcctgaacacctgccgatggcgaacgcacctgacacaatctcgtccaggcccctattcaggatcgcacagaaatccacgtgaccctacagttggacaatcgccacttaacctgtacaggcaccatccggttgaggcccactggctgaatcgtagacaacgaccaaactaactggctcgcatttacaccacacgccaacaacacacaaacaccagc

SEQ ID NO: 638554 - DNA, 176 bp, Homo sapiens
  misc_feature (32)..(32): n is a, c, g, or t
  misc_feature (131)..(131): n is a, c, g, or t
  misc_feature (155)..(155): n is a, c, g, or t
  misc_feature (168)..(169): n is a, c, g, or t
agcgggcgcagagcggtttggtcgttcgttgnggcggtgctgagtttttcgctcgtcagaactgcggctcttcactacgggcagcaggaagcggcagcgtgcggtccgcgagacagtggcctaaagacttnccggcgttgggtgaacagaacacntcggcccgaaccnnaagcaga

SEQ ID NO: 638555 - DNA, 201 bp, Homo sapiens
atgatgaaaaggcttcttgtagtcccataactttccttgtgaactaatgttgtgatcccctcgtatacagtcacctgcatagttcctacaggctaatgtggtaaaactgtttgactttccaatttaaccttaggcttctgttgcttataagcgattcactttgctacggctgggaatatggggaaacttaattatgggcct

SEQ ID NO: 638556 - DNA, 1173 bp, Homo sapiens
  misc_feature (1173)..(1173): n is a, c, g, or t
cggtggggacggggcggggcgcagccttgcgaagccctaatcgcatgcgctggggaggggggcggctgaaaggggggcggtggtcgtgccgcgcaagcttgtgattgaatggtggccctgtgctcagactggtcacggggggaggctagccggctgtggaccagcgggaaggcggtggctggggctcgtcggtaggccatcgcccacaggtctgtccctggtgaggagctgcgccctgttaggctgcttggacgtcggtgcgaggcaggcgcgcagcgtgacagttcctggacagccgatcgcagtcgtgcgatggagatgttactggcaggcttggggcctgcgtgtgcccaggagccgtgctggtggcgggaaacgtctcatgcctaaacgcttggaagcagccacccccaatgcccgggcattgtcatccgagaccatgagggcgaggcatttccgagaactggattgcgtgagcagaatagagaaagcttagcggaaagagctcctttgaggcaagtccccctgagccaaaaaattaccccttgacttttcttcattcccttccccgacaaggggccccggtgttgggcgtggaagctttcttgagacaaacgttcccctttcaaggtaacaaggtggggacccacgcttcctttcacgtaggtcaaagctggagcgttggcgtagcctttagggccttcctccaaggcctttgggatggttgcgccatgccgcttctttcggcttatgggcaaaggctatggggggtatcaaacttccccccaagcgttttcaagtttcgcgttggtgcgttggaaaaacacgggcgatggttcgcgttgtgtggccttttttttggaagtagtgttgtgcgaggacgcgaaaagttggcaatatttttacacccccaaagattccctgtggaatttatagcccccacaaaagaatttcctctgggacgcgccaatgcaaatcccgaaagacccaaaggattaggccattctctaggcgcacaaagagaaagagttttggggagatccatctaggaggcccccatttgcaaataacattagcaggagagagagaactttccccagaggtgggttagagaactcgtgtataagccaagttttgtttcaccaaagtatttcacaatatttggcatatacn

SEQ ID NO: 638557 - DNA, 961 bp, Homo sapiens
gattgtctgcggttcaccttgcctcatcctgtctgtagcgtttcaggagaaccggaccggctgagagctctaaaggagtcaacgcgtcgaactgtgtggtcatccccaggtccagttccggtgtgttccaggtagcctacgtggttgttccagatagccaagtggggttgtcatcggctttcggtcccttgaagggccccctgtttggtgtccacagtagagccaccctgtgaagagtggcattcacaagttgatcagtgactacgcagactctgtgcccgaccctgaggccctgaggtgtgtaacgtggactacgttcagtggaggcatatgaccagaagatcgctgaggaagaagctaaggccaaggaggaggacgggggtccctgacgaggacgggctgcggtgtaacggtgaccccagtccgtgggcctgcgcgagctctcgtgcatccgcaccgtgatctcgaggtcagctcagtcttgcgcggtcgcttggacgaggcgacgagacctggatcgcgcatgccgtaaaacgagctgctgcaacttcctacgccctggcagcatcgagagagcaagatggagcatctagcgcagctgcgcaagaagttcgaggaggacaagcagaggatcgagctgactgcagggcccagcgcaaattccgaccgtactgagctgtgagagccgcagcgaatggactggaggtgcagggccaggaggaggcgaggcagggcctgcagcggtctctgagaggccgagctctggccaacgggccacaggttgaaggccaccgcgtccaacagccccatcagagtccacacaggccaggagggaaggaccaggccacccctcggttcttgtgcttcagcagttcctggggaccaaggcgtgccgagaggaggacttgtccttcctgcttcttgcctccacacccttaactccaggacctggatgaagtcc

SEQ ID NO: 638558 - DNA, 284 bp, Homo sapiens
  misc_feature (6)..(6): n is a, c, g, or t
  misc_feature (26)..(26): n is a, c, g, or t
  misc_feature (32)..(32): n is a, c, g, or t
  misc_feature (124)..(124): n is a, c, g, or t
ctacgncgggcccggcctatttaatntttttnagagatagggtctcactgtgttgctccagctgtagtgcagtggtacaatcaaagctcactgcaatctccaactcctgggttcaagtgatccncccacctcagccttccaagtaactaggactataggtgcaagccactatacttagctcatttgtaaaattttttgtagagctgagatctcactgtgttgcctagctggtcttgaactcctggcctcaagcagttgtcccaccttcagccttccaaatctct

SEQ ID NO: 638559 - DNA, 402 bp, Homo sapiens
atctcagcacggtaacatttcttgcacggcaacagccctaccagttccttcacactgtggaacaggaactttcacaaaccgctgagcagcatgtgcttttttgtcactgttgttgttactcccataaccaatgttgggcatcaagatctggcccttaaatcttctacgaacactgttgtcaataccacggggtttctgcttaattttgacatatcagtcagactgatgccagatgaacgtcttggtcctggttttgatgatcatgggcttcgtgaggagcccgagtgtggccctgatgctaagtgggagatggctgccaactgcataggcagcgccaaggaagagagctcaaacccacgttgttcaaagatcaattgtgatcatttgacagtgttattgtga

SEQ ID NO: 638560 - DNA, 419 bp, Homo sapiens
  misc_feature (1)..(1): n is a, c, g, or t
  misc_feature (154)..(154): n is a, c, g, or t
nttcggcaaaaggcctttcacctactgccatgattctgaggtctctccagccatgtggaactagtctcactccgtcacccaggctagagctcagtggcataatctccactcaccacaatctcccgggggttcaagcaattcccctgccttggcntcctgagaagctgcagacactcaatgccagactgtgaaatcagccaggagggagactgtccctgcaaagcccaggggcagagctgcccaagaccatgggaacccaccatttgcatcagcatgacctgaatatgagacctagagtcaaaggagatcatttcggagctttaaaatttgactgccctgctggatttcgggcttgcatggaccctataacccatttgttttggccaatttctcccatttggaatagctagatttaccca

SEQ ID NO: 638561 - DNA, 311 bp, Homo sapiens
tggagtgccaaaaccttctgctgactactggtgcaaactttaataaaaaggacaaatatgggagatctccactgcactacgctgctgccaactgcgattacccgtgcctgtttgctcttgtgggatccggagcaagtgtgaatgaccttgatgcaagaggctgcccacccctgcactatgcagctacatccgacacagatggccagtgcctggaatacttattcagaaacgatgccaatccagggatccgtgctacgccaggatacaccgcagtacattatacagctgcttatggacaccggctatgtctt

SEQ ID NO: 638562 - DNA, 1048 bp, Homo sapiens
cggaacgcgtaggacaagaccaggtctactgtgatagagcatagcatctaagaatctttaaggaaggtttactactataaaaccaacaaaatcaatatgggtggcattggcaattggagctccgaattccaagaatgatagcaaggaatctttagggggtagatagcttccctaataatcccagagatggaagtgaggggtaactcccagaagtgggactaattccagattagcccctaggagagcgttacggcatctgtactacgctggtagcttcccttaataatcacacacgacgtgttagagactcagggtaggcgtggtgggggtgactttgaccggtttggtcgtggagcagcaatggcaatctcctagaaacggttctaacagacacaatccagggtacgaaccctgagtgaaagggaacacgtgggggtttttggtgctgttcaaagtgtcgtgcgctctgctgagggggggatcacaaggaagaagctctgttggtccctgagaccgttggctaggaaatggtgaagccactcgcttaggtgaatcgtgtcaggagatggagaggtccgcgttatcatcatttctatgacgctagcagctggactaacacaccacatctaaagaggcgaggcactaatttggaaaagaagtcccctcacgaagggggaccccacaagtgtacccttgtttgaaccctatctttatggggtgaccagtgtggttgcctctatacagtcgggtgagccattttttacaagatagacctgcgtgacagaagtctgacaaagttatgatcatggaggaagaatgcgtcttcatgtgtggagacatttgtgggagagagcagcctaagcctttgggggggggacgtatgttggagccatacctagggatttaagagccaagggaaaattaccatttcaaggtgttaggtggggcacacaaacaagatatgattgcgtagaaaaaatcgtcagaaagatagtttttagaaattaccaggggggataaaatagaatagagggataggggtagatac

SEQ ID NO: 638563 - DNA, 244 bp, Homo sapiens
gaagaattttccatgtatttcgccccacacagggacagccttcctcatcagtcagcatcccccaccagagtggtatgtattgttacagttgatgatgccgacattgacacatcatcacctaaagtccatagtttacactagggttctctcttggtgttgtacatgctgtgggtttggacaaatgtataatgacatgtattcactattatggtgtcatacagaataatttctgtgcccatttcaa

SEQ ID NO: 638564 - DNA, 868 bp, Homo sapiens
  misc_feature (384)..(385): n is a, c, g, or t
  misc_feature (435)..(435): n is a, c, g, or t
  misc_feature (464)..(464): n is a, c, g, or t
  misc_feature (571)..(571): n is a, c, g, or t
agcggcttttttcagttctgtcttcctgaggctgctgtttctgggcatggccagggatcttcagactttacaaaccagttgtgcagagccaggcatttcaataaggaacaaaatgctgagtaacaacatgaagtcagagtgttgcttgccaagagctgggaggcctgggtggtttcccaatcttaaagaagcagaaggatattaaagtgagcctcccaaaggaaaacgtggatctacttaccaacgcagaaaatgatacacacggattcgatttaggcacgctacattcaaatgacttggaagagcaggttctctgagccaggatactaaagtccctgtttaggaaagagccacgttgtatgtttaccctaccacaaagatacnnaattctggaggaaagtggctctgggaattgaacagtggctcagtgatgtnggggccaccaagtctgcaattctccctanctgttcttcatggttgtaagatgactgctgcaattctcggcatcatgtgcatgttaatgtcaggaggaagaaaggaagagggagcactgggatgttacattcatttngtcaggaaaagcaaagcctttccagacagctccgaaacttgcttacctctcattggccagcaccatcacttgaccacttgtccactcctagctgcaaggaaagtggcaaagtagaaggtatttgagaatgtctgctgggttagccaaaacaatagtgacttctacacccaattttctgggcactgcagaagtatccttgagtcctatgtgatcagagggagagcaaacctcaataatgaaacagattcaatttccatcacccagtgagacaccatgggattagaataaatttttaaa

SEQ ID NO: 638565 - DNA, 309 bp, Homo sapiens
gtgcacttatatttggcataatgtcccatgttgtagcatgtgtctgtacaccattcttttaaaaggatggataatattccatagtgtggatttacaacattgtgtttgttgacagacacttggattgtttccgccttttgactgttatgaaggatgctgcgtgaacattgtcacacaagtatctgtttgagtccctgttttcagtttttcctagggtataaacctaggagtggaattgctgggtcatatggtaactctgttcaacttttcaaggaaccaccaaattctttttttttcctttatttcttt

SEQ ID NO: 638566 - DNA, 400 bp, Homo sapiens
  misc_feature (69)..(69): n is a, c, g, or t
  misc_feature (82)..(82): n is a, c, g, or t
  misc_feature (115)..(115): n is a, c, g, or t
tcagacatgtgagagttgctgcttcactgatgaggtctttccctcagctcgggacctccacagtacacntaggaacctctgnaactccatcctccctacctagacccatagtgcntggccctctcctggtgccattcaccctcaacttcaccatcaccaacttgcagtatgaggaggccatgcgacaccctggctccaggaagttcaataccacggagagggtcctacagggtctggtgagagtccaacccatctcactctgcctggcccaccttaccagattccacctgcatcacccatgcccgggatatagaagaagatcccatgtgaatcaccttcgaccccgagtcacaagccctacccactggtgtcagccccacccacctatctcatgtcatac

SEQ ID NO: 638567 - DNA, 185 bp, Homo sapiens
ccacgttcactaatgtaatgaacccatgcatatatacgtatcatatgaatattttagcagtgtcctatgttgaatctagttctctgcattaccattattactgttaaagtattttttaaatgcttaaaccaaaaaaaaaaaacaccaaacaccacacacacacaccaaaaacacacacacccccc

SEQ ID NO: 638568 - DNA, 169 bp, Homo sapiens
  misc_feature (124)..(124): n is a, c, g, or t
agtgatctttattgactgtactctttatcctgctattacctgatttaattgataattttttgtgtttgtttttttaggacgactataccataggttggcattggaattgcgacatgcagaaccngtggagattaatgtgctaaaatttgatatggtgcctgtttatgct

SEQ ID NO: 638569 - DNA, 232 bp, Homo sapiens
gaggttacatgtatgtgcatgccaggtatcaaaggtgtgcatatgtgaatcagaaataaatgaatgtcagagcaacccttgtgtagacaatgggcagtgtgtggataaagtcaatcgtatccagtgcctgtgtactcctggtttcactggtggccaaatatgcagattgatattgatgactgttccaatactaccgtgtctgaatggagcaacagtgtaatcgatcacccga

SEQ ID NO: 638570 - DNA, 357 bp, Homo sapiens
tcgactttttttgaaacagagtcttgctctgttgccaggctggagtgcagtagtgtgatctcggctcactgcaacctctgcctcccgggttcaagagattcccctgcctcctgagcagctgggattacaggtgcacaccaccatgcccagctaatttttgtagagacagggtttcaccatgttgctcaggctcatctcgaactcctaacctcaaataatctccccgccttggcctcccaaagtgctgggattacaggcgtgacgactgcacctggccattgagtatctttttcatgtgcctaataggccctttaggttatctttttttttggacaagttcgtgtcgacgcggccgcg

SEQ ID NO: 638571 - DNA, 195 bp, Homo sapiens
gcgtatctgatggggggtgccagaccccaactaagcaacccgaggaaatgggaggcagtgtgaggtggatgctcatggtgagttcttggtcctgatgcaaatgatggagcatggagatggatgcctggatggcagtgtcccagtgcactgcggtgctcttgtaaaggccttgagtgcctcctgaggcctatccca

SEQ ID NO: 638572 - DNA, 437 bp, Homo sapiens
ggatccagttcgagtatggcagcagggctccgaccctgcgatgtggcatccacgctgaccttcctgcgcctgatgtccaccgagtgctcccagaacatcacctaccactgcatgaacagcgtggcctacatgggatcagcagactggcaaacctacaagacaggcccctgctccctccagggctccaacgagatcgagatccgcgccgagggcaacagccgcttcacctacagcgtcactgtcgatggctgcacgagtcacaccggagcctggggcaagacagtgattgaatacaaaaacaccaaagacctcccgggctgcccggtcaatcgatggtgggccccctagggacgttggtgccccagaccaggaatacggcttcgacgtttggccatgtatgcttcctgtaaactacctccatcccaatccccggtcga

SEQ ID NO: 638573 - DNA, 727 bp, Homo sapiens
tggtattttaaataaagacggggtttcaccatgtaagccaggatagtctcaatctccgggcctgtttgatccacctgcctgtggcctcccaaagggctgggattacatgcatgagccaagccaagtgttgcccggccaaaaattaaagtttttttaaaagcctgatatacagaaaccattcatatccatgtgcagtgagtgcgtggacagatcatttacaccatctcagaggataagtgtaatttcgtgtaaggggatccataacaattctccaaaagtgctacgaataaagataatttcactctttaggaaaaaaaataattaacccacgtgaagacccaccgtggtataccttacaaacaaaaaatcctatccccaaattcacattacaagaagcagcaagtgaaagatgacttattcattcatagacatggtcactacagtgactcaaatacattggtcactcagtgctcaatacagtgggatacgaaaattacccgagacatctccatctgagaaaaaaaaacccataaaaccgtgagctaaaagaagccaagagaagggagacaccccaggggtagggccatgacagataccactaaaagagcagagtgccatagaaacgtagactgagtaactcagacaaggatcagaacaaaactgggagatcacgcgcaaaaacctaagagcaaacagaagggcaaaaaaggacaggtaaaaaaccgga

SEQ ID NO: 638574 - DNA, 916 bp, Homo sapiens
cggacgcgtgggttgacaagagaggagtgtatccaatttatacaggaattacaagtgcagtctgattgtgaatccttgtcttggcttcttagccttgagagtttttaaaagttgaatgtgaaattccttatgaaaaagttccaacaaagccaaactttaaaagagcctatatgtggtcaatcactatttttgctgtactttatgcaaataatcaggccaaatataataaaactaaaacttattttgcaaataaatggtcctgttatgatttgcctttaatagaaaagggggactggagagagaagaattatgtttcagaagaaaatgatagcatacctgtgttagattctagctttgtccatgtttttaagttgtaattatttgcctacatttgaactaaatcttgaattctttcctggctacaagtctccaagctaacatttaaatttttttctcctatgtttctgacttggaataagtagaagttaaaactatgcttttcttgaagccctgcagactggagcaagacaacttgaataaactatgggaaaaatcactacagcaacttatatataaacagcttttatgctttgttgatgtatggaatactcagaaagtcactgcaacacctgatttaaactacaaccaggagactctgtcagattaacactaccatctgaagaactacgagactctcaaaaactagtgtatagtctacagtagatattaacttgtttcttctgtttcatagaaaccctttattaaaatctgttgcgtcctaaaaaaaaaaaagggggcgcctaaatcccggggccgctaccgccccttggcaaggccagggcgtaaagcgggcgtaacccgggacagccggtgggccctggggtgcccccaccgaatgggcccccgcgtctaacac

SEQ ID NO: 638575 - DNA, 180 bp, Homo sapiens
  misc_feature (161)..(161): n is a, c, g, or t
cactcatccaatcatgtctgcttagcagtgctccagataagagatttcaaagcataattaatccaagtactatttaacgtggcccttggttggttcttcttagcagctgttgacccaaaaacgcacattggacgcaagagaaagacactgtgccatttttngctgagctggttagggatg

SEQ ID NO: 638576 - DNA, 88 bp, Homo sapiens
tgggggccagtggcgtaagaaacttgggagtgagaggtttgactgagcttgggaagggagcttgggaaaacacaacttgtgaaatcag

SEQ ID NO: 638577 - DNA, 241 bp, Homo sapiens
  misc_feature (81)..(81): n is a, c, g, or t
  misc_feature (151)..(151): n is a, c, g, or t
  misc_feature (238)..(238): n is a, c, g, or t
  misc_feature (241)..(241): n is a, c, g, or t
aacaaacaaaaaaaaaaccaaacaaaaaagccaaaaaacaaacaagaaaccaaatacaaccctccccccaagacaacacgncagtgcacatggcttgttcacttcacagccccggacgcaaccttcccggacgggcgtggaagcaggcagncggcctccatgcactttatgtggagacaactggccccgcccgtggcctcgtgctccgcagggcgcccagcaccgaccatcggccccnccn

SEQ ID NO: 638578 - DNA, 207 bp, Homo sapiens
attccgagcatacacccacatgagtctaggcacagctctcctatccctcctgtctccagccctccggagcagaaagtgggtctttatcgaagacaaagctgaacttcaagacaaaagtgaattttcggatgtggaccagctagctattagggattatgaggagtttgaatcatcttttgaatctgcagggaacatgccaaggcagtt

SEQ ID NO: 638579 - DNA, 414 bp, Homo sapiens
  misc_feature (347)..(347): n is a, c, g, or t
atcacatcatttatgggactagaaattgtggagaactcattccctccaacaccaacccctagtgatctcattctagtgagtaaaacctcaggtcagttgattgtaaatggatttttttttaaaaagcttaattcaggcttttattgctcttgtgttcagtggattcatcttgtgactggctccagattgtgcccttctcccatcccacaccaagctgatttgcaaattcacacaattgttcccaaggagagaaaattgatgactcagtataaacccatcactactcctagaaaatataattcatgaatgcattccttattcaaaaacatttagtagcatttcatagnggaggagatcagcatattatcaggagaaaagattcatgccacattttggtttaaaaatctggtttca

SEQ ID NO: 638580 - DNA, 1675 bp, Homo sapiens
  misc_feature (549)..(549): n is a, c, g, or t
  misc_feature (1675)..(1675): n is a, c, g, or t
ctggagactgaggaggtacacagtgtcctgtatctaaaaaggagataaaaccggaagcgtagagaaccgaaagaagaagaaaaagccccagcgggtgcgaggggatggtacatctgaagaagctctgggtgacccgtgtgaacgacaagactcaaactcctggttccctgctggtctctgagtatcccacagcagactggatgtatgagacttgatgtaatgatgagcgtgaagagatcctgtaacacatgtatagcggatggctcgctaatcttttactactttgctattagaaggatgcgaatcgtattgatggtcattttttaacgtctcccatcatgggagtagtcgtgggtagaagaggagagggaatggagacagggagaaaggcgatgcgcaagaaggaaagaccttggaggaaagctggggagagaatctactgctcaggtcccccagagagagaggaacggggagatttaagtacacgaagtgcagagcgagcaacgtgtgaccacgttgcactgaaatgtaccagggcacatgtaatgnaacggagacaagggagcaacagtacggcccaggaagtcaccacgcaaggactggtcccacaagacaggcacagttagcagcacagaaggcatggagaactcggcatttccatcgttgtcgggcttgtacacatcggatgtccagacgtaggggtggggcctcaggggctcacggagtcgttcagataggggagcaatggacaaccgaattgatggaaccaaagacgcccaagagaacaccgtgaaaggcctccatagggaatccaaccattcccacgtgacccacgagtcgcggcaacgtcctgatggcccgttgttaccccagcagccccagcttgggttgtcaactaacagggcggccaaaaattaaccgtggcacggggccaaaaaacagggggggcaatttggacgaaaggccgcgccaaaatatactgaagcattgaaccaagcacttaccattcgacgaagaacgccacccagggggccaattccccaggggaaagacattgcacgaagaaaaggggcccctcggcaagagacaggacacggggagcgagaaaccacgaacacagacacagtggacacggtcgcaaaacaactgcgcgacgagaagaacaaaggaccccgggcctaaagagctgggcgcccacgaagcttggagccatacgagagtggaccaacgaaagagcctggggatgaaatggcatgctaatcacacgtggggccaaagaaccgaaagccagacaggagctgaaccacaacccagaggaggaaacagtgaaacaagtaacgaggacagcggacagagcgaacagacaacagagacaaggagagcaaacaaccagcggaacaagcagcagagcagacgacaaaaagagaaccaatggagtaacgacacacagagaccaagctagcagccagagagcagcccaccaaggagataaccaacaagcagatacaacgcccacgcaaccacgaatcagcggaagaccagatcagcgacaaggcaaaaagggaacgaacaacacaaagagaaacgaaaagaataaaaacaaaagaaaacaacagaacgaacgaagaaaacaaaaagcagacacacaagagcaaaacaaaacagaaagacagan

SEQ ID NO: 638581 - DNA, 661 bp, Homo sapiens
ctggagtgcatgttcagactggacattagcccatatatagcccctggctctacagagagcggtagagctagctgatcatggagtaatatgcctgcaggccgagactgatcctaggactgaggcgccaggatcactcaggcccagcagtacaaggctgaagcgagctatgatagcgtcactgccctacagtatggacaacagagcacgaccctgacacttaaaatagtaatattcaaccaatgggacactagctattcaccagggagattgaggccctagccatgagccaggcagatgatcgcagctgcgatgtgatacgttagggaacagaccagacaatggctacctgacgttgcgcagctgacattgcaatgcgagtctgagtaggacagaagatactgtcagacatgcactacggcggcatacgaaagaccgaaacaagagtcgctgagaaacagcgggatagtatggggctctagcagaacgtgatgatggggtctctgaagataaactgaatgatttgagatgccggacagcctgagatacctgcacttggcaccggaacctgtgcttagagtaggcgcatgctaaatctcaaggagaggcccggcacagcagtgctgtcgaacagaactttaacgggttcgctgtcctggctccc

SEQ ID NO: 638582 - DNA, 122 bp, Homo sapiens
ccgaacttgctatgctggttagtccctgagtttgcatggctggttagtccgcacttgcatcgctggtttagtcttgtagcctaacgaagacctgaaaacctgggaaggcggcggactttgca

SEQ ID NO: 638583 - DNA, 902 bp, Homo sapiens
  misc_feature (137)..(137): n is a, c, g, or t
  misc_feature (338)..(338): n is a, c, g, or t
  misc_feature (402)..(402): n is a, c, g, or t
  misc_feature (497)..(497): n is a, c, g, or t
  misc_feature (515)..(515): n is a, c, g, or t
  misc_feature (544)..(544): n is a, c, g, or t
  misc_feature (568)..(568): n is a, c, g, or t
  misc_feature (725)..(725): n is a, c, g, or t
  misc_feature (760)..(760): n is a, c, g, or t
  misc_feature (878)..(878): n is a, c, g, or t
acctgggtggacatcagcactgccattgtcagccctgtgagggttagaagagcttggtgcatattaaacactgaacagatgttagctgttgttgtcttgagcaagttttcttaccattctgggccttaatttctttntgtttaagatggaagtaatacctaattcttaggttgtgagaattatttgaaatgtgaaaaatattgtcagtgggtctgagccgtagtaaacagtaaatagcagctggttacagtagtatccccttaatggcgtaggtatacgttccaagacccccagtggatggctgaaaccacggatagcaccaaaccctatatatactnggttttttcctataccgtacatacatacctacctatgataaaacttacaagttaagcacaatangagattaacaataacataatagaactggtacaatatactataataaaacgtatgtgaatatgatctctttccccttctcttaaaataacttattntactgggactcacctatntcacaccagaatgaccgcggataattganactcgaagtgaaacctcgataagnggtgatactgtatcacctttaatatccatctgtagtatcgtatcacttgaatcatgtgagcttctctaccattctgcaaatgcttacataagattactatcttttacagtttaatccttctagttgtagggattttgagatatgcatagtgagactnacttatatgatagatgttctctgtttacactacangctttctgcgttactcattcttgtgaatgcagttcactatcaacacctgattcttctcttaagagttcgtgactgggattgtctgtgaagatggaaacttatcttatctagaaaatgncattgaagtacattttctatttat

SEQ ID NO: 638584 - DNA, 470 bp, Homo sapiens
gataatttgtattagtgtaggaatatattaggcaaatgtttagttggtccaaattatgcataagatatttggtaacttttaaaccattggccaacattgggaaccagcttagcctatgggaagccataacaatctacactctcgcataacatctcaccatgtttcggcaaaattcacatttttctaaaatttatatttttatggtgttagcctgtaagagcattttagcatattgaaatgcatgctgcttaagatgtgtctggttcaaatatcaaaacttgctgggtcatttttacatagtagaaacatactgtctatgtgttgcccaattgctgtttgtccactctgaattctggaccctttttggactaagaattagttaaattcgtgaactaagagaattagagatggggtagagtaggatcaggacagtggggttacaaagataggaaaggaaagtcagcatttga

SEQ ID NO: 638585 - DNA, 208 bp, Homo sapiens
gcccccccaaatttttttgggcccccccccccctttccttcccccgggccctttcctttaaaaggaagggggggggggttttccccaaaaaaggggaaaaatttggggaaaaccccaaaggttttttattttttttttgcccttttccccccaaaaagggtccctgggtttttttttaaaaccctattaacccctttggggcccggta

SEQ ID NO: 638586 - DNA, 140 bp, Homo sapiens
  misc_feature (113)..(113): n is a, c, g, or t
gacttcgcgcgcgcgccccccacatcctcctcgggacacttgtccctggatcctctacccctggccggcccgaggccgtataatcgggaagccttaccagcccccaagggggntttcccttgtttatctgcgctgcgagg

SEQ ID NO: 638587 - DNA, 116 bp, Homo sapiens
tgatagcgaggcgtgtcccgcagatctacattcgatgttcaatgctccacggggagactcgtccacgcggccggggaccacaggataagtcaccgaggaggggctcgaagctggtg

SEQ ID NO: 638588 - DNA, 367 bp, Homo sapiens
  misc_feature (351)..(351): n is a, c, g, or t
tcggtggactgagctgaccctgattcctgaggtaggtagaaagaacttgtaggtacagagttgggcagtgagaaacatcagcagccacagtgtcatccccattaatctcagccagtggggagcactatggtctgagaagtggatgtgggacatgcagggaggtgtattgtttgcccctgttttaacaggagcaagggagcatcactttaagtaattctatttctgttttccgaagtatccaccatcaaagaaaagagaatcataacattgcacaaatcttttagcaatttggatgcagtttacagggataatataggctgggaggactttctaacccattttccttctgancacccagtgtctgaat

SEQ ID NO: 638589 - DNA, 200 bp, Homo sapiens
cgtattaaaaagagtcgcatttaaaagttctgaagagaaagtgctctgggcgtcaggtggttctgccatgactagctgggtagctgtctatgcctcagtaatcttctctctaaaaaatgagacggctcaagatcaccatatgagatcacatccagctctaaaacaagtaatgttctgtgtcaactgtaaaggaaaataga

SEQ ID NO: 638590 - DNA, 845 bp, Homo sapiens
  misc_feature (311)..(311): n is a, c, g, or t
  misc_feature (317)..(317): n is a, c, g, or t
  misc_feature (415)..(415): n is a, c, g, or t
  misc_feature (457)..(457): n is a, c, g, or t
gtgagactccgtaccaaaaaaaaagggatcaaatcatgaagtgccttgtattttatactgagagcttgagagtttatcttgatgggcgcagtggggtgtctttcggcagaagaatgatgctaggacgtcagtggcttttgactggttagtatcctgtttttttagtaacaaatcttatctttttcctcatggggaaccctttcctcactctcagtttacatgattgggtggggctgatcccattcttcaacgtcagcctgagcactgcatagcccctgtcaaagtgataggttcaagggcgggtgtagaanaccaanatagtccactgagagtcttcttgtgaactttttatttttgggggtggaatctctgtcgcccaggctgggagtgcagtagcacaatctgtggctcactngaacccctgcctcccaggttcaagcgattcttctgcctcagnctcccaagtagctggggttgcgggcacccaacacaagcccagctaatttggtattaagtagagacggggttttgccttgttgcccaggctgtcttgaatccctgattcaggtgatctgcaactcggcttccaaaggtgctggaatacgggcgtgagccatgtggccagccttcttggaacttttaattgaagcaattaggacagaaaagttcaccttctttcagaattataaaatgtgtaggatttggacctgggagattctttacaatggaaagggactgttgagaatgagagcaaggacaaagtggagcaaatggggagaaaaggcacaatcgccggatcattttttgggcaatgatcaggcatggagattaattttccgtaaaga

SEQ ID NO: 638591 - DNA, 229 bp, Homo sapiens
ggatgtattgtaacggcacaggctttttacgtgaaatgacgttctttgataccaaaaatactaggacacgcttgccatattggcaaagctgtttttttaatgcctattgttggcaaaagcagagaatagccactctgtaaatggacaccgctggtaagaatgtaaagtggcacaaatttttcaaagggcaccttgttaatatgcaacaaaaaaattttaaatgtgcata

SEQ ID NO: 638592 - DNA, 260 bp, Homo sapiens
gaatgtttgctgctctgggagaagtaagtaggagagggtataagaaggacgctgacaccaggctttcctgtagtacttattcacagagccaggtgctatagtactggtggtggtgtggggggattgtccattgatcctccttgtattttgccataagagaggccttatttatgggctactggctttctctcattagttatgtgttttatattcttttcatgcagtgatcagaatatcatgtccaaacattcaagccgtca

SEQ ID NO: 638593 - DNA, 208 bp, Homo sapiens
agatatcccgggatctgataggaatccgggatctgatagtgattacatttatctaagcaacatacatacatgttcagtggtaagatgttaactaaatttctggtgacaaactatggctttttttttaattaccaacaaacattattagagtcaagtgcagagtcctaagggataatctcagtagtcactcaagtttttcttcaagtct

SEQ ID NO: 638594 - DNA, 107 bp, Homo sapiens
tccccaggtagactaacccaggtagaagtagaggttaaggaggtgatggtggctatgatggtggggatgatgaggctattgtttttttgtgaattcttcgataatgg

SEQ ID NO: 638595 - DNA, 176 bp, Homo sapiens
ccaacacaggtgaaatggctcagaacagctcagcatgtcctactgaggggcaggaaggatgctgagaaattcccaggcagcggtctcagctgggatgtaattttgaggggcgaaaaagttttgtgttgctttgcgggtttcttccctttgctcccttgcagggtttatattttgaa

SEQ ID NO: 638596 - DNA, 294 bp, Homo sapiens
  misc_feature (61)..(61): n is a, c, g, or t
  misc_feature (71)..(71): n is a, c, g, or t
  misc_feature (83)..(83): n is a, c, g, or t
  misc_feature (113)..(113): n is a, c, g, or t
  misc_feature (143)..(143): n is a, c, g, or t
  misc_feature (231)..(231): n is a, c, g, or t
  misc_feature (249)..(249): n is a, c, g, or t
acccagtacaggtactctcacaggaggcactcagcagggatgtagtgacagcaggtaagantccacctctntccctgcctgcncctgggatccagtattggcccatgtatctnccccatttcctcaggcttcctggacttttnttggagggaaagaggaacagaaagaggagcaggcaggagaagcaagagctcccgggggctatgaaaggtaacatacctggagagtttngggagacggcggcttgtnagagacaaggggaagagacagaaacaggagtattctaagaagcat

SEQ ID NO: 638597 - DNA, 263 bp, Homo sapiens
atatgttgaagcgggtggggctttttgaaatcaaaaaagcatgagaagactgcctttagttttggtttgtttgtttgtcaattagggtgtgcagggtgaatacatggtctgttgtacggtaatttggtaaaaagccaaattgacatttgctcagtacattgttttcactgaggaaatgtacgagtctgctgttaatgataatgcagaggattttcccaaggttgctgttgacgcacatcacaaggtagttttggggtcgacgc

SEQ ID NO: 638598 - DNA, 134 bp, Homo sapiens
tggagtgtatcctcgcgaagtgtatccctcgcgacgtgtatctctcgcgaacgtgttatccctcgcgaacgtgttatcctcgaaccatctagtagctggttccctccgaagttaccctcaggataacacgtgga

SEQ ID NO: 638599 - DNA, 147 bp, Homo sapiens
gggggctgaggcaggagaactgcctgagcccgggaggcagaggttgcagtgagtcgagatcgtgctactactgcctgggtggcaagggtgagactccatctcaaaaaagaaacaaaaaaacccacccagttttctttactgttggtt

SEQ ID NO: 638600 - DNA, 754 bp, Homo sapiens
aatttggatttaaaatataaatttatttatttattttttaatagtcaaaaatcttggctgtgtagtctgcaactctaaaatgatggtgtggctttaggatggatcagaagaaacatccaaaaatggagatgaactgtgggtgcagccagttataagtaatatagttaacaagcaaaaaaagtgctgccaccttttatgatgatttctctaaatggagaaccattggcctgcatccacatagacctttatgtttgtttccagtgtgaaaactggcctccttgtgcaccattcgtaaatgaagcagaattttttttcctcttttttccaaatatgtagttggtctggtaagatgtatcatgcgtatgggggctgtgtaatgaacaacgaattttaattagcatgtggttcagaatatacaatgttaggttttacaaagtatctgtgaggttctttctatttataatttcagactttcataaagtgtaccaagaatttcataaatttgtttcagtgaacttgtttgtgtatggtaggtcattaaacacaaggcacttactcttaaaaatgaaaattctctgatcatctaggatatgggacacatttcaatttgcagtgtcttttgactggatattttaacgttcctcctgaatgggattgataagatggtcagaagagaactcactggactaagagactattattcacgggataataaatattggcaattagaactatggggaacccaggtgggtaa

SEQ ID NO: 638601 - DNA, 341 bp, Homo sapiens
  misc_feature (333)..(333): n is a, c, g, or t
tgtgcaggaattagtaactttatatactgctgatgagaatgtaaaatggtacaaccattttggaaaataatgtggaagggaagtttcttcttttttttttttcttcacagagtctcgctctgttgcccaggctggagtgtagtagctcgatatcggctcactgcaacctctgcctctcgggttcaagcaattctccctgtctcagcctcccagggtagctgggattacaggcgcctgccaccacatcacttaatttttttgtatttttagtaggagacggggtttcgccatgttggctagggctagtcttggaactcctgacctcaggggatnccgccctg

SEQ ID NO: 638602 - DNA, 275 bp, Homo sapiens
gacaagggggtgggctatgaaagccggtctcaaggattactgcatatacactatcaactcaatacaaaatgagaacttaattttgcaccattgacaaataggtcatcttaggcactacaaaattccttaaatggatcttaaaatatttgtcctctaatatttaggtgtctcttctgccgtattcatcaattgcttacatttggtcccattatatttatagtcatatttcagtttgcaatgtgccctaattctggggctttcctggaatgaaggat

SEQ ID NO: 638603 - DNA, 247 bp, Homo sapiens
cccatggtcgagagaaattaggctacccgtcgcatactgatcattctatttccccctcttttgatccccacctccatatatctcatcatcaaccgacgtaatcagccactccaatcaagtgtactatacttaaactatcctctagtgtaaatgataaccatacacaacactaaaggacgaacctgatctcttatactagtatccttaatcatttttattgccacaactaatttctctcggaccaatg

SEQ ID NO: 638604 - DNA, 388 bp, Homo sapiens
  misc_feature (10)..(10): n is a, c, g, or t
gcaccctgcngacgtgttcaataacatccctcaaacactcaggcagctcagtcacctttccttcctcttacctgccccctctgacctggcctatctagtccatggagagctctccttctgtaggttttaacactgactttttcactgaacattccctgcctgtactgcctgaatcatctctgttctccaggcctgtttttatcaaaatcacacacacacacacacacacacacacacacacacacaccacagagtacctagtggcatcttgtaagaatagccatcatataatactaataatccactgtgtgtcaggcactgctaaggcctttgcattcaaacctcacaataaccctaagaggctgtattattatcccattttacagat

SEQ ID NO: 638605 - DNA, 202 bp, Homo sapiens
gaagagatgcagtgtagagagtccgcttagtaaataaaaagaacactgccatgttatatatatgattgattaaataagagacagggtctcactaaggttgcgcaggcgggtctcaaactccggacctcagattatccacccgtctcggcctcccaaagtgctgggattacaggtgtgagccactgcgccgggaccacagata

SEQ ID NO: 638606 - DNA, 451 bp, Homo sapiens
agcgggcctccctccccagccttccccgcgagcggacgcggcagagcctctgtctcgcttgtcttataataaccccccttccccatttctttgtgttgtattgactctgatgcttccactatacagaccatgtaaaacataatcagcagacaagaaagatgataatagcaacagaggcacgggagtgagagagagagtgtaacaagcagcaggtaaggaagaatacaagtagaggatcacgacgacaagaagacagaaaacggggaaagctgacaccagctggcaagaagggagccgttcgcatgtcagtagggcacgatgcggccagaaaacagatcagcagcacagggatagagagcgtgagcacactcccggcgacagactgtggttacggatcgacaggacgacacacgaagatcacagtcacttgaacggagagatttctatcacc

SEQ ID NO: 638607 - DNA, 543 bp, Homo sapiens
agcggagcgcgccgctccccagcccccaggcctggcggggacccccccagggaggggctccgggtgagcgctgcggggcgtctccctcgcagtcacgcccgccactcctgcctgcccctgccgcgcgcgcctgagcagtctgccgccttccctcgcgcagctcggttgtctccgacgtcgctcgggtgccgacttgtgctcgtgcggcccatgggcaatgcagaacaagcaacgctgcaggccccgacgatgttcgcacggaacctgcgcagaagaaccacacgagcttctccagacgctgcgagctgccacgcgagctcggtaccacaggcgcttcgctcaacggaacttgccccacagtgaatcgctcaatggtcgatgacgcttcaacgaacgatctagcgccaagacttcctttccctatcggtgaacgcactccaaagatttgcctgacgcacgttcttcacgacacctattgacgaccaaccagacgatgcgcacccatacgaccttctcgcggacgttcgatcgattgccggctga

SEQ ID NO: 638608 - DNA, 215 bp, Homo sapiens
agaacatgtacaagtacttcatcaaggactacccagatggtgtcatatcgaagctcccttagaccaggatgactggggagcttggcaagaagttcacagcacagtgcaggaatccaggtagtgggggatgctctcacagagaccaacacaaagaggatcgccaaggccgtgaacgagaagtcctgcaactgcctcctgctcaaagtcaaccagat

SEQ ID NO: 638609 - DNA, 192 bp, Homo sapiens
cgagatctaatgtttagacataggcatttagtggaataaactttcctcttaaccctgtttttactgcattccagagattttggtatgttgtgtctctgttttcatttatttcaaagaattaattttcttgtttgcccaaaagtcattcaggagcaagttaagtgtatttttgttgtagcaggcaaacatcag

SEQ ID NO: 638610 - DNA, 177 bp, Homo sapiens
  misc_feature (41)..(41): n is a, c, g, or t
  misc_feature (75)..(75): n is a, c, g, or t
  misc_feature (80)..(80): n is a, c, g, or t
  misc_feature (137)..(137): n is a, c, g, or t
  misc_feature (145)..(145): n is a, c, g, or t
ggaggacctggctcctgactctcagagaggataggctgganccctggggagcctctcctcggcctgctcctcatnttccnggctccctctgcaggctggggcagagcctgaggacaaggaagagttttccatccccntgcatgtnccctcctctacctgccccaaatttttatatta

SEQ ID NO: 638611 - DNA, 101 bp, Homo sapiens
gaggaccccgtccataaggtgtgccacccagattaggatgggtctgcttccccagcccacggactcaaatgttaatctctcttggggcacacattatggag

SEQ ID NO: 638612 - DNA, 164 bp, Homo sapiens
cgctgtaccggtgttatcgatgccactggcagtagcggagcttcatccctagtcaacaccaggagagcttctcccaaactccccaataaagctaagagactcacctgagttgtaaaaaactccagttgacacaaaataaactacgaaagtggcatcgataaaca

SEQ ID NO: 638613 - DNA, 397 bp, Homo sapiens
gggcagaggaaaaagatacaaataaaaccaggtttagggtcgaatgaaaataatatatgtgctatgttatgaatgtgtttcccaaaattcatacggtgggaactttattccccaagcagcagtgttgggaggtggagcctctgaagagatcttcaggcacaagggctctgccctcatgaatgaattagttccctttcaaaatgggctttcagtagtgggttcattccttcctgctcttctgctatgtgaggacacaggtccttctcctccagaggacacagcaagtgccttttgggcagcagagagaagccctggccaaatgctggaccctgattctgggacttcccagccctccaggaactgagaaataaatgtctcttctttataaaaaaaaaaa

SEQ ID NO: 638614 - DNA, 395 bp, Homo sapiens
tcgggtcggtgaagggcatgcccagctcgattacgtcggcgcccgctgcgggcagccccttgaggatcgccagggaggtgtcgtagttcgggtcgccggcggtgacgaaagtcaccagggcggcgcggtttgcttccttcagctcggcaaaacgggtttgcaggcggctcatcagtgtttctcctgctgggactgttgcatgtggtgcatcacggtttgcatgtctttgtcgccacggcccgagaggttgaccaccatcaggtgatccttgggcaggttcggtgcgcgcttgaagacttcggccagggcatgggcgctttccagggccgggatgatgccttccaggcggcagcactggtggaacgcggccagggcttcgtcgtcggtcaccgagg

SEQ ID NO: 638615 - DNA, 567 bp, Homo sapiens
gcttcgcaaaaacattcaatgaaacgccggtaaaactttccacggtactttgggattgttctggaccaggctgagatggaggcagacaaagagaggataaaggagaggcatcacttcgtggctatgcggggaatcagaatcgatgagaaaattccgcagtcgtccaaactgtacttcatattgctggggctctgcctggcaagggactgcagacactatgtcggcacaatgagattctctgtgtaccgtgagattggccgccaactcttcagcagtctgtggcagccgcagtccttgcttcaggggaccgtctgagtccacgtactgccagcgtttgaggtagcaggacactgccatctggatctcctcggtacgcactcatttcatgactgaacatcccaggcggccccggctccccaggcggccccggctccccacgccgccgcctcccggatcgagatgcttccgcctccgtcgtctctgctgcaggtctcgctctgaccgccggctcagctgtgtcctggagccccgcgccccgccgccctcgccaccgctctgggcggccgc

SEQ ID NO: 638616 - DNA, 174 bp, Homo sapiens
  misc_feature (50)..(50): n is a, c, g, or t
  misc_feature (144)..(144): n is a, c, g, or t
  misc_feature (148)..(148): n is a, c, g, or t
cggtggagtcgtgttggtcctcagaatccccgcgtagcgctgcctcctcntaccctcgccatgtttcttacccggtctgagtacgacaggggcgtgaatactttttctcccgaagaagattatttcaagtggaatatgccattnaggntatcaagcttggttctacagccattg

SEQ ID NO: 638617 - DNA, 229 bp, Homo sapiens
ggggggggggggggggggggtttttttttccccccggggggggggtcccccccccggggggggggggggggggccctttttttttcccttttttcccccggcccccccggggggggggggggcccccccccgggggggggggggggggcggggggggccccccgggggcccaaaaaaattgggggccttttttttttttttttttaaaaaaaagggggtttttttttta

SEQ ID NO: 638618 - DNA, 700 bp, Homo sapiens
  misc_feature (435)..(435): n is a, c, g, or t
agtccagagacaatggccccgatgggatggagcccgcaaggcgtcttcgagagtaactggtaatgagatatgttgacagacttagatgacatgaacctctcggagtcccttctccgtggacatctacgcctactggtctgtggaagaaagcccatcgtgcccgattcctagggcaggcgaggccatgctagcacttgtatcaaggcggttgatgatgtgatgtagctgcaagcgccaaatctagggaacgtggggaaagaacggggcacactttgccattgatcgatccctggcagcagattggatactcttacgaactacttaagaaagaccgaacgcctacggtcactttggatacctaagcaacccgactgctagaagattggcatcagccagcactagcagaaggtcggtgcgatggccagctgagggagnacttacattgggcgtccatccctgtcacagccctgtgattgcggggggcaccaatagccgtgcagtgtcgtgaggtcgctatgaaagagcttggcaggattgggataggctgctcccagcactcaatcgttcggggtatcgcctctgggaccgtgatgtttagaataatggctgtaaccctggagagtagcgctgatccccgcatatactacgatctaaagactggtattgttacaggggcactgaacgctgaacgaagatgtag

SEQ ID NO: 638619 - DNA, 932 bp, Homo sapiens
gggtttttggtgaccccctcttggcaccattagtttctctgtcgcccccaaaaccggttccccctcccccccggggtttctactctcctccccgcaatcggttttctcttctacgccgccgtgtgcgtttctccccggagaagccctcttccgtttgtgggcagccccaataggtgtggcccctgcggctgtgaccctggcggtagtcggctccggccttattccccagcgcctttttcctggtgccgctactaggtacgtcgtgtcctcccacggtctccctcccagggagcgcctttcaattctcccgcccctctaagaggactgtcatcacattgggatcgtctgtcgccaaaaagaattatcataaacagtcttgtttccgcacgctttcctccttacctccagaatttcttccccccgaaacgactcacattcccgctctttgtataccccccacttgtgcgagaaaacttcctaacctccggagaacacaattcctggttccttattaactccctcctaggagaagaatttttcctccctctacagccaccactcgctcagcaaagccctccttccccacacaaattatcgcacccacccgttctcccccagggagacgcccccccttttgcacgacccgtgggtcccccaagcgcccccccttgcgtgagccctgtgagtgcgtcccaccgagcgcagaatctcatgggccaaagaaagaatcccgcggccaataccacaggatgtgcgcaccccggtccatacaaaacgtctccctttggcgccaacaccgactccccggccgcatccgtgggaaaccacacaggggtgtgacatcctttgttaggagggttctacaaaaagaagcccccggcaccacgagaacttattttgaatcccccgacttccaagcaacccacaaaaca

SEQ ID NO: 638620 - DNA, 158 bp, Homo sapiens
  misc_feature (81)..(81): n is a, c, g, or t
gctagaggatcctccacgtcgaatatagggtgttctcgtgtgatgagggtaatgttgtaatgtggtggggtgagtgagccncattgtgttgtggtaatatgtagagggagtatacgggctgtgactagtatgttgggtcctgtagtaggagagtgata

SEQ ID NO: 638621 - DNA, 397 bp, Homo sapiens
acagatcgcttgcacggagatggagcagatggaggagcacagacgccagagtcacagcactggaacgcgacatagtgatacacgcaccatctgttgtctactatgaccgtgacatacatcaccatagaagaggaggagagttagcttcgacaggtggataatgctgcagaggcatagcggacgcatctgtctgtgagagaggaacagaactgtgatggacgcacgcatctgccagggatcggatcgtgagcggctgcctacatgtctcccgcgctccgtgtgcatagtgaattgcctgatcctatacgatggtctgcgaggtcaccatgagatagagaaccatagacgagctgttgagtgcatgatggtatccacacacactagggccgtgtctatc

SEQ ID NO: 638622 - DNA, 476 bp, Homo sapiens
tagacggatcccgggcagacaaatagatcgacattcccaaatcgatgtgtggtgcatgtagggctagtacatgttaatagttaacctctacaccctaataaatgttggccgtccatctcggaagagaatatgtcttgacaattacagttgagccgggtaaggcccaggacgggggtgtaggaaaggagctgtgcttggggtgggatgaatatgaataaccataggaagagttgatgatgaggtatacagatggagaaggtaaagaaggaagagaagtagtcggggaaggaaagtatgtaaggtgtgtcgagaggagatcagatgtcacataagggggtgtcgtatgttaggatacgccatcatgtgatgtgtatattttataggagacagaggtctcagttggtggccgaggcgggagtgcagtgatgcgatcagagctcagggcagtcgacaaccccccaggctcgggcgatcct

SEQ ID NO: 638623 - DNA, 1664 bp, Homo sapiens
ttgttgtacgtttgattgtcctctgttgtgtgttgcttctgtttgtacctcctcgtttcatcactatgtcgtggttgcatcttcttgttcgttttgtttctcttgtcttcatttgtgttgtcgtgttctcgggttggatatgttcactctgcattgtttgcttcgttctgtttctctcctggtatttctctgatgcagttgcgagtggggtgaccatttcggcctttatgtgtgtctgccccgtcctgcttgtctcagttccttctgttgtgtgaggctaatcaggtgttgttggtattcttcctttttatttctcttttgtccgccgccacgttgttcagtggtattcttgtttcgcggtccttgaatttcagtcgctttttcgtttgggggctcttgcatttggccacgtcttttggtcgcttcaccatgtgcctcggttttcgccttgtcgggcttttctgtgcccccacgtgtggtgtttccctctatcaccggtctcccactaagtttttgccccctttcctagtgtcttagtcctcgcatgcccctctgggcaatcgtgtcctgacatgctgcactgttgttctctctgcgcttgggatcacggtatgtgcaccctctgggtcttacgtttctgagcacatgcgtctgtaatgggtcccccctggtgtggctctcgcccctatccgctcgatgtcccctgccaccaaggtatccaacttccccgtgccaatttcccaaggcaggtgtggaccttcggggccctacgggggccgcctcggaagggaactaggatctataacgtaccgggcgaaccgatccaacggacggaaccacggccctcacaacgctgggtgcgaggacgcaccggccatggcctcaccaatgagtggaccgaatagagtgatgcatcttctaagatcattgaatgtgatatacgctccatgctccattggcgcgcccctcaagtttcccgttgctcatatgattgactgcttatatgaccttgtgtccagactcatccactcactctctgtatctactctagacgtgctctatgaggatgcatgtggatggaattgaacagtggggagacattcttgcccctgtgcgccagggtatctcgcactcaatgagagcggtgctgatgccctctgcaacatgtctgagagtgttgtgtctccttgtattttagaaattctaccttcttgatgcttataagaaatacaagctgaatcacataaatcgatactagactgagcagtcactggcctcctgttgaatggtaggcatcctttgctacgggcatggcagcgcccattggtggcattggaaggagaggtgctaaaagactatcgggttgctgtatgtctaggcctccacgctgcactggagagccaggcccaagcggtctgaggtgtgtgcactagggcagagggcaggagcggcatggtgtacaggcctggcttgggaactatcgaatcccgtgaccttgcctgcattccttgttagcatatccaccagccactagacttctttggaatcatatcggggatgggggtcatctttggggattatggactgcacatcaccgggatttgagtgtaagggagtgatgggagcatgccttggcagatggggcacaaagtgccctgcaggtg

SEQ ID NO: 638624 - DNA, 746 bp, Homo sapiens
  misc_feature (154)..(154): n is a, c, g, or t
  misc_feature (192)..(192): n is a, c, g, or t
  misc_feature (238)..(238): n is a, c, g, or t
  misc_feature (252)..(252): n is a, c, g, or t
  misc_feature (295)..(295): n is a, c, g, or t
  misc_feature (349)..(349): n is a, c, g, or t
  misc_feature (409)..(409): n is a, c, g, or t
  misc_feature (442)..(442): n is a, c, g, or t
ctaggctgaaggtcacagaagaaagtgaagccacatgaaagtcatttatattccaatctgtggtctgggttactttaagaccaacccaggagatgggggaaggaggcttggctctcaaccaggaaaaagtgtgagattatattgcctagatgtnacatgtttatacattgagaagggtaaaaagcagcatcntaggaagacaggctaagaccttgaagaggtagctatgtttttttcntttctttttttttngagagatggagtttccctctcgtcgcccagcctgcaatgcaanggcgcaatctcagctcactgcaacctccacctcccaggttcaagcgattctccngcctcagcttcctgagtagctgggattacaggcatgcaccaacatgcccggctaattttngtatttttagtagagacaaggtttcaccatatnggccgggctggtctcgaactcctgacctcatgatccgcccgcctcggcctcccaaagtgctgggattacaggcgtgagccaccgcatccagctcaacagtaataataaaatagaaaatgataactgtatgccagcatcactactcttgtgcattggatccattatgaagtaaagtgagggttacttgaacgtaaacactacaatacgtccactgttgatttgggtggtgtgggtagtgcagacagtcgtggaggggctggctaagcgatgatgccagttccagcagatatagtggcaccaggtc

SEQ ID NO: 638625 - DNA, 313 bp, Homo sapiens
  misc_feature (65)..(65): n is a, c, g, or t
  misc_feature (147)..(147): n is a, c, g, or t
  misc_feature (276)..(276): n is a, c, g, or t
tgaggctgtgtcacttcagggtcacctgcccaaccttagaggaggtgagggtgacctgaagtganactaagcgcgctgagcatggggacctggtaccctcctggctcttgatacccccctctgtcttgtgaaggcagggggaaggtngggtcctggagcagaccaccccgcctgccctcatggcccttctgacctgcactggggagccgtctcagtgtttgagccttttccctctttttggcttcccttggaaccttttgaggagccccagctacnccttcttctccaagttggggttcttgcaaatttccct

SEQ ID NO: 638626 - DNA, 599 bp, Homo sapiens
catctacagaaacggcttcatttgagctgacagcctctcttcgaacagagcaatggcttggaatgaggtagggaaatgtgagcagtatttatctggtagttcctagagcaggtatggcagttgtctttcctctcaaaaacattagtacacattcatttgccttgatgtttccctggcttggagtatttcttcttttatgctgtctaacaactgctctgaggaagaactataatacaagctttaaagagtctgttcagaatcattacaaataagttgtgttatttaaaattatagttcataagggagaaagatgaaaaatgttaccagattagagaagatttttcaaaaggatgtaaggaaagaggcagtgttaaacactgttaagaggacagtttatcagtattttttactaaactttaataaaacttttctatttgaatttctgctatgaatttttcttcagcatttgtcctcagtacaggtggttccttgaaacattgtttctaataaaactaaaacatcctgatattttatccattctatagagatcattgatggtacacagacataccgtggattatgtttgttgagtgaattgg

SEQ ID NO: 638627 - DNA, 344 bp, Homo sapiens
cccgggaatcgcacggagggtccagccgcaggaagaaacctcaggaggaagaaacctcagacagatcgccggcgaggcagcgcgggatcccaacctcaggcgtgcgcggacggtgtgcgggtgagtctccccaaaagtggagcccttgttatgacgagcacaggtccgcctgcgtgcccgtgggctgctctctcaccggtggctctcagtcgcggagagcagaacccggcagcttcaggggctgcctgcgggagggtgttccctgctgtacgtgtgtgttcgtcatgggtgtgtgtgtgtgtgtgttggagggggtgcgtctgtgtgtgtgtctgtgtgtgtgc

SEQ ID NO: 638628 - DNA, 161 bp, Homo sapiens
  misc_feature (18)..(18): n is a, c, g, or t
  misc_feature (30)..(30): n is a, c, g, or t
  misc_feature (51)..(51): n is a, c, g, or t
accccaactcttggaggncccaaaatgcanccaatgcctttgtgttttagntctaaattttaattgcacctgagaaaggtggtcacctaagcaatgagccacagcaaaaagtaaagaacaacaacaaaataaagctgttgttaaattttaaacaatattac

SEQ ID NO: 638629 - DNA, 285 bp, Homo sapiens
ttttgggggcttcatggtggtcttcactgaggttgtatcttgggtacggtgctgtcgtcccttggttgctgttggttgtagttggagggacagaaggaagagggtccctgctggtgggtaaggggcccttgattgcgatgtcccgtgtcagtgtctctgaaggggtgaagttctagaggccgggttccgaggggctgtaggatgaagcagagttcccaggaaaggaagttgttttggccacgtgagtgaaccagacctctaattgaaaccggatactgctcctgt

SEQ ID NO: 638630 - DNA, 264 bp, Homo sapiens
actctaaaaaaggtaaatacgacaaagagcctggcagccataacaatgaggtggcatgttatttccacaaaggcacttgacactgtttaaaccactgataaaggaaccaagatgacccaaatgatccaagaatgcctactactcccacccatgtctcatctgctcatcctgtcaacaggcatgagtatcttctcacctctctctccccattttcccagaaacatcatttaccccattaggcttgcagaaaacaaattcgcagaa

SEQ ID NO: 638631 - DNA, 370 bp, Homo sapiens
gaccccccgagtggtcctgctgaaaatcaattgaccatatacgggagagtttatttctgagttctctactttattccattggtccatgtgtctttccttattccaataccatgatgttagtgattattatagtttatgaagtaagttttgaaatcaggaagtgtgagtcctccaactttgttctttttaaaggttgtttagggccaggcgcagtggctcacgcctgtaatcccgatactttgggaggccgaggtgagtggatctcatgaggttaggagtttgacaccagtctggtcaacagtgagaacctgtctctattataaatatacaaattagccaggcgcagtgggtcacacctgtattctcagaa

SEQ ID NO: 638632 - DNA, 488 bp, Homo sapiens
cacacagttcagtactgtagttaagagtcattacagcctattttaatgacatttataatgccttagagaaatcaagaactaagtgtcgcctgataccaacattgtacgtgctgcattgcggttgcccatccgtggagagaatacgggactatccgtggattagcacgcatgtttagacctcgttgccctcttctggtgtctaaagagacggtccaccccaatacttgctaatgtgccgacgctgatactatacatctccctacttgccatcacagaccagactatccatctacctacctcacacggctccgacgtccggcagcacctaactgcgctagcatatcatcactatccccttcgcaactgatctataacgacctccccgggcaactgcgcctacaacggagaagttcaaatcgtagcgaaataatgcaccacaggtgtataacgcacagtagctaagacgcgcgcacttcgcactaactcat

SEQ ID NO: 638633 - DNA, 140 bp, Homo sapiens
cggccggattccaaacagtggctcatgctgtaattttaacactttgggaggccgaggtaggcaaatcacttgaggcagcagttgaggcagctggcaacatgggagaccatctatacaaaataataattactgagctgtgc

SEQ ID NO: 638634 - DNA, 1598 bp, Homo sapiens
  misc_feature (1)..(1): n is a, c, g, or t
  misc_feature (26)..(26): n is a, c, g, or t
nctgtgaggtctgggtgtcggtggtngattgtgttgtgtgggtggtcgcgtcggcgcgtgcgcggagttgggtgggctgtggtgtctgtgcgacacagtcggtgggtctggtgtgtcgcggtctgtgtttggttcgtgtgtgcttttgtgttggttgctgtgtcgtgcgccggttggctgagtctgtgtctgggtggtgtcgtggttggggcggacggtgcgaggagctgggttgctgttgtgtgttgtttggctattgtgtgtggagtgacgccgcttcgggtgtgtgtgttgtggtcttcttgtctgctctctttacgtgtcatgtgtgttttgtgttattgtactgtacacgtgtgagtcggtggtggttgcggtgggcgcgcggcggcgtgtgtgtgtggtgggtcggtgctcgtcgccccgagcgtgggttgtatttgtggtcccgcgcatccaagtatgttattagtatcgcccccccccgttggtgggtgttggtggagcacaccaacccaccggcgcgtgtgtttggtgggggcggccgcacacccgtcgtgggtggagtgcgccttcgtgtgggggtgttggcctccccccacactgtgggtgggtgcgtcgccagaatagtgttaccgcgcgccgtgtgtggtggttaattcgcgcccccgcccccgccccgctgttgtgttttttctaccgcgcggttgtcttctatatgggtggtatggggagcgccccccacggtgtgggggcgcggagatttttgtctccccccatgggggcccgcttttttgttggtcgctctcgtctccgtcgctcccacagtgtgagcaccacatcctgtgtgtggtgtgtgtgtgagagagtagagtttttagttccccgctcccgtttggttctccctactggggggcgacaaccgcctctctcgtgtgtgtggcgctcgcccccccacctttgtgtgtgtgtggggagcgcccctctctgtagtagatagagagcggcgcgcggtgtgcgcgcctccggtggatgcgctcacacccagagatgtgtgcgcgtgtctcgctctctatatatatatctctctcctcgcgccccctctctcgtgtggggccgccctctgtgtctctctctcctcgcggagagtagtgtgtgtcccgcccgcgcgggcgccccgcgcgcgagggagagatataccctcgctcccccgcgtgtagcaccctcttttggtggacccacccctcaagacagccaccccctctcttgggggttgtgtgggggtgtttccccgcgcccccacaggatctcccctctcgccccgagaggcgccccgcgtggcgcgcccgcgggggcgcccccggtgtgatacccccccgggggggcggggtctctctcccccccgccgggcccccccccccggcggggcggcaggtccttttctctcgcgcgagggggcccccccccccgccgggggcgagccccccccccccccccaattttctcccggcgcgcgcgcgcgtggggccccccccccccccccccccccccccccccccgggggggggggggccgaagagggggggggcccccgggga

SEQ ID NO: 638635 - DNA, 184 bp, Homo sapiens
gcccaaacccactccaccttaccaccagacaaccttaagccaaaccattttacccaaataaagtataggccgatagagattgaaacctcgcgcaatagatatagtaccgcacgggaaagatgaaaaaataattacccaggcattattttggcagggcttacccctatatacctctgcaatatgt

SEQ ID NO: 638636 - DNA, 1152 bp, Homo sapiens
  misc_feature (340)..(340): n is a, c, g, or t
ctaaagttcaggcatctctggcagcgaacacttgcaccatttacaggccatgctgagacaaagcagttgacagaaatgctacccagcatcttaaaccagcttggtgccggatagtctgactagtttaatggagactggccgaagctctgcccaaacaatctgtggatggaagagcaccacttgctactggacgatggatgatgatggatgaacgttccacgatcttgtggacgaattgttgcactagaggcttgcccaaggaatgaggcacaactgtagacttgagtcaacttctgaagatccatacctgcagaaggtttagcgtgggagcctgcctganttttaatagttaatgagctgctttgtttaacgacagacttgtctttgtttactggagtctgagtaatacactctacgactactctacatactttttagagccccaacgtccccttggacatctgcacggcgactttctcagtttattgggctttgagtaactatcgagatttccagttctcttggtcaggctcaggactttagaggccagatagggataggtccctggggaactccagaaggtttgggaaagagcacaacgattttagactacccagcttctattctgccctcaggtcagagaacagataaacacacatacctagatacccgaacacattgccaccccattgaacaagcttaaaggaaagattgacaagaccttcctatacccatagagagagaaccgagagggggcgcgggcgcctcttccaacagttggttaccttatcgcacactcgctgggtggctggggccccacaaaagggaattgatttgcgctgccgctgcacgcccaaagtcgtttggccttggggaagaacagagggcgacgcacccattgaaggccgcaaggcgcgaaggtgggaaaaggcacagcctgggcgtttccacgcgtgagcgtcccaacgggttgaattaattcgctttgtagacccccatgtccgagagagcccaaacgagttataaaggcggccggaggcctaatttgtccgcgactagggaaataccgcgcattttggctcaaccgggggcggggggccacaaccaaattatgcgatgttggcgcacacaagtatctcagccttggaaagg

SEQ ID NO: 638637 - DNA, 128 bp, Homo sapiens
aatagcgacgcaggatcaccacagtacacggctacaccatatctttaacccactgagtgaggcaaggatcaaacccacaacctcatggttcctagttggattcacttctgctacgccacgacaggaac

SEQ ID NO: 638638 - DNA, 1040 bp, Homo sapiens
tacagataggacatgcgtgggtactcgctgctctgggtagaccaaaggtgcctgccatcgctggtattcaagtgtttcctatcagtctgatgcacactacctgtgcactcttcctaactaacctactatcaaagatattgagcgctctgacgctctcgggtccacagcacggattctcccgatggatgtgagatagcgtcaaagcaaatccggtttcctctaacagtactgttagtatcattaacaccgtttcgcgtagacctcctccaggtaacaaccccgcagatactttgactgggaaatatcaaagaagtaatagagtccgggggcagtggtaattctggagtgcctaattagaatccccgcgtgatgttcggtgaacgcttacatattgtccagaagtcggaagtggtagactccgtgtgatgggtggaaggattgggtcgcgagcgcgcaatcgggtgtgtggtaagtacaagggctcgaagcaatttgacttcataacttccggttcttgataattttacccaatgctaggtatgggcacctacgggtccggtttctattggtgttctttacaataaaacattttttcttctggacaggggctgcgttgtcattttccccacgttggacaccactctaaggccactccccttctcttccttcaattaataaccccattgggtcctactagcaaactggccgtctccatctccatctttagaagagccagcagggcaccctccaggactttgtgaaacaggggggcagatgagtccgtgggaggggcatgatcaagggggatcaccgggcctcagaggaagttgcgccccgccggggcagggtggtcaaagggccacccggaacacgccggactctcccacacagatcggagtggagaacggatggggacatagcggcgaacgaaggtaaacacgatcaggggaacacggcggagaaacgggataggaagtcaccgaaagtgcccaagaaatgagcacgaacaccgaagcagaaaggagagagaacgaagaagc

SEQ ID NO: 638639 - DNA, 915 bp, Homo sapiens
  misc_feature (36)..(36): n is a, c, g, or t
  misc_feature (91)..(91): n is a, c, g, or t
  misc_feature (120)..(120): n is a, c, g, or t
  misc_feature (146)..(146): n is a, c, g, or t
  misc_feature (185)..(185): n is a, c, g, or t
  misc_feature (194)..(194): n is a, c, g, or t
  misc_feature (228)..(228): n is a, c, g, or t
  misc_feature (233)..(233): n is a, c, g, or t
  misc_feature (249)..(250): n is a, c, g, or t
  misc_feature (279)..(279): n is a, c, g, or t
  misc_feature (283)..(283): n is a, c, g, or t
  misc_feature (285)..(285): n is a, c, g, or t
  misc_feature (287)..(287): n is a, c, g, or t
  misc_feature (289)..(289): n is a, c, g, or t
  misc_feature (323)..(323): n is a, c, g, or t
  misc_feature (327)..(327): n is a, c, g, or t
  misc_feature (329)..(329): n is a, c, g, or t
  misc_feature (335)..(335): n is a, c, g, or t
  misc_feature (337)..(337): n is a, c, g, or t
  misc_feature (356)..(356): n is a, c, g, or t
  misc_feature (370)..(370): n is a, c, g, or t
  misc_feature (397)..(397): n is a, c, g, or t
  misc_feature (411)..(411): n is a, c, g, or t
  misc_feature (415)..(415): n is a, c, g, or t
  misc_feature (529)..(530): n is a, c, g, or t
  misc_feature (583)..(583): n is a, c, g, or t
  misc_feature (629)..(629): n is a, c, g, or t
  misc_feature (632)..(632): n is a, c, g, or t
  misc_feature (636)..(637): n is a, c, g, or t
  misc_feature (640)..(640): n is a, c, g, or t
  misc_feature (653)..(654): n is a, c, g, or t
  misc_feature (659)..(661): n is a, c, g, or t
  misc_feature (664)..(664): n is a, c, g, or t
  misc_feature (693)..(693): n is a, c, g, or t
  misc_feature (705)..(705): n is a, c, g, or t
  misc_feature (711)..(711): n is a, c, g, or t
  misc_feature (716)..(716): n is a, c, g, or t
  misc_feature (801)..(801): n is a, c, g, or t
  misc_feature (861)..(861): n is a, c, g, or t
aaaggaacaaaaataaacaatgacgtgtattccaanccaaacaatgagaaatctaatgcaactagactatcagttcaatctatttccaggncgctatcctcactgtgacacgtggcaganttacgcacagatgtcagcaccaagantataccattttactgggagtaatccaaattcctgggganaagcttcanggtccacagcaaaagaaatcatcccccagctggncagtnacacgaacaaaattgnngattaattcagcccccttatggattaagngggntngngnggggtttgtggtgaaatgagtgctggagccaatnactnanctcttnanattgcagaacttgatagangggtactctgcggnaaggtagatcatgcaaccattaatggnttcggtccctggantgcnatcatcataaatatgaaccatgatgacaatgattttttgtatctttatcaataatagatctaaaaacacttctccactggagaatactcaaaaaacctgcttgaattggggccnnttgtgaagctgctgccgcatctcttccattcgctgcttacggtactgctgaanaaaatctttaataatcttggtcctcattcattatggcaaactcctnaanagtnntcnaaaaaaacccccnnccccnnnccncctttttgtttttgttgctcctcctcttnatccagatgggncctgcnagtcnttgacagcttcttgatcagcctttccatctcccggcactgctcctccctctgctctgtctccaactgcttgaagcggcgccagtnattgatcacaccttttgggcctgtgttaactgagatgccttcgcctgccagctcagcctntgcaggcacagaactgctggctggggcacatctgcctcggtccttgtctcgtgg

SEQ ID NO: 638640 - DNA, 458 bp, Homo sapiens
ggacggtcgtgcggcaccagggcccagcccagagatgcccagcaagatgggtgatccggggtagtagagcaaataacgatgtcagtatatctcagatgatgcgtgatgttagcattcaacaaaccaacatggtcccccctcatgtgcaggccatgcaggaaaacagtgcctcgggaaaccatttctcaggccaggggatgtcttacgaggggcacctttgaggggcgctcccaagggaaatcagatgtcctggggtcaaaatccaggcttcccagtcaatagggatgtcacgctaacgagcccatggtgggtcaacttatggcggagtgacatatcggcaggccattggggggtaaacaataagcaaaataatagcaaggcaaataaagcgaagaaaaagaacgccctgtggaagaagaaaaatagtcggcaagatctaaacagccaagatactcgcc

SEQ ID NO: 638641 - DNA, 556 bp, Homo sapiens
gctgaaaagccatctttgcattgtacctcagtccgcctccttgcccgccgcgagtcgcctccgccgcgcgcctcctccgccgcgcgcggagctccggcagctgttatcgccagagtcccatgaacatctctgcttttcatttttaagtccccatgcatctgtgagtcaccaggcagtgtcacccgaccaatgatcagactgctatgcgcgagtagacacgcaggtcttccggaaagatcaccgacgcgacaggcacttagaactgaccacagcaagcgagagggacactggttgatgcgcacaagcacgggcactgacacacacttagggcacaccgactgaagaccggacgacgcccccttgagcccttaagatagtctgtgagcaacaacgtttggtcgttacaaacctagcaaagtgctggaacaaaaccaacttttgtgatggtggaacgagggccagagggagaacaggaaggatcaattatgatacgccaaaactcagtaacggaccggctggcttaaccaggaagcgcggtaaacaaccgtcaaacaag

SEQ ID NO: 638642 - DNA, 1793 bp, Homo sapiens
  misc_feature (2)..(2): n is a, c, g, or t
tnttccagaagcgagatgctgttccaaagcggagatgctgggtggtatactgtgtcagccaagaatgaagcagggattgtgtcctgtactgccaggctggacgtttacacccagtggcatcagcagtcacagagcaccaagccaaaaaaagtacggccctcagccagtcgctatgcagcactttcggaccagggactagacatcaaagcagcgttccaacctgaggccaacccatctcacctgacactgaatactgccttggtagaaagtgaggacctgtaatccagcattcttgttaaagctgaaacactgaaacagccattgccttgaccaacatattcctttgtcacattatgtaaaaggcagaaacatacctttgactataagaaattaaaaaaaaacaccaaaataatatttttcttacttgatataccaaacttagtttaagtagataatgctaatacaaatatacacattgcacagaaaatacacatttactgtccaatttaaaactttggaattgctgtgattaaagtgatcaaaatgccaaaatactaaaggaaatcaattgttcacaggtaactacaatttgtattatctacaagtgcctttaaacacaagatataggtgctgtgtagcctgatagtgtgaaatgtttaatgagggagttgtaccacaaacagtactacaatgattctgaagcacagtgtattcagacagatacagtgaaccaagtgcaatatgtaaggatgaaagaagaagagatgacaaagaaatccaagtaaatgccttgtctttgcaaatgtttttatattaaatcataaggaaggaactacttgccttaaatgttaatatcaaaagagttttctaacaaggttaataccttagttcttaacattttttttctttatgtgtagtgttttcatgctaccttggtaggaaacttatttacaaaccatattaaaaggctaatttaaatataaataatataaagtgctctgaataaagcagaaatatattacagttcattccacagaaagcatccaaaccacccaaatgaccaaggcatatatagtatttggaggaatcaggggtttggaaggagtagggaggagaatgaaggaaaatgcaaccagcatgattatagtgtgttcatttagataaaagtagaaggcacaggagaggtagcaaaggccaggcttttctttggttttcttcaaacataggtgaaaaaaacactgccattcacaagtcaaggaacccagggccagctggaagtgtggagcacacatgctgtggagcacacatgctgtggagattgcagtgtgtctgaggtttgtgtagtagtggaagattttaggtatgtagagcaagttgaaaatggattgagactgcatggtggcataaatgagaaattgcctgtagcatctagtctacttgaaggaagtggagacataaggagagacaaaaacaggtttgtgccataaagtattttttcaaagacaccaagatgtggtaaatgaaaattattagttcacttccctgctgccatgaaactttgccttaagaaggtgctggattccaaggtttgtaaaggcatctcggtaaagactgctttttgaatgcatatgattttgcatcagctagactgagttgattctgaccagacttgatggttttaagtcggaaccgataaattttaaaaaggagaaaaaataatttgacctagtagtataaaacatgaggctttaatggtactttgctatgagcactgtattcctttgcttcatcgt

SEQ ID NO: 638643 - DNA, 454 bp, Homo sapiens
gtagctgatgcattgaaaccatgtgcatgtttgaagatgggcagaggatggtggtgcaggaagaaccagggtgatgatttcttcattatttgagaggggtcagctgctgtgctacaaggtcggtcagaaaatgaagagttggtggaagtggaaagatgggggccttctgattatttgggttgaacttgcactactgatgaatcgtcctcgtgctgccacagttgtggctcgtgcccccttgaattgcgtaaggctgaaccgacctagattggaccgtgtccccagtttgctcagaggtctgagcaagcgggaaagagaaacgcaggcaggggcactgaccgcacagtgagcctgggtctggctaagatgaccaaatgtgaaaagtgagaagagcatgatggggatgctgagcttctagtccctgaggtactagacctggcagcatgtggaccct

SEQ ID NO: 638644 - DNA, 1774 bp, Homo sapiens
  misc_feature (2)..(2): n is a, c, g, or t
  misc_feature (1696)..(1697): n is a, c, g, or t
  misc_feature (1704)..(1704): n is a, c, g, or t
  misc_feature (1737)..(1737): n is a, c, g, or t
  misc_feature (1740)..(1740): n is a, c, g, or t
  misc_feature (1749)..(1749): n is a, c, g, or t
tnttccagaagcgagatgctgttccaaagcggagatgctgggtggtatactgtgtcagccaagaatgaagcagggattgtgtcctgtactgccaggctggacgtttacacccagtggcatcagcagtcacagagcaccaagccaaaaaaagtacggccctcagccagtcgctatgcagcactttcggaccagggactagacatcaaagcagcgttccaacctgaggccaacccatctcacctgacactgaatactgccttggtagaaagtgaggacctgtaatccagcattcttgttaaagctgaaacactgaaacagccattgccttgaccaacatattcctttgtcacattatgtaaaaggcagaaacatacctttgactataagaaattaaaaaaaaacaccaaaataatatttttcttacttgatataccaaacttagtttaagtagataatgctaatacaaatatacacattgcacagaaaatacacatttactgtccaatttaaaactttggaattgctgtgattaaagtgatcaaaatgccaaaatactaaaggaaatcaattgttcacaggtaactacaatttgtattatctacaagtgcctttaaacacaagatataggtgctgtgtagcctgatagtgtgaaatgtttaatgagggagttgtaccacaaacagtactacaatgattctgaagcacagtgtattcagacagatacagtgaaccaagtgcaatatgtaaggatgaaagaagaagagatgacaaagaaatccaagtaaatgccttgtctttgcaaatgtttttatattaaatcataaggaaggaactacttgccttaaatgttaatatcaaaagagttttctaacaaggttaataccttagttcttaacattttttttctttatgtgtagtgttttcatgctaccttggtaggaaacttatttacaaaccatattaaaaggctaatttaaatataaataatataaagtgctctgaataaagcagaaatatattacagttcattccacagaaagcatccaaaccacccaaatgaccaaggcatatatagtatttggaggaatcaggggtttggaaggagtagggaggagaatgaaggaaaatgcaaccagcatgattatagtgtgttcatttagataaaagtagaaggcacaggagaggtagcaaaggccaggcttttctttggttttcttcaaacataggtgaaaaaaacactgccattcacaagtcaaggaacccagggccagctggaagtgtggagcacacatgctgtggagcacacatgctgtggagattgcagtgtgtctgaggtttgtgtagtagtggaagattttaggtatgtagagcaagttgaaaatggattgagactgcatggtggcataaatgagaaattgcctgtagcatctagtctacttgaaggaagtggagacataaggagagacaaaaacaggtttgtgccataaagtattttttcaaagacaccaagatgtggtaaatgaaaattattagttcacttccctgctgccatgaaactttgccttaagaaggtgctggattccaaggtttgtaaaggcatctcggtaaagactgctttttgaatgcatatgattttgcatcagctagactgagttgattctgaccagacttgatggttttaagtcggaaccgatgnnttctggnaaggagcggtcgtccactgttgacctcgtagtntgnacatgcggntttcctgttcttcctgactcgccct

SEQ ID NO: 638645 - DNA, 102 bp, Homo sapiens
tggcggaagtaactgtaccagaagatcatgtttggcaagaggcgaaaaatccgagaggccaacaggctggcggaaaagcggaaagcccacgatagcggtgag

SEQ ID NO: 638646 - DNA, 1138 bp, Homo sapiens
  misc_feature (2)..(2): n is a, c, g, or t
tnttccagaagcgagatgctgttccaaagcggagatgctgggtggtatactgtgtcagccaagaatgaagcagggattgtgtcctgtactgccaggctggacgtttacacccagtggcatcagcagtcacagagcaccaagccaaaaaaagtacggccctcagccagtcgctatgcagcactttcggaccagggactagacatcaaagcagcgttccaacctgaggccaacccatctcacctgacactgaatactgccttggtagaaagtgaggacctgtaatccagcattcttgttaaagctgaaacactgaaacagccattgccttgaccaacatattcctttgtcacattatgtaaaaggcagaaacatacctttgactataagaaattaaaaaaaaacaccaaaataatatttttcttacttgatataccaaacttagtttaagtagataatgctaatacaaatatacacattgcacagaaaatacacatttactgtccaatttaaaactttggaattgctgtgattaaagtgatcaaaatgccaaaatactaaaggaaatcaattgttcacaggtaactacaatttgtattatctacaagtgcctttaaacacaagatataggtgctgtgtagcctgatagtgtgaaatgtttaatgagggagttgtaccacaaacagtactacaatgattctgaagcacagtgtattcagacagatacagtgaaccaagtgcaatatgtaaggatgaaagaagaagagatgacaaagaaatccaagtaaatgccttgtctttgcaaatgtttttatattaaatcataaggaaggaactacttgccttaaatgttaatatcaaaagagttttctaacaaggttaataccttagttcttaacattttttttctttatgtgtagtgttttcatgctaccttggtaggaaacttatttacaaaccatattaaaaggctaatttaaatataaataatataaagtgctctgaataaagcagaaatatattacagttcattccacagaaagcatccaaaccacccaaatgaccaaggcatatatagtatttggaggaatcaggggtttggaaggagtagggaggttattggcatggggatcctcagagg

SEQ ID NO: 638647 - DNA, 989 bp, Homo sapiens
gcggaagatttcggatggaaaagtcacgaggattgacagctgacttgcagaattacatagcataaattaggaacctccacaacatttcatgtcaattcgatctacttcgcccctctttgttgtctctgaggtgcagttgtttccttttttatattgctggtcagcgtatccatcttctccatattcgtgatcgtgttggagctgcctcgaaagactattttgacccgcagcccccttcttttcagggagtcgcttggtatccagtaccacaatcatctatgacattcgtggccacaacccctcggatgttactatcctccctcgcgcacatattattgtctctccccacgatgtactctgtacatgtagtgggctgtaactaatctttccccctgtctgatgctgcttgggtcgttccgagtctcaaatgcgttcgaagacccccttgcggtaggcactgatagccacgccgcgtgtagcggccttgttaggttaacagagtgcaaccggaggttgattttgccccgaacaccagtctcgtttcaaccgaacggcttgcgtccaatacagggtgggtgagcatgggccaagtgttccacctaggccctcactagtctagagtcagccacaagccgggggccccaaggggttattgccctgttctgcaattcctgccccggagaagccttgaacaatgaatgaggggcccacaacggaacttttcgaggcgccatccagtcgctttggaacttgacttgttgtgcccactcgaacaaggaagcattcgacgcgttttttaagctccggatgcaagttaccaccaaagcatatggcattgattaagaaaaaggcccatagaaacgcaacagtttgggcctctacgccgacgcgatgtgccccaaagccaggggcctcccaaagtttcctttggtgctaagaaaaacaacgccgcaaacgccaaagtggaaactacgcccgggcaggcaaat

SEQ ID NO: 638648 - DNA, 430 bp, Homo sapiens
tctagcacggatcccctatcatttaggcaatagagaagaggcacaagatggttgacaggctactttaagctgtgcatttagtactgtaatatttgtgtcactttttcacaacacggtggttatattcttgtataatcttactaatcctataataaaagacagtgctatatctacaaattctatagtacattcatcttttagtttcataaatatatgcaattctcatcataaagtcgcgactaatacatttgcacgttttcatagactaacataatacatctaacttatggaagtctcctgttattgtgttatttttgtctacatctgacattatcttcattaattttcgatgaagccacaaatgtactgtaacttttggaatctatccgagttttatagaataaatgatcaggagcaattctataaaact

SEQ ID NO: 638649 - DNA, 162 bp, Homo sapiens
ggctcggacccctttccacaggatacgcagtttgtaagtcatggggacaagaggtattattgagggaacatatcaaggtatgaggaaaccagcacatctcagtgtgctcagtagcttccactgactccattctccctagagctagacctgtgcttcccccat

SEQ ID NO: 638650 - DNA, 1204 bp, Homo sapiens
ggaactgtccttcccagcactgtccagctttaacgaagccatgcactcagcactcagggcagctggaggagcaaggctatggaagagctcaaggagatcatacagccaaggcaccacgactggccttgcagcctctcctgagatgaccgagcagccagactatgacctggagacctttgctgaaccaacagcgcgcaactctgcctctgagcccagccacacgccacagccactctctcctcacgccccctgcgcacgactgctcactcacaggccccttgccgccctgggcccacctgccccgccctgcccacacgacggccacgcgccctaagccccagcaccacacactaccgccacgccaacgcacaaccgcgcccccccacgctgcaccgcaccctgccaaccactacacacacactcctgcctctctgcgctcttctggacccaaccccccaggcccccttccctctccccctgcgcccccttcacccccacgcacgcacaccccttctgcgcgttacccccttgcgcttcgcgcgctcctacgggcccacgcggcctcccttgcacgccctgcgcgcaccacgcgcctctcctgcgctacacatctgccccacacgctactgcgcgcgcgccatctccctgcgtgccccccacgcggcccccgccctgcgcgcgcacgcgcgcgcgctccacggcatgcctgcaccacttgcgcgcaacccaccgtcccctctctctccctggctattcctccttcccggccctctcgctcctgcccccctctccaacccgcaacgcacgcgcacagcgcggcacgccctccctctcacgcctctcacccccccttctcctctcggcttggcctcttgccccccgttcccctctcttcccatcttccaccccgcgccgcggccccatctgggtctgccttccaagtcccactaacccacggcccctttacttccttccccgacccacacgaccaacctccccctgggcacccccttggcgccgtcttgccgcgccccctggcggcccttgatcctttaacccttgggcaccgcgcaccgccctttcccccttggggcccggccttctcgcctccccctgtgggcccttccctatgggcgcggccccacacacgcgcgcacccggcgcacggccccctctcctctagcgcctacccagcggccctatg

SEQ ID NO: 638651 - DNA, 456 bp, Homo sapiens
  misc_feature (268)..(268): n is a, c, g, or t
agaccacacacgcgcgttccgctgtgaacgagacctataacgcgacacacacgaggaacacaatgcgcttcttcgcacaaaggagtttttccttctacttccgctcttcccacgagaagaaggaagataagaggggaaaacacacacacagagaagaaaacccctcggtggcacagagagccccacaatttcctatactttcacatgagaattgtgaaaatgcccacggagtgctatataaatcacccccggtgtctttaagccacancaccacaacggtgaagttttgtgttgttggctgctccacactgtgcctttctgccacgcctacacacaggaggggaaaagcaaagggttaacacagaaggatagttcctttcaggaggaaacagccacttaaagcactttgagtcaagaagagtggggaaccatttccaataaaccccattttggata

SEQ ID NO: 638652 - DNA, 981 bp, Homo sapiens
ccgcttgccctgtgttccacatgggagccgctttccccagggcgcttttgccagtccctctgggttctcctgcgggccttccggtgttgttcgctgagtccgtgtgctgcccgacgctcgtagtatccccgggtctttcagctattggggcgctataaagtttctggggaagaataaatttctgtgagagcgtctgtgcggtggaggggaacccctcttgtcacaatcggcgtgtggtggggcggccccccctggccctcgtgacctatcagggtggctcagcatcggccttgcaagtctgtcgatctgggccccgttccgacatggtatttcccgggagcattccttgtgttggtcgcctccccccccaccaaggggtgctcccgggtcgacaatgtcttgcccgctttttgtcgaagatgatttaagcgaccgctcatggacgccccatggatggttgacatggtgtaaacacgccacgttcactagtggtgtcgcccgatcgctgtggcgatgcacgtggtgtcaccccaatccccttgtgtgagcgaccctacaatttttcctccttaagaatttttcctttcccaggggagaaattagtcttgaaaacctctttcctcgtttaccacgctggttgaaagcaacgctaatctccatatggcccctcctgagtgagctgaagcacacctgaaattagtccgatgtttttttgtttttctccccatcttccttttgtccatacagtcttcttacaaataactccgctgcccttcttcgagctatataaaaccccaatcacctgcagaatcaccacccacaaacaatagcttcatgtgctatatattaattcgaacacaataataggagaaacattcatgatgttattttttgtggagaaaaatacccatttttttattttttttccaatcaaaaaaaaaagggaacttttaacaaaacaaaaaaaaccaaacaaaaaaa

SEQ ID NO: 638653 - DNA, 1281 bp, Homo sapiens
  misc_feature (338)..(338): n is a, c, g, or t
  misc_feature (444)..(444): n is a, c, g, or t
  misc_feature (507)..(507): n is a, c, g, or t
  misc_feature (563)..(563): n is a, c, g, or t
  misc_feature (597)..(597): n is a, c, g, or t
  misc_feature (620)..(621): n is a, c, g, or t
  misc_feature (623)..(623): n is a, c, g, or t
  misc_feature (653)..(653): n is a, c, g, or t
  misc_feature (656)..(656): n is a, c, g, or t
  misc_feature (658)..(659): n is a, c, g, or t
  misc_feature (685)..(685): n is a, c, g, or t
  misc_feature (713)..(713): n is a, c, g, or t
  misc_feature (720)..(720): n is a, c, g, or t
  misc_feature (731)..(731): n is a, c, g, or t
  misc_feature (734)..(734): n is a, c, g, or t
gaggcgtgaggcgggcctgaagcggcagcgggcggcttcgtccggcgagagctaggccgaggacccgctgccgtgctccccggcacctcacctgcgttcttcacccggactcccgcggcgccgcggccgcggcgtggggtaagggcgggcggtggtctcctccaaggctgcgcgctcggagccggcctgctgggcttgggcggggcgcaggggtccggggccgcctacccggctccagtcctccccctgtgggacctggcgacggcggcggtagggaagaggggagcgtgcgcccggtccggggccgggggcgggtggggaggggggagggcggcggncgggctggggctcgggatccgcatcgggatcgggccgccatggacgacaaggcgttcaccaaggagctggaccagtgggtcgagcagctgaacgagtgtaagcagntgaacgagaaccaagtgcggacgctgtgcgagaaggcaaaggaaattttaacaaaagaatcanatgtgcaagaggttcgttgccctgttactgtctgtggagatgtgcatggtcaattncatgatcttatggaactctttagaattggtgganaatcaccggatacaaactacttnntncatgggtgactatgtagacagaggatattnatncnngtggagactgtgactcttcttgtagncattaaaggtgcgttatccagaaagcanttacaantattgagaggnaantcacgaaagccgacaaattaccccaagctactactggcttccatgactgaactgtctgccgacaagctactgggcaatgccaacgctttcggaacctattttacagatctctttgattatcttccacttacagctttagtagatggaccacgatattctgcctccatggtggcctctctccatccatagacacactggatcatataacgagcctggatcgtctacaggacagtcccaccatgcaggggcccactgtgtgatctgtcctcggtcagatcccgcatcgatcgtgcgtgcctcgccgtatttccccccgtgctgctggctcccttctcggccccacctctcctgacctttaccctgccctggtctcaccactggcttcctcgtgcccacccagcttgtactgcccggatccccctgggccgtcctgcatcccccagctcggcaccccctcccgctgcccccacttcctggtaccgctgcgcgcaccccgctgcatccgtgcctcgctgcccttcccactcgccttctgcagttggcccga

SEQ ID NO: 638654 - DNA, 1534 bp, Homo sapiens
agcggctttccccggcgattcctgcggacccagctgtggcgacgccaggagaccccaagctgcatcgccgagtggaagcaactagaactccaggctgtgaaagccacaggtgggggctgagcgaggcgtggcctcaggagcggaggacccccccactctccctcgagcgccgcagtccaccgtagcgggtggagcccgccttggtgcgcagttggaaaacctcggagccccgctggatctcctggctgccacccgcaccccccgccagcctacggtgcgcccgcgggcccagcttctctctgcgctgctccccgttaaattccctggggagacggaagaaaaggcaaaggaagtcggttctccaggggccagaagtgttgagcctaattagtcttcagacttctcaatgaggaatcgcttatcagtttcttatctgggagagttgaggatggagggacagaaggcacccaggatttgcacgggggggattcagggagagagggtgatgagggacggggtgggccttccagtcttggcccagtccccatcttgcacacattgttggcttcctcttagagccgttcgcccccctggggaggggagacccatagtgacctctcctgacacccgccgaccctgaccagtgttgccgggttcttcaaaggccacgctctgactgctggtctgtgtcacctgcaccccccagccccaccgtagagatgccttcttcggtgacggcgctgggtcaggccaggtcctctggccccgggatggccccgagcgcctgctgctgctcccctgcggccctgcagaggaggctgcccatcctggcgtggctgcccagctactccctgcagtggctgaagatggatttcgtcgccggcctctcagttggcctcactgccattccccaggcgctggcctatgctgaagtggctggactcccgccccaggtgaggcgtctgaccctgctgccagccatatctcagaaacagtgcagaatacacagtatcaatcccagacaccatcagcgattccaggtttccagcccctgggccccaaggaacctttggtttacagtgtgtgacgcagattgtctctgggccgacccaggctcctatgcctgtttggcacacacagacactgagctggttatggaggggccagcgagatgactcatggaggcctcaggagttcaagaccagcccgaccaaaatggtgaaaccccgtctccactaaaaatacaaaaattaggctgggtgcggtggctcaagcctgtaatcccagcactttgggaggccgaggcaggcggatcgcaaggtcaggagatggagaccatcctggctaacagggtgaaaccccgtctctactaaaaatacaaaaaattagccaggtgtggtggcgggtgcctgtagtcccagctacctgggaggctgaggcaggagaatggcgtgaacccgggaggcggagcttgcagtgagccgagactgtgccactgccctccagcctgggcgacagagcgagactccatctc

SEQ ID NO: 638655 - DNA, 2907 bp, Homo sapiens
  misc_feature (1744)..(1744): n is a, c, g, or t
agcggctttccccggcgattcctgcggacccagctgtggcgacgccaggagaccccaagctgcatcgccgagtggaagcaactagaactccaggctgtgaaagccacaggtgggggctgagcgaggcgtggcctcaggagcggaggacccccccactctccctcgagcgccgcagtccaccgtagcgggtggagcccgccttggtgcgcagttggaaaacctcggagccccgctggatctcctggctgccacccgcaccccccgccagcctacgccccaccgtagagatgccttcttcggtgacggcgctgggtcaggccaggtcctctggccccgggatggccccgagcgcctgctgctgctcccctgcggccctgcagaggaggctgcccatcctggcgtggctgcccagctactccctgcagtggctgaagatggatttcgtcgccggcctctcagttggcctcactgccattccccaggcgctggcctatgctgaagtggctggactcccgccccagtatggcctctactctgccttcatgggctgcttcgtgtatttcttcctgggcacctcccgggatgtgactctgggccccaccgccattatgtccctcctggtctccttctacaccttccatgagcccgcctacgctgtgctgctggccttcctgtccggctgcatccagctggccatgggggtcctgcgtttggggttcctgctggacttcatttcctaccccgtcattaaaggcttcacctctgctgctgccgtcaccatcggctttggacagatcaagaacctgctgggactacagaacatccccaggccgttcttcctgcaggtgtaccacaccttcctcaggattgcagagaccagggtaggtgacgccgtcctggggctggtctgcatgctgctgctgctggtgctgaagctgatgcgggaccacgtgcctcccgtccaccccgagatgccccctggtgtgcggctcagccgtgggctggtctgggctgccacgacagctcgcaacgccctggtggtctccttcgcagccctggttgcgtactccttcgaggtgactggataccagcctttcatcctaacaggggagacagctgaggggctccctccagtccggatcccgcccttctcagtgaccacagccaacgggacgatctccttcaccgagatggtgcaggacatgggagccgggctggccgtggtgcccctgatgggcctcctggagagcattgcggtggccaaagccttcgcatctcagaataattaccgcatcgatgccaaccaggagctgctggccatcggtctcaccaacatgttgggctccctcgtctcctcctacccggtcacaggcagctttggacggacagccgtgaacgctcagtcgggggtgtgcaccccggcggggggcctggtgacgggagtgctggtgctgctgtctctggactacctgacctcactgttctactacatccccaagtctgccctggctgccgtcatcatcatggccgtggccccgctgttcgacaccaagatcttcaggacgctctggcgtgttaagaggctggacctgctgcccctgtgcgtgaccttcctgctgtgcttctgggaggtgcagtacggcatcctggccggggccctggtgtctctgctcatgctcctgcactctgcagccaggcctgagaccaaggtgtcagaggggccggttctggtcctgcagccggncagcggctgtccttccctgccatggaggctctgcgggaggagatcctaagccgggccctggaagtgtccccgccacgctgcctggtcctggagtgcacccatgtctgcagcatcgactacactgtggtgctgggactcggcgagctcctccaggacttccagaagcagggcgtcgccctggcctttgtgggcctgcaggtccccgttctccgtgtcctgctgtccgctgacctgaaggggttccagtacttctctaccctggaagaagcagagaagcacctgaggcaggagccagggacccagccctacaacatcagagaagactccattctggaccaaaaggttgccctgctcaaggcataatggggccacccgtgggcatccacagtttgcagggtgttccggaaggttcttgtcactgtgattggatgctggatgccgcctgatagacatgctggcctggctgagaaacccctgagcaggtaacccagggaagagaaggaagccaggcctggaggtccacggcagtgggagtggggctcactggcttcctgtgggatgactggaaaatgacctcgctgctgttccctggcatgaccctctttggaagagtggtttggagagagccttctagaatgacagactgtgcgaggaagcaggggcaggggtttccagcccgggctgtgcgaggcatcctggggctggcagcaccttcccggctcaccagtgccacctgcgggggagggacggggcaggcaggagtctgggaggcgggtccgctcctcttgtctgcggcatctgtgctctccgagagaaaaccaaggtgtgtcaaatgacgtcaagtctctatttaaaaataattttgtgttttctaaatggaaaaagtgatagctttggtgattttgtaaaagtcataaatgcttattgtaaaaaatacaggaaaccacccctcaccctgtccacttgggtgatcattccagacccctccccaaacatgcatatgtacctgtccgtcagtgtgtggatgtatgtttacagttctacataaatgggatcattttatacatggtgctctggaacccacatttttcatgcagtcatttgcagtgaattatttattgtgataataaatagcattagaatacaagatttttaaaaaaaaa

SEQ ID NO: 638656 - DNA, 3339 bp, Homo sapiens
  misc_feature (2176)..(2176): n is a, c, g, or t
agcggctttccccggcgattcctgcggacccagctgtggcgacgccaggagaccccaagctgcatcgccgagtggaagcaactagaactccaggctgtgaaagccacaggtgggggctgagcgaggcgtggcctcaggagcggaggacccccccactctccctcgagcgccgcagtccaccgtagcgggtggagcccgccttggtgcgcagttggaaaacctcggagccccgctggatctcctggctgccacccgcaccccccgccagcctacggtgcgcccgcgggcccagcttctctctgcgctgctccccgttaaattccctggggagacggaagaaaaggcaaaggaagtcggttctccaggggccagaagtgttgagcctaattagtcttcagacttctcaatgaggaatcgcttatcagtttcttatctgggagagttgaggatggagggacagaaggcacccaggatttgcacgggggggattcagggagagagggtgatgagggacggggtgggccttccagtcttggcccagtccccatcttgcacacattgttggcttcctcttagagccgttcgcccccctggggaggggagacccatagtgacctctcctgacacccgccgaccctgaccagtgttgccgggttcttcaaaggccacgctctgactgctggtctgtgtcacctgcaccccccagccccaccgtagagatgccttcttcggtgacggcgctgggtcaggccaggtcctctggccccgggatggccccgagcgcctgctgctgctcccctgcggccctgcagaggaggctgcccatcctggcgtggctgcccagctactccctgcagtggctgaagatggatttcgtcgccggcctctcagttggcctcactgccattccccaggcgctggcctatgctgaagtggctggactcccgccccagtatggcctctactctgccttcatgggctgcttcgtgtatttcttcctgggcacctcccgggatgtgactctgggccccaccgccattatgtccctcctggtctccttctacaccttccatgagcccgcctacgctgtgctgctggccttcctgtccggctgcatccagctggccatgggggtcctgcgtttggggttcctgctggacttcatttcctaccccgtcattaaaggcttcacctctgctgctgccgtcaccatcggctttggacagatcaagaacctgctgggactacagaacatccccaggccgttcttcctgcaggtgtaccacaccttcctcaggattgcagagaccagggtaggtgacgccgtcctggggctggtctgcatgctgctgctgctggtgctgaagctgatgcgggaccacgtgcctcccgtccaccccgagatgccccctggtgtgcggctcagccgtgggctggtctgggctgccacgacagctcgcaacgccctggtggtctccttcgcagccctggttgcgtactccttcgaggtgactggataccagcctttcatcctaacaggggagacagctgaggggctccctccagtccggatcccgcccttctcagtgaccacagccaacgggacgatctccttcaccgagatggtgcaggacatgggagccgggctggccgtggtgcccctgatgggcctcctggagagcattgcggtggccaaagccttcgcatctcagaataattaccgcatcgatgccaaccaggagctgctggccatcggtctcaccaacatgttgggctccctcgtctcctcctacccggtcacaggcagctttggacggacagccgtgaacgctcagtcgggggtgtgcaccccggcggggggcctggtgacgggagtgctggtgctgctgtctctggactacctgacctcactgttctactacatccccaagtctgccctggctgccgtcatcatcatggccgtggccccgctgttcgacaccaagatcttcaggacgctctggcgtgttaagaggctggacctgctgcccctgtgcgtgaccttcctgctgtgcttctgggaggtgcagtacggcatcctggccggggccctggtgtctctgctcatgctcctgcactctgcagccaggcctgagaccaaggtgtcagaggggccggttctggtcctgcagccggncagcggctgtccttccctgccatggaggctctgcgggaggagatcctaagccgggccctggaagtgtccccgccacgctgcctggtcctggagtgcacccatgtctgcagcatcgactacactgtggtgctgggactcggcgagctcctccaggacttccagaagcagggcgtcgccctggcctttgtgggcctgcaggtccccgttctccgtgtcctgctgtccgctgacctgaaggggttccagtacttctctaccctggaagaagcagagaagcacctgaggcaggagccagggacccagccctacaacatcagagaagactccattctggaccaaaaggttgccctgctcaaggcataatggggccacccgtgggcatccacagtttgcagggtgttccggaaggttcttgtcactgtgattggatgctggatgccgcctgatagacatgctggcctggctgagaaacccctgagcaggtaacccagggaagagaaggaagccaggcctggaggtccacggcagtgggagtggggctcactggcttcctgtgggatgactggaaaatgacctcgctgctgttccctggcatgaccctctttggaagagtggtttggagagagccttctagaatgacagactgtgcgaggaagcaggggcaggggtttccagcccgggctgtgcgaggcatcctggggctggcagcaccttcccggctcaccagtgccacctgcgggggagggacggggcaggcaggagtctgggaggcgggtccgctcctcttgtctgcggcatctgtgctctccgagagaaaaccaaggtgtgtcaaatgacgtcaagtctctatttaaaaataattttgtgttttctaaatggaaaaagtgatagctttggtgattttgtaaaagtcataaatgcttattgtaaaaaatacaggaaaccacccctcaccctgtccacttgggtgatcattccagacccctccccaaacatgcatatgtacctgtccgtcagtgtgtggatgtatgtttacagttctacataaatgggatcattttatacatggtgctctggaacccacatttttcatgcagtcatttgcagtgaattatttattgtgataataaatagcattagaatacaagatttttaaaaaaaaa

SEQ ID NO: 638657 - DNA, 2470 bp, Homo sapiens
  misc_feature (1307)..(1307): n is a, c, g, or t
agcggctttccccggcgattcctgcggacccagctgtggcgacgccaggagaccccaagctgcatcgccgagtgggccccaccgtagagatgccttcttcggtgacggcgctgggtcaggccaggtcctctggccccgggatggccccgagcgcctgctgctgctcccctgcggccctgcagaggaggctgcccatcctggcgtggctgcccagctactccctgcagtggctgaagatggatttcgtcgccggcctctcagttggcctcactgccattccccaggcgctggcctatgctgaagtggctggactcccgccccaggcttcacctctgctgctgccgtcaccatcggctttggacagatcaagaacctgctgggactacagaacatccccaggccgttcttcctgcaggtgtaccacaccttcctcaggattgcagagaccagagtgcagagtgaggactgtggcccggtgggggcgtctcctgcctctgggatgtctgccccagtaacctggaggcagccgcgctaccccacactcgccgggagcagggtctcggacgcacctctccttctctcctagctcgcaacgccctggtggtctccttcgcagccctggttgcgtactccttcgaggtgactggataccagcctttcatcctaacaggggagacagctgaggggctccctccagtccggatcccgcccttctcagtgaccacagccaacgggacgatctccttcaccgagatggtgcaggacatgggagccgggctggccgtggtgcccctgatgggcctcctggagagcattgcggtggccaaagccttcgcatctcagaataattaccgcatcgatgccaaccaggagctgctggccatcggtctcaccaacatgttgggctccctcgtctcctcctacccggtcacaggcagctttggacggacagccgtgaacgctcagtcgggggtgtgcaccccggcggggggcctggtgacgggagtgctggtgctgctgtctctggactacctgacctcactgttctactacatccccaagtctgccctggctgccgtcatcatcatggccgtggccccgctgttcgacaccaagatcttcaggacgctctggcgtgttaagaggctggacctgctgcccctgtgcgtgaccttcctgctgtgcttctgggaggtgcagtacggcatcctggccggggccctggtgtctctgctcatgctcctgcactctgcagccaggcctgagaccaaggtgtcagaggggccggttctggtcctgcagccggncagcggctgtccttccctgccatggaggctctgcgggaggagatcctaagccgggccctggaagtgtccccgccacgctgcctggtcctggagtgcacccatgtctgcagcatcgactacactgtggtgctgggactcggcgagctcctccaggacttccagaagcagggcgtcgccctggcctttgtgggcctgcaggtccccgttctccgtgtcctgctgtccgctgacctgaaggggttccagtacttctctaccctggaagaagcagagaagcacctgaggcaggagccagggacccagccctacaacatcagagaagactccattctggaccaaaaggttgccctgctcaaggcataatggggccacccgtgggcatccacagtttgcagggtgttccggaaggttcttgtcactgtgattggatgctggatgccgcctgatagacatgctggcctggctgagaaacccctgagcaggtaacccagggaagagaaggaagccaggcctggaggtccacggcagtgggagtggggctcactggcttcctgtgggatgactggaaaatgacctcgctgctgttccctggcatgaccctctttggaagagtggtttggagagagccttctagaatgacagactgtgcgaggaagcaggggcaggggtttccagcccgggctgtgcgaggcatcctggggctggcagcaccttcccggctcaccagtgccacctgcgggggagggacggggcaggcaggagtctgggaggcgggtccgctcctcttgtctgcggcatctgtgctctccgagagaaaaccaaggtgtgtcaaatgacgtcaagtctctatttaaaaataattttgtgttttctaaatggaaaaagtgatagctttggtgattttgtaaaagtcataaatgcttattgtaaaaaatacaggaaaccacccctcaccctgtccacttgggtgatcattccagacccctccccaaacatgcatatgtacctgtccgtcagtgtgtggatgtatgtttacagttctacataaatgggatcattttatacatggtgctctggaacccacatttttcatgcagtcatttgcagtgaattatttattgtgataataaatagcattagaatacaagatttttaaaaaaaaa

SEQ ID NO: 638658 - DNA, 239 bp, Homo sapiens
ttttttttttaaaaaaaaaaaaaaaaaacaaagaaaattttctccccccattccctcggcccaaatttgggaattaattttttttttgaaaaaggtctaatgaaaagggaattggttcccccaaattttgcttttttttcccccccttgggggaacccgtttaaaatgggcccccccctaaaatcccggggaaagtttaacccgggttgcccggaaaaaaatggggattttttccagga

SEQ ID NO: 638659 - DNA, 767 bp, Homo sapiens
tgtagagctgggtgttactcggccgagggcgagctgcttgttgatgctggcagtgagaaagaggaggacgcgctgacctgaatgcagccgcgcccgccctgttgcccctgtgggcctggagagcgacttgagcaaggtcctgtgcacaatgctccgcatgttcctccagagtgctggcccacactgcatgtcgctgcgtggagaagtggctacatcaaatgaccagtgtgttctggcttgctgctgctgtgcctgctgctgtgtgagctgctgagatggagcctggggtgccactgcttcgtgcagcagttgcatccgctgccgtcgatgtgcccgcgatgagcgccttgaccttggattgactgggctgcttgggagtgactgtccactgttatcagcctggagccctgaagctcttctttcgggagctgccctgagcccctcttccccttctacgcacttcctgccagttcattgcggccatcaagtttgcgggaccatggccctggcgcagccgctgtgtgcgtgacttgggttgcgctcgcttgcccgctcccaaccactgacactctgcgtgatgctcttccagcacctctgcctgggtgatcgagcacgggctgagcagaaccgcatgtcggtgcagagcctgttggccattgtgtcgggcccacgctgctgcggcccgtggtggcagagaccatgcagtgcccatgaccatggtgttccagaacaggttgtggagctcatcctgcagcagtgcgcggact

SEQ ID NO: 638660 - DNA, 524 bp, Homo sapiens
  misc_feature (53)..(53): n is a, c, g, or t
  misc_feature (56)..(56): n is a, c, g, or t
  misc_feature (120)..(120): n is a, c, g, or t
  misc_feature (142)..(142): n is a, c, g, or t
  misc_feature (244)..(244): n is a, c, g, or t
  misc_feature (382)..(382): n is a, c, g, or t
  misc_feature (482)..(482): n is a, c, g, or t
gttcaaagaaaaaaagttgccagcagataatcggcgagcattgtctgggacanttngagtacttggagggaaccggttatttctctcaaaggggctggttataacaagggctcatctttnctaggactctgaagggaagaanggtcagggatctaggatattttatttctagatgaaaaggaaagggtctatgaagaagtagtttcttaggaatcagatggaatgtggaggtagaccacggtcngaaaagtttcaaactggaacaggttcatttggtgtagctagaggactcggctccggtgacacctctaaaccttctcgggctctttatccaggcggccggggtagagcagaaatctcagaacacatccttggtcttttnccaggaatcatttagctcatgcaaggacgggtgggcaagatgggttatataaggatgatggatggactaagggacgattaagtcttagcaaggaaacacngccttagcttaagagtggtccggtcccattttaactctctcc

SEQ ID NO: 638661 - DNA, 1381 bp, Homo sapiens
agcggctttccccggcgattcctgcggacccagctgtggcgacgccaggagaccccaagctgcatcgccgagtggaagcaactagaactccaggctgtgaaagccacaggtgggggctgagcgaggcgtggcctcaggagcggaggacccccccactctccctcgagcgccgcagtccaccgtagcgggtggagcccgccttggtgcgcagttggaaaacctcggagccccgctggatctcctggctgccacccgcaccccccgccagcctacgccccaccgtagagatgccttcttcggtgacggcgctgggtcaggccaggtcctctggccccgggatggccccgagcgcctgctgctgctcccctgcggccctgcagaggaggctgcccatcctggcgtggctgcccagctactccctgcagtggctgaagatggatttcgtcgccggcctctcagttggcctcactgccattccccaggcgctggcctatgctgaagtggctggactcccgccccagtatggcctctactctgccttcatgggctgcttcgtgtatttcttcctgggcacctcccgggatgtgactctgggccccaccgccattatgtccctcctggtctccttctacaccttccatgagcccgcctacgctgtgctgctggccttcctgtccggctgcatccagctggccatgggggtcctgcgtttggggttcctgctggacttcatttcctaccccgtcattaaaggcttcacctctgctgctgccgtcaccatcggctttggacagatcaagaacctgctgggactacagaacatccccaggccgttcttcctgcaggtgtaccacaccttcctcaggattgcagagaccagggtaggtgacgccgtcctggggctggtctgcatgctgctgctgctggtgctgaagctgatgcgggaccacgtgcctcccgtccaccccgagatgccccctggtgtgcggctcagccgtgggctggtctgggctgccacgacagctcgcaacgccctggtggtctccttcgcagccctggttgcgtactccttcgaggtgactggataccagcctttcatcctaacaggggagacagctgaggggctccctccagtccggatcccgcccttctcagtgaccacagccaacgggacgatctccttcaccgagatggtgcaggtgggcggagccgggaggcaggatggcgtggctgaggctgcagtggcccctggcctggctcctaccctgatgtatctgctgggtgccagggggtctgaggtcagttaggacagctgagtcctcaggaacgacatctcagttatcaaagaatcccaggttgatcaactcagcctggtctccat

SEQ ID NO: 638662 - DNA, 208 bp, Homo sapiens
atgctctgcaaggagctaaacccatactggcactgttgcccccgtgttgagcgacagtcaaggccaagcagctcaccccatggatcctggaagccaccagaatgtggcccagttgtcgctggcagagagccagctgcgcttcatccaggcctgacagacccatgcacgacttcggcatctcctatgtcatggtcaggatcaagggccg

SEQ ID NO: 638663 - DNA, 393 bp, Homo sapiens
  misc_feature (25)..(25): n is a, c, g, or t
ctttggtataatcactgagcatatnatacccaatcccagatttgggaatatctgatcatttgaaagttttttgtaatacacaccaatatattcggtgccttcaaaaccactgtatgggccaggtgtgctggtacatgcctgtgatcctagcacatgggaggtggaggtaccaggattaggaattcaaggccagcctcgatgacataatgcctccacgacatgagcccctctaacaaaatatgtaatgtttaggtcaataaatcatattgtaacataatatctagtaattcattctatagttgactggtttgaaacttaacatttttcagaatcccttagatattattttgaaccacatattctcatgttaatgtactagtagaagaattaaat

SEQ ID NO: 638664 - DNA, 213 bp, Homo sapiens
cctcaaagaaacagataattaattacatggtagtatctacactatactgatatgccaggagggaagccatcaccagccctctattattgctgctcctacgtcttgaatccaaagcagctatcctgttctcatgacactaacattgggtttggatgacctgaagtgtttggtagacacgcatgtctaaactaatacaggcttgtgcagaatgtg

SEQ ID NO: 638665 - DNA, 443 bp, Homo sapiens
gagagatctagaggaatatgctaatcaatttatgtggtaatataccactgattacagacacggtcctctgacacttttaggcagttacactaagagataatctttctatgatagggagctgctgtacctgagcaagcccaactgtatgctttttgaaagagagacttcagcttaaacatttatcacttctcaccactctgacacatagagactgctcacaatatgctgcttatggggagaagaaatcaacgctcatcaatctgataaagttagctcagaacgagcctactgctgatctggaggatgtttagccactagcagaagatattactaacatgctctccaaaggctgatgagtatgcctctgaagattgcatgcgcgagctgcctgaacacacagtataactctgtgacaatttatccacatagaatactaagtttgg

SEQ ID NO: 638666 - DNA, 507 bp, Homo sapiens
  misc_feature (144)..(144): n is a, c, g, or t
gcagtgggttcagtcaatttctgtcatgcaataacattcatgacattagcagggatattggcttcataaggagttagaactggctttggacagttgtgacctctagctgtaatttccgtgcttctgctgtatgtctccgcatcntgtactgtgcgcctagccgtatcagcgtgctcttgatatgtattcttctcaagtttagtcagctcatcaagatttgatatcgtgtgagctaatttctcctcagggtttccaaacttctttccagctaagggccctgtccttcttcctacaattggaggtgcgcctatccctaggttgcgacaggggtatcggtcactcgcataatccgacatggcgtcaatgattgcggttgtcggggatccatgtatatagaaaagcgtgcgtcaagtctctgcaaatggcctagatgtcgccgaagccttgagggggcgacatcgtattatggaccaagatgacaccagccgatgctgcacgactacagac

SEQ ID NO: 638667 - DNA, 764 bp, Homo sapiens
ggcatgtgaaatcaagcttaaaaagtttgagaaaattttactgcgctgtgtgctaatggttaaagaagtctggtatctagtgataaatatacccagtttttttaaaagagatgctgttgtgcctatatcatgaagtacattaatttctcatgtagaaaaaaatagctctaaagattgtgtttcaacctaattggtaacctgagtttatatctggcatgaagttcattatggtgatagcacatatgtgaattcaagtacatttggagacagtattctaccattcagtaagtttggttaagtgatttgtaacacttctcagtgtattgtaatttcaaatggtttttataataggtgtatgctgctttgttaggacagatgtgttttgaatgtaccattataagaagaattctatgtatcttaaatatgatcttctgaaaattttatgttccgtaagtacttctgtggccgttgagtatttttaaaaaggctcaactgtaagcctcttagccagtgtggatacaagtattggggggtcacctagccagttgaaatgcaagaaagcacgtagtgacacagctttcccttcagagagccattggccgaaacatttctcaaacaggaaatcgttcttttactaatgtggacctatagatatccgtatatagtgtgtagactacctagtcaagaaatcttgatggcaggtacttggatctaggctggaatttcattcgaccaagtggccacagttaaatgcctttggaacg

SEQ ID NO: 638668 - DNA, 261 bp, Homo sapiens
gcccccccgggggggggggggggggttttttttttacaccccccccttccccccggggggcccccccttccccggggggccattttttaccccaaaaggggcctggggggggtttgtttggtttgggggttaaaggggggggggggggggggcccccccccgggggggggggggtccctccccttttccccggggggggggttttttgggggggggggccgggggggggcctttgttttaaaaaaaaaaggccctttttta

SEQ ID NO: 638669 - DNA, 251 bp, Homo sapiens
ccataaatagtgcttaccaaaaatgccaaagtgccgatctctgtcgtcgatcacaccatcgttgggtagtcccttagagttcatcgtggctatcagttggtgtcagtgcaattctcaagtcccaaataagctcttcgtctgacacggacgttattcaaaaaggagcacaaaagagcaagctttggggcatactgacaaacacttcactggttagaagagaataattgtaacaatcaaataaaattgaggct

SEQ ID NO: 638670 - DNA, 786 bp, Homo sapiens
tcttatatcttattctcccctccccccctttcaccattcccctcggaaggcgctataccccgggcaggggacagaggccggtctcctcaccccaccagcacacatcaccgaagacaacagaagaaaaaatgacagaaaaggaaagacacaaaaacaacaaacacgagaaaatgaacaagaaaagataaaaaaataaagagagacaaaacaacacaaacaacgacacacaacgcaaagaaaagaacaaaaacacaaaacgaacaacgaaaaaaacagaagagaaaaacacaggaaagaaaagaaaaaaaaaaaagagaaaaaaaaagaagagaaaagaaaaaaggaagagaaaaacagcgatacaacacaagacaacacaaaagagaaaaagaaaaaaaacaaaaaggaaaaacaaacaaaaaacaaaacaaaaaaagagaaaaacaaaaaagagacaacacaaaaaaaaacaaacgacacgagaacacaaaaaaaacgaactaaaaaaaagaaaaaacaaacaataaaagaaaaacacagcaaaaccaaaaaaaagagagaacgaacgaaagcaaagcagcaaagaccataaagaaaaacgcaacaagcatagaatccacaaaggtgaaagcgagaaaacaggagagaaagacgaggaaaacagaggaaacacgcaacaaggcgacagcaaagagtgacaaagcacaaaaacagaaccaaagaagcgaaaagcacagggcaagtcaagaaaacacacaagaccagatagggaaaaccaagaagaca

SEQ ID NO: 638671 - DNA, 851 bp, Homo sapiens
gcagaggctaaagaattaaccacgtcatcttcagtcaagcaaatcctctactcaccatgctgttcctcctgccattcatttctatctccttccccttgcatgcatcctaatgaaatagctgtttgagcttttaaatacatgatgtcctacagaaatcctttattcacatgtgcgttaaacctgttccagtcacaccccatgctagcaacagcacgttgaatcacatgccagaaatggcaggcagcgcatttcattaacactggactggatcggaacactcgggttcaagtgggttgccgtgaactgcgtaccaccaaatacatctctgatggccagtgcaccagtcatcagccctctgaaggagctggctgtgtgctggtcgagtgcttgcccctgccagtgctcccataactaggacttggaggaggctatggaacaaagtactgtgacgcagtgaggagctcccaggattggcggtgtgtcaatgacaaaacccgtacccagagaatccatgctgcagtgccgaagatggctgcacacgcacctacaaaatcacagtagttcactgcctgcaagtgcaatgaggtacgacccggacatcagcaaccgagtccagtcacaacgtttgacgagcctgtcatcctgtccaagcccagtccagcatcacgagagagcgtgaaaccgagccagcgaatcccgccaagcacagcactgagttagaacttcagactcccataggctagacttactagtaaaccatctgctttacagacttgacttgcttggcaagactcaagcctgccactgcctgttttctcgacttgaaaagtatatgctttctggtttgatcg

SEQ ID NO: 638672 - DNA, 87 bp, Homo sapiens
agattgtcgctttgtgcttcagtatcgttacctttgtagacttatttaatgaggagccattcaaataaaccaaacttgctttggttg

SEQ ID NO: 638673 - DNA, 770 bp, Homo sapiens
  misc_feature (362)..(362): n is a, c, g, or t
  misc_feature (406)..(406): n is a, c, g, or t
aagagatggagtcttgcactgtcacccaggctggagtgcaatggcccatctcggctcactgcaccctctgcctccggggttcagacaattctcctgcctcagcctcccgagatgctgggactacaggcatgcgccaccacgcccggctaatttttgtatttttagtagagatgggttttgccatgttggccaggctggtctcgaaatcctgacctcaggtgatccacctgcctcagcctcccaaagtgctgggattacaggcatgagccagccactgtacctggccccatttgcatgtccttttcaacaccacatgcctgtacgctctgacctggcctcctgaagataggccctgttcctgnctgagaggggatactggactgcagaacctgtgccctgtggtctntgctttccagctttggagtgggcactagacaataagcatgcagaaggaggcacgaacaaacacctaggaattcattttgacgtatatggtgtttatgaagtttgcaagctatataatgttgagcaatgtatctcacgcttgtcctcctcctccttgtatgttagctgtttttgtagcattgggtgtttgtgtttataggcatgtttccacttccttcctactaggatgaactattgttggagaaaatgtgttaagattccttcacttccttctttctcctctactcccactttttcaccctcttcctctctcattctccatgtagacacccacatatatatgtatgtaggtatactcttgcctc

SEQ ID NO: 638674 - DNA, 278 bp, Homo sapiens
gggctctccccccagggccttttccccccctttgattgggggtgggggccccatagctcaccccccctgtcccctgctgaatgggcagggctgatggggccctgaggagctgcctttggtcaaaggccaggctttgcccaccaggggacttgactcccccccccccggggggtccgggtccaaaggggagggccccccttggggtttggttcccgaatcagaaccccctccccccggggggaaattttaatttaaaaccttaaaaagggccttttcta

SEQ ID NO: 638675 - DNA, 399 bp, Homo sapiens
  misc_feature (12)..(12): n is a, c, g, or t
  misc_feature (30)..(30): n is a, c, g, or t
  misc_feature (81)..(81): n is a, c, g, or t
  misc_feature (100)..(100): n is a, c, g, or t
ccgttaccaaanccccctggtgggatgtgnaaaataacccttgggggaaatgtgtcccctagaccctgatgtgatgccatnggggacaaatttcccaatnccatttgcctccccaagaaaatgaaatgttacctaaataaaccagccgtcagggcaaggagcccccggtccctaaagaaaaaccttgcacagcatggtgaataaaattaataatggtgtattgcagattttaaaattgctaaaagagtaaatttcaaatgctctcatcataaaaaatattagtatttgagggaatgggtatgttactagcttaattgaattattccacattgcattcatatattataacatcactttgtaccccataaatttacataattagaaattgtcaatttacaa

SEQ ID NO: 638676 - DNA, 816 bp, Homo sapiens
gcttggacggaacccggcgctcgttccccaccccgtgcggcgccccatagccagtccctccgtcacctcttcaccgccaccctcggactgccccaaggcccccgccgccgctctagcgccgcgcagccatcgcgggcgccgccggctctcctaagtcgccggccatgacgaccgggtccgacctcgcaggtgcgccagaagtaccacccaggactcagaggccgccatcaaccgccagatcaacctggagcttctacgcctccatacggttaccctgtcccatgtcttactacttgggaccgcgatgatgtggctttgcaagaacctttgccaacatacctttcctttcacccaatgtcctcattgagtgagcagcggcacccatgcctgacccgaaacacctgaatctgaacaccgtgcaggacacccacaccgaggtgtggcccgacaatcttatccctatcagcgcattactccacggagcacccagcacctgttgcctagacctggcctacacaacgccggggcgcctggcccattgccacatggacgttgttgccattaacccactttgtggcaacaccacacccttggtgacatccacgtcacatcactggggagacctgggcaccaacactgggccagctgaccaagaattgacccccccaatttctgtgactttcccatttggcagaccaacatttaccttggaaatgcaggccaggctcgaacggccaatccaacagacacttgggtggacccacgttggaccccactttggcggcaaagaagcggaagacgcccgaaattctggcc

SEQ ID NO: 638677 - DNA, 659 bp, Homo sapiens
agggagtgaaaccatctgctataaaaagacaaaaatcagccggacatggtgggcgggtgcctgtagtcttagctactttggaggccgtgaggcagggagaatcgtttcaaccctggaggcggagggttgcagtgagccgagatgtattactgtactgcagactgggtgacagagcaagactgtctcaaaatgaaatgaaatgaaataaaataaaatattcatgaagaaaaaaaaaaaaaaaaaacaaacaaaacaaacaccagacgagcacaagacaggcggcgcggcgaacaaacacgagctcaaagacacccagggcgccctcgcacaagcacgaagaccgccaggcaccacacacacaagtccactgcacacacaacaggtcaacagaaccacacccacacccccgagcataccacaccaaaacacagagagagagcacgacacaaaacaaaaacaattaagaccacaacaataccgaaccccacacaagcgagcaacacaaccacccaccgcccactcaacagacaagaaacaatacaacaaaactacaaccaacaaacatccacacgacaccccaaacaacaacacacgacaacacacccgatccccacagacacaacacacaaaaaccgcacaaacacaaacaagcgcaacac

SEQ ID NO: 638678 - DNA, 118 bp, Homo sapiens
tgccttaactcccaatagggaatccgtgatggccatctacgacgaaatccgtgccagctccaagagctgatcgagctggtagaacaggacgcgcagtacacctctgctgttgctcatg

SEQ ID NO: 638679 - DNA, 448 bp, Homo sapiens
gactctgtcagtgcgctgtaattctgcactgtgtccttccagttgctggcccggtacaaaggcctgaatctcaccgaggatagctacaagccccggatttacacctcgcccacctggagtgcccttgatgacagacagtatcctggagtgcacaggaaataaaaaatggatctatcagtccagacgggggcctaatgggtcacataattctatctgattacttccaaggacacctctgactacaagataataccccctaaccagtccttccagactcaaaaataaccccagattacctctttccaggacaagagggtgtcctggtccctggtctacctccccaccatacagaagctgctggaactacggcttctccttgctcctcggacacgctcctgtcctgggcctcacaagtctggcggtcagatcgcaccatagactacgaaaa

SEQ ID NO: 638680 - DNA, 971 bp, Homo sapiens
  misc_feature (971)..(971): n is a, c, g, or t
gggtgtatccgctccagccgcgcccgctgcctctgcgagctgcagaggactgtcgggaacaaccatgtcctactgccggcaggaagggaaggatcggatcatatttgtgaccaaagaagaccatgaaactcctagcagtgccgagctggtagctgatgaccccaatgatccctatgaggagcacgggttgatactgcctaacggagatattaactggaattgtccatgtcttgggggaatggccagcggcccctgtggggagcagttcaagtctgccttctcctgcttccactacagcacagaggatatcaaggggtcagactgtatagaccagttccgggccatgcaagagtgcatgcagaagtacccggacctctatccccaagacgaggaggaggaagaggaggcaaagccagtggagccggtggaggagacagctgacactaaggtctctgcagccaaagagcaagggacaagctcttgaaggccacatggctgccactcaccatgggactttctgtacaaatgccttttggtcactttgtgaaagttctttccctctgtgcactgtaatatacaaaataacttattttaatgatcaggcgtctggccgtatacactgaagaaaagggcgtgtgtgcacctgtgtcctgcataaacctgtccttaaacattagtcactcctggatgtactactctgtgaatggcctggattgcactttgaatatgtgttgccacctctcaggcaccaaagtgtactcaggaaagttaccggaaaagcgactatcgaccatttgtatcctttggatttccccctttgaattagtatgatcaatctaaatggccacccaggaagggggcaggcgcgggacgagggtcgcctccacaatgtggccaccgcaaagggaggacgagccccaaagaggggtagggaaacgggcctagggcaaaggtcacaaccagcgttggcn

SEQ ID NO: 638681 - DNA, 115 bp, Homo sapiens
ggaggacctttgttttctgggagtcctggcggttctattaggctgttcatgtgaaagccctaggaggatgaagaggattgttctggtggcaacaaagtgtaagtgtgccgggatt

SEQ ID NO: 638682 - DNA, 329 bp, Homo sapiens
gcacatggctgaagtcatatggagagtatgctcatcagaggctattcactcaactgtgtggtgggatcccatggcatgcggcgagataatcgttgatgcaaaaattgctcgccttgacttcagcctgcaaaaaacaaaaatgaagcttggtgtacaggtggtcattacttaccctgaaaaaccggaccaaattatacagatagaatcagatatccccaacgagagaattcacaatatcctgtcaactggagccaatgttattctaaccactggtggaatagatgatatgtgtatgaaatattcttggaaggctgatgctatggcacata

SEQ ID NO: 638683 - DNA, 281 bp, Homo sapiens
acccttgccattgctattagcttcttagtaatgattacacatgcaagcatccccgttccacgtgagttcaccctctaaatcaccacgatacaaaatgggacaatgcatcaagcacgcagcaatgcagctcaaaacgcttagtctagccacacccccacgggaaacagcagtgagttaacctttagcatgatagcgacagtttgactgtgctattctaacccctgggttggtcgatttcgtgcctgccagcgtggtcactcgattaacccacgtcagtagag

SEQ ID NO: 638684 - DNA, 464 bp, Homo sapiens
  misc_feature (175)..(175): n is a, c, g, or t
  misc_feature (337)..(337): n is a, c, g, or t
tcagaagtagctgggactacaggcgtgtgccaccacgaccggggcgggtggatcgcctgaggtcaggagtttgagataggccatggccaacatggtgaaaccccatttctgctaggaatgcaaaaattggctggtcgtggttgcacatgcctgtagtcccagttgcttgtgaggncaaaatcacatcaaatctttgtttgtttgagacagggtcttgctctgttgtccggactagagttgcagtggcaacatcaaggcccgctgcaccctccacttcctcggctcaagcaatcctcctccctccctccctatagctgggactataggcatgcaccancacacctggctaatttttccttttgataaagtcttgctcttgtcacccaggctggagtgcaggatgtgatgattggctactgcagcctcaatctcccagacccaaagtgaacctcccaccttatctg

SEQ ID NO: 638685 - DNA, 524 bp, Homo sapiens
  misc_feature (82)..(82): n is a, c, g, or t
  misc_feature (86)..(86): n is a, c, g, or t
  misc_feature (89)..(89): n is a, c, g, or t
  misc_feature (94)..(94): n is a, c, g, or t
  misc_feature (119)..(119): n is a, c, g, or t
  misc_feature (177)..(177): n is a, c, g, or t
  misc_feature (195)..(195): n is a, c, g, or t
  misc_feature (207)..(207): n is a, c, g, or t
  misc_feature (249)..(249): n is a, c, g, or t
  misc_feature (274)..(274): n is a, c, g, or t
  misc_feature (340)..(340): n is a, c, g, or t
  misc_feature (351)..(351): n is a, c, g, or t
  misc_feature (357)..(357): n is a, c, g, or t
  misc_feature (372)..(372): n is a, c, g, or t
  misc_feature (374)..(374): n is a, c, g, or t
  misc_feature (408)..(408): n is a, c, g, or t
  misc_feature (445)..(445): n is a, c, g, or t
  misc_feature (455)..(455): n is a, c, g, or t
  misc_feature (485)..(485): n is a, c, g, or t
  misc_feature (500)..(500): n is a, c, g, or t
tgtgagcgcaggaaggggttcacagtttcagtcgttgcgcacggctcctcggagaccaatttttttatgaacaccatgcaanaatngtntgccnggcctggtccccagacaatgaacantttgcctccggtggcatggacatgatggtgtatgtttggaccctgagtgacccggaanccagagtcaagatccaanatgcacaccggntgcaccatgtcagcagcctggcctggttggacgagcacacgntggtcacgacctcccatgatgcctntgtcaaggagtggacaatcactattgaggagccccacccccgcctttggatggaccaatcagggantagagtttaantgcagnggaacatgtcatttntntatttttgtgaggggcccccatgcccccaccccnccacaagaggcaggagggcccagtcatgaccctggtntttgcagggngtctgtacacgtttttttgaaagctttagncagtaacagtttgcncatgaaaaataaagcgagccccta

SEQ ID NO: 638686 - DNA, 138 bp, Homo sapiens
aatttactggcaagttggtttagtaacccaaaaaagggaaggagaaaacagctgcctccccgcccagacattgttttgttcagatgtttcaatgcctcatgaaacaataaaaccccaaaaattttttttccagtttta

SEQ ID NO: 638687 - DNA, 260 bp, Homo sapiens
tgtggagactggggtctcagaaagacggccaaagaatgccccgatttacaccagggcgcggtggctcacgcttgtaatcccagcatttggggaggccgaggcaggtggatcacaaggtcaggagatcgagaccatccggggtaacacagtgaaacctcgtctctactaaaaatacaaaaaataagccaggcgtggtggcggacgcctgtagtcccagctactcaggaggctgaggcaggagaatggcgtgaacccgggaa

SEQ ID NO: 638688 - DNA, 333 bp, Homo sapiens
tttttaggggcccccctttttaaacccccccggggggggtgaggaaaacccttgggctcttttttttttggggggaaaaaaaaaagggtgggttttggggttggggggttacccccaaaaaaccccccgggggggggggtaaaaaaaggtttttgttttttcccgggggcccccccccaaggtcttttgggggggtttcttttttggggttttttggccccccgccccccctaaaaaaaaaggggggcccccttggggaaaattatttttgggggtccccggtttcaaaaaaggggcccctttttttccccctctttaggggcccccccccca

SEQ ID NO: 638689 - DNA, 185 bp, Homo sapiens
actatgccccagatctactgcacctgttagccgcttggaccgggacatgactagaataggactcagacagatgttcaggtacaggggcagtacataggtcctctctctaatcccaaacctaagacctataattcttacaactgcgattccatctaaagtggaagcctttgggtggcacaacagta

SEQ ID NO: 638690 - DNA, 1612 bp, Homo sapiens
  misc_feature (519)..(519): n is a, c, g, or t
tcgtaagctgactaatggctcgtactcgctcgtggttagaaggcatgattatatattatctaagcggcgtgcttatgcagtcttcacgccctcgctgtgatggatttcttgagccgtggtggaatgtatgcgacgtgctgtagtgtactaagtcgtgtcgtgactatgtgtgtcacgtcgcttttgatgacccgacgtgtggggagttccccaagttttcctgggggacaacaaacagtgggggcgtacgcagaaaggagcgtagagatggcctccgtatcgtcgcctttcttgcggggagaggctgttgtgttcctctattggggggccaaggacaccccccgatatgattggggcgagagtcacaaatctcgaggcgggctcaccttgggggagaagcaacaccgccctggtcctgcttggtgagaaacgtcgctgcgccgctcaaaaatacccggggggggaaaagttgtggggccttgttggggtgtccagccacagagggagggggcctcctcncgtggaggagtcacggggaacaatgtttgcgctgggcccccaaaaaaaggggtgcaccaaatgtggcttgaccgcccggttggccttgtggtggacccagaattgccgcccgccacaggaggagaaggtccaccctcggcggcgcacgagcccccccaaggaaacaacgctggggttgctctgggggggcgcgcgagaggaagggagccgccgccccccgttgtgtgtcccacagggccgtttataatgggggtatttctatgccccgccctgagagagtcgtgtcccacggggggggcaagccccaggggagaaaaatctcgctggaaggtgagagaaggggcaacaacgcgtgggatccacaaggaccctggggaggagacacacaagtggggagggcccacagcggagagagccaacggcctgggcctggaaaacacatggcgtgcaaagaaagtgcgtgcccccccgttgtgttcgctcgttgggggcgttgggtcaaatccccacgccacagagtggtttctgaacacaatgggcacagcaatcttaacacaacgcccgcgagaagtgggcttgagtaatttcaccacgagaggagaaactcttgcaatattctgcgccttttccttgggaaggggtggtccgccaaatggttgccacagtggttctcgttctcgcacagaatttggcgtaaacccacaactcgtgtgcaatccacgtgaaccccacttgctagtcactcaaacgggtgacacaaacgaagtcctggcctctgttctgtggaagacggagttatcacccttcccaacattgctgaaaaaggttcaaggcctcttcttggctgagtgccaatctgcctttgtggctgctgcccctcgtggctgctgccacaccacacgctgctccctgctgctgctgcacgccccacgctaaaggttgaaagccaaggaaagaagtcggaaggaagtcggaacgaaggaatattgggagatttggtctctttgactaatcacccaaaagcaacccacttagccagttttaatttgccaaaacaagggaataaacgcgcctacttttttataaaagtcca

SEQ ID NO: 638691 - DNA, 90 bp, Homo sapiens
ctcctcagtgactctggcttctatctctgtgcctggagtgcacacacatgggacactaggagtctcccgaaaagaaacattcagtacttc

SEQ ID NO: 638692 - DNA, 799 bp, Homo sapiens
ggcatgcatttatgtgtatgtgtgttacagtataaccgctgaggaatgttcaagggttattcatctttatttgtttgcaaaacttaatttatactgcagtttctgcatttttacggtttatttttctttagttagaacgtgattttctttatatcctggaaatgccttacacaatatctattcaataaatgttattgaatgaatgtaaataacataatttagagtttttaaacagtcataacatgcctaattttaaaaagaaaatacctcttttttttgttgtttttaagagagtattttgctctgtcacccaggctggagtgctgtggcatgatcttagctcattgcaacctccgcctcccaagttcaagtgattctcctgcctcagccatcagagtagctgggattacagatgtgcatcaccacacctggctaatttttattttattttatttatttatttatttttgagacagagtcttgctctgtcgcccaggctagagtacagtggcacgatcttggctcactgtaacctccgcctcccgcgctcaagtgattctcctgccacagcctcctgagtagctgtgattttaggcacctgccatcatgcccggctaattttgtatttttagtagagactggttcaccgtgttggccaggctggtcttgaactcctgaaccttaggtgatcaaccaccttggcctcccaaagtgctggattacaggcgttgagcaaccgtgctggctaatttgaatttagtaaaatggggtttccatgtttgcaggctggtccgaatct

SEQ ID NO: 638693 - DNA, 174 bp, Homo sapiens
actcactctgatgtcacctcggccagtagccattgtgatactcagcaggacgagcgcgagcttaagctaccactataatcacagcaaacaagtggatgccaccaacagcacgttttcagttcgccgattatcgctcactgagttcgtcatatagacagttggccatctatttgg

SEQ ID NO: 638694 - DNA, 521 bp, Homo sapiens
tcgtggtttgataggcaagtgagaatatgaagaattgactaagagataaatcaaaagtgtccaggaatggtaaaaaagggggggtggatggatgagtagtgaactctagcactgtcagagttcaatcagagaaacagaatcccttggagatggaaccacagttccagctgagtgaaactgacatacgacaaatccatcacaaccctgcatcacttttaatggaataactgaggctaagcaagtgtggagttagaattctcaaactaacaacgacaacaacaacaaaaaaaaacctgagggagggaaaaacaaaaacgggaaatataaatactaatttcctcaacttcatagtggagaggacatctgcctgaacctgataaatcaagaaatagaggcttgagtatatcacttaagattataaatgtaaatactacaagatctaaaaacacacataaacctttcaagttatcacagtgaaagcatgaaacacagaccaaagaaaacagaccctatcaaaagac

SEQ ID NO: 638695 - DNA, 785 bp, Homo sapiens
agcgggcttacggcctgcgctcgggtatcgcggcgggtcctctctatctagctccagcctctcgcctgggcgccactccccgtgtcccgcgtcctaggccgaccatggcgcggggccgcctgtagcgcggccgcgtgctccgtgctggccagtcctggccgtggacctggccgtgtagcccctgcggtcggctctcagtacccggtcgagcggccgtgtcctggtgcggacggccccgtggatcgccagcgtggagggaggagggtgtgcgtgcgtgcactgtgactttgacgtcggcgacgtatcaaggacaaggccagcaacgatatgtaacctagaatactccgacgcgactgcaggtggcagctgcgcccgcgatgcagatacgtatccttggggtgaactacttcttgtgaccgtggaagctgggccacatacctagcgtgttgcccagagacccgagggtgcagacttggatcaacgtgccccagttccatgacctagcctacgatctagcaccacagggagagcgattcatgctcgtttccagggatctacgctgttgccgttgtggcatggggcaccagatgacctgtggtcggaaagtcgcaccctgatccagcgacgccctcacggggggtcgtgtaacactggggcattgtgcctggttgccctaatcgaaccgtacttatgcacaacccttaccagggcgtctagtattgcctgacccaatgaaagtggagagacctcctggcctgaagagaaaagccggagttcaccatgcc

SEQ ID NO: 638696 - DNA, 85 bp, Homo sapiens
gcggccgcctactactactactactgctcgaattcaagcttctaacgatgtacggggacatgctataaaagtggacaggtactcc

SEQ ID NO: 638697 - DNA, 964 bp, Homo sapiens
  misc_feature (26)..(26): n is a, c, g, or t
  misc_feature (55)..(55): n is a, c, g, or t
  misc_feature (57)..(57): n is a, c, g, or t
  misc_feature (74)..(74): n is a, c, g, or t
  misc_feature (83)..(83): n is a, c, g, or t
  misc_feature (155)..(155): n is a, c, g, or t
  misc_feature (161)..(161): n is a, c, g, or t
  misc_feature (165)..(165): n is a, c, g, or t
  misc_feature (167)..(168): n is a, c, g, or t
  misc_feature (211)..(211): n is a, c, g, or t
  misc_feature (259)..(260): n is a, c, g, or t
  misc_feature (299)..(299): n is a, c, g, or t
  misc_feature (307)..(307): n is a, c, g, or t
  misc_feature (312)..(312): n is a, c, g, or t
  misc_feature (323)..(323): n is a, c, g, or t
  misc_feature (604)..(604): n is a, c, g, or t
  misc_feature (610)..(610): n is a, c, g, or t
  misc_feature (613)..(613): n is a, c, g, or t
gggagcggcgcgcgctcggacctctnccgccctgctcgttcgctctccagcttgngnatggcggctacctgcgnggtcgtgcngctcgctctgcagagcctcaggctcgcggccggctgggcgccggcggcctgacagccccactcgaagaagcngcgtgntgcnanntatgccgaaaaaggatcaaggtggcgaagccctgtggttggangatggatggtgatgagatgacccgtattatctggcagttcatcaaggnngaagctcatcctgccccacgtggacatccagctaaagtntttttganctcgnggctcccaaancgtgaccagatgatgaccaggtcaccattgactctgcactggccacccagaagtacagtgtggctgtcaagtgtgccaccatcacccctgatgaggcccgtgtggaagagttcaagctgaagaagatgtggaaaagtcccaatggaactatccggaacatcctgtggggggactgtcttccgggagcccatcatctgcaaaaacatcccacgcctagtccctggctggaccaagcccatcaccatgggcaggcacgcccatggcgaccagtacaaggccanaagacnttngtggaggacaggacggcactttcaaaagtggtcttcaccgcaagaagattgcgagtggggtcatgggggtgggctgtgtcaaactttccctggagcggggtgagggcatttggatttcacagcgaggagtcatctattagtgggagaagtgtcatgattgcatcagagaaatggcggtgaagaatagacagaatatacaagtagagcaagatgggtcaccgggttatccggcgcttcgaagcgtaaagacagttagcaatatagttgatacaccgcaatagaattgcggatgtctaagctggtgtatgtggagaattatcgatgggacatatacagattcctagaaatacg

SEQ ID NO: 638698 - DNA, 223 bp, Homo sapiens
ccgcacaccaccacgcccggctagtttttgtgtttttttggtggagacagggtttcaccatgttggttaggctggtctcgagctcctgacctcgtgatccgcccgcctcggcctcccagggtgctgggattgcaggcgtgagccaccgtgcctggccccacataaagtttctgagcacttgaaatgtggctagtgtgcggctgaagattgggtaccgagctcg

SEQ ID NO: 638699 - DNA, 214 bp, Homo sapiens
ctagagatcccgcccggatagcgtgatctgcctagccgagtagggtctcttatcacgtggctcctcagctaaggcttctaattccttttgacatttaactttgcgagccagctccgtggatcaatcatataagatatgcgactgagacctagccgtcgtttcaaggcacgcatatctttggcccacatagttaaacgatcgtgtctctacaggt

SEQ ID NO: 638700 - DNA, 143 bp, Homo sapiens
ggcatcaagaacccagtgaacaagggcaccaccacagtggacggcgctggcttcggcatttaccggccggcggagttttccaaggaggacgcgagtattaggcgttcccaaagaggatgatgctggcctaccgttcggccaac

SEQ ID NO: 638701 - DNA, 406 bp, Homo sapiens
  misc_feature (257)..(257): n is a, c, g, or t
  misc_feature (320)..(320): n is a, c, g, or t
  misc_feature (355)..(355): n is a, c, g, or t
  misc_feature (361)..(361): n is a, c, g, or t
  misc_feature (393)..(393): n is a, c, g, or t
gttaaaaccgcagccaaagccctcttcttcctatttctcccgaaacccagatccagatggttttacaaatgaactcttccaaattttaagaaattgttaatgtttcccttattaagatattgtccttaaaaaatgagcttattctaagaggcttatgtaatcttgactccaaaatcaaataaagacatttagtaaactcattttaaaatttaagtgagggaataaaagaaaagaaaaatagcattccttttgatttngaattaattctaaataaaatgatattcagtccgatcttaagtgtgttaaaaataatatcatgntcaagtaagaattattccagaaattttaaaaggtngagttnaaccatcagggaaaatcagctggggtgcagtnggcttgattgccc

SEQ ID NO: 638702 - DNA, 148 bp, Homo sapiens
gacgctagggtagcggcatgtatcaggtactcacaggttgactgcagaggagaggaacacgctatacttgaccttaaagcagcaggatggtcggaatataagtgagagagatgccattctacaaagaattctccttccacaaatttta

SEQ ID NO: 638703 - DNA, 234 bp, Homo sapiens
agatggggcataaacctcgacgggtcattatacgcacaggaagagcaatccatggatgtgaaagtacgagtaacaaccagcgatgagaccagacaacgggcctggatgggtgatgacaactatctggcgaggctgagcccctgcgtggtgagggagcccaggactccttctaggatgtctttccagcctgtgtggagagggtgtcccctacgatgcggtgagaaaactcttcta

SEQ ID NO: 638704 - DNA, 281 bp, Homo sapiens
caccttgatcatctcatgactttatacaggaatcggagatagtgtacctttaaagtgataccgtcatgaaagagtcatctgaaatgactctcgtgctggaggaaaggaaagtaatgaaatcaacattcatggttatttaacatgccttacaagctaagcataatcatcacatagtacactccttttcctagtcataaaaatagtgccagaaactatatttgttcaaatcatcattgcaaacggtatcagaatacaaatcagatcattcaaaccagtggctc

SEQ ID NO: 638705 - DNA, 423 bp, Homo sapiens
gatatactttggatatggatttaaatggtctctaagagccgggggtagggggcaggaaaagtgggttgtttttgcccctcaaagtccacctacctagaaaccaagcccacggttttggcggtgaccctgataataaatgggttttttaagaggggccagcccctccctccccagccggaggggtcattttttttttgtaccattaaagggagctttgatgaagttggagagaagggctcaaggttttcgcccctcccctccctaacccttaccttcagtttccaccagcctgaagggcctcttaggggatcctcagggggcccccaccagggcacaccctactgtccttgtgcctcacgccccctcctcatcctgcaccccttccatccccccttccctttcaataaacagttgggatggata

SEQ ID NO: 638706 - DNA, 1598 bp, Homo sapiens
  misc_feature (1094)..(1094): n is a, c, g, or t
  misc_feature (1439)..(1439): n is a, c, g, or t
  misc_feature (1598)..(1598): n is a, c, g, or t
tcttctgtttcaatgggcagctctgtttcctaaagtggaatgaactgaaaatacaaattactaattaaaagataaattacccattaagcgtgaaaaaagagacagagagcaattcagtgtttcaatgtgttcaccattccgtgccaacccccacttcgtgtaaaatatactttatcacctactctcagcatcttcacacttttgtaaccacttaaacactttaaatataatttattatttcaatgaggagaatatcttatctttatgagtttcatattctcaaaaaaacaacaaaacacaacccaacaagagaaaccccttcacaactgtgtggttgtcgcaaacctcacaggtgtttttcaccacacagtgtggaccacaaacaaattttatattctccacaaagaggtgtgagagagagatctctcacaggagaggggtgggctattaccacccacaccacagtgggagacctctcagggagaagaggtgagaaaccacaagggtctgtgtttctccacaacccccccaaggggaagagtgtggtgtggcctctccccgggggccacaagggcgccagggggcagggaggacatcctctgtggggaggtctctctcccctctctctgtgtgtgggccccgaggggcccctcttgtggaatctacacaccttttctcactatttttggggcgcatatctctggagagcgtctaaagaggcacccgagatgataggaggcgcacgtcgtctcaacaaacaacagacaagaagaggggcgcccccccccaataactattgtctgtgacaaagcgcgggtgggcccacccagggggccgatacacgcgagcaaacgagggtggtcgttcccacaattattcggacactcacctcctgtgtacttacgcgcgggcgccaccgccaagagcaggctgtgctgttacagaaaagcgagtttgttaaccccgaaaaattattccgcaacgatcttcgtgacgctttctaaacgatgtgttgacgaagcaaccaataggacgtgttgctccaactcgatcgataagtttccaccagacatccgggacagaggcggggcccncggccctccttaagaaggttatctccccccttcaagaggggggcgccaaaaggtctatcacaggcgctatcacccacggttgttctttgggctaacgagggggggtgcccccctaattgaggaacggcgcgatcttatataacgagctaggacacacgtgtgccccagcgctgttttatcaaaccaccggctctcgtggtccttgtgtaggcaacacacaccgtccctcctgccgtggcgagaccctctcctccgtgacagaggagcccccccatctgcattctcgtggggggggcgagcccaactctgtgtcacacacaccagcactccccatcaacgaagaanatatacacggcctctacaccggacacaataacacacctttcagcgctggctatctctgttgtgaaccaaacacccgacacttacggtctcgcagctgaacgactcgtcgcgccgacgatactatctctaacatactgcgagcccctacctgacatctgn

SEQ ID NO: 638707 - DNA, 480 bp, Homo sapiens
gcggttagcgactcatagaggatcccccgatacaaggccgacagtgacaagaaaagtagctgtgatctagtgtctgcactaaagctgactttcctggcactcagaagtgcccttccagtgcctaactgcagaagggtggcctcagcctcctcctcctcctccttgtgctacctcctcacggatctgcaccagcaactgaaagaggattggggctggaccttccccagaccccggtaagccacagctgccaacgtaatggacccgctgtggttggacccggaaatgacctgatcatatgacgtggcctggtacacataatcttaatcaatgtgcccccttctctaccacctaactgtagcagaggctccagacgaatgacataagcagacaacattatctcacgggttcgtgatacgtgttccagaaatttgactctggtgcatccccttgagactctcaacgctcccaaacacctgctca

SEQ ID NO: 638708 - DNA, 852 bp, Homo sapiens
tccatgctgaggctcagacaggcctgtggtcacccataggctgttcgtgaagagttcttgccactctcaaaaaagctgcatgactatggatgagctgctgaccttctttgcagacagaactgtggacttggacatgtgaagaacgcacatctgatcacgctagtccgtgctctcaattggctctagcaggcgtcatacctaattaaagggtgacgtctgccttggcggcagaattgtgcagaggaagtgttgcgctcctcgagcggagacatgaaaggaaaatcaattactgattcacttcacacagatcttcatgcgtacccatagcttgatggcactggtgataggcaggcgcccaggtataccgagctaccttgcgtgatggccgagttgcaggaagagggcaactggctgcgagagcctacatgagcaagtgtactacggcagtggctgaggcccagcgagctgtatatcctgtgcgggagatcatccatgagcttcagagaaagatcagtcttaatactccttggatggctaaacttgtgatccaacaggagcaatagatttactactgatgaggagctagttcagcgacggcgaaagtgaaatacagcagaaatacaaggcacgaagtggcaaagcgtttcaatgttccgcccacggggggaaccagggctccggaatgaagacggtttccaggctacgtaccacgcacctggcggcggtaaagcattgccgaaagcagagacacagggtgacaaacttggggcacccatgcgtaagttctcgggtgcacggtgtacccggcagcaagcctcagcgggggtggacgcagagcgggagacacacccc

SEQ ID NO: 638709 - DNA, 960 bp, Homo sapiens
  misc_feature (228)..(228): n is a, c, g, or t
  misc_feature (237)..(237): n is a, c, g, or t
  misc_feature (264)..(265): n is a, c, g, or t
  misc_feature (267)..(267): n is a, c, g, or t
  misc_feature (320)..(320): n is a, c, g, or t
ccacgcgtcgcccacgcgtccgctaggcacccgggctcttctgggggctccagaactaagccacccagacaccatcatcccgaaaaccccagcccttctcccatggcaggctacttgccccccaaaggctacgccccttcgcccccacctccctaccctgtcacccctgggtacccggagccggcgctacatcctgggcccgggcaggcgccagtgcccgccaggtanctgcccagntcccggttcgccctcttcccctcgccnngngcccgtggccttggggtctgctgcccccttcttgccactgccaggggtgcctnctggcctcgaattcctggtgcagattgatcagattttgattcaccagaaggctgagcgagtggaaacagttcctaggctgggagacctgtaatcggtatgaactgcgctctggggccgggcagcccctgggtcaggcggccgaggagagcaaatgctgcgcccagtctgtgctgtggacgcccgccagggaccgctgacgatgatccagcctggccgaccccgggagacgtgcaggtgctgcagtagactaccgaccgctgcaactgtggctgcacgcgtgctgccgcctgtggcctccaggagatggaagtacaggctccagcaggcaccagcattggccacgtgctacagacgctggacatcccttcctccccaagttctccatccaggatgccgagtcgccagaacagtcttgccaagtggtggggcctgctggacctgtggctgtggcacagacaccaaactttgagcgtgaagactcgggatgaatcccggcagtgtgggccgattcagtaagcaatgggtgaggccctgatccgagaaatgccctagagcatccgacttacattggcttacagtcccgctgacctgaatctaaggcgaaggctggcatgctgagaacaaattctcactggccac

SEQ ID NO: 638710 - DNA, 838 bp, Homo sapiens
gctacgagctggccgatggtcaggtcatcaccagtggcaatgagcggttccgtgtgtccgtcaggcgctgttccagcctcaccttcctgggtatggaatcttgcggatccacgagaccagcttcaactccatcatgacagtgtgagtgtgcacatccggaaagaccctagtacagtcccaacgaacggtgtgcctgtacggggctggaaccaagcaatgtatcacgggcaattgctcggataggatgcagaaggagatcacgcgtcctgtggcccagccaccatgaagatcaaatgatcaatcggctaccctcacagtagcagcgacgtactcgagatgtagggatcggatggctccatcctgtgccatcactggttccatcattcctagtcaggatgtaggatttagcaatggcgcggcagtacgcacgagtacgggcccctccatcgtccaccgtcagcatgcttctaaacggcactcaggcgcatgcgtagcgatttagctgctatggggttaacttcgtagacatacgcaatattggcccctggcaacatgctcacgcctcatgctagcctcacgaaactggaataagccttcgaaaagagattgtccttgaagctggtatctgatatcagcacctggattgtagacacttgtcgctgattttgaccttgtattgaagttaactgttccccttggtattcgtataataccctgtacatatctttgagttcaacctttagtacgtgtggttgttcacttcgggtaaggtaagaacgtgcttgtgggagacaagtctgcggctcggtgaggtccgtgtggccaggagctctgatct

SEQ ID NO: 638711 - DNA, 199 bp, Homo sapiens
ggttcccctaaaaacatcaggaattagattctcataggaatatgcaacctggatccctcgtgtgtgcaattcacaacagggttcatgctcctataagaatctaatgatgctgctgatctgacaggaggcagagctcaggcaggactatgccatacttttaatttagggattattttctatgctttacttttactttaag

SEQ ID NO: 638712 - DNA, 356 bp, Homo sapiens
taggtggaaaggatgtgctgatggcatgagacacatggagcagagggacgagagccgtgggtccaacgggggccttgtgacaccatgtgcaatgagacaatgggtgagcacagagtccacgtgggggacacaatcaacttattcacgaatactgtgtgttcgcatatccgatgcgcagatgcgcttggggagctaccatattttgcagaaaagaacatgcaccagcagatcatatacaccccctacttttcttgccttacgaacgtgtgctgtgcttcacctttctcctcctgttcgctgctcccagctgctcccctcctatcacgcgcgcaccttttcccttcagctcacgagca

SEQ ID NO: 638713 - DNA, 462 bp, Homo sapiens
  misc_feature (1)..(1): n is a, c, g, or t
ngactgtcacaataactgtacctggcgtctccctcattggaattgtcaagcctatctattcatctgtgaactgttatttgaagttgatctctgtgtacatcatgcgcatcaaggtatctcacggtggtgatgcttagtcgcctagggacatacatgatcccccgtcttagccaaatagagcgaacgtgctctgggattggaagtgagcttggtcgtcgcataagcgtgttctcagttgtggctatagttgcgtcgcagccagaaggtcatagtgtaggtgatagtgataacggcaattcccgagaatgttatgcatagtcatttgcacaatgtgtcccggttggacatgagtgtaggcttcagtgtgaggcttctaatacgtatatcctgttagcgataatgctattattcaagtggtttgatagtaaggtggagtgagttggtgccgaattcctgcagccc

SEQ ID NO: 638714 - DNA, 416 bp, Homo sapiens
gatccatgagcactgccacaggcctgatgactgcactagatctcaggaaaacagaagatcttcctattaccacacactaactgaaaagtgacacaggaaccaactccttaactttccaaattactgagaactcagactgccaaataccgtacctctggacagatggggcctgcttggtctttctatcaagggaagggaggccaatgggggagtaatgcctgtcatttccaggggaagcagaaaaaggacagtaaacaactttactaccataggccccagcgcagagccgtagagggagaagcaccttcctctctagcataacaagaatattcacaagagttttttatatagtgttttttaaacacacgataccaatggtcctaaacttgggtcagtcaactggtgaagataaccta

SEQ ID NO: 638715 - DNA, 984 bp, Homo sapiens
ggttcgctgtggcgggcgcctgggccgcccggtctgtttaacttcgtcttccgcgtgtgtcccatacgtgatacttctgcatgtgacccagatagcatcactggtttacttggccgtgtgaacgattacccaaggcacttgacggaccgattgcctgcagaacgatctgctgcgtggtacgatgcctcgtaggtaaacacacattagaagtagctgcagccgacggttccacgcgcaaggtgttatcgtggatattgccaaggaaggaagagtgcaacgatcatggactcaggaacacacagacctgccaaccgttacgactcagtggcttgtgcctcgccctcatgggtgccatagactcccggtaatccactatcttgtagtccaattgatagccatatggtcactgcgagatgaccccaacagcgctattccagacaacaacagatagatcatgtctatcttcggaagacgcaacagaaggcagcacgcagtcaacaacaacaagcagcatcagcagcagccagcagcagacaacgagcaacagcacgcagcgagcagcacgcagcagcagcagcagcaagcagcagcagcagcagcaagcggcagagagcagctgacagcccgacacaagcagtcaatcgtaccccagacaaggccacacacgagaggcaaacctcaacgaccaagcaaccaccagtcttcttcagaactccacaagcactactcacaactagcacccttgctcgagaaccaactatcaactgtaatccacttcaccaccaaataaccataccaaatcaaccacaccaatcaacactcccgtgacccaacaaaccactacttaacgagatgacattactgcgtacactaccactccaccagtattcacaacacaacacttaaacatacaaccaaacatgaaattatataagtacaattaccaccttgccacctaacagacacattttgccacataccccc

SEQ ID NO: 638716 - DNA, 382 bp, Homo sapiens
atcaaagtcggttgggacaacagaggtccacatgcaaagaattaagttggacccttatctcgccatgcagaaaatgtaactcaaaatggatcacagatctaaattaaaagctaaaattataaaactcttagaagaaaacatatgtataaattttcatgaccttggattaggtaatgctttgttagacatgacagcaaaagcataagaaaccaagaaaaaaataaataaattggacttctgatatggtttgggtgtgtccctacccaaatcttaacttgaatttaactcccacaactcccacatggtcgtgggaggaacccagtgagaggtgattgaattatgggggtgggtctttccagcattgttctcatggtagtgaatg

SEQ ID NO: 638717 - DNA, 484 bp, Homo sapiens
cgaggtcaagggctgcagtgagccattatcactccaccgcactccagcctgggaggcagcgtgagatcttgtctaaaaaaaaaaaaaagttcatttctcaaacctccttctcggccagtcctttgcaccaagaattttttctgtccgtggggattggcctatacggaaagggcgatttgggacactaggggtgggagggaacagtcattcccatacatacacacaccatccttagtagtctcccgctccacagcactagtgaaatagtggtgccaggcttggtgtgtcccgcaagacctgaaacatgcatggtctagcccttaacagagaaggtgggctcgacccttgttaaaatcactcattaagagtgaagggatggatccatcctctggggggggggccccgacctctaactagtgcaaccaatattatgatgaagatcggccgagggtgggaaaggcctctcgcgggctagccaggattg

SEQ ID NO: 638718 - DNA, 185 bp, Homo sapiens
  misc_feature (76)..(76): n is a, c, g, or t
gtggttccatggatgatggcggtttagcagattccaaaaaaggatttgtacagcatcctgggagcagacccatctncaaatatatcagacctaaaacaaaaatatcaaaaactccatattaatggttcattgatgatgttacatagccctctgacccatgtgaactgatgacagaatagaggcac

SEQ ID NO: 638719 - DNA, 797 bp, Homo sapiens
aggcgtatgtagaagtagaggttaacgagggtttgttgtggtctggaacataagatgagccaaagggggccaagcattgcttcacacctgctaatcccagcactctgggtagagccgaggtgggcagatcacctgagagtcaggagttcaagaccagcctggtcaacgtggtgaaacccgtgtctctactaatgaataccgaattacaatgaataaacagataattataatcacatggggtgactttgcggggccgctatggtggagtccccttgacttaggtggctgtgtggagccaaggtaaaatcgtattgcacaccggagtcggtagttcgtgtatttgtagcccctgcatggctgcaccctgttcctcctattttgggtgtctaatgagactccttcaaagcaaagcaatgacaggtgggtgcgtgaaagggtcttgcctcgaggggccctagtatgtgccgtgtcccctttgtttgctttgctacagcggtccccttctgggctcggtgatactcagcctcccagcggtctttgtacacctgctctggatgggggtctcatggcctccacgtagggaatctcttgtgcgcgaggtggtccccctttttctctgggtttggcgtgacacttccttgggcccacttccccttgggggggcttgttaggcctttaggcgtaagatgttgacctttgaggcggtttaccgggcgttacttgccgatttgtcccgttgtgaacacttttgcttcgcggggttttgcctgctgactttttccccgagcggagtcgcg

SEQ ID NO: 638720 - DNA, 354 bp, Homo sapiens
atgagctcgtaccctgtgtctgaacttaggtatagaaaggttagtatacttgcctcctagagttattacagtgggtgaatgggctgggattccaacccaggtcgtctggctcccatgtggataggtctggacccacaggtagaggggacaagacaaattgccaagcctcaggactgggtagagcaagacaggatcaacaacctctccagtagttggctccaacctagcaggtgtgggagaggacctgtgacaggggcgggagaaggcttagtggggccggcagtccacccactcctcccccaagacagtccaaagcaataggtgacagcaagccccccctaagttcagagccgg

SEQ ID NO: 638721 - DNA, 144 bp, Homo sapiens
gcaaacccactccaccttactaccagacaaccttagccaaacctttacccaaataaagtttggcgttagaaattgaaacctggcgcaatagatatagtaacgcaagggaagatgaaaaatttttaaccggctaatttgacaggg

SEQ ID NO: 638722 - DNA, 116 bp, Homo sapiens
cctatgagctggacaaagccttctccgcataggaacaccatttcatctggctagttcaccatcacaactgcattaccaaaaggggatgttcgaaaacgaggagaacgcgtcaagat

SEQ ID NO: 638723 - DNA, 188 bp, Homo sapiens
catcgcaagagtagatcctcaggagtagtgtagcgagcaaatactggaaagtagtcctcaatcttcgatttcccagcaagaactttctcagcgagcagatctatgcttgtagaggaacaggatcacagagatggtgcgcaacattcgtgttgttccagatgctcttgaagaggttctgagcctcttga

SEQ ID NO: 638724 - DNA, 204 bp, Homo sapiens
tgccgactgcttctcacccggtggccacgtgggcgtgtgtctttgaacaccacccaccctctcacacatttaggcagaagctgatatcccagaaagactatatatgtttttttttttttttttttttttttttttttttttttttttttttttttttttttttttttttttgggggggagcggggggggggcgggggaccgcac

SEQ ID NO: 638725 - DNA, 218 bp, Homo sapiens
cgtcgatccttctgctctatttagaccacggtataaaacaaatctatgccccttcctcggggctgagagaattttgagcgctagccgtctctcgttcgccagctaataaaggactcctgaattagtctcaaagtgtgacgtatctctataactcgcttggttacaacaaactctatctctagaaatgcacaaaaatgcccgagagcagaaggtcgacg

SEQ ID NO: 638726 - DNA, 593 bp, Homo sapiens
cattttttattaatagaagcacggcgagacgaggcttattgtttaaccaaatcaatgatgcttagacaggcagttggctctctctatcgaagctgatagaccgttgatttactctgctgagcttcatttgctcatgcttattaaaatggaaggctgagacgctcaaaaatgtgacgttatcagcctaaggccgcttgactagccacaacagagctttttacccttctcgaacaagaacatctacttattgttagtcttggagcactaatctacaaacgctgcgaaatgctctataacacgctttcaagagctcttttgttgacatgagcttgcggtgtacgagctaaacaagtgcagactgtaaattgagtactacttgcttaacagaaagcgtgcatatatatggatcggacgtgaaaggttaagaagtaaactaattgccaacgacagtactagtcgaatacacagctgtgaaaggagggaagctcgttatctaagatgacgtgccacatttggagaacctgggacttaatggagccttatgaagacccacacatgactgatgaggaccccggatggagagggtagtgaca

SEQ ID NO: 638727 - DNA, 137 bp, Homo sapiens
atggagaggcatataaaggaacatccagacgtaatgggtgagagagacataaagatggattgatatacaaaaatggaaagtgagggcaaacttcatttatgagagcttgcggtaccagccgtgtcgtgaagtgggtc

SEQ ID NO: 638728 - DNA, 1038 bp, Homo sapiens
  misc_feature (17)..(17): n is a, c, g, or t
ggtaccggtccggaggntgttatggatgaggttagaattttctcggagaaagacaggcgggcacgaggaaatacagaaacaagccgcgagcaacatctaagcccttgagagaggatcctgagagaggggggaaagggaaaacagcagacaccagcccaagcacttgtgtcttctgccccttcccacctatcttgcccaccccgaacgcgagacccacgctgccgttgggacatgtgtagagagtctgtggccgaaggacgcgtcactacagtaatcttcaaaagaatagagtcagaccagcccgtcgccgttcccagaacacagccgcaaaagttcacgtcgatccaggcgttgtacgttttgttgcaatccagcttccaggagacctgttatgttcctgcgaaccaccgccgctcaccgtagaagtggagatatggagtgggtggggagaaagtgaaatacgtgagatttggaccgtatatagtgtatttgataacaaagactatatattagagtccacagtgaaggcacaccccgtagaacataagtttgcagattagcaggggatcacatgagaataagggaacatgggatcgaagaagtcaaagaaagtaacagccgatccccaaaaacagtatagagagagaccacacagtaccaccaaccaagtgcaaggaccccagaaagggggcgggccttggaacaggatacagacaggaaagaaaaacaacagtctggggacattaaagagagcacacaccagtcgaaatggggattcaggagggattcccgcgaagtaagggaaataaaccggaaaggaggtacagcttatgcttcgaaaggaggggcccccgtgggtaaactagggcatatcccagtataaagacacggtaagtaatgtgggaggaaaaggtgtcaaagagagaggatggttgggaattgggaggaatgattaggcacacaagagaaactcaatttgtcaaggagatgttggaacttgtgacaggtgaaaggcctacgggagacagaggaatggta

SEQ ID NO: 638729 - DNA, 114 bp, Homo sapiens
cggtgtcgccagggccgcacccgcagcagccaaacgaaaagtgctcacggccagaccaccctccaaccagacagggcggaccagacggcgcccatggctgagaggccgcggccg

SEQ ID NO: 638730 - DNA, 913 bp, Homo sapiens
ggacactgcatgatcacaggagcagccctctggcccataatgacggccctgtcttcgcaggtggccactcgggcccgtagccgctgggtaagggtgatgcctagcctggcttatagcgccttcctttgggcaggtgtggactggtcagcgaatcttcatcattaggcacattgtcccatcagccagtgtgactaggcatggacctaagtaactgagcgctgtcctggagctggctgaatgactccccgtagatgcctactgggagcgggatgctaacgcttctattggtgttgaactgcaactggcccatcatcgctaggcaccacgccgtcactctcattggatcgcctcgtttacagcgtggagcgtggactctattctatggttccaatcagcgctaggccattcacagtgggtgtagagcggcctgcagtggactacacgtggattacgcacggcctctttgacctgccctgatgccgtgagcgtcagtgggctgccctgtggcctgggccattgccttgcactactccctgactatgtcccagtgtgcgtcgggcacgagtctgggaacatggccagaaggatagcctgccttgtgctggccatggggcttgctgggacccctgtgactggctggggccaacccctctcagatcagcctcttctacagttttcaatttcctcaatgtacaccctcgtggccagtgcctagtcctgggcctcgtgcccggggcagttgcacgtgttcagtgcccgaggaagcaccggccatcacatcttcctgacttcttgtgtgcctcccggttgcctttccactcccacaagggcaacgagtctggtgagcatcagattccaggaggggcagcccgattccattccagccaccttaagtcaggcgcttcccctcccg

SEQ ID NO: 638731 - DNA, 400 bp, Homo sapiens
  misc_feature (105)..(106): n is a, c, g, or t
  misc_feature (261)..(261): n is a, c, g, or t
  misc_feature (282)..(282): n is a, c, g, or t
tgccgcatcttattttattttttacaaaaacgtgctcatttaatagaaatgattgattatataaaattgtttacacatttgggggaggggggagcacgtatatanntaaccaatcaaaatcatgctttctgttagaaaagttaacacttctgtgaatagactggatgacttccttttagtttggatgtctgggtcagactcacgagacgctggggttggggtgtggtgcttgacatcggggggggggaaacactaataaanagaaccccaaaactaactttntacacaaataggctttccatagaggcattacatttgccttgtccaaaggaaggaaaactgaaaagtgggggcgtactggggggctcggctttgagaaattgtgagcgcggggaagagg

SEQ ID NO: 638732 - DNA, 855 bp, Homo sapiens
  misc_feature (740)..(740): n is a, c, g, or t
gattttccggcgtgtggtgacgccttgccgcctaggcgtctttaggctccgccaggtcccccattgggcaagacaatctggggtataaaaccaataggggccaccagctctgcggtcagaagggacgcacgggccagcgccccgaccagggattgcgtccccgccctcctgcgaggagttcccgtagacacaggtcctaccattttgggagcatgggccgctcaaaactcccccgggccagggtccgcacgcaagagtctcttcccgggcagaagccagcacaggtggtgccccgccccgaaaggcaaacatgcctcttgccacaatcgcgccccgaccgcagggggtggcccccagccgtcaagagacctaggtttccccccatgggggcagggacaataacaacatcccgagtttttacaagtgggcacggacgacagaaacacacaattgtggtggattgcctccagaaaccgccagtgcacctggaatgggcataagttctcccggaccccccaccgagaagtgtccaaaatacatcaagttgttcctcaggaattcctataaacgtaacaccagcgccaaaccacgccctcttgtactgtgggtgcacaaacacaaatccacgccatagaccatttgttgtgaaacagttcacaacttctcgccccaaaaatagccttccctctgaggagtcactcgcccctgagaacattcggcaagaatcctcgcatccaacntgatggttgcgataaacccacgtatcacccacggtcccgggatattaatcctgttataaagaatatttgggtccggccaccctccccgacccctccgaccccccccaaccccaca

SEQ ID NO: 638733 - DNA, 919 bp, Homo sapiens
agcggttgcagtgagccaagatcacgctactgcacttcagcctgtgtgacagagcgagactccggctcaaaaaaaaaaaaaaaaaaaaaacttggctgattattttcttgcggtctttatagattggagaatttagggagtagagacggacagactatatttacctcaagactttgaaattgccatagtttatccagagatcatacatttcatttacttgaccaggcattatgagtgctttctctctagaaagcattttggtcatttggaattaaaatacgtcttcggtattttacctttaattgaagtttgacaacttttcagaaggtttccaggggtgaagataaccttgaattaagggagatacctttacacaagcagaaaaagcctcatctcttcgggatccctttaatgccagttggtcattcaccaggtgtagatcaggtcaccttttacccagggctggggaccaccaccttctcatctacgggtgtgtcacctttagcaatcttctggcatctcactgtcagccaacacattttctcctttccaagcctctgcagtctcatggagtggcctggaaattacttcttttaacctaccttgctaccttagccagcctggatctcataggagaattacgtgaaatactcccagattggggcctttcctgtgcccctgttttcctgtgtaccctgggaaaattctcagacccaatccagtcttggggtcctactctgtattgaaagggctaaggaaaaaggcaacaaagttcatacagattaaccctgtttgaagtttcacgtatttcattatttcaggcctcatgtgactcccctgctttgcctgatgccttttgattgccttaccctggttaagtcttcaattctttaaaaaacttaccaaatcttctctgccc

SEQ ID NO: 638734 - DNA, 682 bp, Homo sapiens
  misc_feature (659)..(659): n is a, c, g, or t
tatttgtagctattggaaataagattattttcttggtttattttctagattgtttgctcttggcatacagaaatgctgctgatttttatatgctgactttgcatcctgcaattttactaaacctcagttctaacagttttctggtagagtccttaggtttttctaaatttaagatactattgtctgcaaacaagggtaatctaaatttttccttccaatttggatgccttttcttttcttctcctgtttaattgctctggctaggacttccagtaccacgttgaagaaaggtggtgaaagtgggcttccttgccttcttccagatcttacaggaaaggcttttagattcccccctcatgatactagctgtgggtttatctgtctgtggcttttattgtgttgaggcatgttccttctacatccagttgagtttttatcatgaagggatgctgaattttactgaatacttttttggcatctatagaaatggacatatggttatgtccttcattcttttgatgtgatgtatcgcatttacagatctgaatatgtattaggtggttctcacattgctataaagaaatacctgagactgggcaatttatataaaaaaagagttcattggctcactattctgcaggctgtacagcaagcatganagcatctgccttggcttctggtg

SEQ ID NO: 638735 - DNA, 94 bp, Homo sapiens
tagagtatcccccgcgggtattgttactgctgtagctctattacgacctatgccggggaacctccatatgccgcaggtgcggccctaaaaggac

SEQ ID NO: 638736 - DNA, 645 bp, Homo sapiens
  misc_feature (46)..(46): n is a, c, g, or t
  misc_feature (591)..(591): n is a, c, g, or t
actgcacgccggtatgtacaacacagacagtctctccctatgcgcnatactaatctaacttacgtctctatggactgcctattctggtcctttcttataaatggaacgacgcaacatgcagcccatgttttctggctgctttcactgagcataatattttcaagattcacccatgttgtaacacatatcagtgcttcattcctttttatggctgaataatactccattgcatggacagaccatatttgtcttatctgttcatcactgacagacatttgggtttgttccatttttgggctgtcatgaataatgctgtcagcatgtatgtatgtacgcggtttccttagtttttatctaatgtcattttcctgttccaggatccccttcaagataccacattatgtttagctgtcatgtttctaggctcccttggctgtgacatttctcaggttttcattgtttttactgaccttgacagttttgagttctggtcaagtatttcatgaaaactccctcaattatggtttatctgatgttttcctcatgattaagctgggttatgtatttctgggaggaagaccagagaggtanagtgccaccgtcatcacatcatgtcaggagtactaaccgagcgtgtaatgggga

SEQ ID NO: 638737 - DNA, 312 bp, Homo sapiens
  misc_feature (142)..(143): n is a, c, g, or t
  misc_feature (228)..(228): n is a, c, g, or t
aaggaggtaaaggatgagggttgcatcatccctgccctgtcctaaggaagctaaaaggcatggtccctgctgtcccctccctgtcctccacccacagtgggagagggtctacaaaggaggtacaagaaccctctcaggtctnntcccaagtctcccaagagcttccagagctctgacccacagcctccaagtcaggtggggtggagtcccagagctgcacagggtttngcccaagtttctaagggaggcacttcctcccctcgcccatcagtgccagcccctgctgctggtgcctgagcccctcagacagcc

SEQ ID NO: 638738 - DNA, 309 bp, Homo sapiens
  misc_feature (227)..(227): n is a, c, g, or t
  misc_feature (259)..(259): n is a, c, g, or t
gggcattttcagtacctatttcagccttgcatctctcactgcctgtctgtcatcagggtcatataatgagtttagagttccaagggggtagagtggtctcatggcatttaactctttggatattcctctcatcatttattgtgtatcattcgagtttggtgaagcccaatgtctggatttctaccacggtcatgcatctgcaggattgagctattcttccactgagnttttcaacacacatcctgtctaatttgacccngttatgcagataccaacgttttttttctctttttctccttttatagggtt

SEQ ID NO: 638739 - DNA, 180 bp, Homo sapiens
tccccaacacaaaaaatttaaaatcagctgggcatctgtaataccagctactcaggagctgaagtgggaggaatcacttgagcccaggagtttgatgcagcactgagccataatcatgccactgcactgaactccactccagcccaggtgacagagcaaaaccttgtctcaaaaaaaaaa

SEQ ID NO: 638740 - DNA, 626 bp, Homo sapiens
  misc_feature (517)..(517): n is a, c, g, or t
gttcgacggagactctcacatgtacatcagcaaattgcaacaagggtgccaagacaattcaatgaagaatagtcttcatcaataaacgggctgggaacactgaatagccatatgcaaaagaatgaagcctaactcctacctcataatgtacaaaaattaagtcaaaatatacaaagacccaaatgtaagagctaaaaccattaacactctatgaaaaaaggtagaaatctttgtgaccttggattaggcaatgctttcttagatatgataccaaaagcaacgaaagaaaataagaaatgggagttcatcaaaatcaaaaacttttatgcttcaaagtacaccataaagtgaaaatacagctcacggaatgggagaaaaaaatggcaaaccacgtatctgataaggaattggtactggtatatatagaacccttaaaactcagtaattaagacgactcaatttaaaaatgggcaaaggatccaaataaacatttctccaaagaagagatacaaagtgncaatagacacattaaaatttggtcgacatcattagccatcaaggaaatgcaaatcaaagccataaggagataccagttcacaccactaagatgggtgtatccagagcag

SEQ ID NO: 638741 - DNA, 382 bp, Homo sapiens
  misc_feature (329)..(329): n is a, c, g, or t
gtcgcccaggtgccgacggaccccggccacttttcggtgctgctagacgtgaagcacttctcgccggaggaaattgctgtcaaggtggtgggcgaacacgtggaggtgcacgcggccacgaggagcgcccggatgagcacggatatcgtcgcgcgcgagttccaccagtccgtaaccgcctgccgcctggcgtggaatccggctgccgtgacgatccgcgctgatcccccgaggaggtcctgtccataccaggccgcacacagcgatcgcccaggccccacacgccagccgcagctcaagtaaggaggagggctggccgcgcccgaatncaacgcgcctcctcaggctccctctattaaagccgatctgactccgcccaaaa

SEQ ID NO: 638742 - DNA, 879 bp, Homo sapiens
  misc_feature (4)..(4): n is a, c, g, or t
  misc_feature (136)..(136): n is a, c, g, or t
  misc_feature (149)..(149): n is a, c, g, or t
  misc_feature (151)..(151): n is a, c, g, or t
  misc_feature (185)..(185): n is a, c, g, or t
  misc_feature (188)..(188): n is a, c, g, or t
  misc_feature (199)..(199): n is a, c, g, or t
  misc_feature (207)..(208): n is a, c, g, or t
  misc_feature (219)..(219): n is a, c, g, or t
  misc_feature (221)..(221): n is a, c, g, or t
  misc_feature (232)..(232): n is a, c, g, or t
  misc_feature (238)..(238): n is a, c, g, or t
  misc_feature (243)..(243): n is a, c, g, or t
  misc_feature (257)..(257): n is a, c, g, or t
  misc_feature (263)..(264): n is a, c, g, or t
  misc_feature (272)..(272): n is a, c, g, or t
  misc_feature (295)..(295): n is a, c, g, or t
  misc_feature (298)..(298): n is a, c, g, or t
  misc_feature (300)..(300): n is a, c, g, or t
  misc_feature (302)..(302): n is a, c, g, or t
  misc_feature (315)..(315): n is a, c, g, or t
  misc_feature (317)..(317): n is a, c, g, or t
  misc_feature (324)..(325): n is a, c, g, or t
  misc_feature (327)..(327): n is a, c, g, or t
  misc_feature (343)..(343): n is a, c, g, or t
  misc_feature (345)..(345): n is a, c, g, or t
  misc_feature (440)..(440): n is a, c, g, or t
  misc_feature (526)..(526): n is a, c, g, or t
  misc_feature (535)..(535): n is a, c, g, or t
  misc_feature (539)..(539): n is a, c, g, or t
  misc_feature (544)..(544): n is a, c, g, or t
  misc_feature (560)..(560): n is a, c, g, or t
  misc_feature (575)..(575): n is a, c, g, or t
  misc_feature (609)..(609): n is a, c, g, or t
  misc_feature (614)..(614): n is a, c, g, or t
  misc_feature (717)..(717): n is a, c, g, or t
  misc_feature (719)..(719): n is a, c, g, or t
  misc_feature (726)..(726): n is a, c, g, or t
  misc_feature (796)..(796): n is a, c, g, or t
  misc_feature (843)..(843): n is a, c, g, or t
catnaccttagctatgtacttaatgaaccaaattacccaaacaaaataaacatggcaatataaaaatgttaagaatttacaaagctgtacaaaataacttaaaatttaaaaattagactgatacagtctgtaaganctcttcgagagancngtccaattacagatctatatacttttcttcaganggncaaagaaaggntgctttanngcttctctganantcattcttttngctggntcatnctccaccattttcngactgnngtcaaagngccgctcatgttcatcatcttgnggntncntaatttccttcgntngtttacnncntcttgttacatatctncnggctgatctgtgttcatcccagtctaatcgatcgtggtgaaaatatttacgtttcctggttttctgtatcatatgttttggtagcggtccacgantcctttccctccttgctaaatgctccttactatcgtgtgttggaaatacggtaaacccaagatagtattcaataagactgcccccnccgcccccncccnccccnggcttgggcccccccncgggcccccctcccntccggtgctctataatgtcttgtagataccaatntactntgatgttcgtcatcatatgttgcactaccaaagtctacaactttaatatctggatttattaaggtgcgttcatcacgttttattttgggattatacgcctctntntagtcanactgcacaaataagatgttttcaggctttaagtctgtgtgagtcaacttattactgtgccaaaaaattcncagacttgcatatctgatatgccatctttctgatatgatccagtcgnaatggtagaaaccattttctttaatgaagtcgtagt

SEQ ID NO: 638743 - DNA, 1157 bp, Homo sapiens
ggcgagaggcgagtagctgtgaacggcctagaggttgatcgcggcgctgttttctcggtgtgacaatcattatagagcaagaacagccctgtctgcggacatgactggtcgaagggtactctagaagagccgccgagacgtataagccgtgttgcgtgtcaaggaaggtgtggacaagaagcactcacgctctcagcagaaggtgagcccagtgatagagagagggcagaggattgcctttgtatgcccagggcaatggaggcgttattggatcgggaagcagaggtggttatggtgtgcaagactagatgccgaatttttcgctggaatagaaggctaattaccgacaaagagaagatgggtgcgtaagggctgggagattgtgttgaggcctaaaggtggaaggatcccagagacggatggcgttgggcctagttgaggacgatgcaacgtattttgatagctgggagaggagataacgaagaggaagagggccattgtgtatcgcagttgtaaaggttggaggaactacttttatcttgaactttgtgaacgaggaacatatggtgaaggccatagaaggagttacccgagggagagcccttagggttacatgtgtatattccttaacggcaaggaccagaaaaagaacggaagaagtcaaggcaggaacaattggggtgtgcggcagggtgaataggaggtcaccacggggggaaccccgattgtgggcgccaaccggtgttgcgcggggggggggcccagtgggtgggaaccaggccctgtgggacacatgcgctcgttctcgaacagagggacacgacgggagggggcaatgggaaaaggcgagggggggggggttcttggacacccccaaaataggtcagcgggcggggaggttgaaaggacgcgagtgggttaatggaaacccagcaaccaccgaaatggggtacattttacgacgcaccgacaatcgtgggggtgcccttaaggacaggggaggaacaccagggggaggggggccccactgtttaaatttgcgcgggggggggacagaggggcgggccactgcgccacaggggtcacacacctgtatgtaggtgggagcagctcggcaccagagaattggaaacaacgtgccctaagaacagaagggg

SEQ ID NO: 638744 - DNA, 116 bp, Homo sapiens
tcgacctagaggatcagctctaatttcttttgactgcggtgtggtggtgaggctttttaagtggttaaccttcatctaaatttttttctcccactggatttatagatcctctcgaa

SEQ ID NO: 638745 - DNA, 690 bp, Homo sapiens
atagcggggcggggggcgccacggaccgggcggcgggcgcggaccgcccgcgctcgtgcgccacgggcgcaggtgcggggagccggcccggagcgcagttccagtggggccggggttcacccgggcccgctcgttgaaccgaacccgacaaatgggcgcagacgatggagagccggacccggactgctatctccgtcgcctcaaacaggagctgatgtccatgaaggaggtgggtgatggcttacaggatcagatgaactgcatgatgggtgcactgcaagaactgaagctcctccaggtgcagacagcactggaacagctggagatctctggagggggtcctgtgccaggcagccctgaaggtcccaggacccagtgcgagcacccttgttgggagggtggcagaggtcctgccaggcaccacaagtcatgttacacacactcggactcaaaacatctctttggccagcaagcaccaagtttccatcccataggagtgtctgtggaagggatatagcccccttgaccaggacacagtcacatcaacagctgtgctcagcaggggccagagcgagtggaaccggatgactggactccacagtgatgtcccggggccggaatccgacagctctggtgtcaggggacaacgtcctgcacgacctggtgggccattggctagaccttgacaga

SEQ ID NO: 638746 - DNA, 495 bp, Homo sapiens
ccatgaggaaaaaacaccgtccaggaaaaccaaactaatgacaacggttgttccttgagaaaaaaaaacctccagcggaacacctaacaatggggaggtttgaaaaaggagcaaacacccccacccccagaaaaacgaagagattgagcagcctatccagaatgaagagaaagaccgccctttgttaggagttgaagtccaccagcctgcaggaaatcgacggcgacaggctcgccgacttgcccctaattttcgatgggccatacccaataggcagatcaatgatgttatgggtggagatggagatgatattgtaaatattcatggaggagatgagagaaatcagaagaaaacttagggagctgcagctgaggaattgtctgcgtatccttatggggaagctctctaatcaccatgaccatcatgatgaatttttgccttatgccttgactcctgccatatatcatgagattaatactgtgattcccgccggaa

SEQ ID NO: 638747 - DNA, 209 bp, Homo sapiens
cagctgacattgtccttcggtgggagaggagttcagtcaggctgctttccactgcgttaacccagccctgagggaggcaaagccccggaatctatgccccttggcaagaactcccagggttccaggcaggactgcccccgaacgtccgaggcatcaggcccagagcagttggctgatccaggtgccgtccttggggaaacaccaaccac

SEQ ID NO: 638748 - DNA, 350 bp, Homo sapiens
  misc_feature (3)..(3): n is a, c, g, or t
  misc_feature (10)..(10): n is a, c, g, or t
  misc_feature (26)..(26): n is a, c, g, or t
  misc_feature (28)..(28): n is a, c, g, or t
  misc_feature (49)..(49): n is a, c, g, or t
  misc_feature (59)..(59): n is a, c, g, or t
  misc_feature (109)..(109): n is a, c, g, or t
  misc_feature (123)..(123): n is a, c, g, or t
  misc_feature (197)..(197): n is a, c, g, or t
  misc_feature (199)..(199): n is a, c, g, or t
  misc_feature (221)..(221): n is a, c, g, or t
  misc_feature (229)..(229): n is a, c, g, or t
  misc_feature (233)..(233): n is a, c, g, or t
  misc_feature (247)..(247): n is a, c, g, or t
  misc_feature (258)..(258): n is a, c, g, or t
  misc_feature (264)..(264): n is a, c, g, or t
  misc_feature (272)..(272): n is a, c, g, or t
  misc_feature (277)..(277): n is a, c, g, or t
  misc_feature (340)..(340): n is a, c, g, or t
tcnaactccnaggttaaagcaattcncntgcctcaggttcaaagaagcngggactgcangcgtgagaaccaacacgccggcaaatttttgcattattagaagaggcaangtttcaccatgttngcaaggctggtatcaaacttctaacgctcaagtcgagaaaccccgccttggcctcccaaagtgctagcgattanangcatgagaaaccacacccagcntggcttcnctcnatgaatatgtaganatatgcctttngttatnactgtaanaattnaataatctgaaattttaaagttggagagaaaaaggcatttaatttgtctagagaaaatctggnataatggttc

SEQ ID NO: 638749 - DNA, 497 bp, Homo sapiens
  misc_feature (129)..(129): n is a, c, g, or t
  misc_feature (174)..(174): n is a, c, g, or t
  misc_feature (210)..(210): n is a, c, g, or t
taagggttggaggggggaatgggggaaatggtagaggggggatattgcggaaaacatgtgttcatatatataagtataagtggcataggggtgaggtggataggaaagtttttttcacatatagcgcangggtgtaagtgaagtgtggcggccgataaggcgagaaactgcganggggtatagtggcgtgttgtctgcgaaaatctctcnatataagagaaaatagcgaggggggaagaagaggttgttataagaaaagaaggtgatgagggggtggtcttcatttggtgggaggggaggcacaacaccaaaaaacaacaatatgtcatgatctggtgatggatggcgggttgggttgattgaacggaagcaaaggcatctctttcattccacggacgggagggggggacagagatgtaagagaactgcaaaggcaggcatggcagcccggcctaatttccacttcatgcattaatggtatggtgggttgggatgga

SEQ ID NO: 638750 - DNA, 883 bp, Homo sapiens
aatatataaagagtaatcttgactttcagcttcgagagcggcatccctgctggctactgcaccgtggatatatcatacagggtcgccagagtatagtgaacacactacatgagtatacaattcagtgaaggtccactattcatacacatctgtatctgtcttgccactcatgtttcctgcgtatgtgcggacccgttatcaacagaaggagtgctcactgtgcactattaatgccctaccaaattatagagatattctctcagagtaccaggctcacaatacacttactcttaggaaagtaactcagtgaatacttaaggaggcaccgttcctcttacgtgtcccagaaggaaataggactcacgaaaccacgggctgctaacatatggggcaatactcatcagaggattggggtgcagaagagatagcatgcaactttatgtgcagtcatcgagaacgcaaagatgacaacaaaaggtattggtacgcgagagccatgggagacaaaacgacgatagagtgcgaatccctatggggaaaaacgagaacggagcgtacctaagcaagaaacgaatcacagaggacagatgaagcagaaacatatgaaggcgaacacgcagtagataggacgcggccgtatctgtcgcaccaagctaagaactaagcggttggacaaaagcaccactttgcacagatggcggcacaaacactggggggacaatcaggcaggagaacgaccgggttcatatacaaggccgaaataggggagagaaacggttcctgcgcacgaacggaagatgtgaacattccatgttgacctcaaccctaaaagtccactccttgcatgggaacaggtttggccctgaaaagggaactggccatc

SEQ ID NO: 638751 - DNA, 131 bp, Homo sapiens
  misc_feature (93)..(93): n is a, c, g, or t
cttaaaacttcagacacgtagaccctcccgctggggcactgcggcaaccgcattgaactcacatcgtcgagggaaagatgatcaagtcgtctnccacgtacccggacgtcctgtacttccagggagcacta

SEQ ID NO: 638752 - DNA, 230 bp, Homo sapiens
cggcacgaggtttttttatagagttcgagaccagcctgggtaacattcaagaccctaactctataaaaaaatgttaaaaagcagcctggatggtggcatgcacctatagtcccggatactcaggaagctgaggtgggaggataacttgaacctgggaagtggaggctgtagtgagatgtgaacatgccactgcactacagccttgagtgacagtgtgagaccctgtctta

SEQ ID NO: 638753 - DNA, 104 bp, Homo sapiens
tttggtgagtgcaggtcttggtagagggcagaagcaggaagcgcgttcttggtgagggcacgaagcagtgaagcaggatcttgcatgagggcagaagcaggaag

SEQ ID NO: 638754 - DNA, 319 bp, Homo sapiens
tatctcctctccccctcccagagcccttcttctgcagcgcccctgccccactagcggcctcctcccctcctggcttcccttcccctctcggcctcccgtctcagcctccccttccctcttcttccttctcggcttcctcggctttccccgacggcctcccctcactgcttctcctcccccaccgccttcccgcctctcctcttctctccccacagcctcgccgccgcacagcagaaagccggactcccgcggctgcccgagcgcggaggagacaccggggccccgcgcgcagccactccttgaggccccgcagcggccg

SEQ ID NO: 638755 - DNA, 275 bp, Homo sapiens
gcttcccgatagccgacagagagccacgggtaagaggtccaggctgaggccctgtgcagaagaccatgacaaggcatcagccactgagcctctacccctgccgggaggacaggaccagctcctctcagctttctctcccatggaccctatgactcggtgcgtggtcctgtgcttcgaacatgaagccccatggcactgtggcaggactggaagggaatgtgctgagctggagcttggtccatgtcgaggctatgtcggggggggtacctgagctc

SEQ ID NO: 638756 - DNA, 265 bp, Homo sapiens
gcttcctcttgccttcggcacccccgctgcctcggctgacgcctatcctatgcagcattacttctacccgctgctcaaaggatggatccagttttgtttctcaccgctgcagggcccgccgtttgtcggctctgacacccagcgttgcctcctcctcgccaggcagtggtatttttgagtaccctctgagatttggtgtgtagcgaggtagatgcgtgccgtcagcctcaatgtacgtcttttacccatagccatcccatgagga

SEQ ID NO: 638757 - DNA, 967 bp, Homo sapiens
  misc_feature (551)..(551): n is a, c, g, or t
  misc_feature (591)..(591): n is a, c, g, or t
  misc_feature (636)..(636): n is a, c, g, or t
  misc_feature (654)..(654): n is a, c, g, or t
  misc_feature (775)..(775): n is a, c, g, or t
  misc_feature (967)..(967): n is a, c, g, or t
aattctctccctccttcctgccgtcccccgcctgagggaggggagcggtgcagcagacatccgagggcagctgggaccccctgactcagccgacgggtgagtcaggctccctgcaggccacaccggacccccccagggcggggatttccccaagatgagaaatcagccaccggaagtcacgccggaccttggacgggcagacagaggctgggaggagttctgggtgcagagccccccaacctgtgctctcatctcttgctctggggtaagccagtggccatgctataaggacactcaagccaccctatgaagaagcccacatgaagaggaactgagatatctggccaacagccagccagtcactgagcctgccaaccacgctgtggcaggtacctccagccccagacacctgcagcctccactgaaagctcaatggcagcctcatgagaccctggaccggaaccacccaacgaagcggctcctgtattcctgattgacagaaactacgggatcataaatgcttgctgttcagtctgccaagtgttggcgtnatttgttaaacagcaaccagtaactaatacgccacccatngtgccgcgttcctgctgtggggccagcactattccatgcttagangctccatcaatacctgtnatggactaaatggcacggtggctcacacctataatctcaccactttgggaggccgaagtgggaagattgcttgagcccagaagttggagaccagcctgggcaacacagcaagacccctgtntctaccgaaaatgaaaaaaattagctgggcatggcagtgtgcacttgggagctactcaggaggctgaagcgggaggatcacttgagctcaggagttcaaggctgcattgagctatgatggcaccactgcagtccagcctaggagacagagctagaccctgtctctaaaaataaataaataaataatctcggn

SEQ ID NO: 638758 - DNA, 854 bp, Homo sapiens
aattctctccctccttcctgccgtcccccgcctgagggaggggagcggtgcagcagacatccgagggcagctgggaccccctgactcagccgacgggtgagtcaggctccctgcaggccacaccggacccccccagggcggggatttccccaagatgagaaatcagccaccggaagtcacgccggaccttggacgggcagacagaggctgggaggagttctgggtgcagagccccccaacctgtgctctcatctcttgctctggggtaagccagtggccatgctataaggacactcaagccaccctatgaagaagcccacatgaagaggaactgagatatctggccaacagccagccagtcactgagcctgccaaccacgctgtggcaggtacctccagccccagacacctgcagcctccactgaaagctcaatggcagcctcatgagaccctggaccggaaccacccaacgaagcggctcctgtattcctgattgacagaaactacgggatcataaatgcttgctgttcagtcaaaaaaaaaaaacaaaaaaaaaaaaaaaaaaaaaaaaagggggggagcacgcctaagaataccccgaaggggggccaagaaaagcagagaacaccacgagatatctagaacaacaagggggccacatagagaggaccccggttgagacgcacaggcgacccggagccgccacgacattgacgacgccgccggaacacgcggcaacaaagcgcgaaacacagcggggcacaaggcggaagaagagcaccgcaaaaccacggggggggaacccaagtgaggggcgcgacgccccccacgagacatagacccccgggggcaca

SEQ ID NO: 638759 - DNA, 1060 bp, Homo sapiens
gcttgtactactggcggcccgcttcgttctttgcaactaaatctttctactggttactcttaggcgtccgacatgcctgatgatgagctataagtagctctaccgcgaacgtctgcagctacgctcctgaagtgagcgacgagccatgagcccactgggaggaagaaacaagtccagatgcagcggccttaagagctgtaacattcaccgccgcaaggtcctgcacggttcacctccctggagccgatgggtagtaccaggaacccacctacgaaggaaagaaacgtcgcggaaagcacatcctagaactatcagaaggagagcgaaatctcccaggagcgtcgcaagctttgtagtagttgcgtacaatctagcgccgctagaggtgtcccagtgggttcaatgtgttccacttgtcgggcgacacatagaagaccggactacacaatttcgggtagcttggctggcatgtggcgaactgcctgtgggattgaggtctggagcaaaaacggctagggaccccgtgggtccttccagaggcagaccaatattgcacagcgccggattggttcgggagacccacgccttgcaggaacaacaatacaggacggtgggtacacagggtgctccctcatgagaactcctgggggaaattgatatattggtcgcctcaagagaccgtgggacggaagtaattggaaatatagtctgtaggagagatgtgaagagctgatgcttgaaatataggtggcagagctgaagtgtcaggaaaaggttgtggagacatgcgttgtgaaggctaaacaatagcgtaatatagggggggggagaagggggaaaccattcggtgggcccgtgtccagagagcaggcggatattggggcctgagagaaggggtcggttgctgaagggaattcacaataataggaatgagatgtggaaggcgatatcatggtgcacattaggggaaggtgcttccatgcaatgcaggtagagagaaattcgccatgcttatgttcggtaaaattggggggcacaattccgtgccatcggaaaatgg

SEQ ID NO: 638760 - DNA, 546 bp, Homo sapiens
  misc_feature (354)..(354): n is a, c, g, or t
  misc_feature (546)..(546): n is a, c, g, or t
aattctctccctccttcctgccgtcccccgcctgagggaggggagcggtgcagcagacatccgagggcagctgggaccccctgactcagccgacgggtgagtcaggctccctgcaggccacaccggacccccccagggcggggatttccccaagatgagaaatcagccaccggaagtcacgccggaccttggacgggcagacagaggctgggaggagttctgggtgcagagccccccaacctgtggcacggtggctcacacctataatctcaccactttgggaggccgaagtgggaagattgcttgagcccagaagttggagaccagcctgggcaacacagcaagacccctgtntctaccgaaaatgaaaaaaattagctgggcatggcagtgtgcacttgggagctactcaggaggctgaagcgggaggatcacttgagctcaggagttcaaggctgcattgagctatgatggcaccactgcagtccagcctaggagacagagctagaccctgtctctaaaaataaataaataaataatctcggn

SEQ ID NO: 638761 - DNA, 581 bp, Homo sapiens
  misc_feature (529)..(529): n is a, c, g, or t
  misc_feature (532)..(532): n is a, c, g, or t
  misc_feature (549)..(549): n is a, c, g, or t
  misc_feature (555)..(555): n is a, c, g, or t
tagtttcttcctacccccagaagactaagaaatatatgaatataataacacatgtaaggcatattcccgagaggatatctatacttggtgtcctattgagaaatgtacagaaaatagtccctcaaatatttattttttgttaaacaccagcatatatttttgttacatgcataacctaatttagaattttcaaatgacaagatgtgacaatatcttctaattgctatgtcgcaaaaagaaaagaaactgccttcaacttataagtacttcatctgctattgagatgaaaaacctttctcaaacaggtttttttttcttttttttttcctggaaagttgcttctatatccataattgaccaaacttgaccaaacccatcttttagaaatgcctactttttaccacctggtcttgtataagtagccccacccaacaaactggatctgactacctgtccctctggaatgaggagctgggtgtatttccaaaggacagatgaatcaagcgtgtccctcgcacacaaaaactgnttnctcttccacatacaggnacactnaactaacagggaaaatcgaaaatgtg

SEQ ID NO: 638762 - DNA, 649 bp, Homo sapiens
  misc_feature (262)..(262): n is a, c, g, or t
aattctctccctccttcctgccgtcccccgcctgagggaggggagcggtgcagcagacatccgagggcagctgggaccccctgactcagccgacgggtgagtcaggctccctgcaggccacaccggacccccccagggcggggatttccccaagatgagaaatcagccaccggaagtcacgccggaccttggacgggcagacagaggctgggaggagttctgggtgcagagccccccaacctggtaagtacaatgatcccanggctaggacaccaacgagattttccaaagggcagacgagcttcagcggttcctccgaccccattccccacgtgtgggagccctcctccctagcggccccgtcctgcaatcgtccccctgcgcgaagacttccgtttatctccagcatggatggagggaaagtcaagctcaaacacaaggtccccatcagcaatggaacccaatgatccgctgggggttcaacattggggtgtcaggcacgggtgtctctggagcccagagaaaaatccaagattctttgaaatggcaaaagcccccaaaagtgactttcttgtattgccacgatgaactggaactgcctgaaaaattctaaaaagatagagaccttaataaatggtgtagagaagaa

SEQ ID NO: 638763 - DNA, 118 bp, Homo sapiens
gcggccgcctactactactactgctcgaattcaagcttctaacgatgtacggggacatgtttatgtcgtagatgtagttttcgcatccttgaattaaactgccttaactcccaaaaaa

SEQ ID NO: 638764 - DNA, 416 bp, Homo sapiens
tagaaaatattcgcaatctatctatctgacaagggattactaaccagaatatataagaaggtcaaataactcaaagagaaaaaaatgtaataatctgatttaaaaatgggcaaaaggaaatgtcaacaggcttttctcaaaagaatacaaattgcaaacagacatataaaaacatgctcaatagaaatgcaaatcaaaactacaatgagataacaccagttaagatggcttttatgcaaaagccaggcaataacaaatgctggtgagaatgcagagaaaaggtaacccttgtacactgttggtggaaatgtaaattagtacagccactatgcagaacagtatggaggttcctcagaaaactagaaatagaactaccagcaatgccactgctaggctgataggtacatagcaaaaaa

SEQ ID NO: 638765 - DNA, 379 bp, Homo sapiens
tcaagagcgtggtgtttgatcgggatgaaaaacaccacttaaaggaggcatttgcttatcagcgacaataagcaaaagcttgacgggtatgttattctctcaatactacttctccacttcgcaggcatatctattcaggagggcatcttgaaagaggagcagggtcacccacgacttcttatatctcctgcagtgcactggccaagtgtgtgtgtattgatatgcttgaagcccctagggttctcaacatgccaaatcacaaaggggttcaatttgtggcctgcaacattgcccccaagcaagactgtcatccagtccctaaaagacttgaagcctggcattgctttggtctacctcatggatcaaagtcctttcaggc

SEQ ID NO: 638766 - DNA, 107 bp, Homo sapiens
ggtcgacaaatgaagggtgtggctgtgatccaatataacagaaattctttctgcgactgtaagggtctgtgtgacccagccttttgtttgcctttatcattgaatct

SEQ ID NO: 638767 - DNA, 184 bp, Homo sapiens
ggactttctaagtgtgtgaagctatatttgacatttgcaagctgattaatatatacattatatctttatgtcacagtatattctctatgttggtgggcattttagttgttgcgatatttgcttttataaaccgtgtaagtaaacatcgactcctactgtacatatcaagtgattgttccccgct

SEQ ID NO: 638768 - DNA, 183 bp, Homo sapiens
  misc_feature (152)..(152): n is a, c, g, or t
  misc_feature (168)..(168): n is a, c, g, or t
  misc_feature (181)..(181): n is a, c, g, or t
acctgtgatgcctacgtgggaatgggacctcgaatgtgggaccccagcccctctccagctcgaaatccctccacagccacggtggacaccctgcacctattcccacggtgacatggctggacccagagactctgtgaccctggggcctcccncttgatgtagagaccnctgccctctgacntt

SEQ ID NO: 638769 - DNA, 139 bp, Homo sapiens
tcttctcccctgacactcccagcacaatcggaaaaataagaagaacaaaacaaaagaaacccctcctacagcacatttaatctttaccagatacaacatatgttctttagccccagacaaataggcagatgaaaataaa

SEQ ID NO: 638770 - DNA, 1639 bp, Homo sapiens
  misc_feature (13)..(13): n is a, c, g, or t
  misc_feature (880)..(880): n is a, c, g, or t
ggtgcatgcatcncttgtgtttcgtgctgtgtagctagcatcgtttttggttgtgcgctgcgctctccctccgtggggggatgttgtctgtgctcttgatgtgtggtcagacgtgggtcgttcgttttctcactaaccgccggctaaatttctcccctcgcgttattcgacgcggattttgggtgggttatatctccccggggaagtgtcttttcgccaccatacctaagccccccgccgcgttttataataatttgctggtcgctcttttgtggcgttttcacacctttgttcgccccgcttttttggggggaccgcaactgctggtgttggactgtgcggcgtgagagactcactcttgtgttggaggaccccagttgttttttctttattggggcgtgtcttttattccctccctcttaatcccgcggggtggacgcacttctgccacaagtggaaagcggttttgtgcaaaacaagatatccacaccagacgtgggggctttttaccatggggcttttctaaaaggcagctctttacccctgtgaaactcttcttttatctttgccccaggaatgacctccctgcttaaggcgaagaattttttttcccttgcggtccaagcctgtggtgctaacaacacattggggtgcccttgtgacaccttccggtgtccgcaacacaattggtccttggggaagaccttttcaccccctttgtttggggaacactgtggggaaaatcctaaatttctttaagagaacaatttggtttcttttttttatgggggtgggccttacacccaatgagtgattatttgttgggtctggcaaaatattttctcttggtgtccccccacacgagtatgtcctccccccnccgctgggtgttgtatagtatgtttaacgacccaacattggtgaagagagtgtactcctccacggcaaaggagggatattttttctctctctgttgggcgccaacgatttctctcttgtgtggttttgtggggaaaagacaacttctctgagcactcttataatttcttttctctagggtatcctgagcctcgtttgggtttttgggccccctttgccacaagagcgccacgagaaatttctctgagacagcctgtgagatttctcacgctatactggaggaaacgtttcacaatgttgtttatgcctcgcgttatgagaattcgcctggtttctgggacacatccacatttgtgcgttattacttcacgggcactttattagaatgttggagaagtttcacattataatttttcacgcgctcttcgataaaggtgtgaggcggagaaactcttctgctctttttcacggcacccacgcctgctgagaagaaagagaatcctcaccacgtataactaaaagcgcacgagttctttcttaaaaaaggagaccacaagaaaattggtgtgagaatgggaccacttatacttcacaatgtagcacgacttcttccccggagatataaaaagagaaattcttcactaatgaattataaactatattgaattaatgtcccccacagaaattctgcttttctactatattctttcagcacttagagatttttttgtttttgtaaaataccgtctgtgctctttga

SEQ ID NO: 638771 - DNA, 375 bp, Homo sapiens
gatccttcagatatctctctacgtggcgtagtttcccccagataccgtgttgcactaacacctaattcaactcatggctcaaatctcacttttttaaaagaggcccaggccgggtgcaatggctcattcctataatcccagcactttgggaggccgaggtgagaatcgcttgagcccaggagttcaagagcaccgtaggcaacatagcgaaaccctgtatctacaagaaatacgagtgggatgtagtggcatgcctgtagtctcagctactcgggaggccggggcaggaggaccaactgagactgggaggtggaggttgcagtgagccaagatcaccccactgcactgcagtctgggtgacagagtgagaccctg

SEQ ID NO: 638772 - DNA, 278 bp, Homo sapiens
atcctcctgccttagcctcccaagtagctgagatcataggtgtacaccaccacacccacctatttttttattttaattaattttttgtagaggtgggttattgctatgtcacctaggtttgttttaaactcctgggctcaagtgatcctccctacttgacctcccaaaatatggggattataggtgtgacccactgcaccttggccctctctaggatatttcaaggggaaaaaagaaaagcacagaacagcatgaatatattatgctgccatttaaat

SEQ ID NO: 638773 - DNA, 294 bp, Homo sapiens
ctagaccgcagagctctcattctaagctgaatcggaggagaaccagtaagctaccctttgagcatcatggacaagtagcatccgtagtatacttcacaacaatcctaatcctaatagcaagtatctccctaattgaaaacaaatatactcaaatgggcctaaatcctaatatgaataatgtggctgattgaaaacagagtactcagacatggggctcgatcgacgaccgcggacaatgtacaagagcacgagacgtactagtggacacgtgagccgtgcaccttacgcttggca

SEQ ID NO: 638774 - DNA, 235 bp, Homo sapiens
  misc_feature (29)..(29): n is a, c, g, or t
  misc_feature (168)..(168): n is a, c, g, or t
  misc_feature (173)..(173): n is a, c, g, or t
gcacacagataccatcccaccttgctttntgacaggccagccacacaataaccctttccctactcactaaagcatccctaggacaccaacaatgaggacaggcagacttacccccgccatctagagagaatgtcgttattacccataaaactcgaccacccccatatncactnttgggtaaaaacaaacgcttaaacctgtgagcctgccattcctttttacgtgttaatcaatt

SEQ ID NO: 638775 - DNA, 449 bp, Homo sapiens
  misc_feature (62)..(62): n is a, c, g, or t
gtgtgttgagagctctcagactaccaccttggggtcgctttgctgttcgtgatattagacanccagttgcggtgggtgtcatcaaagcagtggacaagaaggctgctggagctggcaaggtcaccaagtctgcccagaaagctcagaaggctaaatgaatattatccctaatacctgcccccccccttttaatcagtggtggaagaacggtctcagaactgtttgtttcaattggccatttaagtttagtagtaaaaggctggttaatgataaccatgcctcgtaaaaccttcagaaggaaaggagaatgttttgtggacccctttggttttcttttttggggggggcagttttaagttattagtttttaaaatcaggactttttaatggaaaccacttgaccaaaaatttgtcccaggattttgaggccccttaaaaaagtttaatga

SEQ ID NO: 638776 - DNA, 153 bp, Homo sapiens
cggtaccagcggaacagcagtgagtctcttaatggaacaaagtaagagcatgtcaattaaactttccttcaaagaaaggaaagaaacctaaatctgtgatggcaaatttggaaagataaatatttcctaagtcccatacatatgtgttatgtg

SEQ ID NO: 638777 - DNA, 159 bp, Homo sapiens
gctcgcagcgcaggcaccaaggacgcaggcaccatcacggggctcaatggtgctgctgcatcatcaccgagcccacggggcggccatcgcctagggcctggacaagaatgggctgcgcgggcggcgacgcagaccgtgctcatactttgaccgtgggcg

SEQ ID NO: 638778 - DNA, 1471 bp, Homo sapiens
gccagataagtttttttctctttgcaacagcatagcagattaataccaactacttcaacacaaatcatagtccacataggttactcaagcatattgcttagcgttcaagtttttaacgtcaattttcacatcagcttcaagcattttcaagcagcacacacatcatgcacagcacttagcaagcacgtcagccatgcaggcacaggcacacacagcatcacccacaggtttctcaacaaccatgaccggcaggtctcgcagatgcacagccttcttccatggcagtcaacaaaacatgtcattttcacaccagcaacacttgcaggagcacaaggcactaccaaggaagccccccgtcaatttaatcacgcacactagcacaggggccacatggcctctgccaccattcaacacatgcacagggtgcaccttcaagacgaagcttcaacaggctttctcggctcttcaaccaagttctgttcacggggtggatttacaacagtacctcatgcaacgggccggactcgtcttgtcaccacacaagaagaattctaaacccggaaagggttgcacttcacccacgaaccgtttggcaaacatttccattgcaccggccagggggcaggcactagggccgtctccatctccacacagacccctgacgttctcacaacgccaactctttcacgtctaagacccgccacgaactggaacgaattcgtgcccaccgcattcaacctctggcgtgcacgctcgcgtccagcgcactggagataccaactgtttgggcagcaacgattcgcaccgttccgagcacgccttgcgaacacacattgtgaaccacaccagcaacgtacaggggaacacgccgaacgaaccagcaactcagacgcccgacaccggggcacatccgcacgcatcagacacaccaacaccgtcagagagcaaccacgcgcatcccctccaccacacaggacacacgactggcacgcccgaaccaaccccagaaccacctcacgcaactccccacgccccagcgcccaagcgccacccgcgcgcacgcccaccgggcgcgcactgctccaggcctcgacatcgaaccacatcgcgacgcaggtcacggtcgacgacagggagcccgcggtgcaacacgcttccaccacagccgcaccacgtcacgcgacacatgttcacgccacaggcaccacacaaccccccccgacaccgtccgacgccggcacagcgagcagagcgcggacggcattgcaggctgctcgaacgacgcgggtagctcaagatccggcaggacgagcacccaacagcagcaggcgcttcgcacgtacagccgagccggcacggacgcacgccggcgcccgccgcgacccaggctgcgtcgctggagcggcaccgcgaaggcataagcagacgagaccgtccgccgcgcggcggcgggcaccctgcccgccgcgcc

SEQ ID NO: 638779 - DNA, 557 bp, Homo sapiens
cctagtccccgcgtgctcatgcctccggtgttatcatcaatacgtccagtctctgcagcacgttccaggtttcacgagcattgtagcttcactctctctggatctgaacacctgtgattctacggctctgcaatcattgctcaacttatcttccccatctcttcaccttgcgaggctccctatcgcgagaatgacataatcttctcagaataaaaatcctctgtcatagtgaaaacgtccagatagtcaatatcaggtgaaccagggcaccattactagaatactttacgaagatcaaaaaaagaaatagaagcatacaggtaatagtacatactactaggaagcctcaggatgcaggatttgcctgccatgaagctgcccctcagtacagagacagccggaagtccctactcccatattcagttccctgctcactgactggttaaactgtcggagggcttggtccagctgcgacgccaagaccaggctttcgacgtctattttagtatcttcttagcagtcctccgtcagttccccaactgatccggtctacactg

SEQ ID NO: 638780 - DNA, 134 bp, Homo sapiens
ggatttgctggtgcagtacaactaggcttaatagggattggatttgctggtgcagtacaactggactcgaattcgagctcgaattcgagctcgaattcgagcaagcttctaacgttagaagcttgaattcgagc

SEQ ID NO: 638781 - DNA, 680 bp, Homo sapiens
gttgaagccagtcaggagccctcatcgtagaggggacctttgagtttcattagcatggacactgcacaatgggtattgcggggcccatcccctccgtcagcgacctccatgagccttgggctatctgcagtgtctgaagtggctctacgggtttctgccactggacaacattgccttctcctacactgaggacatcatgtaagccagaaacagaagttgccttcgggattcattcttaaatggtaagctgggacattatgtcatcgccaagaaacaaggctcggtcaccgtcagcagtgttgcagtatttccgacctcctgcccagttcctcagtcgtggttgacccagatatctccgttatgcagccgcctccgggggacacaccgtctcctccctttgagtcagccacagacagccatacattgacggccccgctggcccccacaattccactgaactgtgcggatgccacagtgacaccctctcaggcacagcatgacctcctgaagtcgagcctgcttgctttgaacactaccagtgaagaatctcctcaaaatgtttggatacacagctccataaggccccatcacaggccaccgagctacactgacacagtgtgcgtgctgtgtgtgtgtgtgtgtctgtgtgtgtgcttggatagggcggggacgtcacctca

SEQ ID NO: 638782 - DNA, 368 bp, Homo sapiens
tgttttgtccttttgcattctaaagtctttaggtggatcttttggatatgattcttcttgcaataaattgccaagaaccagggtttcatttctgtacagagcaatttttaaaacttttcctttttaaacttttcctttttcctagttactaaactggcattttaacctctttttctccttttagctttgaatctgtctttcttaaacttgtcttttactctttttcttctcatatgtattaataactatagtcagtgttttatatttagtttttagtactcagcgggaggtcatgtaactaattgtcataccagggataaaactaataaggtgcccattttttgtaagtaaaaggaaccacggaagat

SEQ ID NO: 638783 - DNA, 682 bp, Homo sapiens
cgcggcgcggctggctgctgcgctccgccccggctgcattgctgcgctcccgtgcccaagggagccacgctgccgcgttcgcccggcagccggccgcccggaggcagcgcagttcctgctggcatgggcccctgggggcgccccgagctggggctccgtggctgaggcgctaaagcctgccctcccgccctgctggtgccccagcgtcccgttgcccgtccgccttgcccgccctgcggccatggcccgtccggcccgcgctgtgcgccaggcgcttcctgggcattacgtcctcgccgcttggctccggcgggctcgggtgcccacgcagagtgccaccgtggtcaacccagtgccttggtgccaatcccggagctgtttccccactttcctggtggagccccgaaggatgtgtccatcggtcaagcaaccaaggccagtgctgcttgtgttgcaaggccgtgcccgccagcgcacgatcttcttcaggtgcaacggggagtgggtgcgccagggtggaccacgtgatcgaggcgcagcacagaacgggaccagttgagcttgccccaccatggagggtccgcattaatgtcttcaaggcagcaggtcgagaaggtgtcgggcctgggaggacatacttggtgccagtgcgttggcactggagctccttcgggtcgcccac

SEQ ID NO: 638784 - DNA, 160 bp, Homo sapiens
aacttctagagagaaattagtctactgattggtataggtaaatggacattaaacttttttaaagtaaaggagatggtagataccgttagatatagtcttgaggttcatgtgaagccagtggtgttaaccttactttgattcctgtcagtcaggccctgga

SEQ ID NO: 638785 - DNA, 264 bp, Homo sapiens
tcaaactacccatcaggcactgtccttgaaccggatcacggtccacagtgagataaccagaacaatcagagtggtatttcaccaacgactccaccaccactagcgtggccgcatcaacgtctcccacctatcctacacaaaccgtcccaatcaccaataccaaactatagtaaaggtcccggggtctttccgtcctgctgcgcgtaacgagcatctttactcgtaatgcaatttcaccgagttcatggtggagacagtagggaa

SEQ ID NO: 638786 - DNA, 788 bp, Homo sapiens
  misc_feature (21)..(21): n is a, c, g, or t
  misc_feature (317)..(317): n is a, c, g, or t
  misc_feature (383)..(383): n is a, c, g, or t
  misc_feature (394)..(394): n is a, c, g, or t
  misc_feature (476)..(476): n is a, c, g, or t
  misc_feature (495)..(495): n is a, c, g, or t
  misc_feature (520)..(520): n is a, c, g, or t
  misc_feature (523)..(523): n is a, c, g, or t
  misc_feature (566)..(566): n is a, c, g, or t
  misc_feature (591)..(591): n is a, c, g, or t
  misc_feature (633)..(633): n is a, c, g, or t
  misc_feature (678)..(678): n is a, c, g, or t
  misc_feature (692)..(692): n is a, c, g, or t
  misc_feature (700)..(700): n is a, c, g, or t
  misc_feature (718)..(718): n is a, c, g, or t
  misc_feature (721)..(721): n is a, c, g, or t
  misc_feature (741)..(741): n is a, c, g, or t
  misc_feature (750)..(750): n is a, c, g, or t
  misc_feature (760)..(760): n is a, c, g, or t
  misc_feature (773)..(773): n is a, c, g, or t
  misc_feature (782)..(782): n is a, c, g, or t
  misc_feature (785)..(785): n is a, c, g, or t
ccccccccctttcttagtgtncatttccaaaataacgatagtcctgtatccatacattgtttcattgaaagaattctctattgcctcttcttggtagagccagagtccttaaggaaaatcaggaaaatgaagaaaatgatggtgccatcttgaccagacttctgcacagtaatttaacgctatcctagggagacttggttgaatgcacagttctgggatcagggtctaaatgtgcagtttctgagaaccttcaagaccactcactgggcagggctctgtggagcactggagctgtttggattccccagccctttggncatatcctggaattccgtggaggctgcagaacttagatgcagctgttttttacagcacctattttngtcagattggnaaggaaacactgagtcacagaatacttaagaattggagactccagtaatgtaggatggcctgagaggacgtccaagtcccanggggtggacacggcatgtncctcgggcacaggctcagtgggggnctnccccaggcgcagctcggcccacctgaggaaagggtgtttcggnagggcgcagccacaacacacagggntggcaggctcacggtcacgcccatcactccctgcccccactncccttgagaagttagtggtgtcacatccttagtcttattggcagnttgggattggttgngaggacancagtccactcttttttanatnatttcacacctcaatttaantggtttttnagggttttcngtttcccctcagntttacacgnttntct

SEQ ID NO: 638787 - DNA, 157 bp, Homo sapiens
gtacccacctgcagatgatagaaagtgatgggacaattaaacttaaaagataaatcgcttattacagccaaacttacacagataagttccaatatgccttaagccctgatagctcttctgatccctccactggatctccgggaaaccatggtaatca

SEQ ID NO: 638788 - DNA, 883 bp, Homo sapiens
gaaggacaaccctaagttctcgtttctgtttggaggcggacaaacagcagaagattgcccggctcctgcagctctgggaaaagaacggctactttgatgactccatcattcagcaactgcagagccctgccctgggacttggtcagtatcaggcgactctcatcaatgagtactcgtcagtggtgcagcctgtgcagctggccttccagcagcagatccagagcctcaagacacagcatgaagagttcgtcagcagcttagcccagcagcagcagcagcagcaacaacagcagcagcagcagccgcagccacagccacagccacagattcagctgcctcagatggaagcagatgtgaaggccacacccccaccacagcaccaccaccagcctcagcagctgcccccaccatcccaccaactacccagccagatgacaacaagcctcccatccagatgcctggctcttcagagtacgacacctctgcaggtgtccaggatcctgcagctgctggcctcgaggtcctggccccatgagcagatcccgcaaacaagccccttggtttgatcagcctcacccagttgccccttggggtcaacagcagcccctgagcaaccccatatccacacaacaaggtggaccaccgccattgcccaccctggaacaacaggccaccgaggcatgtggggttgaagcagcggaggggacccctggtgggaattgggcccaacaatgccgtgggacaaccaggccagaaatccattggattacctgtttgacgggccttgtaacatacagtaaccacgctggggtgtaccaaaggataccccttttatttcatgccccacactgggggagccacatttcacaaaaactacacgctc

SEQ ID NO: 638789 - DNA, 159 bp, Homo sapiens
cgcgcagaggtcctggagacggtggagttagcagatcagcttgaagaactatgatccccagaaggacacgcgcttctcgggcaccgtcagtctataaagaccactccccgcccataagatactctgtgatagtgtccgtggggggacaccagcagcact

SEQ ID NO: 638790 - DNA, 687 bp, Homo sapiens
cctggggaaagtccctttggattaaggaaagtaagtatattgtgttacgcgccgcgagtgtatgaaaatagcgtgtccatttatagctccaggatggcacatccaatgtttgttattattaagtagcgcaagagttacctatcccacgggtataattaacatggggggaaacacccccaggtatctaatgaggattaaatatatatgttttttaggcgttatatatttttcatggttaacataacgtatcaagaacgtatatttgttcaaaggagcattccccccgaaggcgcccccaaaacacacctgggggaactacaccccgcaataattcccccgtcaccacttccgagggacccactagtagggacaggaggtattgcgttctaggagagttataggggctgtcttttgggagaccacacgcccgtcgactcacacctagggcacaaagacacccttcttgtatgacgcacaatgtcttaaaatttcacgacgcgcgcgtatggttgtgactcccctgttaggtaccacagacgatatgcacctgacggtgccgggtgggggaggacattattactaggaggttctccctgggcggcggtgaactagacgcccaccatcctcattccgtgcccttggtacacagatatggcgagtctccctcgtcccatcaatagaacagag

SEQ ID NO: 638791 - DNA, 1038 bp, Homo sapiens
  misc_feature (773)..(773): n is a, c, g, or t
  misc_feature (807)..(807): n is a, c, g, or t
gctaatcccagctgggagcggcatccccagcccgccggcacggccgcctacgaactggtgctgatccggcacggcgagagcgcatggaaactggagaaaccggttcagcgggtggtacgacgccgacctgagcccgggggccacggggaggcgaagcgcggtgggcaggggctacgaggatgctggtcgtagtgcagttctgcatgatcacgcgttgcacctcagtcgctggaaagagacgcggagtccggaaccactcatgggatctggtgtctcaggactgtgcagtatgcatcagaaatgttggtcttgctcattctgcgatggaggtgatcgtgtggggcgaccgtctacatgaagctgggatcttttgcgtggggtctgagacccgcgtcgttcacatcatagagcgaagtgacacgtgctcggcgaaagacgatggtgtgacggtcgcccaggatagaaaggatcgtggacggactgcctgctctagttgagttgtccaccactcaactctcacgggatgggaggcgccgcgagcacaaatactcggtttgcattagcgaaggccaagcaagttcaagctaaagggagttcgtccagaggtaggtgcagtagcgcctcaagcaagtaagactcgagacttacgcccgtccatggtagagtacgctcatggagaatggagtgactaattgggccaagacggctgcatgcctcccttgcatggaagaactgacacgagacatacgtttccgccccagcagtgcgaaggnaccggcggaccagagctgttgttacttgattttngcgggagcccaagtgtggcaaagcagggccttccggggggtcgattggtcaaagccacttctgggatggcggtcttctcctgaaaggagtggctattcaatggaaggctgaagcttttgcggacctgggtatttccccagttgctctattgaatttgggccaggaaccttggaagcgcctattaagagcccacatgccaagtttctgggggaaatgaaaaggcccgttgcc

SEQ ID NO: 638792 - DNA, 144 bp, Homo sapiens
cgctagcggattaagtgaacgggttgactcctgcctgcagttcaagactcacagtccaggaggtgcctttgctgagaaacactcactaacatctccaggctgacttaaagatcccctccaggcgttcacttaatgccgctagcg

SEQ ID NO: 638793 - DNA, 250 bp, Homo sapiens
actacatacttccgcaggcggactattcatgctcaatgccgatctgcatgatcctcccacatgtgcgctaacggccaacgtttcttaatcgattctcgtacacgaagggttatatcgtgtggcctattgcgtactgagttgttttaccatgtcaacaacacatcattagttgggtaaaactaacctgtctcacgacggtctaaacccagttcacgttccctatcagggggggggaagtatgaagtcagaa

SEQ ID NO: 638794 - DNA, 964 bp, Homo sapiens
tactcgtgttaaatcttaccccgcctgtgtaccaataaacatcactctagtcagtcatcagtatcataggtagcgcctgcccagtgacacatgtttaccggccgcggataccctagagcgtgcataggtagcataagtcacttgtaccttaaatagggaccatggtagttgaagtggcatccgactgtatggtgtttcaaaacgtggttcgtcgtgtgacctttgttaaaccaggtgagcatatttgacccatgtggccgtcgaagaggcggcccgcctataacaacatgccacccacgagaaggacccgtatgcgccgctttaatttgagttgaatgcaaactagtactctaacaaactccaatgaggtcctatatatctaacacacgctctactccaaactaaacgtacacgatgcccagatatcaataggctcaaaggaccaagataggacgccaaaaactaaaagttaataacgtgactgaacgtcagcacctatgtatgcactctgtatgtgagccggcgacagacagaagtaggtaggtcatatacggccccaggggaggggtactgcccaccagaaatataatatattctagaggcccaatagcgtgttagtcatagggaagtgaacttgactcactgagtcatatagttttgcctgcaagtaatgtaaactgtagcgacactacactcttgttgtagggcacggagtcgaaagccgcctcaaagaacccggcacggagagcgcagtggctaagaccgtaaccgtaaagaaacaagacaataagcctcgaggaacaagcgcgggtcgcgagtgtagccgaacctaaggtggtccgcatggactatgatacgggtaggatagcagactttaaactaaaccgtagccctggggggaaagggcgccctggccaaagcaaagaaatcagagggggcgacgaccataaaaagtccccgaagg

SEQ ID NO: 638795 - DNA, 512 bp, Homo sapiens
catggctttaaaaaggaatactttaaaaaataggtaaacagtccagctgaatatttcgaggtgaattaactgaactgaagagctgcaataattaaactcacttagggaataacaatatatctgattaagccagtacatacctaaaaagttacgtaagcaactacaagtatacaagaatatatatgagattattacctattcctaatctgagcctcattgttcggtgcattagcataacatcgcgaaactgactttcagtagttgcatgtacattactagttatgtcttgcgtatgacatacatacaatctaatgaactcacatgcaatctagcaactgatggtgctgagaaattatctcttgctggctgggcgtggtggctcatgcctgtaatcgcagcactttgggaggctaaggcaggagaattgcttgaactcgggaggcagaggttgcagtgagccaagatcgcaccactgcactccagcctgggcaacaagattgacactgcatctc

SEQ ID NO: 638796 - DNA, 341 bp, Homo sapiens
gtgcgttatgaggctgcagtgcattccacgcctgtgctaagagtgatgactctgtctccaataaaaacaagaaaacaaaacaaataaaagaataacaggctgggcacagtggctcatgcctgtaaacccagagctttggaaggccaaggcgggtggatcgcttgaggccaggagttcaagatcagcctagccaaaatggtgaaaccccctctctactacaaatacaaaaattagctgggtgtggtggcatgcacctgtggtcccagctactcgggaggctgaggcaggagaattgcttgaatctgggagatggaggttgcagggagccgagattgcgccac

SEQ ID NO: 638797 - DNA, 159 bp, Homo sapiens
gtttagagactgctgaacaaccacatcttgacgtcagctatgtgtgctgaacgccatcgcttgcggggctgtctgtagagaccctggagggcacgacacgtggaggtgggctgcagcaggggacatgctcactaatcaaccgggaaggcgactcatctc

SEQ ID NO: 638798 - DNA, 238 bp, Homo sapiens
tttttagaaagggtttttatggaccaatgcaccagttgtcagtcagagcagttggtgtttttaattgtttaaaatgtcacctgtaaaatgggcattatctatgttttttttcttacattcctgataattgtatgtattgtataaagaaagtctgtaaattgggttataacactagtatatttaaacttacaggcttatatgtaatgtaaaccacaattttaatgtactgtaattaaaa

SEQ ID NO: 638799 - DNA, 297 bp, Homo sapiens
  misc_feature (29)..(29): n is a, c, g, or t
  misc_feature (146)..(146): n is a, c, g, or t
tgggagtcccaagctccctcgcccatttnactccatgaggataggaggggacagctgctgacgacctggcagagaccctgcgccaggccccaccccaccggcaccctgatcttgcacttccggcctcgagaatgcccccgcccggnagggtctgagccaggcagcctccccgggagccggtgctgacacggccagagaaaccattccagacccggaccccactgtccccaacaactgcgggccagtgactcagggcggtggagagagccaagaggaagtggaggcttgagtggccct

SEQ ID NO: 638800 - DNA, 242 bp, Homo sapiens
caggtactttccaaccatttccagatttcacctgggggcagcttcccgcccccaggaatcacctacaaactcacgggccttattgcaaccctcccccatttttttcaccttttcaccccctgccttcagggactttcttgggtttcccaggttttttccagccttccccagattttttccacagtcagcccttggcacccaagcatttcccgacaaagggttttaaacagaacccttttgga

SEQ ID NO: 638801 - DNA, 208 bp, Homo sapiens
aacagcaagcagtccaccccttcagcctcccaaagcactgggattacaggtgtgagtcactgtgctgaggcaagttatgtttctgtttagaccccagtagtaaatattttaggctttgcagaccatgtggttgtaactactcacctctgccattggagaacaaaagcagccatagacaatacttaaatgaatgggcacacatatggag

SEQ ID NO: 638802 - DNA, 287 bp, Homo sapiens
gaggacctctctttctccctttaccatctatactcagaggtttcttcattttatctgtgacctggcttatggtttcttgactcatctcttctataatggcagtctcaactcaagaaactggtttggaccacctatctttttttttttttggaaataaattcgtcccctgtcccccaggcagaagtgcaagggcgcaaacccggcccactgtaccctcggccccccgggttcaagatgatacacctgcctcagcctacggagtagctagaataataggcgggtaccac

SEQ ID NO: 638803 - DNA, 989 bp, Homo sapiens
tctgtgaaggaacttgaagtgatgcatgtgtgaatttaagataccgaagtcttaaagtgacctggacgtgaaggaaaaagtaagatgagaaataaagaaagccttggtaagggggttttaaaagccttatatgcaaacctttataatctgttgtttctgcaattgccatccttgtacagtgttaagagggtaacatgggtaaccttgtgcaccagcttcagggttaagctacacccggtaccttggaagcacccatgtcagtattagaagaataggcagcagttccttagttaacatatgtaggtgcaatatatttctggtacttatatggtacataaatttggtacagtattacaccaaacggttttgggcaacaaaaaaactttttcttgggcattcatttaatttacaggtcaaataacattttattacatgggggcctcatttgatatgttcctaatttacattaattgccatacgtgtagtgtaccagcattattagtctctctcaatataatagcatataattaaggtaaacaaagggaccttgccgttgcaccattggggccaaattttcacgctacagacgaaccagcatctatggggttgggggaacacttaaattgtgacatggcgatttgccacatgtaacataatgcgaaatactaggggtatacttacccgaatcagtggacaatttccaaaattggggaaagctttgcgaatacgatactgggagcacaccacgggaatatataccagacttgaaatatccgccatataaatacaaacggtggacgcaacagctaaaaaaaacgggggacggggcagcaaatacaaagggattgaatccccgtgcaaaaaacgaacttcccccgaaaagggacaaggggcaaaggataatacgttagcagaacaaacaagagaagagtcacatcgggacagcggacacagcggcggaagatcacggttggccacacctacaaaag

SEQ ID NO: 638804 - DNA, 364 bp, Homo sapiens
  misc_feature (73)..(73): n is a, c, g, or t
  misc_feature (78)..(78): n is a, c, g, or t
gaggcttgcataataaactcgccaatgattccctacagtgactcagatcattgcttatatactgaaagatgtnttatnatatacaattgttaacagaaatatcaattacgttatttatgcttatttaccattaactagtctataatgagggaagcaaaagtatttattcatttttaactggctcctttcttgtgccatgccatgttgaaatatattattgtcacttactggaaattctgttaatccctatattgttttcataataatgcattctatgctccagactttacattcttttgaccaccctttggctaagataacttccggtgctctattatgttagagatacgggtaccgagctcta

SEQ ID NO: 638805 - DNA, 96 bp, Homo sapiens
  misc_feature (4)..(4): n is a, c, g, or t
  misc_feature (25)..(25): n is a, c, g, or t
gaanacgggaaggcgaagaaaagantagagaagatagggaaaagaagataaaaacatacagaagaaaaaagataaaaaacctgaaaagtaggaagc

SEQ ID NO: 638806 - DNA, 244 bp, Homo sapiens
  misc_feature (30)..(30): n is a, c, g, or t
  misc_feature (66)..(66): n is a, c, g, or t
  misc_feature (77)..(77): n is a, c, g, or t
  misc_feature (83)..(83): n is a, c, g, or t
  misc_feature (86)..(86): n is a, c, g, or t
ggcgtcttggcgattcggcccgacgagctncgctttcgctacagcatggtggcctacttgagacangcttgactcanctacanccnatactcccagatctgtgcaaagcagttagagatgcacttaagacagaattcaaagcaaatgctgagaagactcttgcagcaacgtaaaattgtgaagtaagaggattattcaccccgactaagcttgaatgctacatcccagggaagtgtttggccaa

SEQ ID NO: 638807 - DNA, 160 bp, Homo sapiens
ggtcggtactggcatcgtagtccacaagttgctgtcttttctgtcccctcagtgcctagcctagctctgcctccacatcctcagaaccttcactccaacttgaaactgccctcttagtccacaatttcctgtcttttcttgtcccctcacggcccgagag

SEQ ID NO: 638808 - DNA, 200 bp, Homo sapiens
aactattatgcaatgggtattgatcatgatacaacctgcatggagccccttcacatggatggatgatgccccatgaccctgtagaaattgaaatcctgctcacaacattgttaggacttcattactaacctaggaccgtgattgagcccaagaaaccaggaactaacgcatatggccaatgtcaaaagaacagaactttg

SEQ ID NO: 638809 - DNA, 942 bp, Homo sapiens
ctcgccgaggcgcgtatcagtcggaattatggggagccaaccgcgccgtctgtccctggcaagccagcggcggtttaaaggaggtggcgggaagcctgtgtgtgcttcaaatcgtcaccctcatggtcgctccgatggcttgtgctggaggacaagcaaattgaggacactggcaacggagtgatcaaaatgatacgatcatgacggcctacaaactgaataaggaaacgaagagaagtggcagaggctgagaacagaaagagagggtggcaggggctgtaactcttgaagattagggtatacatatgagtatactgggtaagaattggaacgaatcgtgtagcgaggcagtagtcaacacaacgtagcaacgcagtcttggaagcagctagttaccaatatcaagagccaggtggctacccaggtggcagctataggtcattgaagctcaagaacactgagtctctagggcattggttaacgtcatctgtctagacttcacagttgtctaggatgataattcacgaagactgatctgtgccacaagtcaccaggtatacacgactgaaaacaacatagcaacaataagccaagatgtctgtggatccaatgacctacgaggcccagtgctcatggcttcaccgccaacaaaccgtgcatgctgtcggatctcaccatcgcattccaagacttacctattctgacgctgactccacgcccgtctgcaacaggtacttctcgacgaacgctggaatggcatcccacgactgtggaccatgtaggccccagctgcagattgcgcacaattgtctccaataagattcttttgctccgcgcgaacaggacataccggatcaccgttctgaggcagactaggaacacccggaagtgcgaccgtcgacgcaccgatcccctcacgaccacattgactctccaacccca

SEQ ID NO: 638810 - DNA, 90 bp, Homo sapiens
ggatttgctggtgcagtacaactaggcttaatactcgaattcgagcattcaagcttctaacgttagaagcttgaattcgagcagtagtag

SEQ ID NO: 638811 - DNA, 318 bp, Homo sapiens
actccaaagttcatctgacacgaggcaagcctctctgcctataagcctagaaaattgaaagcaagttagtatacttccgtagatacagtggggctacaggcattgggtaaatatacctgttccaaatgggagaaattggccaaaacaaaggggctacagcaggccccatgcaagtccgaaatccaatagagctgtagttacaccttaaagttccaaaatgatctcctttgactccatgtctgaatgatagcctttggacctgtaagattcatgtggcttgtagaaaatataaaacttcattgtgcctcgcattatatc

SEQ ID NO: 638812 - DNA, 187 bp, Homo sapiens
ggttgcaggcctaccaagaccctggaagagacagtttgtcttaggaaggctaagtttaaggctgaaacgagcagcccaatcaaatttgaagagccaccagtttgactctgttccatttccctgctacttcttctggggctgggactggccgctgaacgagaacgcctggccttgtactgatcttttc

SEQ ID NO: 638813 - DNA, 338 bp, Homo sapiens
taattctaaagatctcaacaatgacagcttcaacgagtggagtatttcactaccaagtttatacactacattcgtgcaaaggcaacatctggggatcacgaatagatatagactcaccaatatattgtgacagtggtaatttatcaatttaccaaatatgccacttcctttttttttgagacagagtttcgctcttgcaccctggctgcagtgcgatggtgcgatctcggctcaccgcaacccctgcctcccgggttcaagcgactctcctgcctcagcctcccgagtagatgggattacagacctgggccaccacacccggctaattttgtattttt

SEQ ID NO: 638814 - DNA, 171 bp, Homo sapiens
  misc_feature (1)..(1): n is a, c, g, or t
ncaagtggttcacagaaattttccgtcgacaactatcgttgtatggtccgccgaattccaaatctgttatacgctacagcattgcttgcattcactgctcggatgggatcagatcgactatcggtgctgtgtgcggatctgcctctccagcatctcgacgcaggttctata

SEQ ID NO: 638815 - DNA, 163 bp, Homo sapiens
ttgactcttagaaggatccccattgatatgcggatgagggcacagtaattacaaacttactatactgccatcccatacattgtgacagacctagttcaatgaatcttgaggaggctactcagtagacatgtcccaccctcacactgattctttacctttcact

SEQ ID NO: 638816 - DNA, 313 bp, Homo sapiens
  misc_feature (179)..(179): n is a, c, g, or t
tgagcaagctgtgaatactgggcacacaccaccatgcacagggagatatgagacatcaatcaatatatgtaagatgtacatcagtttcgtcgggaaggatgggacaacatgaagcagggagggggctcccgggtgacagggaattttctggtgggcaaatggtgagggagttcctggtncaaaaggccaagaaccgggatgactcatagtcaagaccctccaccagtaacatatatgggcgagccagccaggagaccactacaggaaacactccatttattccacctgacttcccagctggctcagaggggta

SEQ ID NO: 638817 - DNA, 243 bp, Homo sapiens
atcatcccgttttcctgtgtcatgcctgaatggcatctaatataaaatataatgggagtgtggggaggattggcacgcgtccttccttatctaagaaaaaggcactatcattatctggatctttcacacaccaattctacttctttcccttagacaaaacttagccacaaagctattcctagctgcaacaataatcagaaaatggacaccttaaactttataaattgtcacactgaggatgaa

SEQ ID NO: 638818 - DNA, 1725 bp, Homo sapiens
  misc_feature (649)..(649): n is a, c, g, or t
  misc_feature (998)..(998): n is a, c, g, or t
  misc_feature (1356)..(1356): n is a, c, g, or t
tcgtcgttgtctgacggtcgctatcatgtcctttgggcttttagtggtgttctgctcgatgtgcgatacctgtcctgctgtatgtatatcgtgtttgatcgtgcttctgtgtgtgccggtcgttgctgttgttttgaccattgtcgtctgcggtgctgtgcgtgtgctgttatatagcggctgttagccgtcagtgtcgcgggagcccatcccccgtggtgtgccgctctgatgggaagctcggggtgcattcatcctcgcggtgtttttatgctgtgcccccgggggcgtgataccttgtgttccccccggagcccctgctgggccccctgtggacctctttgttggggcgaccctcatttaggacccactggttgttgacacacgaaaataccggcggtgggtggctcccgtctctcggagaagtttccgcccgggagttttttgtgttggcgacctcactcgcggttttctctcactgtcccgccagtggctcctcccatgatagagggggggccctcttttcatcgccctctctccttgtgttgtcgctcttccgcccgcctatacgcaccatgtgtgggtggttgttatccatcgttgcccccgctccctctatgtttgcagccgctgcgtcttactcaagttnctttaagggccccgtccttcttgttgtgctgcgatgaccccgccgccgtgttgtccccacgttggtgtcgcccccatttgagttgggcgcccccgcaattgtgtcataccaccccgcgggtgtgtatgggccactcctctttgtcgtcacagggggcgcacgtacgcaagcaagccgagacccgacaccttgggttctccccctaaatagggccccctctttttcctgagtatttccccgcgcggggatatatctccccctcggttgtttaatgtgtactcccccctctcgcaagaagagggggttgttgtttttgctttttccccccaaaggagggagtttttttttntggaccgccccttgttgttaatcgcgctcgtgctacactgcccttttggcccccttagtccgcccccctccacttatatagagaggagcggcacacttggcgcgcccacacactacaggggtatctcacccccccggctgttttatattcgcccctctgtagagaggtgctcccacgctctctttgtgacacacccactccccgtgtgtgtatcatctctcgcctctcccgggagtgtgtctccaactctccctctggggcgtctctcccccaatgaggtgttatattaaggatacacccctcccgtgtacacccctagttatttctctagccacttgcggtttattcaccacagttnttactctgggtgcttctcttatatgttcacccgctcctctctcacatagcccttccagaggattccttcctggagattttctcgccttctcaccacatttctcggccggcgtatgtttccggcgtcacaaacttgttttgtgaagcccaccagggtttccccggagtttcaccgtgcacttattgggtcgcacactgtttcctccacctatgttgggtttcactgccccccacctagatagttgttccctcttacactacccacaacatccacctcttgtggcttttgaaacccccccctgatactggccttttgtaaatggggtttgactattttgcgtatgtttcccttttttgatagagggtttta

SEQ ID NO: 638819 - DNA, 124 bp, Homo sapiens
  misc_feature (20)..(20): n is a, c, g, or t
gggacatgaagacatctttngaaatgatgagattatttcctgtatgcagtcatttctgaggctttcttgcatcatagccggtaacatttcctcttagaaatattacactctacaaaattgtttt

SEQ ID NO: 638820 - DNA, 154 bp, Homo sapiens
gtggtgggtccacaacacgtatcaagtcggtcctccggaactgatacgtgttgtggatcccgcgtcggcatctggtcacagagtgttggtcgggtggttgattcctatgctatgtgattcgagtgatcgtggtagttagattacgattcatcct

SEQ ID NO: 638821 - DNA, 537 bp, Homo sapiens
  misc_feature (2)..(2): n is a, c, g, or t
  misc_feature (34)..(34): n is a, c, g, or t
  misc_feature (37)..(37): n is a, c, g, or t
  misc_feature (62)..(62): n is a, c, g, or t
  misc_feature (66)..(66): n is a, c, g, or t
  misc_feature (155)..(155): n is a, c, g, or t
  misc_feature (234)..(234): n is a, c, g, or t
  misc_feature (396)..(396): n is a, c, g, or t
anccttcagggttttccaaagttaacctggaagnggngcccaggaaaacgggccaggaaaangtanatttggtgagacaagttttttccacaggggtgatgtattgaaataaaccaatagatttcaaaaccagggcaagactggaaaatgtgacnttgaattcagatggtaccaaacatactgtggggagtttctccatttaaagtatcaagttgtattttaaccttgaatccntcttggagtgtgccagggacgtggaatccagcctctgtcacatcttggtcacgtgagttcagaacagtgtagcctgaatgacggcatggtctcatgggcaccctgagtccatcctggctcccactggccatgtgaatttcatcgccctcagcctcagctttntcagctatcaaaagagagaacacccagctcaaggcgggtgacaggaggatttaatacaataacatacatagtgttgtcaaagcttaatactttgttattgattgttgctattgttatcagtatagatactatttaaaccag

SEQ ID NO: 638822 - DNA, 163 bp, Homo sapiens
agaagtagacaaatgctagcttattttagcagaagacggtgataatagaatttagatactgttagtgatggggaataaaaagaaggactctatggaccacattatacatttaattatagatcatatcccacatgtgccataaagcagtagcatttaagcacgg

SEQ ID NO: 638823 - DNA, 976 bp, Homo sapiens
catctgtgtcactccctgcttgtgtcgacgctatgttccattctagatgcgtcgtgtcctctcttataaggaatgctgtttccaacaccggcctcctgtttcttacaaaaggcgcccctggtataactgccccgcgctcctttataggagggtgtcttgcccatatctggtgtttgcccgttgggcgaccgttttgtgggcaccccccaaccagggggttgtattcccacaagggaggtaccgcctcggttccggcctgtttgtccgcgactctagatggtgagcctcctcgttggggctcgcgatgtgaggtgtctccccccctgggcagtgcaggaagggctggtgtaattccctgtgtgcacccccacagcggggttcctcccccgtcgcagttaacggcaacccatgaatcccgggctaacccctccccaagggcttgggcgtccccccaacccgcatctcggggcgaaataggaggagcacaacaaaagcagagaacacacccggggacaaacgggcaaaccccccacactaaggtgttccctccgcgaggataagaataagtcgtccgtcccccctctggaatggtcggagacacacgaggaaaattccccacgcgaggtcccctcataccgcccattacatatcttctgaagagtccccaaccggtaaaatatgcggcctccagtaggcgctcgtcccccgtcagccacacgggggccacccgagaggagccccccgtcagataaatgccgtgtagtgtagggccggttggggaaacataattggtagccccgcgactagtaatacgatgattgataattccagtctcatgttatttcgggcaacaaaagtcgttagatgagtaatccccgcagaagtttgctttggtttgtgcgaaagcagatgaaaaatatcaacttctccttcccaaaaaaaaaagggaaatttttcaaccacaacaaacaaaaca

SEQ ID NO: 638824 - DNA, 400 bp, Homo sapiens
  misc_feature (26)..(26): n is a, c, g, or t
ggagtccgggtaggcagcgcgagtangcatgagatggctgtaccactgagggctccaccacatggtggctcagctgaatgagtgccaccagatgtataacggcgggtctcagggttgtcacggtctgcccagtctgtatacatgaacttgatggtctctcgccagggtgtccttaccctcaggatagccatacagattgtccacacaacactggagacggaacagccaaagccagcgccagagacaccatccctcaggttccaccaccccttccacaaacctgagaccctcgcccctggccgacacctagccatgatgctcactagctcgacgcgaactcgccccctgcctccactgagccactctcagggctcactcacggacctgaccatccccactc

SEQ ID NO: 638825 - DNA, 812 bp, Homo sapiens
gacgctgtgtcaaaaaaaaaaaaatgtttttaaaggcttttggtagaaatgagggtctcacagtttggcccaggctgatcttgaactcctgagctcaagagattcccccaacctgtggtctcccaaagtactgagattacaggtgtgaggcacagcactcagtctgaatattttcttttttaaaatggctgtacaatattctgtggtattggaaattatcataatttaatagatttagcattgcattacatttcttatttttttggcatatggtacagtaacattcatattttgggctttaaatgttatatgtttttatagttccaattctggacgtctcttatggggaattaaaggttttctaccatttcacctaaattatttttggttaaccaggtaagatacctttgtgacagcaattatggggtgggaaaattccttttaaattcttccaacttttggatcctttaatttggttctggccccaagcctaaatttgggcaacaattttatggtttaagcaaacactatttcggattcaacatctttctcaaagatattccaaactggctttcccatcagaaacaactcctttttggaactcattttcagagggtgtccagaatttacaaaattcaacagttttaacacaacgtggcaaaaagcagatacagaaaccaaggtacaactggatggggggataacgcataagtacctacctctcatcgcggaatcatccagagtctcggcgccatattacagcattattccccccatttacaactatcattaaccttttccagaaagcgaag

SEQ ID NO: 638826 - DNA, 392 bp, Homo sapiens
  misc_feature (315)..(315): n is a, c, g, or t
atctgcccgccacggcctcccaaagtgctgggattacaggcgtgagccaccgcgctgggcctgggcttctttttttttttcccaatcctgagggatccaaaacctgaggggagaggaagggacttaaaaaaaatctaagctcaactcttctctttccttacccttgactcagatcagcagttcccagagtgtcccacaggacacagtacagacattggggtccggtgggccggtgtggtccaccctcatccataattggattcagaatcaaaaaggggtatcgggataaattgtgggtatggtcacccaggtggnattgcagtgacaggacctcagttcagtgcagcctaaacttcgtgtgggtaaaagaaatcttcccatttaagcctctt

SEQ ID NO: 638827 - DNA, 1290 bp, Homo sapiens
  misc_feature (335)..(335): n is a, c, g, or t
  misc_feature (873)..(873): n is a, c, g, or t
ggctgtcccggctgcccgacctgacagccattgacgcgtccactgcagttcaaccgaaaggtgcccctcagtacgggactgtcgtgcacgtagtgtctagatgatagcacggccttccgtgctcgcgatgactatggagcgcgcccagaaagggagggcagagcgtccgtgactctgggatcggaggtgactcatcgtgccgtcgtccgatcggtacccgtgaacttccagatagggctctgaagggaatcgtgcatcatactcgttattcgcacacgtcagtcgataacaacgcctataggccggggcatcctgtcacaccaagagattcatancgcgacatccaatcgcaagaaagcattgtgctacctattgcatattgaaagacatcctggtccgaagcgatttcacttcggaacaggcacgcatgggatgctatcgtacacggcgctcattgatacgccctagtaggacaccttgtttgcaggacggcgccaaacgggcatcgtggtattatgaagaagttagggtgaataccatttgcacatggcgagtgtgcccacgggtggtacttgcttcttctcagcccacctggtgctgggcgaaaggggctctataggaccgataaaggggcgatgctatagcaacgaaagctaggcggggctgggagcaaatttctgaggcggttcaaatgttacgtcagggacgaatacgacatgagaaggcggagataaagtctttcggaactgaggtagtcgaagcctaaattgaaaagtgcgttaggtcgcaaaggatgcggagttcgacatccgggggcgccttgccatggaacttgtggggccaaccccaaatcagaaaattgtgcggcccaangcacatgggtcaaaggtgcggattgaaccattggcttcccgggagacaggcattgaagggccaacgggactgaacatgggcgcggtttggaaccccttgggggaccggcggtgcaagcatttggcatctttgaggcccgaagaattcgcggcccccacatggtgaccttccaaaggccctgggggcggaagcaggaaggcaggaagaaaccttctttggtcctttagaaaacgacaaaagacacagaaaaatatccccatatatgaggtgaggtgatgtttgtggaacttggcgcacagcttattagcaggattatctgattaccctagaggcacatgtgtctcaggaagaaggaccctttgtggaaagatcacttcatggtgggagaacaggaatttatccattcaccgatgtttc

SEQ ID NO: 638828 - DNA, 171 bp, Homo sapiens
tcgagtacgcaggcattctcttaaggaaaggttaagtaacatgctaaaaagaactcagccaatcttaccccgtcctgtgtaccacaagacatcatctctagcatcaccagtattagaggcaccgcctgccctgtgacacatctttaacggccgctgtacccttactcgtat

SEQ ID NO: 638829 - DNA, 616 bp, Homo sapiens
ccgtaggcagccatggcgcccagtccggaatggcatggtcttgaagccccacttccacaaggactgtgcagtcggctgcgtggccacgtggttcaaccagccggcccgtaagatccgcagacgtaaggccctgtgcaatgccaaggctgcgcctgatcgcccctgtgcccctgcgtcgggtcccatcctggcccatcgtgcgctgccccactggttcgggtaccacacgaaggtgcgcgccgtgccgcgggtttcagccttggaggagctcaggggttggcccgggcatttcacaagaaggtggcccggaccatcggcatatctgtggatccgaggcaggcggaacaagtccacggagtcccttgcaggccaacgtgcagccggcttgaaggagttacccgatccaaaactcaatccttctttccccccgaggcgaaaggtccccctttccggtggtccccccctgcaaaagcaaagcggcggcaggaaccacggttttcacttggcttgacggggacacgcttgaacaacccttgtgtcccgacccccaggccttgaaccccgggaacccggggtcattgcccctgtcccggaaaccggtcctattcaccaccgg

SEQ ID NO: 638830 - DNA, 253 bp, Homo sapiens
ttcacccctttggggggggggggggggcaaatttcttgagcccaggggtttgagcccagcctgggcaacaaagggcattcccgtttttccaaaaaaaaacaaaaattacccggatgggggggggtttgccggtggtcccccctccccaggggggtggggggggggggtcccttgggcctggggaatgggggttcccttgagtggggttggcccccctgccccccagcggggggggcaaagacccggtttccca

SEQ ID NO: 638831 - DNA, 317 bp, Homo sapiens
ggaatttccttcgtgaccctccggctggcgtgcaatttaatttcgactttgatcagatgtaccacgtggccctagtcatgctccaggaggatgagctgctaagcaagatgagatttgccctcgttcctaaacttgtgaaggagaggtgttctcgaggactactgttaccgcgtctcctgattagcagtcagccagctcacggcctgctgccaacagcaggccgcaggaaggaggagaggacactgcagaagcagatttccgctgcagagcagtacgcccaaacgcaccgttgtatcaatctagcttaaactagagga

SEQ ID NO: 638832 - DNA, 322 bp, Homo sapiens
tggacctgaaaagtcctataatcttgtgattttaacatgttatatagcagtgcgttaccttttctatgttaggtatgttggattctttgtttgtccgtttgtcgtttcctctgaggagtctcactctgttgcccaggctggagtgcagtggcgtgatcttggctcactgcaacctctgcctcccaggttcaaacgattctcctgcttcagcctcccgagaagctgggattacacatacgtgccaccatacctgactaaattttgtatctttactagagacggggtcctaccgccgctaggccgcgcttctctccaactcctg

SEQ ID NO: 638833 - DNA, 443 bp, Homo sapiens
  misc_feature (224)..(224): n is a, c, g, or t
  misc_feature (266)..(266): n is a, c, g, or t
gggttcaggtgattctcctgccttagcctcccgagtagctgggactataggcgtgagccaccacgtccggctagtttttttgtatttttagtagagacagggtttcaccatattgaccaggccagtctcgaactcctgaccttgtggtccacccgcctcggcctcccaaggtgctgggattacaggcatgagccactgcacccggcctcatttttttttattgnggtaaaatacacataacttaaaatttagcatcttaacaattngttttgttttgttttgtggtagtgatgtttttgtgagatgaggtctctatatgttgctcggactggtctcgaactcatgggctcaagtggttctcctgcctcagcctcctgcataactgggactacaggtgtgcaacactgcacccggctctatcttaaacatttttaagtgtatag

SEQ ID NO: 638834 - DNA, 667 bp, Homo sapiens
gcaacacttccacggaagccatatggaatgatctgctgcaatgctctgagccctaggaatcatcattcttgttcaccgtaggtggcctgactggccattgtattagccaactcatccactagacctcgttactaccacgacacgtacataccttgtagctccactgtcccactatggtcctatcccataggagctgtatttgcccatcattaggaggcttcattcactgatgttcccctattctcaaggctacaccctagacccaacctacgcccaaatcccatttcactatcatatatcatcggcgtaaatctaactttctttccccaccaacacatttctcggcctatccgggatgccccgacgttactcggagctaccccgatgcatacaccaccactggacgatcctatcatctgtaggctcattcatttctctacaacgccgtaatattaataattttcatgattttcgaagccttcgcttcgaagcgaaaagtcctaatagtagaagaaccctccataaacctggagtgactatatggatgccccccaccctaccacacattcgaagaacccgtatacattaaatttagaccaaaaaggaaggaatcgaacccccccaagctggtttcaagcccaccccctggcctccatgactttttcca

SEQ ID NO: 638835 - DNA, 301 bp, Homo sapiens
tcgcgatgtgcaacttgatgctgcaagtcaactctccacggatcccccctggttgatcaggtctccaggcaggcggatcgcttgagtgtctaggagttcatgaccagcctggccaacctggtgagaccctgtctctgctaaaaatgcaaaaactagccgggcatggtggcgcacacctgtaatcctagctactcgggaggctgaggcaggagaattgcttgaacccaggaggcggaggtagtggtgagcaaagatcgtaccgctgcactccagcctgggtgatagagcaagaccctatctc

SEQ ID NO: 638836 - DNA, 988 bp, Homo sapiens
gagccagcttgtccccacagcccctgagccccatcctaccaccgtccacagaccagcctgaccaacatggagaagccgcgtctctgctgaaggtacaaaattagccaggcgtggtggcacaggcctgtaatcccagctacttgggaggctggggcaggagaatcacttgggcccggaaggcggaggttgtggtgagcccagatcgtgccattgcactccatcctgggcaacaagagtgaaattccccatctcaaaaacaaagagataggtagagctggccgtggtggctcacgcctgtaatcccagaaggctgagttcggtggatcacttgagatcaagagtttgagactagcctggccaacatggtgaaaccccatctctgctaacacacacacacacaccaccacttccaaaacattcacccgggcatggcggcccggcatctagtacatcgcagcttactcgcgagaggctgcacggccaggcgacaatcgcctgacaccccacgagtgcaaatcgttgcagctgaactcgcaaccgccatcccagctagtctccaaacgaaacacagcttaacgactcagagttcgcttattaatcacggctccttccctccgtcggcctccctacttacaccacctacaacacgctattttcccgatgttcacacgagtttacttatccgaccgcaacttccccaagtgggtaccaccttcagaactattcccaagtagcgggcgacaatatcgcacgagccctctactccctggttcaggagtagcacgtcccctttatccgtgcgcacataacggccacccacaggaaacaggaacaaaacacaacccaggtagccgggctcccctcaggccaaagcgaagacccacgagcaacaacacccatccccccccacaccgacggcgacccagcacggaccccccacccccccgccccgcccacccacacctaaaccccccccccacccggaccc

SEQ ID NO: 638837 - DNA, 394 bp, Homo sapiens
  misc_feature (72)..(72): n is a, c, g, or t
  misc_feature (140)..(140): n is a, c, g, or t
  misc_feature (151)..(151): n is a, c, g, or t
  misc_feature (169)..(169): n is a, c, g, or t
  misc_feature (190)..(190): n is a, c, g, or t
  misc_feature (202)..(202): n is a, c, g, or t
  misc_feature (205)..(206): n is a, c, g, or t
  misc_feature (223)..(223): n is a, c, g, or t
  misc_feature (237)..(237): n is a, c, g, or t
  misc_feature (257)..(257): n is a, c, g, or t
  misc_feature (262)..(262): n is a, c, g, or t
  misc_feature (276)..(277): n is a, c, g, or t
  misc_feature (289)..(289): n is a, c, g, or t
  misc_feature (291)..(291): n is a, c, g, or t
cgtcgacagatcatccctggtcatccctactgcctctgatctggaggactcactaaacagagaacatccctngtcatctactgcccctgatctggagtactcactaaacagagaacatccctggtcatccctactgcctntgatctggagnactcactaaacagagaanatccctggtcatctactgccnctgatctggagnacnnactaaacagagaacatncctggtcatccctnctgcctctgatctggaggantcacnaaacagagaacatnnctggtcatcccnantgcctctgatctggaggactcactaaacagagaacatttctggtcatcccaattgcctctgatctggaggactcccgaaacagtcgacgcggccgcgaattta

SEQ ID NO: 638838 - DNA, 125 bp, Homo sapiens
catcaaaaaaaaaaaaaaaaaaaaaggctgggcacagtggcctcacaccttgttaatctctcaagcacttttggggagggccaagggccaggttggattcaccttgaggttcaaaagtttcaaaa

SEQ ID NO: 638839 - DNA, 322 bp, Homo sapiens
tgcaaggagccacacagcaggaggtgagcggtgtcgagtgagggggtgagggaagcttcgtctgtatttacagccactcccctttgctcacattcccgcctgagctccaccttctcagatgagcagcagcattagatgctcataggagaacgcaccctgttgtgaaccgtgcatgtgagggatcgaggttgcgctgtccttatgagaatctaatacctattgatctgtcactttctcccatcacgctcaggtgggaccatccagttgcaggaaaacaagcttaacaacgcccactgattctacattatgctccttggtcgtg

SEQ ID NO: 638840 - DNA, 552 bp, Homo sapiens
  misc_feature (186)..(186): n is a, c, g, or t
  misc_feature (412)..(412): n is a, c, g, or t
  misc_feature (458)..(458): n is a, c, g, or t
atggttataaggaggatataattcatgaacatttgtaaactacacatataacctggggcacacattatttccgcccaatctatgatactggtagagaaggaagcagcattgaaacttggagctgccatgaagatgggtagtatgcggagactgcagggcccaggcaccggttcctgtcttagccgntagcaaggtagaaccaagaaatgcagtcccaggctgtaagaaaggaaaggctgaagcctaatgcggaactgctgcagtagggtcacattacattacacatattctgttatggaaaccacgccttttggagcaaggtcaaaagcaaattatggcatgtctgggaaatgtcaggccttggagttttccaagattttccctcccttcttcctcatatttatattgcagnctgtggctgcctcaaaaccccagctttcttgaagaggggaaagaanaaaacctacacccaatcattagtaagtctattcaagtgcatatgtagttaattaggtttcttcatcggtctttcacatggggacctcactctgg

SEQ ID NO: 638841 - DNA, 274 bp, Homo sapiens
  misc_feature (48)..(48): n is a, c, g, or t
  misc_feature (90)..(90): n is a, c, g, or t
gggggatctagaggatcccgtactgtgggtaccgtgattccatctgtnaatgtctcatttgatgtgaacgttttcctgatttcatgaatngtctgtgttttcttgtagctcactcagtttccttaaaagagttttttgaactctttagcaggtaaatggcagatttccatgtctctgggttaggttaccaaaagattattgtgatcttgtggtgatgtcacagtcccttgatttttcatgtccttggagtttcgtgttgttgtttttgtatctg

SEQ ID NO: 638842 - DNA, 270 bp, Homo sapiens
tcggtacccctagttttagaagttcaatagcacattggaagccatgagagggaacgtgctgaaagacagggcgtgcatgtatagaggaggcagaaaaagaactagatctggagaatgactgagtcaaggtggaggcttgtgggaaggcttaagctgtgggcagtgaggtagggagaacgtgggatgacctaagaacagttacatgaatagtataggttaagagagcttgtgagtagggaagcgtatagaaagaagttcagtgcttagagg

SEQ ID NO: 638843 - DNA, 132 bp, Homo sapiens
aaggactaccccctattccttctgcatttgaattatctagaatatacttctgcatggagaaccaatgctagacccccgataccagacgagctacctcagaacagctattagagcacacccgtctattttgca

SEQ ID NO: 638844 - DNA, 942 bp, Homo sapiens
  misc_feature (340)..(340): n is a, c, g, or t
  misc_feature (358)..(358): n is a, c, g, or t
  misc_feature (430)..(430): n is a, c, g, or t
ggccgagcgcgccccgtccctcgcgcgcgatgctcccctggatggctctcggcctggaccctgatgcttgccgtgtctggggcttggcagcgtgagcgcgctgctggatcggtcgggcagtcttcataggagagcgcctggtgacgatcaaccaggatggtgcaacttagttcgatggcacccgtgcactgtaggcgcaaacgtttccatgagatgcctgatcacgtcgcgacgtgaccctcgagaccccgtgtccgagaaaagcagcctgcctagcgtttgatggtacgatggaatgatcctgctccatcatttgatccaatgtagccttgagtggcgncatccatcttactcgaancgcctgaatgcgtgttcgacagacaggcactccatatgaccatctggtacagagtcactggtccatgccggnttctccgtgcctgtggtcgctaggtccaacctccgtgtcgtgatctcggacaggcaccctcggggactagctaggttctggctggacggctgtcttccccacgtggcccagtccgtgggagctgcaatgacgccagacagctgccagggaacctggccacgggactggactctggtgcctggcctcgactccggacatcgtgactagcgactgtggcgctagtgcctgagtccaacgtgcgcctccttgaggccccagatcctgcgggtgcgcacgcggccggtgaggcagggccgggggcttcgggccctggagtcgggggctgggcctggcccccactgcagctcgccgcctccccgccccagaggaggccgggccaggagcgcatcgtcatctcccacgcccggccgcgcagctccgcgtgagttgggccccatgtgctgggctcagccgcggcgctcggctaccacgtgcagttcgggccgctgcggggcggggaggcgcagcgggta

SEQ ID NO: 638845 - DNA, 1759 bp, Homo sapiens
cttttttttattgtttttaaggcgaacaattggttataatgaaccagaaatacaagattccactgaaactagaacagttgacagaatatggttgaacttaaaccttacagagggaaacaagggcaaaacaacagcataagtgaggtggaaaagtccaagaattcagctgtgggcataacacatgcaggatataatgtgcatttaagcagtggcctactctttcgtgcaccctcttctccagaccagtccgctctgtgccactcatctcctcaccttcgtgacaacaccataccacaattcaacagtggacctctcgtgaatccttcataatactgtcgcagcaaataaaccacaacccaataatagtatacgcccttcgtggactcaatgtactacaacaccccagagaaaaggcgacacactcagtgctcacaactcctccctatcacccacagcggggcctccacacacagcgtgtcacaaaactcgaacaccgcacaacacaacgaccgcgcgagtcaaagaggggccaataagtagtgtggccctccactccacaaagtggtcacccagtggctcaaccccaaacttaatgcaactcgagacagcccccgagacaccatgggttcacccacccaactggaataaggcacacaacccactcctaatatgtgccgtgccaccagtggataagcgtgcatagtgttaccacaagcgctctcgctacaaagagtatccaaatgtccaacaccttctcactcaaacgtcgggtggcgaaaaaaaacaccggaccatctgtccttgaagaaaggacacgcccaacgagaaccccgcacaccataacaacacccactctcgtccaacaacccaaaggcgcacacaactgccgaaacacagaccgcgcacgctggataacaacaaacgaaaaacaccacccctaaaaccacaccacaggaagaaaccacccaaacaacggaggaacatccacgaggccacacgcagcacacggcagagaccaacacacccggacaccccacggagacacaaccacaccgggcggcgaccactggcctccaccccacaagcaaggagaggaccccacacacacaccacacgcgcggacactatccacacccccacacaccacgacaccacctcgagctcaacgaccccatcgaccatcccccacaccacaccatacactgacacacacaagaccagcacgagccgcaccaacacaccgccaagcacaaacaaaccaaaaacaaaaccacgagacgaccaacacaacacaacacgcacaccgacaggccatcacagagcaacaatccccgccgcatcccccaccgcacacgaacacgcctcacgccgcgcacaacacacacgagcagcgactagaaaacagcacccgcccccgactagctccccactgcacagaacgcaaagccagacaacgacaacaaccacaccaccaaacctcacacgagcgacacaccaaaaccggacgcaacccacacacacaaacacaacgtagacacacaacagacaacccagcaaaccacaacaccgacgacccacagccgcagcgagaacagagcaaacaacccacacacaagatacgaactaagcagcaacagatacagagacaacaacaccaacaccacacgacagaactaggacgcaatacacacacagcacacaacgacacaatcgaagaaaaagagcggcaacacaacaacaacaacgacacgcacaaaca

SEQ ID NO: 638846 - DNA, 252 bp, Homo sapiens
tgttttttcagcaagctagccgtacaaccattgtatctctttctcttcaggatggtttagagcccagagcggttagtaggctttcgttgtgttctctttcgatacatgtacatctttactgtttgaaaagtggtacagcgggcaaagggtcttcatgaacctgaagataatttcttgtgaagttgagtggagagtgtacggtcattgatagtgtttatatgagaatagcaggagtctgcacttttgctacct

SEQ ID NO: 638847 - DNA, 146 bp, Homo sapiens
tagtttaacttttcctttttttgctgtctagtcatcctcgtcggtcattctgctactgggaatcgacatcgtcatcctcatcatcttcagctgcccgatatgcccgaagctaactcagcttcctcatcttcatctccatcctcttc

SEQ ID NO: 638848 - DNA, 171 bp, Homo sapiens
ctgtataccagtgttttacactccaggtctcagagcactgggttgttctctgcctttcagcttgcttcgttggatgcatctctgcaacctgaactcccaggttcaagcacttcttgtgcctccgcctcccgagtggctggcattgcaggcatgcaccaacacgtctggctg

SEQ ID NO: 638849 - DNA, 534 bp, Homo sapiens
  misc_feature (5)..(5): n is a, c, g, or t
  misc_feature (31)..(31): n is a, c, g, or t
aaatnattgtattcaccttctcctacaaganggctcagcgagatctgggctatgagccacttgtcagctgggaggaagccaagcagaaaacctcagagtggatcggaacactagtgatgcagcacagggagattggaaacaaaaagtcacagtgatatgaagagggagaggacatggccctgggtgttattaggtcctccagaaagggacttagaaacaatccaactcttaacaattccattttacactctgtccaacttgtctttgggtcaccagaagccttgcaagtcactggcccagttgcaacccttcagctctaagcacttgtccagcaatgcacaagatgtgcctcagctgctgtgacccaaggataggtggctgatagtgagttgcctggaacctcttgtaggttagaatttcatcagggcttcctcatctcctttccatgtgccaacgcatttcgtgtctgagaaaattcccatacctttatgaagctcaaagaaaagaacaataaaatcttttaatgcttaaaaa

SEQ ID NO: 638850 - DNA, 350 bp, Homo sapiens
gatattcttccatgaacattatatcaaatatttctttgcccattactgagtggataaggcccaactctagagccctgtgaggaatattgtcatctggtgcccttagaattggacagataatcctcgtagaggctagccttatcggttccgagactggtccctgcacgagacggtgcatgcacctatctttgtctacgatcttctttcatggtggctgaaggaatctgctcggcggttgataatcaccaattccctacctgagggcttacaggcactcaagggtgtacgatccaccatgcaggaggagctgtatgcagctcatgccataactactgtgtgggcttgaccgc

SEQ ID NO: 638851 - DNA, 248 bp, Homo sapiens
ctcaggagcagttagtgaggctaggtgtggcatcggacgactgccagtctgagctggtcggagtctcagttaaagcttgtgaggacggggtgaggttggcagtgcccgctggagacctcaagcgaggagggatgagaatggcgctgagagacgtttggatggtgagttcaccagcactgacgttgaagagggccggacgcggacggttgttaggcagttgagttcccagacatcgcagctcatcaaag

SEQ ID NO: 638852 - DNA, 252 bp, Homo sapiens
atccactcaaaaggatggtagcttgaagaggcttcaaatcatcccgagccactgcaggtgtgctcgataggcattagggaaattctatcagaggatacagatggggatggactatctcaggtgggtcctggctaggaactagtaacgactactgtcacggaaggggatcaccacctagcacattgcctttgagtgcccagatgtgcctgcactccagacagtgggcttccggctagtcagacacaggcggcg

SEQ ID NO: 638853 - DNA, 825 bp, Homo sapiens
ggaccactgccttcaggaagcctctcgccggctacaagtccctgcggttctggggcagcgtgggccctgccagagtccacctggtggggcagggagccttccgagcactccgggcagccctcgctgcctgcccgctccatcagcacacttcacccccatgcgaatgacgcgggtccttcggcacaggcaccatggccacagatgtctgcaggagaggagtggtgtcactgagtcaagtcctgcaagcaagggcacacgaatcgcgcccaagaaagacaccatacgaacacgcgtccacatcataggggaccacagtgaacaggagatacggagaagacaataagaaacacaaagagcaacatgaagactagaagaccacagaaagcaaaaaaaacgcacgagatgacacgccagaacaaagagagcaccacaaaagacgggccgtagagacagcaaagcaatagacacgagagccacaatggacacgaccaagacgagcacacatacgacagcagcaaaagaacacaagcaagccaagagcaagaagaacaacgcacagagaggatcacccaacagaaagaaaacagagacaacaatagcagcaacgaaacagcacagcgcagcaacgagagacacagacgacagcaggtagagaccaacccaggagccgcgaaaaacaaagataggaagatcaaaacaagcgcaccaaaaaggaaccgggatgaaccacaaagcacacggggacacaccgacgcgagagaaaagacgcacaccacaagaacgagaagaagcaacacagagagagcaaaaagccctaacaagacg

SEQ ID NO: 638854 - DNA, 141 bp, Homo sapiens
taagttcttcacggaagcgatactctgagtacacagggacagcctgtcttatcaaagtgctcccagaaatatggcagtgcacagagagtgtgtctcattggagtacttgcgcttaattcatccaacagaaaggtactcttg

SEQ ID NO: 638855 - DNA, 726 bp, Homo sapiens
cccacgcgtcgcggacgcgtgggctttgctgggaaacagcgtggaagatggacgcacccatgtctgactacaacgatccagaaagagtccacccgtgcaccatggtgctccgtgcgttagaggtgggatgcaggatcttctgtgaagacccatgacatggtaaggaccatcactctcgaagtggagccgagatgacacgcattgagaatgtctaggcggaagatccaagacaagggaaggcatccctcctgacacagcagagagtttgatctttgctgggaaacagctggaaagatggacgcaccactgtctagacatacaaatccagaaagagtccaacctgacaacatggtgatgcgaacataagagcgatggagatgcagactcactcgaggacgacaccagaacctggaaaagcaccaatcaaacatagcaaaatggagccgaagtgagaccaactagccgaactgaccaaggacacaaagctcccaacgaaccaaaggaaacgggaaacccgacactggaacaagacagacaggcaagaacaaaagaccgagcacaacagacccggacaaaacagcgacacgacaccacggaacatgacacaaaacaaaaataaaagaaaaacaaaaacacaaccatgacaacacggagtgcaaccacaaaaaaaacgagagacaaccagaaaagacaaacgacacaaccccagcacagaacaaaaccaaa

SEQ ID NO: 638856 - DNA, 559 bp, Homo sapiens
  misc_feature (278)..(278): n is a, c, g, or t
gccgcgcctctgcaggcggaacagagccgccgccagggagccccaacacacggtccacagctcatcatgatggacttggagctgccgccgccgggactcccgatccagcaagacatggatttgattgacatactttggaggcaagatatagatcttggagtaagtctagaaggatttgacttcaatcagcgaccgaaagagtattagctggaaaaacagaaaaaacttgtaaaggctagacagagaacaactccaaagggagcaagagaaaggctttntcgctcagttacaactagatgaagagaccggtgaatttgttccaattgaggcagcccagcacatccagtgggaaaccagaggatctgccaactactcccaggttgcccacattcccaaatcagatgctgttattggtactaataaggctcagagaactggaaactgtggtggttaaggagccctggttggtttgaccgtgtgcaccagacaattcgccaggttgggaggagtattatacattccgtggtaaccagcctaatttacgacacgctggtgagcc

SEQ ID NO: 638857 - DNA, 208 bp, Homo sapiens
  misc_feature (77)..(77): n is a, c, g, or t
  misc_feature (160)..(160): n is a, c, g, or t
gccgggggcaagaaggtgaagaaggcggccaagccagcgtccccaaagtgcccaagggccgcaagtgagcgtgtcgnccggtcagagcggaagtgggcttttcggtgtttttgtttttctaccccaagtgacgtagattttagtacagctcacggaccanaacagtggtctaactaggaaaacccaaattaatttaactaaaccaaca

SEQ ID NO: 638858 - DNA, 707 bp, Homo sapiens
taggggctaggtaagctgggtttaattggacgaggcggcgcgctgattggcgcgcggtcagcggggggtgccgcgcgtatgggcctgcctaagtgccgagcgggcgcggtgagctggctgggtgagctgcagccaacatgtctggataccaaggtaaaagttgccgtccgggtcccggcccataaaccgactgagaactggaactgaacaccagagtgctgtaggtggagattggaagggaatcaaactggtcctgcaccctcctacctttctaacaccaaacagtggcagaaatgggaaacctcccaaggtacagtggaagtgtcctcagtcaaagcatgctcttgccttgcagaagcccaggtttcttgcataccccaggttggcctcagaatatctggcatagttccaagacccctacactttgtcataggtattatgtctatatctagggtcaagtattctttcctttcctgaggagccacatttgaaacacacacagggaataaaacacaacaggcatttctatcctccttatttgttccagtttatcgttactattcttggtctcgcttcgaaggaatttagtttcaggagagcgtatgtagttgttgccgaaggttagggagtagcgaaggcttaggagaggagatattgtatgtgagagtagtgagataggtggaagggaaggtgagggatattaagag

SEQ ID NO: 638859 - DNA, 1617 bp, Homo sapiens
ggcctctcaagcttggcgcttcgtccggtggggtcacacgcgggcttcaaccactgcgtatcgaacaagctgcttacttctcttgcttcggggcccatctatcctggaccacggcactgatgttcgctccgcacaccgactcgcacaggacgtcacgactccgcacacactctacacactgctcactaacacaaccctctcaccaccccgacacgccgcacacctccctcgccccaccgcctcaccgcctgcgctccacccccgcccctccccgcgccacacccgccacgccctgcgcaacccgcacccgcctctacccgcccgcgccacatacacccccacctctccgacacctctcgcaacaaccaccgctccccaccacctcgacaccacctacctcaccactacaccacgcccgcacgcacgccactacctgcgcccacctcacaccacaccctaccctcggcacctcgccgcaccccgcaccccgcacgcaccgcccccccccacccgcacaaccccctccgaccccacctcacccgcacacaggcccgcccacaacaccagccccaccacacctcccacaccctaccccgcaagaaccacccaacgccacctccgcacccccgccacaccacacacctcaccaccggccacgcccccccacccacccacacaccggctcccccacgcgcgaccctcactccccccccaccgaatccaccgcctaccacacacgcacccacacaccagcaccccgtaccccaactcacctccaacctcccccgccacgaccccccccctcccctcacagcacgcccgccaacacccgcgcaacacaccaagccccgcgaccccgaccaaccacacccgcgcctcaccccgcccacgccaccaccccacccgcacgcgcaacagctgggacaccacctcggcaccaagcccaccggcacctcccctcctcacaccaccacaccacccccccaggccccaacaccacacaccagcccgcgccacccccgcactgcctcaccccacctctccgccccccacgacggcccccccctcgggcacaaccaccccactgcgaccaccctgcacctcacaaccccccacgccgcacacaccctgccccaaccccctccaccggcgcccccaccctccccacaccctgcccacccaacgccgcgccacgcactaacacacaacgccaccccactgctctatctcccgtagcccatatggtccccaactaccatacacacgaacaaacgacacttagccggcactcacttcaccacgcgacacggcgcaaccgcggaccctgcggccacacccaccaagccagcgtccaaagacacctcgctccacacacacggcacatcagcaagtggcagacacgtaaccacgactacgacactgcgtatcagtcaacaccaccacctctcaccctgtcgatccgccacgcactcgcacaccccgccacccgtcgtcagacaccccctcccccccgggccgcacacccacatcagcgccgacccacggtgccccgcatacgaccccaccacagtcgcgccccacctaccaaaccaccggctgcccaccacaccccaacgg

SEQ ID NO: 638860 - DNA, 259 bp, Homo sapiens
  misc_feature (6)..(6): n is a, c, g, or t
  misc_feature (165)..(165): n is a, c, g, or t
ctacgntgcgatgacttccgcactgacccaagggctggagcgaatcccagaccagcttggctacctggtgctgagcgaaggtgcagtgctggcgtcatctggggaccttgagaacgatgagcaagcagccagtgccatctcggagttggtcagcacagcctgtgnttccagttgcaccatggcacgaacatccctttcaaacgcctgtctgtggtctttggtgaacacacggctgctgggtgactgttttaaggacaga

SEQ ID NO: 638861 - DNA, 477 bp, Homo sapiens
aggggaaattaaactgatttaatcagcacacattatatacatgtttcaaatttcacactccataaatatgtttaacttatatgtcatttaaaaataaggataaaattttttccagattcaagcgccttttgtagcgcttcccacagtcctcacatttggatgggttttctccactggggtctttttgttggtctttacagtatgaccggcatacaagcctttttccacagtcttcacatttaaatggctttttttggcaggggagttttttatgattcaaaatactaaaagcttgtttaaagcttttcccgcagttatcacagttataagatctctctcccgggggggttctaggggggaagtcaagacctgacttactaatgtggcccttcccacactcctaaaatttgaagggcttttctccaggggggcctcgttgggggaccaaaaaatttggggccctttttgaggtttttc

SEQ ID NO: 638862 - DNA, 214 bp, Homo sapiens
ggacttcagaatggcaagcagagaatgcagaaagcgaatttagctgccacggatgtatacctgctccagctgtgccactcggtcatctgtgcatgtgactgtgatgaaggacatctggcagatcatgttgtcctctgcttcaatgagcttaccccgatatacctcacaggtggtcgtctcacatgtcacaatgtgcccctcggcctctagtcgc

SEQ ID NO: 638863 - DNA, 236 bp, Homo sapiens
tcccgggggggcccccccccccttttttttccccccttaaaggacccggggggggttccccccccggtttttttttttgggccggggggggggttccttttttccccggggccccttttttccctttggccctttttgggggccccttttacccctttttttcccaaaaacgggggggggggggggcgggttttccggggttttttttccccccggggcccccccccgggccccga

SEQ ID NO: 638864 - DNA, 129 bp, Homo sapiens
cgatatagagatcctttgcgatgcaattgacctagagtaatgctcactttgctgaacttggctatactgcatgtccagacactcctgcagctccagttaatcattcacagtggattgccaacgtcgttg

SEQ ID NO: 638865 - DNA, 187 bp, Homo sapiens
cagcgcgtaccgggtctcatgacaccatgtgatctctccccagtgggatgcgtcggtcctgggtactgcttcagtttgtgtgggcggacggaatgaccgaagaagcatgctcgccctggtgctgcgatacggcgtacctggcgttggtcccctattaaagaagatcaagaagggcatcgtctccagt

SEQ ID NO: 638866 - DNA, 468 bp, Homo sapiens
ttggctcggggaaaaattcggttttttgccttcctgcacctcgcaaagtggataacgtggaggtcattcagtttacacctgtccttgccgactcagtcctgggcgaggggttatcagggtgatgccttagcgtgttctgagccattaggagacattcgtcatttggtgcactggcgaatcttacaaatggcgtttgtgtcagaagatctgcgacttcattccagctgctgcagatgctgacagcccctgggcggttggtgtgttgtagagacgcttgagcacctcatgtcgtggcttaggctggatgcctcagaacgagcagtccggacttgagtgaagcagctaattctttacccgtaaactccagttggaggtctgctttttgaaatgtccagcctttgcccaatgtgtttcagatcatctcattcctgcaggctttggcaggacatttaaaaaggttggcggccg

SEQ ID NO: 638867 - DNA, 351 bp, Homo sapiens
gtgtgtgtgaatgtgtgtgtgtgtgtgtgtgtggtgtatatattgtgtctgtccaccccagtggtagctgtagcatggcctctatgcatgaaatatgcactctatgggcactgggtgttgtcgggggatgtggccaccacattcactatgcataatcaaacatttgcttcatgtacatatgcatgtgttaaaaatgtcgagtagtaacattggctatctggtctgattgtgttgtgtatatacatggctgttgtctgcatgcaactcgtatagcaccttccctctgtcttacatttatgctgcatgtgccctgcatgtgggtaatcgtatatgtgtatcatgggtgcggca

SEQ ID NO: 638868 - DNA, 138 bp, Homo sapiens
ctatattcgcaatggtaggttaggtaggaagacggggggccgggtgaacaaaaaccacacggtctctatggaaatgtgtgagagaactgagagcgaggtgtggcagaagcaggcccggatgccggagagagggtggct

SEQ ID NO: 638869 - DNA, 168 bp, Homo sapiens
agtactataaaagcttgatcaaagattgaaaagttacactaataaaaaaactgaggcttacaaattaagtcaattttctcattgttctttaaacccaagatatattttttaaagttattgttataaaatgttaatactattttccagcctgaccaacggggaggaacg

SEQ ID NO: 638870 - DNA, 212 bp, Homo sapiens
ctctcaagagatagaagcgtggtcggtctgtcccagacatactaagctgctccagaatatccagcagtggttttaatttttctggcactgccttatctaccaggtcctctatgagaagttcccgctggggacctgaccaattggcaaaccagtgaagaatacacttcatctcctgggaggtgacgtaagacatcagaggaggggaagggtta

SEQ ID NO: 638871 - DNA, 590 bp, Homo sapiens
  misc_feature (2)..(2): n is a, c, g, or t
  misc_feature (66)..(66): n is a, c, g, or t
  misc_feature (497)..(497): n is a, c, g, or t
  misc_feature (500)..(500): n is a, c, g, or t
  misc_feature (553)..(553): n is a, c, g, or t
cngccggaggtctctgtggactgatgacctgttgatggaccagagagacgcgagcagctcgaagcnctgagcattgctccctgctggcgttgttcagctcccaggccgtcgagctgatctcctccgaagttcaggatactgctacgacacatcctttctgaagcctttcagagattgtggttctcttttataagctgatgttctgagcgagagcatactgaatggtataggagcactgttgctaaggcaaagtgtttttcttgaccagatgaagaaatttgttgagtggttacaaaatgcagaagaagaatccgaatcggaaggtgaggaaaattaaatggctcaacaagcacaatacctaggttaccacacaccactttttgattgggaatgctgaaccatttgagaagagaaacttggcttctgttttcgcaaaggaaaaaaaaaataggataggcttcccttgtgcagagggagaaatggttttgtttttgtgntgngtttatatggagccctgaggcatctagctattatacttgggactctacctctnactcactatatgctaactcaaggccattcaacaagga

SEQ ID NO: 638872 - DNA, 624 bp, Homo sapiens
  misc_feature (599)..(599): n is a, c, g, or t
cccttagcacgaatgttgaccaccgaatgtactattcgccctggcgagcagttgcacgtcggcatggacttcaacatcagccggatggccgcgacggtgcatgtcattcgtgacggtctcccgctgctactcgaagaagccacgcaccttttcgacacgccggcgatgatcgtcgagctgaagcgccgcttctcggggcacagcatcacggtctatccggacgccagcggtaagaaccgcaagagcgtgaacggcagcgagtcggatcacagcctacttcgtgctgccggcttcatggtgatggcgaacccgtcgaacccagcggttcgcgaccgggtactggccgtgaacgccatgttcctgaatatcgaccataagcgccgctacctggtgaacaccgacaactgtccagtaaccacccaggtgctggagcagcaggcatacaccgaaaacggcgaacccaacaaggacggcactgaagacccggtcgacgcactcggttacttcattgtccagcgcttcccgattgcgggcagctatacactcgcaaacgtgagcaactcatgagcgcattcagctacctgaaagacagcctgcanaacctgtcgcagacattcgtgctaa

SEQ ID NO: 638873 - DNA, 147 bp, Homo sapiens
ccgtaccgggtaaggctgggctgaatgtggctatagagactgaatgaatggagcattatcatgatggaacaatgtctacattttgattgtggtgatgattccatgaatctacacagtgtagaaacatgtagattaacacctggactc

SEQ ID NO: 638874 - DNA, 1197 bp, Homo sapiens
agcggctgtctttctgcatgcaggaaccgcgcgtctgctggacaagaggggtgtcggtgagatactgacgctattgtctccggcctcgtcgtgaagacacaggcgcatctccccgctgtaggcttcctcccacagaatcccgtttcgggcctccagagcgtctggtgagatgctgttgtcgctgctgctgctgcttcccaatgtgctgggccgccggaggtctcgatggccccggggtcgtctccctcacctggggctcatgttgattggccccgaccatcgactcagttcacgtgccagtgaagtaggtgagcaaggctacgggctggctggcatgggccccaacctgttccatcgacacgtgcgcgctcctgtgcgggaaagagaccatggtgaccagcaactcactagagcgccagtcgctgacgagtacgctcagtggacgctgactggacgcgcagccgttctgtcccggagctcaccgcctggaagcgactccaccgcaggagcggaccgatgacgagctctagctggatgggcgccgagaacctcacgaaggctgaagcctgctcttgccagtgccgtccacccgcccctctgggcctgtctgtggctctgtggccctcctctgctggcggcaggacctttgtggggcttcgtgcccctgctctggggcccaggcggggctgggtccacattcccaggccccaacaagtcttcagcgatgggtaaggagcttgcctccccttgggacggagaggggggtgaggcgcccagaaacgggtaaggaaaggcaaacaccggagaggcatgaagaagccacgaaaaagccccaaaaatacagacggaaacaacgatcaagacacgaaagcgtgacactacatggaccaaagagagaacaagagccagccgacaagccattgtacagagaccaattaccgtaacctgggtgaaaggagggagacaaggagcaacgagacaagacaaaggaagcacccacagttagtaacacgagaaccagacgaaggacggccaagtcaacaggacatgtcagatatacaaatgaaaatagacaaccgcacacaacaaagacaaaaaacaaagaaagacaaggaaaacaaaaaagcaaaaggagaaaaaacagggaagaaaaaagaagagagaacgacaagaagaaagaaaacaacaacgaaagat

SEQ ID NO: 638875 - DNA, 572 bp, Homo sapiens
tgaggtcggcttcgctatgacagctcttctactgctccttcattttttagtccataattggaggagtgtgtagatgcaagggccgtgtacggatctaatattctttcgatttctctaaatcttcactccttctatcagcctctgttgagccctcattctggactgggccctgccttcccagtggcatgcacaaggaaacatggtcctcacttctgctggggcttctaggttagtggggagaagcatctatgaaatattcgtatgtatagaggtaaacctgcacctgtgggctgtggaagggggcctgtgaggttgtcaggtgcaacaccagaaaaacattctttgctgcaaatccattgctttagaaaggaccctcctgggtagtgatttgggatttagagtaggtttgcacagtggaggagagcagttagggtggcgacttttcatctaccagttgctatgaaagcttagggggctgttgatatcactcgggtgtaaagagaattatttcattgttcagttggttgagtgtagattttgttgtcacatatctttttctctttcctcttttt

SEQ ID NO: 638876 - DNA, 413 bp, Homo sapiens
atgttattcctttgtgtccatgttatttcactcccacttgtgagaacatgaaatatttggtttcctgttcctatgttagtttgttaaggataatggcctccagccccatccatgttcctgcaaaggacatgatctttctttggcaaccactttttactgtcgccatagttcttccttttctagaatgtcatattggaatcatatagtatgtagccttttcagactggcttctttcacttaataatatgcaattaaggttcctccatgtcatttcatggcttaatagtgcatttatttttagcactgaataatactccattgtctagatgaatagtttatccattcacctattgaaagacttcttggtggtttccaagttttggcaattatgaataaagctgttgtaaacatca

SEQ ID NO: 638877 - DNA, 434 bp, Homo sapiens
  misc_feature (57)..(57): n is a, c, g, or t
gtccccaaccccccgtgttggtgggggggggggtaccccaggggggcctccttgaanaatgtttccctcccctgggggggccaaaggcggcgaaaaaaagcccccccctggtgtttttttagacacaccctcccggaggggggggaggccccccaaatattgtggtgcccccccgcccccccttccgcaagagggggggggcccaatttggtgggggggaatttttttttttccccccccccccggggggggggggtttataaaaaaagcccccgggggtttttccccccccccgggggggggttctctcttgcccccccggggggggggggggggggggggttccccccccttttttaaaggggggccccacccccccccttgtttttttttttgggccccccccccccaaaaaaaagattgggggcccccca

SEQ ID NO: 638878 - DNA, 136 bp, Homo sapiens
gttggttgaccgtggcttgcagggaagcatctactatacggctggcagcctcctctatcaagtctgctcccttaggcagaggtgcgtcctgggcagagaccatgctaggtacagagggagtgctcctttctctgcc

SEQ ID NO: 638879 - DNA, 396 bp, Homo sapiens
ttaatattttttatcttttctttctctcttttaattttatttgagacccagccttactgtttcacccaggctgaagtgcagtggcttgatctcaactcactgcaacgtcagcctcctgggttaaagtaatactcccacctcagcttcccaagaagctggaacaacaggcgtgcgctgccatgctcagctaatttttgaatttttgttaaagagggggtacactgtattggcctggctgttctcaaactcctattgatggaataacaggcgtgaaccattgcacccggccctaatttatccattcttaacagttataatccttgaatagttcattaaacaaagtaagccatcatctcaattaattcctttgtaaatcctttctacagcctgtgaaac

SEQ ID NO: 638880 - DNA, 475 bp, Homo sapiens
  misc_feature (130)..(130): n is a, c, g, or t
  misc_feature (132)..(132): n is a, c, g, or t
  misc_feature (141)..(141): n is a, c, g, or t
  misc_feature (151)..(151): n is a, c, g, or t
  misc_feature (156)..(156): n is a, c, g, or t
  misc_feature (158)..(158): n is a, c, g, or t
  misc_feature (162)..(162): n is a, c, g, or t
  misc_feature (250)..(250): n is a, c, g, or t
  misc_feature (253)..(253): n is a, c, g, or t
gggcccgagaacaggaggccccagcattattttagtgttgtattgttcggtagggcagccactacccacatgtaactttttaagatttaaatttaaattagttaacattcaaaacgcagctccccaatcncnctagcaacntttcaagtgnttgananccangcatgattagtggttcccctattgaataggtcaaaagtagaattttttcttcatcccaaaaagttttattggacagtgtttttttagntcntcataagactccagagcccttttcaaagttcaggcatgttcatcaggtaagtgtggtattttgagctggggttttgagactccccttagagatagagaaacagacccaagaaatgtgttcaattgcaatgggccacatacctagatttccagaggtcatttccccttttttattttaagttatgttaagattattaaaccaataaaagctcttaaaaattca

SEQ ID NO: 638881 - DNA, 451 bp, Homo sapiens
  misc_feature (429)..(429): n is a, c, g, or t
taacatcgagcgaggaggcatgacagcactgtgatcttcatatactctgaagcacttcttcaaactttggtacttgtgtcatagatacctgcagtaggctgacaatgtggagaaactccaaaatgatatgtaactactactaggattactatctacgccaagtcgatcataactcatgatgcctacacacacaatccagaactcattatatagcctgtaagtcgctatactccacaggagataatgaacgagtactccagagtcttggcaaaatgacctagcatagctggatacatacagtggtagtcttgtactcatacctcagtggacttaaccaaaattgtgttagtctcaattcctaccacactgagggagcctcccaaataactattttcttatctgcagtattcctccagaagagctaaccanggcagggctgcatgagaagtgc

SEQ ID NO: 638882 - DNA, 864 bp, Homo sapiens
ggccgggggcacagtggctcatgcctgtaatcccagcactttgggaggccaaggcaggaggatcgctggagcccagtaggtcaagaccagccaggcaacatgatgagaccctgtctctgccaaaaaattttttaaactattagcctggcgtggtagcgcacgcctgtggtcccagctgctggggaggctgacagtaggaggatcatttatgcttgggaggtcgaggctgcagtgagtcatgatgtgtatgactgcactccagcctgggttgacagagcaaggaacctgtttcaaaaagaaaaaccctgggaaaagtgacgtatggctgtaagtctcatggttcagtcctagcaagaaagcgagaattctgagatcctccagaaagtcgagcagaaccccacctcaaacctcgggccagtgtcttcaggcttaactggggacctgcgagctgccctaatgtgttggctgcaaggccaggccatccctgggcgcaacagacgagctccgagccaggtcaggcttcggaggccacaaagctcaagcctcaggcccaggcaactggatttgtggcaagagggggccactacccaagggctagctagggcccaagaccttagtacccagacagtgagaagcccctggagggccagaaaagttggacgcattgcagacagggcagggaaccctttccgcggcaagcaactgtttcacatgtctcagaagcaagtcaggttcatgaaaccgaagtgtctttgcgtgccaaaagtaccaggtgaccaggctcacaggatttgtggacgcgggataaaaattccccgaatggctgggcgccagctgcccgtaaacactgttccacaaacgaat

SEQ ID NO: 638883 - DNA, 292 bp, Homo sapiens
ttaatgacaaataataggctgtaactttattattactttttaaagtactgttgtaagacatatgtcttaaatttttttttaaaagatggcataggggaagaaggactgggagctgtaggacctagctggccatttcagctttaggtttaatatctgtgtcactaaaaaaggacataacaaaaaaaaaaacaaaacccggctgaacaatgtgaggggactctaactgacccttttcaggctgagtgttcacattacaagtttggccttttaatttacaaatggaaactggctt

SEQ ID NO: 638884 - DNA, 757 bp, Homo sapiens
  misc_feature (37)..(37): n is a, c, g, or t
  misc_feature (68)..(68): n is a, c, g, or t
  misc_feature (130)..(130): n is a, c, g, or t
  misc_feature (173)..(174): n is a, c, g, or t
  misc_feature (185)..(187): n is a, c, g, or t
  misc_feature (191)..(191): n is a, c, g, or t
  misc_feature (202)..(202): n is a, c, g, or t
  misc_feature (205)..(205): n is a, c, g, or t
  misc_feature (208)..(208): n is a, c, g, or t
  misc_feature (213)..(213): n is a, c, g, or t
  misc_feature (215)..(215): n is a, c, g, or t
  misc_feature (217)..(218): n is a, c, g, or t
  misc_feature (222)..(223): n is a, c, g, or t
  misc_feature (225)..(228): n is a, c, g, or t
  misc_feature (232)..(232): n is a, c, g, or t
  misc_feature (237)..(238): n is a, c, g, or t
  misc_feature (257)..(257): n is a, c, g, or t
  misc_feature (276)..(276): n is a, c, g, or t
  misc_feature (350)..(350): n is a, c, g, or t
  misc_feature (386)..(387): n is a, c, g, or t
  misc_feature (408)..(409): n is a, c, g, or t
  misc_feature (436)..(436): n is a, c, g, or t
  misc_feature (458)..(458): n is a, c, g, or t
  misc_feature (472)..(472): n is a, c, g, or t
  misc_feature (474)..(474): n is a, c, g, or t
  misc_feature (561)..(561): n is a, c, g, or t
  misc_feature (575)..(575): n is a, c, g, or t
  misc_feature (621)..(621): n is a, c, g, or t
  misc_feature (627)..(627): n is a, c, g, or t
  misc_feature (653)..(653): n is a, c, g, or t
  misc_feature (657)..(657): n is a, c, g, or t
  misc_feature (659)..(659): n is a, c, g, or t
  misc_feature (682)..(682): n is a, c, g, or t
  misc_feature (734)..(734): n is a, c, g, or t
tgcaaaaaaaaagtaacgaaaaccttaaaaatacaanaatctgaatatatgtaagaactaagcctccnaaacaatatttaaaatatatttaactttcaaatacatttataaggaacaccaatagtgaganaataaagtcttacaatttaaatacaaatcaccatatacccccnncccgccccccnnnccancctatcttacngcngtncaggngngnntgtnntnnnntggntctgnngcacagcactgctgtgtancacagctctgcctgtcgcnaaactgtcagcccgcacagccaaatgacagctgcgtcatcaagagaaagagagaatggttgcagggggcacgtnctcccctcttcactctactcaagcatcaagacccgnngctactttgctttgctctagnnaaccatagggcccatcaccctgttcanaaacaagttaacccgtcccagngcctctccagggcngntcatttggtgctctgctccaaggcagagtactccgtctctgggactctggaggcatcgatgagcttggtgagccctgttttggccgngtacttgaagatgngggacttcatcagctcgtacctgtagttgcgattgatgaagctgtngggggnggggttgacgcagcagtacaccagcnacangnactgtgtgacatgcagggccgtnaagagggcgtgctccagccggcaggtgaaaggaatgtagtgcaggatggagnagatgtccagcagcaccgccacg

SEQ ID NO: 638885 - DNA, 383 bp, Homo sapiens
cgattcagctgcaggagcatgatcttctgcgaggaagtcagcactcctgttgattcccttccggcctcctgatgagattctcttggctgaggcttttcatgcattcaggtacttagcatggtgtctgatgtggtcagcgatgaaagttgcaatgaagtagtagctatgatcataaccctcttgtagtctaaacacaacagggattttcttctctgtgcaggcagctatgaagttatcagggagtaactgcccatttgaaagaaactcgtcatcttttccttgatccgattaggatgtcaatctgggaaccccgaataggccttcacgagacaggtcgcatcgtatgccttccatttactttcatctggtccccaaaatatcca

SEQ ID NO: 638886 - DNA, 164 bp, Homo sapiens
tagagctcggaccataaggcgcgtcatggatgccgggataacccacctggcgtgatgtgtgccctgtaatgcacgtgggccctgattcgctgatgcctgcctgagggtatgcgcttatcggcgacatcagcctgcacttttcttatatctcgtgatctctctgg

SEQ ID NO: 638887 - DNA, 290 bp, Homo sapiens
cgagctcggcacccgtacctctttaggaagtggaggccggcagatagcttgagtccgggagttggagaccagcctaggcaacatggtgagacctcttctctacaaaagggtacacagttggccaggcatggtagtgtgcacctgtagtcagttacttgggaggccggggtgggagaatcacttgggcccaggaggtagaggctacagtgagccatgatcgcaccactgtactccagcctgggtgatagaacgagaccttgtctcaaaaaataaaataagtgaatttacac

SEQ ID NO: 638888 - DNA, 366 bp, Homo sapiens
tttttttttttaacaaagccatggccatttgaaaaaaaaaaaaagccttttaacaagtatcgtttagaatcatggttatattctacacagtgcattgaatttaaggttctcaaggctgtcttccatatactcagttctataaagagcagcctcctctctagaaagttgtttaaaactaggagacttgagatgcaaaatgctgagagattcagctcaaacaaatatatcacctcttgccctttaccttgtcaaggctgaacagtcttgaacaggcctccaggttcccagcccatgccctgctactctccttttatgtatcatgccgatcaaatgctggaagattctttccccttctgtcgtcttctc

SEQ ID NO: 638889 - DNA, 399 bp, Homo sapiens
atagacttaaaaaaaaaaatatggttttaaaaaaaatttttaataaaaaactaaaaggggtaatataaaggggaaaaaacacagaaaggacgccttgcgggcggccttcggccgatttgattttggcttcggctgggctttgcattgcggccttattggtccgattttgggtacatggggcctttttgggggtctattgccagtcgattggctgtttttttacggggaaacccctgggataccctgggtgtatcccattgtagcgctttgtgattacacccgctgttgtaaagttgatgagtctccaaaggggccccttcggaaggtcttgcccaattttatggcgtctcggaagtcgatggtgaattgtaggggataaatttcggttaaatttggggt

SEQ ID NO: 638890 - DNA, 240 bp, Homo sapiens
tctagatatcccgcttgtgtactctcccacctcagcctccgagagctgggatacaggcgtgacgcacatcgtggctaattttgtattttggtagagacgggctcaccgtatgggcaggtgccttgaactcctgacctcaagtatatgcccaccttggctcccaaaatgctgagatacaggtgtagccactgacctggccggccagtgttatcacaggtccttaaaagcgaaagacaggca

SEQ ID NO: 638891 - DNA, 153 bp, Homo sapiens
ttacatatacgaatcgagctggtccctcgatagggcaaccgcggttgggcatgcctgtaatcccagcactttgtggaggctgagtgcaggcggatcacgatggtcaggagatcaagaccatcctggccaacatggcgaaatcccatctctact

SEQ ID NO: 638892 - DNA, 168 bp, Homo sapiens
atcatcatggtatatgatgtctactatacatttgtgtgcaattgctgatatttattaggattttgcatctaagttcattagtgatactggcctgtatttctgtgtgtggtatctttgcctggtttcggtatctgggtgatggtggcttcagagcataagcttggaagt

SEQ ID NO: 638893 - DNA, 1365 bp, Homo sapiens
tggagagctgagcagtcaagatgtgtgacttcacctgaagaccagacctgcagagttcaatggagtgccttccagctgttttgacctgaacatgtgtgatgtgcaatgatcctgtacatgaacatgatgtgtggtgattgttgattgatgtgtgccctgtgtgccagaacccgtaccaactgccgatggatgctcaaatgtgtccttggtgtgaaccccaagatgtgattgacgactgcaattgttgaaagtgtgcattggagctatatgatgcagcatttcattgcaccaattgcattgcaggaacaatgttggaccaaggaacaaatgtgaccccatgatgggccaccatagttgagagaattattgtcggacagtgacacttcgcggttgctttcggacaacgtgaacggcaaactgtgcagcctgtcaatggagttgcgtgaagatcgcggcaatgtatctttgattcaacaacttgtggttgacagacacgatgacacgacgggaactcgacacgtacgacgcgactgcttgggtgtgcacggggcactgcaggagcagggcaaaatggagattattattcacaaagattaattgacaggcaggctccgatcacgaaaatggattgacatggaaatatgggcgtgaagtgacgccatatacacaagagacatacccacacaagaaggtccagtatacgcatatctcacgcatgtatgttaaaatttatagtaattcgttatgctcataacatggtattacaccctaaagtgacatgttgcttattgtccagaaacgacaaaagttattcccgaaagtccgttgggtctccagcatagggcactacatgagtttgcgacgagacatagaatttcaagcacaaaaagataagactatagaatcctcaggggagcactgaaaacaggaagagaaagaaggcaaagcaagaacaagagaagccatcaaagttagatgcatctgtgtacaaaaaaggggaacagcgaacagagtgagagagaggcccagatgaacgagacaaggcacaccagatacgagaacaggaagggaagaagcggaagccaaacaccataacagtgacagagaaagaaaagacaaagagggtaccggaacataacagtgtgaagaaaggaagaagagaaaaaaagaagaaaagaagaaagataagaatataataaatgttgaaagaagataagaaaagaagtgaagaataaaaataataataaaagaaatatgatgagaagaagatagagtaatatagtaagtgtaaagaagtaaagaaaatatagaatttaataagaaaagattataggataaatgataaagaaagaaatgatatttatt

SEQ ID NO: 638894 - DNA, 280 bp, Homo sapiens
cttataagactataccgtacccttcccccagatactacgcatccctaagagagaccgacgtccagatgggaattactagcactaggctgcctcccctttcccaggtacagctgacttatgaccctccaattcagagcctggctctgagcccttggtgagatggcataagccctgatagagtttacaaacaagtgagatttcaagtaccaatgccttcgactcccaataagaatgacaattcatgtatactttaccagaactttatcatagaaaatatctg

SEQ ID NO: 638895 - DNA, 108 bp, Homo sapiens
tcggtacctggtccgtcttgcgccggtccaagaatttcacccctagcggcgcagaggaccagagcgaaagcatttgccaagaatgttttcattaatcaggaactcggt

SEQ ID NO: 638896 - DNA, 144 bp, Homo sapiens
gtaccgatcagcatttgaccagagaatggacccagaatactcagtcctcttggggaaagatctagtggtgggtcactataaacagagcggtaaggcctgcgggtgaaagtggagacatcagacctttggaggggctggtgctga

SEQ ID NO: 638897 - DNA, 192 bp, Homo sapiens
ctgcttggctggccccgggcctcctcttctgccctccgccctgcgcttttttcttttctccctccctccccttcttcttctcctcctcccgtcgccttgccgttccttccccctcgggttcaatggcatttcaacacagccgcacagcacatccagttcaacttttcccccacagcagcagcagcggtcggg

SEQ ID NO: 638898 - DNA, 845 bp, Homo sapiens
gaatcaatgcagaacgtcgagatggagcccaactcactccagatgggtcggctcaccgtgtggcttgcacggaccttacattttctacaaggcttttcaattccagccttggaaaggcgaagaccaagaattttgtcccttgtgcgactgtgctcttatgtaagatgtacgccaaatggatccagatttgcgatagcggagctccagtcgtgtcgtgggaagagaggacctagccggctaacgttttatccagctctaaacttgatttcctctcagaagacactccccagggcagaaatagcgaccatggcgaggatgaagtcattgctgttccgaaaaggtgatttgtgaagcttgaagacctggtcaacgtggtgtacattctgatttctccaatgtggtagatgttggcttccacgctggaccacgttgaaaagctgaggccttgtggaaggaatggacatgaacggaagctctgctgaagtacaggcggtcaagccctaaacagtggactctaacttcaaagacgtcctcaagggagaaggcatgacctggggggtagggacgatggaagaaacgaacgtgatagtgcttcaagcttaccccccagtactgccgggtaccggctcgactgcttgaagaccgcatcccaggataacgccatctgcccattccttaccggtacccagtttgcatttggcctgggggggccatgcagttgggcaagtctggaaccttcagatccggtcttgtcgggacaccttagaccacccgatctcataaaaaaagaattttgcgcagaggttgggcaatttagggcgccacccgaaaaaactggcccaaaa

SEQ ID NO: 638899 - DNA, 213 bp, Homo sapiens
tctccggtggttgaacaaaaccaacgcatacaagaagtaacaagctttggctgcctgctcctgaggtgtttcgctctgcagtcccctggaacgaccatgctaacggttaccgtcggtgtccccactgccggactctcgatggttcgccttgttttttcttctcttcccccgaattgatttcttccacagatatcccgttcgatgaaacaaaca

SEQ ID NO: 638900 - DNA, 203 bp, Homo sapiens
ccctagtatatggctgtagggaaaacgaacccaagctgctggaacccaatcctcttgaattaatggcttcataggtatttaaaaaaaacaaaaatatgacccaccacacccagcgtcattctattggtaattttatgaggaccttccattagtgtttactacatttagcgggtcccatttttaacatttcctcaccacacaag

SEQ ID NO: 638901 - DNA, 464 bp, Homo sapiens
cctggtgtgttgtgttccattatcatggttcaataatttcttttctattttcttcttaatttctttacccgctggtcattcaggaacatattatttaatttccatgtttttgtatagtttccaaaatttctcctattattaatttttagttttattctattgtgatcagtgagaaggcttgaaattatttcaagtttttgaatgttttaagacctgttttgttacctaacgtgttatatccttgagaataatccatgtgctgaggacaacaatgtgtattctgcagccattggatgaaatgttctataaatatctattagatacatttagtctatggtgcagattaagtccaatgtttctttattgattttctgtctgtgtaagacctgtcatggaaatctccagcaattattgtattggagcctatctcactagctgtaataatatttgctttatgtatctgg

SEQ ID NO: 638902 - DNA, 474 bp, Homo sapiens
cgacaagttcctcaagggcctcccactgctaaagttattgtgagctgttgatctgtgcttcctggatatgacttttacacggcattattctggcagcacatgtcgtattcttggatgatcttgctgctcttatttctccttttgtgtgtgtagtgtgtagtgtgtgtggctatgggatttcatttgtaactccatctgctataggagagtgggctctctataagtgttacctgctgtaaaacttcattgacgcacaggctgtagagagaaataaggactataattccacctagggggctctccatctccacaccttacggaggagatttctagaaaaactgggccagattctctttgttctccctcattttcatgtggcaggctgtacagttatccttaacctctatacctatgttgatatcactttcgtaacgtgtccaaaaagaaaaacagacccaatcaagagtctctatg

SEQ ID NO: 638903 - DNA, 521 bp, Homo sapiens
accactctggaatgactagggcaggcatcttttatggtgtgtgtggtcctgctcctggacacaatagtcatggtccccagagcccacatggactcgcatagggccatggaccccttcttggaggcgaactgcagttggatgtttggcctccgtaactccttcaggctacagggttccctcctgggcggtggacttaggagatttggttttggccaggcagtgagacagcagccaggggcttccataattggtgggggagggggtagctggaggggtgagccctgccatgttggccagtaactggggctatgtaaaccggtctagggggcctcttctcctggggaatgtcaacgccagctgagttgcctcacagccacgctgtccggaggagccggaggaggaactccttttaggatatctgatttctcaaattgctccagcagactggacaggtccgatgcctcacttccaatctcactgatgaaagcctgtagcagatcttcagaaccctgagtacgtgg

SEQ ID NO: 638904 - DNA, 332 bp, Homo sapiens
ctaaggaggagaggtaaaggggcaatgtaggtcacagagtacaatgtttgggttagacaggagaataagtttctgagatctgtggcacagcatggtgggtgaccatagttcggaatgtattatatatttcaaaattgctaagagtaaattttcagtgttctcactatgcccacaaaaatacacaggtgaagttatggatatgttaattagcttgatttactcattctgcaatttacacatgtatcaaaacatcacattgtaccccataaatataaacaattattgtcaattgaaaataccattaaaaaatataaatgaccaaaaaaaaaaaa

SEQ ID NO: 638905 - DNA, 314 bp, Homo sapiens
tggagctggttgaggctgcagtgagcagagatcatgccactgctctctagcctgggtcaaagagactgaccctctctgggggggaaagaaaaaattagaaaacaactgtcatgctgggcgcagtgtctcacgcctgtaatcccagcactttgggaggccaaggtgggtggatcaactgaggttgggatttgagaccagcctgaccaacatggagaaaccccatctctacaaaaaatacaaaattagccaggcatggtggcgcatgcctataatcccaggtacttggaggctacggcaggagaaccacaatgggg

SEQ ID NO: 638906 - DNA, 184 bp, Homo sapiens
ctcactcaagttctgcccagaatgctcataaccgctataataatattatccctaatacctgccatcccactcttattcagtgttggaagaacggtctcagaactgtttgtttcatttggtcatttacttttatgtagctacatactggtttattgatactcactgcatcgcttaacctttcagt

SEQ ID NO: 638907 - DNA, 784 bp, Homo sapiens
gagtttcctcccgagggcgcgcgcggaaccccggcgtcttctggaatagcccccagagcacaaacgcaatggtccctgtggacaaccgcgtggggacgccccccacggggttgtgtccaaaggaagtaacggtgcacttcttcttccacgcatcccactcgtgggtgaaaaaacgtagtcgccctcggtgcaaacagccgcggagtgttcttcagaaacagccaaatggtaccacaggaagaggtgtggcgggtggcccccacacgaagaagacgtcctgtgtggcgcacgcgccccgttcatacaggaaaaactgtaggggtgctaaaaatcagagaggcgttctcccgaaggacaatcgtgtgaagaatttcggaccaattgtccaagagcctaaacaactgtggcgactttgggcgcatcgtctccacgagagaacgcccgctccgttgcgagtagtcctattttagccaccccactatagagtcggattgaagattctttgtatccttaagaacaccacgtgctcatgccgcctggggtgtcttcccaagcacacagaatgttgggagagattcgaggcaatctcatctcaagagtgttcgtgtaacgctgccccgcgtatctatcatggtgtgctgttgtaagatactgtctggcaagtgggccacaaacatatgtacgacgcccgattatggactgacgcttctgtaacatgacgggcctatgagactgatggtgcgcccccatatggacatctcgtcttttagtcccacaatgtcaa

SEQ ID NO: 638908 - DNA, 359 bp, Homo sapiens
agcttaatagcatatcttactttgaatatttacacaaacacataaccatgtgactacattgataggccctgtaccacgggccttgaaactgtagcctatgcacattaccagccctgaaacctaaattatggtagtgttacagtacatccacttgcttgatgaaatagacaatgtgactggattgctcttagcaggtattcaatctctacaagtttgggctattaatagagatttaagcaaccactaatgctgacgtccaagtatagaatacaggaccagcctctgtctagtagagctggggagtggtgagcctggattaggaggctttgatgaggagactgaacgtttgatcgagctaa

SEQ ID NO: 638909 - DNA, 243 bp, Homo sapiens
cgacctctggcttcacgtgacctgcctgtcctcagctccctgggtagctgacaagtgcggatctccgtgctccaggccacagggtgtatgtggccatgcctacctgttttgtttttttcagaccagaaacccctattttcacagacctcttttaagaaatttcataaagggacatgcataaacctgggtatgctttacttaaaacataccataacaagaaaaaactagcacaacaaaaaacac

SEQ ID NO: 638910 - DNA, 808 bp, Homo sapiens
gagcggggtacttggacctgaaccttgctcagagagggagtcctcgcggacgtcagccaagatctccagaatgacgtactatcttgacttaccccgtttaaaaatcttcccactgcatcaatagatgggccctcagagttttccataagatcctcatgagactggttgcctcgccaggctacgagactgcccgcagcgtgtccagaccaaaacgaagaagacgttagcgcaaacctcagatataaggaatgttgtggtggtggatggtgttcgcactccatttttgctgtctggcacttcatatagaagacctgatgccacatgatttggctagagcagcgcttacgggtgtgtgcatcggaccagtgtccctaaggaagtagttgattatatcatcttaggtacagttattcaggaagtgaaaacaagcaatgtggctagagaggctgcccttggagctggcttctctgacaagactcctgctcacactgtcaccatggctagtatctctggcaaccaagccatgaccacaggtgtcggcttgattgcttctggccagtgtgatgtgatcgtggcaggtggtgtagagttgatgtccgatgtccctattcgtcactcaaggaaagtgagaaaactgatgcttgatctcaataaggccaaatctatgggccagcgactgtctttaatctctagattccgatttaatttcctaagcacttgagctccctgcggttctggagttctccacagtgagaccatgggccactctgcagaccgagtggccgctgcctttgctgttactcggttg

SEQ ID NO: 638911 - DNA, 195 bp, Homo sapiens
ggcgaatgcctctgataccacaaaggctgtatttgacatggagctgtctcctgaggcttagacttgtgaaacaactgtatgtcaaatgtgactgaccatccccatgtgtgatatgagagactggtcgttcttcaaccactcttgagggttatttatatcgtggacctgtatagtgcatatctcaggctatatggt

SEQ ID NO: 638912 - DNA, 500 bp, Homo sapiens
caacggacagagaccgggagagaaggaccacgagtagaactcaagcagagatagagaatgaaaatgggcccaatctaatagatccgcaggtaccattatctccagaagcagactgtaaggggacaggcgcagtgcctgtggagcggcacttgacatcagcgtctttttccacatggagtgaggagcctggccttgacaagcctgccttagaggagagcgcaggagctgacaccacacaagagacacttagtttaccagaaggagaaatcaccacgattgaaattcatcggtccaatccttacattcagttaggaatcagcatagtgggtggcaacagaaacacctttgattaacattgtcatccaggaggtctatcgggatggggtcatagccagagacgggagacttcttgctggagaacagatacttcaggtcaacaactacaatatcagcaatgtgtcccataactatgcccgagctgtcctttcccagccctgcaa

SEQ ID NO: 638913 - DNA, 264 bp, Homo sapiens
  misc_feature (12)..(12): n is a, c, g, or t
acgctctctctngtggggtacaggttttcccatgaaatttacatcgagtggtccacctccagcttatagggcttctggaacagagtgggtcttgctcttcgtgattccatgggagaaaatggaatgggaggaactagtagaattcagggtaatatccagtcagagacttggactgtgatggattgggagctttcctggccaggggctgggttacgaacagagcaagcatagagcccactatgcttggccccacagagagagcgt

SEQ ID NO: 638914 - DNA, 178 bp, Homo sapiens
gggttttaaaaagggggggggaacaaaatttttcctttgggggggattaacccgcccccccctttgggggaagccccaaaaaaaactttttttttccggttttccccccggggaaccaaaaaaaaggggggctttttttttccctggtttttttttttttttaaaaagggggggggta

SEQ ID NO: 638915 - DNA, 197 bp, Homo sapiens
ccaacccaagccggattgcctttggagcaccaccagtttctaggttggtttttttattgtattgaaaaccacccttggccggggttttattatttcaaggcccaaattaaccttctttttcctaccatttgccttattaaccttggtttaattacggacctttgaataccgactttttttacccccctttcttctta

SEQ ID NO: 638916 - DNA, 128 bp, Homo sapiens
ctagagcatcgcttatctggaaagggggagctcagtgctgatggagaaggagctaccaggcttcctgcagagtggaaaagaaaggatgccgtgataaattgctcaaggactggacgccaatggagttc

SEQ ID NO: 638917 - DNA, 154 bp, Homo sapiens
gtggaaaacgtgcttgctcgtacacaaagacaaatggatcttctattcccagaggaccaggcacaccaaaatcctccctcttcagaatggaggtagacagatcaaaatgagaggggcttgagtgtcacagacaatctgaaagtaataatagggg

SEQ ID NO: 638918 - DNA, 227 bp, Homo sapiens
tagacagtcgccaggatgattaaatttaaataacaataacaaggttgatttcagatgtctcaccacaaagaaggaggataagggagcgaggtgatggatatgttaattagcttgatttaatccttccacattatatacatgtatcagaacatcacattgtactccatcaatctatatacaattattttttgtcaatcaaatgtttttaaaatcaaaggtgggccgga

SEQ ID NO: 638919 - DNA, 301 bp, Homo sapiens
taaaagcccccccctttttttttagggggaaggggccggtcttttcccaggtccccccggggggggggaaaggatgggtttgggggaaattagggaagggaaaatttttttaattttggccttaaaattttttttttttgtttttttttgaaggagggggcttgggggccccccttcccccttttttgtcccccaacttgagagggatgaggggtttgggtttccctgggggggggggggggcaaccgggggtttccgggacattggtttggggccggttgaataaagggggcccccttta

SEQ ID NO: 638920 - DNA, 118 bp, Homo sapiens
tgctctagaggatctcagaggaggtggacaggggtggcgaggtcgatgaatgagtggttaattaattatattagggggttaattttgcgtattggggtcatcctccctgtgctgtcca

SEQ ID NO: 638921 - DNA, 1625 bp, Homo sapiens
  misc_feature (435)..(435): n is a, c, g, or t
  misc_feature (751)..(751): n is a, c, g, or t
  misc_feature (851)..(851): n is a, c, g, or t
ccactcgatacggtgtctcgcagagactccatagggctgtcgcctcacagcgaagtatctttcgattgtggaggaaaggtgtgaatgagtgacactgggagcagagcacacgtcacgatgtcttagtagaggaggctccatctcgagcacatcttggaactcgcaggtctaacggtcgccgaggtcagcacatctcgaaggctcgagctctgagagcatccaccattaacaagacataatattccgaactttagcgccacagagcaatgcagagcgtaagaaatcgcgcgaaaggagttcgtcgttgctgggcctagctgacaatgtaaaacttggcctgaccaaaaacgttgggaacatgacactagtgcgagacttaaaaacctcggagggcagagtcattccacggtgccttgcatcagcacacgtagttgngcgcgatagcaccaccgtggagggcttgggtccttagcgcggctactctcgaagcatggagcaaatgggcgcattgttacatctacagggagtgaatgtccgagaatcggatgcactagcatctatgggcgcggtgcaaaagaagattgggctcgcaaattgcacgttctttggagccacaagaagggagagcatacattcggggggcagcgaataaaattgctgcacctggcgtatggggactggacagacattcgttgtcacgatagggaataaaggggtgtacccgcattgggcagatcgtcgtagcacagcnaagggtcccggctgtgtcgggattgcaagtttacaaaagaaggcgttccaactcgggcaacagaacgtaaagccggattcgtaccttgtgtagatatggngaatgtcgaacggaggtgcttggtcccaatggggccccttagtgtgcagggtccctgggattgtgtggtggggcccagttttagggtaaacccttgttgttacataagcaattggttctaatcgtttcacatacgaaaaagagggttcgcgatcgcgtaaaagctaacacccgtaagttaaaagggcatcccccggagaggtaattggggccaatggaaatggatcccaattagctggctttcatcgttggcacttgcatgtcgtccgtgcttcgacatgaatgaacaaccactgtctaactttaggcttttcaatagtgcattgacaattcctagattagaacgctatggtgggggatgttatccctttgaccaccagtgagggccctgagctccaagtacctacgaccatggaatcttgtttcgaagttgttacatacttataaggtccgcgagataagcggggcgttttacccccattcaaatgcgggccgcaaaaatatacccgggggggtacgcatgttgcattccccattgtttcatattaccaatattgaccacgtctgtcacaatgagcaaatccattttctcatattggacccatttcgcatagcacaaaggttcgcaaggcggaacttataaagttacgtgttcacgagatgagaccccgcggtagatcttgtgttgcccttcttccacccagggggtagtaattccacaccatgacgtgcgggtggcaccctagggtgagggtacagtgtgtgtagagccata

SEQ ID NO: 638922 - DNA, 203 bp, Homo sapiens
tcctgtactagctcgccagtgcaggcggcctgttaatcgcagctccggccagtctgtgttctcactgtcagcatcttcatctgtgagagcacggaatggagaggttcagtctgccctgtacctccagtctggccatggcacttggtactactgctgagggacacatgttcaatacaccccacaatcactggcgcggtaggacg

SEQ ID NO: 638923 - DNA, 334 bp, Homo sapiens
  misc_feature (68)..(68): n is a, c, g, or t
gagctcgattcctggttgccgcctgctgagtagctgggaccacaggcacctgcaaccacgcccagctnattttttgtttttttagtagagacgggatttcaccgtgctagccaggatggtctcgatctcctgacctcacgatccgcccgcctcggccccgcaaagtgctgggataacaggcgtgagccaccgcgcccggcctgatctgggccattttatgcacgttatacctcaacagaaagttagtattattattttgatacagggtctcactctgtagcccaagcaggagggcagtggcgcaatctcagctcactgcaacctctgcctccca

SEQ ID NO: 638924 - DNA, 136 bp, Homo sapiens
  misc_feature (68)..(68): n is a, c, g, or t
  misc_feature (73)..(73): n is a, c, g, or t
  misc_feature (109)..(109): n is a, c, g, or t
ccacagctgggcccagatcagtgcccagggcccctgccacagctgggccccagatcagtgcccagggncgtcntgccacagctgggccccagatcagtgcccagggacntcctgccacagctgggccccagatcag

SEQ ID NO: 638925 - DNA, 1364 bp, Homo sapiens
  misc_feature (208)..(208): n is a, c, g, or t
ggttgacatccgggtgctacagaatcgacccccagagtcaagagaatgtgcagctcatgctgagccttggactgttgaagcaatcctgctgcaggctggcagtccctccaggataaagaccacaagatgccacatagggtaggtgcatgcgcccactgtgcggggccccgatctactatcactctttgtacgacgtgacctgtgcatngactggtccactcagtcgacatgtcttgggctaaggatgcgtgacttatagacagagtacctaacataggatgaaactatcgtgtcgtccaacaggggcttatggcgcatgagacattgcgatatcgctatcgatcccttctcgcagagtgacaagataggttgtggctcagacaacggatttggtcgaaggggatagtcgccacgatttctggccatggttgagatagccaaagagcttgcgtccagagggattgggaaaacgagctatgtggctatggaaccataggctcatagatgtggaccctctctatatttgcggctagtggtatggccccaattgagcttaggggcctattagccaattggtcctccgccttgtactccagcctattgtaatcttggggttgccaggtaagacaccctaaggtaaggtaacccttgaactaagcggtggtcccttgaactggctagcgccgccccaagaggaagagcgtcgccctgattggaaattcccacaaaccaaataccggtacgccgtcccccgaagtttggttcttgggaggggggcaattcccgccaaaccgttaggaatcctaagtaccccccgcttgtaaaccctatgggggtatggcccgggttccgccgctttgggggaaagagaggccgatatgggggcacgtcattgttcccactttcttgttcccaaagacaccaacgggcgttcggaaacacgataatggtcccccttttggtcccccaaaaggtatacggccgttaccctatgggaccctgactaggtttcgacgctcgacccttggtggacgcaatcttggccatttggtggaatcccacaagaaacattcttgggaccagcctctaagtgttccccattataacacttagtcccaggtttctcccccagtttaccaacgcggaggctcttgcaacccacgtgtgacacctatagccctcaaagcattgggcgttaatacacctcagtggcaaccgtttggcactttataggacggaggcgccgccgaatgtcgaggaaaccgggggaaactcgctcaggccgccccggcagttagagtttggggccagccccgggtttattccaaaaacgcggccaacaggaggtggcacccacagtatgg

SEQ ID NO: 638926 - DNA, 157 bp, Homo sapiens
atagaattgagaccaattaaggctttgccacattctcacatgtgtaggggttctctccagtatgaattcttttgtgttgagttaggcgtgagagcacgtgaaatgatttgccacattctttaagtgtaaacaagcatcttagcaacggggaggaacg

SEQ ID NO: 638927 - DNA, 436 bp, Homo sapiens
  misc_feature (252)..(255): n is a, c, g, or t
gccccgagccaggagcatgctgaattctcttgtggtctttgtttcctgaatggcctatcaatcagtaaccgagtgcgtgccaaacccagcccacacgggaacccggtgtcctcggctctccagtaaatactacttcaggtctcatgtccgaggaccatatgctcccaacacagctaataaaatcacccaggagcaaggaagttctggggtcagggtaggcagctgggtgttcagaggtgtttgtggggaatnnnnccccccggggtggggttttggtttgaaaaattacccccccctcctttttttccccttttttccttggcctcacagctaaggtcacaggctttggaatcagcagacctggatttgagccctgcttagccaattatgaactaagtttcatgcgcatccgtgtgaagagaacccccaaacagga

SEQ ID NO: 638928 - DNA, 272 bp, Homo sapiens
  misc_feature (177)..(177): n is a, c, g, or t
  misc_feature (227)..(227): n is a, c, g, or t
  misc_feature (250)..(250): n is a, c, g, or t
tatctatgtatatctatgctaaaacatatattcaaaaatgtttttaataacctgaaaaacagttgggatatattaagaaagcaacatacaatgtgagtgtctacgtgtgtgagtgagagagacagagactgaggcaagaaataacatttaatatgatgttgaaagggaaatgtgccnatataaaagcattgggtataatcacagatatttttaattacaactctccntattcccaattgggctgttaacntatatttatattttattaattc

SEQ ID NO: 638929 - DNA, 109 bp, Homo sapiens
cacaaatagctcaaagattgcagcctaaactaaattcatacgacaataataaactatcactagttacagttaaattgtcctgactggtttaaaacttagttgtaaaaca

SEQ ID NO: 638930 - DNA, 236 bp, Homo sapiens
ggcgaggacctctcttatatggccccctacggacttaagcggaggcacccaggtgtggaacatattccgggggcccttttttgaagagagggcacgaaaaaagatctgtgacggatcttttttttctgggaacttcacggcccccccaggcccattaaatccccttttctttttcttcaccccactacagtgaaaaaaaaggtgttttttttctttttttcccccaacataaacaa

SEQ ID NO: 638931 - DNA, 336 bp, Homo sapiens
  misc_feature (33)..(33): n is a, c, g, or t
  misc_feature (36)..(36): n is a, c, g, or t
  misc_feature (54)..(54): n is a, c, g, or t
  misc_feature (75)..(75): n is a, c, g, or t
  misc_feature (241)..(241): n is a, c, g, or t
  misc_feature (300)..(300): n is a, c, g, or t
  misc_feature (315)..(315): n is a, c, g, or t
gtgtttttacagagtgctgattggtgcgtttantangacacagcgctgctttantaggacacagtgctgctttantagacacagcgctgcttggtgctatttttacagagtgctgattggagcatttacaatcctttagctagacacagagcactgactgatgcatttacaatcctctaggctagacagaaaagttctccaagtccccactggacccagaaagtcaagctggcttcacctntcaccagcaagcctgaactggtggcatgtaaggggacaacagcaaaaatttgcaggctncaggcaagccacctnagccctaaatgccaggtccca

SEQ ID NO: 638932 - DNA, 120 bp, Homo sapiens
gtgacgtacatccggcgagtagctggcggtccccgggtgctgctggtttagtgtgctctgagggagggtccgagccagccgctgtttttgccggagaggcccctcaggccggctgcttcg

SEQ ID NO: 638933 - DNA, 443 bp, Homo sapiens
atctctcattgtactttcgcatgtggaccatctagtcgtcaagggacatacctgctcagctgttctagtctgctatactactacatcctcaggcataatacaggccccctcccttccctacacatcaagctcgaggattagcccccacccaggactggaaaattagcattattcaacatgccctgagataacaaaaaataaaactactcttagtctaggtagacactttcactagataggtagaggccttatctacaaggtctgagaaggccaccgcagtcatttattcccttctgtcagacataattcctcagtttagccttcccacctctatacagtctgataacagaccagcctttattagtcaaatcagccaagcattctctcaagttcttagtattcagtgacagactaatggtctattaaaaacacacctcaccaag

SEQ ID NO: 638934 - DNA, 286 bp, Homo sapiens
cccgccccatgtgaccagaggcccacaggaacccaactctatttcccttaggaataatggtttagtatttactaatgcagtgttccaagtgactttatagaacataactactgcaaataatgagaatcaactgttttatctttggatcatgtgctgtattactgttaaaaatgtgaagacataattatgtaggagaaatattactgtggaggattttttttttttttttttttttggggggggggtttcactttgccacccagctgggggggaaggggctcaattt

SEQ ID NO: 638935 - DNA, 777 bp, Homo sapiens
ttagtgggacttacatgagtaagcaaagtggaggtgaaggcggcatcattatcaattatgtcatctttacgaggactcatgcccgttgcacagcagtccggcttatagtgctacaaagcatggcgtatttggattcacacgctcagcagccgtgggctgctaatcttatgaacagtggtgtgagactgaatgccgatttgtccaggtctttgtctaacatgaagcatcccttgaatcatttgttaacatgaaagaaaacatgggacactatatagaatataatggatcatctcacggatatgattaaagtacttagtggaactttagggtccactcattgattgccaattggattgcttactacgtcattgaatatgatgctttaagagtggtgccttaatttatgagggatcacaactctctaagcggaattcatttgcaagactatgatacagacctccattgcaagcaaaaacccaatgaacagcttatgtgttagccatagctgaccataacgcacagagatagcttatattcagatcctatctttcatttgaatatccgcttttaacatgaagagtggtccagctttgaagttttccttcatgcacttggtgataaacgttttctaacattctcagttcagtatatcggatacccagttatgacgtattcaaatgtgatgtggccacaaggctacgtcgtacacatgatgctctaccaatgatcacacctgtttccgaatctcaatctgcctcgcacgggcttcctccggcc

SEQ ID NO: 638936 - DNA, 243 bp, Homo sapiens
ggagaatgagttctatgaatttgctagagcagttccgattcatcagagcccatgtccgttcgaggaaaagagatggagacctctacatcctcgcacaaaactttttctatgaagaagatttatccctgaagtcgtacactgagtataagagtgtgacatattcagattcttagaatctaaaatttgaccctgttcttcaccttatgtgctcagactccacacgtctgtgatttgctgatcagt

SEQ ID NO: 638937 - DNA, 197 bp, Homo sapiens
catgcgatccaagtgctcccgtgtcactacattcttatttcctgtgcaagttattacgacatcgacttgccgtgatgacttcatttagctttaccaccctgaacccatccatgcaggcctgcagagcacagatggggtcgatttcggtactgtagactattgctccaagagctttgagagcagcacagcagcccttg

SEQ ID NO: 638938 - DNA, 211 bp, Homo sapiens
aaaggtttaaattgggcttttttgggggttcaatttaaaaggaatttttagggtaaattatgataaaaatgaaagtaggctttcattatttaggggttttttttcccagtttgttctttaaaaatcaaaacaagcagaaagagaaaacggttcacccatcctttcatttttttttttcatttttttccccttttatactaatatttttata

SEQ ID NO: 638939 - DNA, 1986 bp, Homo sapiens
  misc_feature (259)..(259): n is a, c, g, or t
  misc_feature (859)..(859): n is a, c, g, or t
  misc_feature (867)..(867): n is a, c, g, or t
cgtgtagtatgtggcgcgctggtagttgcttctgcctggtgttcgtcggtgcgttgttgtcgcacacgtgtgtggtgctgcgtcttcgcttgttttgtggggtgtccttcgggtcgtgcttgtatcttgtctcgcgtccgtgttggttctcctcggtgagtcccgtggggtggcccctgagcgtcggtgagtgttgctgggtaggtccgtatttatacataccgcgggtcggcgaaccagtcacatgggggtttttttncggggcatcccggtgggtggtgtacgcctactgcttgttggtggggaggacccttgttagtaatgttctgggagtgttgtgttgttgggtcgtcaccggctcattttgtctcctgtcgtgcttggtgttcctgtgggcacccagctgactgttgcgcccagcattgtgtgtgtgggccgtgttcattccacccgtgcgcttcaatcagtgtggcccctgtgtgccaccatcgcggatgattgtgctgtggggtggacgcacaatgcgaagagcccggttgttaggcgaatataattcatctcacacggaggtggtgaagactcccacaaggtggtagtttccccacgtagaattcctaggagtagttggtgaaagggcgctctgaacaccacacattgtcctagagggaccaaaataatactcgtggggaaaattgtctctgtgatagatggtctgcaggcgagattatatctttggtagacgaacagtttggtgcgttttccccaagaagaagagtgcaccccacgtggaaatttgctctcgggccttgctccttctggggggtgtccaaaaaagtgtgggcagacatgcggcgccccnccggattntatatagagtggagaataattctccacaaggggcgcgccacttcgtcttgtgttcgtgtggtaagaatcgtgggaattgatggaatactttttgtaagcatgtggcggattattgtcttctctgatgcagaacgatggttttgcgccccaacaagggtggtcgtgaataatattgtgggggcgtaatattgtgttgacagccctcaatatttgtgttgtgaagtggtcgcccctccctctgtggtgtaggatgataggggttgtccttgtgacaaacacgacgtatagctcgtaggttttgttgttgggacgttgttcttccaacatgttgtgccaacactggtactggtgtcaacgagtggggttttgtcctccggtggtaaaatgttgttatattatgaacaccgcggcacatccatcagggccaccacacgatatagggatgctcatctttatatctctaagggagcatgtgtggctcacaatatagaagggaaattatggtgtgtagaaagagataggctctaatatgggcgtggtaaatataccgccccacgcgctcatatgatatatccccttcctggggagtattgtgatatcgcgccgctctcatatcacgttgtgtagtatatgagaaaacacacgccctctcatatatagtagatatgtatagttaagagagagtgtctcatactgctgtttataaaagaggagtataaatagtctcaatatgtgggagtgtatacacacggcgagtgagagggtgccacagggagtaagagacacgacacacctgttgtgacacgtgtctccacgtcgccacatgttctcacacaaaagtctctgtgtgtaagatatctctgtaagttgtgtgaagccacagcacctcgttgtggagggagaaaattaacctcgttgttgagctcgccacagtggtgtgtcatgcactgtcttaaatgattggtgaaactggctatagtatggagatttgaaacccgtgaatgcacgatagtctttttcctatttgaggccctggtggaattaaaaacccgtatattttactttgttgccagataatcttgccccattttggcaaagttgtcagagatggtggagctt

SEQ ID NO: 638940 - DNA, 508 bp, Homo sapiens
gttgtgtttataaggaagttagatccagctattgtttgtttaattacatctttcgcagacagaggtttcctgtcagcattacctggtttggcttcatcattatcatttgaactttcagaaggaattattacttccatagaagattgttttacagtgctactatgtggtgttgtgactgtcgcaggcagtgcacaaatctgtccagtatacttaacttattttcatgtagatcacataattgtcgttgattttgatcctgagaggcagataattcagcattttttaaaaagataatggtatcacagcaacatttggatactacagtgctatggagaataccaccattatagtggctggtgaactctaccattatgtagggctgcacttttcccccacgtgtacaaggctaccgcgtagagcaggtgaagctatgtgggtccacaacaatgtagttctaagtagatgtcaagaggtatctaagctcaaatcacagtgtagtagctatatt

SEQ ID NO: 638941 - DNA, 474 bp, Homo sapiens
tttgtcgctaccaccctccaattcagtcgcgccggcgtattaacgcacaccctaaatccctgggcacaatggcaataacctcttttaccgaacgtgcgggagtgcatcccccgaggccaatgaccaccggcccgccttgaatagccccgctctccggctgcagggtcgtcttttctcgggcataccccgcgggccactagaggatggcgggcttgtaaaagaccaccctaggccggctaacatccaatatggcggccaccccctagctcaccgaagaagggcgttggcggagcaccacaagagggaggggcgagataaatcaggggagacccccccttgctcgcgccgctgcaccatctcagcaagaggcgtacgccctcgccccccccccccccgggatgatggttgtttaaaaccccaaaaaatggggggttagcccaaggaaaaaacccttttaaaaacacccaaaaaaaa

SEQ ID NO: 638942 - DNA, 207 bp, Homo sapiens
cgagcacagtgcacatatatatatatctgaaacatagacatatacatgtgcaatcaacttagaattgctagcacatcaattagccactctcagataggtccacaatcagattagtaatgctaagtaggttagtccccatgccaatcacaggtactcccaggatcaacacctctcctaccgcacactatggtcatatacagctccaga

SEQ ID NO: 638943 - DNA, 668 bp, Homo sapiens
taaaagccgggatggtaaccagattttctttttcccccttctcagctgtaaatatgatatctcctttacagggccccagtttaagggcaaagtgagttaatggtgtagacaacgggcgagggacaagagagatgttaacatctagacgggggaaaaacgccatggtgtgtgggtttctggggaaccaccaacacttgcaggtttagcttttctcccagggttgactacaagaaagaaaaccatggtttttggcaagattaacaatggtgggtcgatgtggtggcctaaattaaccatccccatttcttatcattatttccaccatcatcttcggggtcttaaaagagtcagggctcacctggggcggagctgggtcagtaccattgggcttcttaagaaaggctaagtcctggggtcccggtctggatttaagggtcccaggagaatcttcctggaaaacacccccgatcgcaagaggggtaatcttcctggagacgttcggtcttggcaggggatacgctgggagtgtatgggccaccctgggtcccacagatggcgggtaatggaatccagcaaaacgggggagaacgcagggctgcgcaaaatggcccaactcgcagaaccgggtcaggcaatccaggtgaatccggagacggtgtcggaggacc

SEQ ID NO: 638944 - DNA, 171 bp, Homo sapiens
tgtccgggacgggtacacgaccggctactacacacggaccctttttctactggtggtttttaccacacgtaacaccttctactttggacacgtacgttttacgactttaccgactgcaacgacacgggaccggtctggggactcctctacgacgtcgacccgtgcacggca

SEQ ID NO: 638945 - DNA, 1104 bp, Homo sapiens
  misc_feature (15)..(15): n is a, c, g, or t
  misc_feature (74)..(74): n is a, c, g, or t
  misc_feature (85)..(85): n is a, c, g, or t
  misc_feature (159)..(159): n is a, c, g, or t
  misc_feature (162)..(162): n is a, c, g, or t
  misc_feature (167)..(168): n is a, c, g, or t
  misc_feature (170)..(170): n is a, c, g, or t
  misc_feature (173)..(173): n is a, c, g, or t
  misc_feature (178)..(178): n is a, c, g, or t
  misc_feature (185)..(187): n is a, c, g, or t
  misc_feature (197)..(197): n is a, c, g, or t
  misc_feature (200)..(203): n is a, c, g, or t
  misc_feature (215)..(215): n is a, c, g, or t
  misc_feature (217)..(219): n is a, c, g, or t
  misc_feature (224)..(224): n is a, c, g, or t
  misc_feature (229)..(229): n is a, c, g, or t
  misc_feature (231)..(231): n is a, c, g, or t
  misc_feature (237)..(237): n is a, c, g, or t
  misc_feature (240)..(240): n is a, c, g, or t
  misc_feature (243)..(243): n is a, c, g, or t
  misc_feature (245)..(245): n is a, c, g, or t
  misc_feature (254)..(254): n is a, c, g, or t
  misc_feature (260)..(260): n is a, c, g, or t
  misc_feature (263)..(264): n is a, c, g, or t
  misc_feature (602)..(602): n is a, c, g, or t
  misc_feature (613)..(613): n is a, c, g, or t
  misc_feature (618)..(618): n is a, c, g, or t
  misc_feature (629)..(629): n is a, c, g, or t
  misc_feature (643)..(643): n is a, c, g, or t
  misc_feature (832)..(833): n is a, c, g, or t
  misc_feature (839)..(839): n is a, c, g, or t
  misc_feature (846)..(846): n is a, c, g, or t
  misc_feature (850)..(850): n is a, c, g, or t
  misc_feature (867)..(867): n is a, c, g, or t
  misc_feature (870)..(871): n is a, c, g, or t
  misc_feature (874)..(874): n is a, c, g, or t
  misc_feature (877)..(878): n is a, c, g, or t
  misc_feature (883)..(884): n is a, c, g, or t
  misc_feature (887)..(887): n is a, c, g, or t
  misc_feature (902)..(902): n is a, c, g, or t
  misc_feature (928)..(929): n is a, c, g, or t
  misc_feature (932)..(933): n is a, c, g, or t
  misc_feature (937)..(937): n is a, c, g, or t
  misc_feature (948)..(948): n is a, c, g, or t
  misc_feature (953)..(953): n is a, c, g, or t
  misc_feature (956)..(956): n is a, c, g, or t
  misc_feature (976)..(976): n is a, c, g, or t
  misc_feature (984)..(984): n is a, c, g, or t
  misc_feature (986)..(986): n is a, c, g, or t
  misc_feature (995)..(995): n is a, c, g, or t
gaatgggtcaaggcncctgcctgtttttgttggtgcacagagattgacttgattcagagacacaattcactccncccctatggcngaggaatgggttagccctaatgtagaatgtcattgtttttaaaactgttttatatcttaagagtgccttattanagnatagnngnatntcttnaaatgtnnntgataggaanttnnnngatttatataangnnnccccngcctnanaataanaanagntngttttaaantgcttnatnngtatatctgaactcttgaaacttatagctaaaacactaggatttatctgcagtgttgcagggagataattctgccttaaattgtctaaaacaaaaacaaaaccagccaacctatgttacacgtgagattaaaaccaattttttccccattttttctccttttttctcttgctgcccacattgtgcctttattttatgagccccagttttctgggcttagtttaaaaaaaaaatcaagtctaaacattgcatttagaaagcttttgttcttggataaaaagtcatacactttaaaaaaaaaaaaaacttttctccaggaaaatatttggaaatcatgcngctgagcctcnatttncttccttggangttggatccagatncttttatcataaattttccagcatttaaaaattcactggatgtacattcaagccaataaactggttaatggaatacacaacactatgtagtggtggtccctattataacatggcttgggagcaacgtatttctatgagactctttactcaggtgcatggttacagcccacagggaggcatggagtgccnngggaanggattcngcantacccagaacctggttncgnnggnatnnggacnnacnggtttttcaaagaanccatttcctcagattacaagatgatnntanncaanttagcatggcncaaanggnaccaccaagtgtgtcacccngtgccttnanaggaggttnaatcccaggcacatccagacgggccatagtcagcgacgtacagccctcataaagggccgcaattacggtaagtccccacacatgtgttgcgacatcgcaggctcaaagg

SEQ ID NO: 638946 - DNA, 156 bp, Homo sapiens
tcggctcatgacaaacaacacagtacaactgggtccacctagaacggggaaaaaaagctgggggaaaaaaggaatatacttatttagtttctttaggtatgtttcttttcataactgggtattatgtggacattatattatgctacaaggtgtcga

SEQ ID NO: 638947 - DNA, 824 bp, Homo sapiens
  misc_feature (263)..(263): n is a, c, g, or t
agcgggtttacccttgtatggccggcgacattggctatggctcgctcaactctctctaacgggagagcagtgcggaatacatgagattgagctgtatctgccctctagtgccaagaagattcatcgcttcacaactggctgctcacacagatagccgaggaagtgttttccacttccatgctcctttttccatagaaagagaagcttgaactattaagatattgactacgtcaacaaaggaagaatgaaaaggtaaaccgtanagacttttgcattgccaagcagggtgccaatatcaaaatactcggcagggcgacagggctcgcgagaccgtggagtagtagaccgtaggctcttgactgtgattcagagtgtatctcgatgcatgtcgattggatctgatgaccgggtgaggtacgtacatggctcgatcgtggaaatcttagtgaccatctctaatggcgggacaggcgtgacgccgtgaaacactcggttagtgaaagcgatctcgtgggatgtgcatgcgcccgagacgatgacaaccgctctggatcggccaaaaagctcgaagcgagaaatcattgcgtgagaagatgctgtgccgaccacataaatgcgcaccaatcgcaacttccgtagtacgttggggtggaaccatttatctggatttgtggcacacggggaatggctagtcaccggcgttatccccacacgtcaattaccacgcttgtatataccaaagaggtggacattgtgaacaattagccaagtgaacaagcaatttggatgtttaacactcaaggaatgttggggaagatagagac

SEQ ID NO: 638948 - DNA, 399 bp, Homo sapiens
  misc_feature (25)..(25): n is a, c, g, or t
  misc_feature (45)..(45): n is a, c, g, or t
  misc_feature (71)..(71): n is a, c, g, or t
  misc_feature (304)..(304): n is a, c, g, or t
  misc_feature (358)..(358): n is a, c, g, or t
  misc_feature (367)..(367): n is a, c, g, or t
  misc_feature (394)..(394): n is a, c, g, or t
tctcctccacttttttcggaatttntttcttcctaattacagcgnggtgtggaggaaactgcagctgagtnccgaaaactaggcgtcactgcgcatgcgtatgtggtagactgcagcaacagagaagagatctatcgctctctaaatcaggtgagactgcaggttcacaaatttcttcagattattttgtttcctaggacgctgacgtggaaaatgagaaaggtctttatgactgcctgatttaaattcgattttagctgctaactgaagtagttatgtcaccaaggaaggatatatacttttnttcttgtatgtaatccactcagctctgcccattattattgtttcatattattantcatttccntctgatcagagtgtgagcagtggcacnggtga

SEQ ID NO: 638949 - DNA, 701 bp, Homo sapiens
  misc_feature (282)..(282): n is a, c, g, or t
cccccggcatggggttttgcttagggattctttagtggcggcccttagaggggggtggggtacccccggccccccgggtcaggaagcgttctgggtggctaagacaggtttctgtgatcttctccgttggggcatgttgacagacagtttccccccctcccaccctcattttttggtcctcgcgattgagagccaggggggacatcatgaccttttgtcccggccgccttagccccgggcacagggaaggcagatgggccgtttttgtttgtgtcccatccngctgtccttttgtcctggatgttttatggggccggggccccccagggaagcttacccctcctgtgttgggtggaggccacgggacaccttaggtgcccccccccttggcccttaaacagcccccaggaaaacaaccggaaaaccggacaacaggcaacctgtttgggttttttaggcctgggggtggcaaacaagcccccgggcccgtggttccaacaacagggttgtcagttggagcattttggggctccctgggtcctggccgttttttaggtaggggcagtaccgtgttttgtaggtaacagtaggaacgggggcccccccggcccttcaaccgcttatgggggtggggtgtgtgccaagcccccccggggggcagggggttacgtgtggggaataaataggggttttgcccccca

SEQ ID NO: 638950 - DNA, 154 bp, Homo sapiens
tcgagcagtcgggtcttatacacatagtccactcctgtattcacaggcctatgtccagccgtacttccagggatgaccttgtaatccgagtattagtatgaagcaattctacctcagcacagcggcacagtacatcacgaccaagcttgtgcag

SEQ ID NO: 638951 - DNA, 290 bp, Homo sapiens
aatcccaggtatcatctgactcttcagactccgtccttcttctcatctgttcttctcctctgctgcagcagtgggcagaaccagcagcgaggggctgtgaaacctggtgcagcagaaacggttacagccccaccagcaggtacactggcaagcttgtcaataccctgggctatgacgtcttccatgtttgttccattcagctcactgataaccttgttgagccggtcgtcgtccgcctcgatacccacgctgtccaagatcttcttgatgtccttggcccccttatcgag

SEQ ID NO: 638952 - DNA, 1042 bp, Homo sapiens
  misc_feature (616)..(616): n is a, c, g, or t
  misc_feature (633)..(633): n is a, c, g, or t
  misc_feature (640)..(640): n is a, c, g, or t
  misc_feature (655)..(655): n is a, c, g, or t
  misc_feature (698)..(698): n is a, c, g, or t
  misc_feature (702)..(702): n is a, c, g, or t
  misc_feature (723)..(723): n is a, c, g, or t
  misc_feature (778)..(778): n is a, c, g, or t
  misc_feature (788)..(788): n is a, c, g, or t
aacgatggcggcttcctagtgagtcggcggctgatttagaaggaggttcaggctacggtgagccgacacaggagccatggaagtggcagagcccagcagccccacgtgaagaggaggaggaggaagaggagcactcggcagagcctcggccccgcactcgctccaatcctgaaggggctgaggaccgggcagtaggggcacaggccagcgtgggcagccgcagcgagggtgagggtgaggccgccagtgctgatgatgggagcctcaacacttcagtgagccggcccctaagtcctggcaggtgcccccgccagcccctgaggtccaaattcggacaccaagggtcaactgtccacgagaaagtgattatctgcctggacctgtcagaggaaatgtcactgccaaagctggagtcgttcaacggctccaaaaccaacgccctcaattgtctcccagaagatgattgagatgttcgtgcggacaaaacacaagatcgacaaaagccacgagtttgcactggtggtggtgaacgatgacacggcctggcttgtctggcctgacctccgacccccgtgagctctgtagctgcctctatgatctggagacggctcctgtnccaccttcaatctgganggacttntcagcctcatccagnagaaaactgagcttccggtcacagagaacgtgcagacgattcnccgncatatgtggtccgacatcctngtctacagccgtccacctttgccagccccagttctccttgacggagcccattganacatgttccngtgccatattcttcttgacgttgttacttccccaggcctgagggcgcggggacaacttgtgaaagacattgttgccctctagggcggactgtgtaaccggggcacccttcaagtttagctggcctgctgtgcacccctggggtgtcacgtgtttttgaatgtggccccctgaggcgttcagcagtctcaaccgggaggaagaagacagatatgcggtgtgcacccacatacatatgaagagaacgcatcaactg

SEQ ID NO: 638953 - DNA, 1085 bp, Homo sapiens
  misc_feature (659)..(659): n is a, c, g, or t
  misc_feature (676)..(676): n is a, c, g, or t
  misc_feature (683)..(683): n is a, c, g, or t
  misc_feature (698)..(698): n is a, c, g, or t
  misc_feature (741)..(741): n is a, c, g, or t
  misc_feature (745)..(745): n is a, c, g, or t
  misc_feature (766)..(766): n is a, c, g, or t
  misc_feature (821)..(821): n is a, c, g, or t
  misc_feature (831)..(831): n is a, c, g, or t
aacgatggcggcttcctagtgagtcggcggctgatttagaaggaggttcaggctacggtgagccgaaggggaggattctggcttcccctgtccgtgttccatctagccacacaggagccatggaagtggcagagcccagcagccccacgtgaagaggaggaggaggaagaggagcactcggcagagcctcggccccgcactcgctccaatcctgaaggggctgaggaccgggcagtaggggcacaggccagcgtgggcagccgcagcgagggtgagggtgaggccgccagtgctgatgatgggagcctcaacacttcagtgagccggcccctaagtcctggcaggtgcccccgccagcccctgaggtccaaattcggacaccaagggtcaactgtccacgagaaagtgattatctgcctggacctgtcagaggaaatgtcactgccaaagctggagtcgttcaacggctccaaaaccaacgccctcaattgtctcccagaagatgattgagatgttcgtgcggacaaaacacaagatcgacaaaagccacgagtttgcactggtggtggtgaacgatgacacggcctggcttgtctggcctgacctccgacccccgtgagctctgtagctgcctctatgatctggagacggctcctgtnccaccttcaatctgganggacttntcagcctcatccagnagaaaactgagcttccggtcacagagaacgtgcagacgattcnccgncatatgtggtccgacatcctngtctacagccgtccacctttgccagccccagttctccttgacggagcccattganacatgttccngtgccatattcttcttgacgttgttacttccccaggcctgagggcgcggggacaacttgtgaaagacattgttgccctctagggcggactgtgtaaccggggcacccttcaagtttagctggcctgctgtgcacccctggggtgtcacgtgtttttgaatgtggccccctgaggcgttcagcagtctcaaccgggaggaagaagacagatatgcggtgtgcacccacatacatatgaagagaacgcatcaactg

SEQ ID NO: 638954 - DNA, 227 bp, Homo sapiens
accagctggtcgcgatctccgacttcgtgatctgcccgctcggcctcccgtagtgctgggagttcctggcgtgcgcccccggacccggccccttagatctgtttctgagatgtttttctggctctccagcctgttattgtgagaacaggaggctggtgtgcattgagcaagtgttctcacaaggcctccggtcagcgagaagccattcctacggtgggttggcccaa

SEQ ID NO: 638955 - DNA, 246 bp, Homo sapiens
tagtcggacccgtattctgttgcgttgtggctcagcggttaccaaacctgacaggatccatgaggatactggttccatctctggcctcactcagtaggtcaaggatctggcattgccatgagctgtggtgcaggccgcagactcagcttggatcaggtgttgctgcggctgtggcataggctggcaactgtagctccgatttgacccctagcctgggaactttcatatgctgcaggcgctgccctg

SEQ ID NO: 638956 - DNA, 247 bp, Homo sapiens
cctgcgctacctgctgaattgcagcgattcagaaagctgctttggtttgatcacttgagctcaggagtttgagaccagcctggtcaacatactaagactccattctctacacacaaaaaaattgattttaaattagccgggcacagtgatgcatgcctgtagtcccagctactcaggaggctgagacgggatgaccacttgagcccagtaggtcaagggcgcattgagtcatggctgcactactgca

SEQ ID NO: 638957 - DNA, 684 bp, Homo sapiens
cctcaggttcatggaaggttcccaagacctcttgaaaatcggcgacaaatgcgaaaccatcgtgaaccaaacataatccccgggcttaagtttttctttcggcgatcaaacccccttcttgttcttgcaaggggccgccccgttatttccaattccctccattgctcacaagtttcgggggtgaactggggaaatagctttcacttgaagtttaaaatttaaagttgtgccctaagcgtctgccaggaattccctcccttccatcgacttaccggcccgctctatagagcgtgagctcaagcacagaccaatctgcattgttacgcttgtgtggcccatgtccaacccaaccacatggcccttatagcgtgtgatggatttgttagctgcttatgaacataagtcatgcaaaacgcctgctacgctgacctgatggttccaggatggtcataaggtggtagtgccctgccaactggcagtcggcttacatcattctttttacaagctattaagcagcctatgagcttaaaatgtgtacaagcaagagcaatagttctatcccctgctttttcctgtgtcttggtgtaaagccggtgcccagtctacaccccgtgtgtttctctaagccttttcccatctttttgcgtgctccagttgttccactattgaaaaattttcaccggc

SEQ ID NO: 638958 - DNA, 403 bp, Homo sapiens
  misc_feature (26)..(26): n is a, c, g, or t
  misc_feature (69)..(69): n is a, c, g, or t
  misc_feature (116)..(116): n is a, c, g, or t
  misc_feature (164)..(164): n is a, c, g, or t
  misc_feature (171)..(171): n is a, c, g, or t
  misc_feature (201)..(201): n is a, c, g, or t
  misc_feature (220)..(220): n is a, c, g, or t
  misc_feature (229)..(229): n is a, c, g, or t
  misc_feature (236)..(236): n is a, c, g, or t
  misc_feature (245)..(245): n is a, c, g, or t
  misc_feature (316)..(316): n is a, c, g, or t
  misc_feature (344)..(344): n is a, c, g, or t
  misc_feature (349)..(349): n is a, c, g, or t
  misc_feature (387)..(387): n is a, c, g, or t
acataaaagtggaaaaccaaaattantagtaatctcttcaaagaatcgagaattgcgtacaaaaaaaancttaaataaataaagaatgaataaatttacaggggtaaatgcaaacngcttccaactcaaagcaagtgacagcccagggtgttctggccaaaganatcagcnaagagagggaagtgggtcctacggcttggnctttccaaccctgagaganccgcaaganaaaacanctggttttngcgagcgtctggagagatcccagaccactcagccctgacacgttaataccctgcccagatcagaggctgcnggccaaaaagattaaccaagccaaaganttgtnttccacaagcccgttcttaccttagccacgaagtaccnagcaaaaggtcctaaa

SEQ ID NO: 638959 - DNA, 855 bp, Homo sapiens
ccctgtacacgtatcctgggaaactggagggccttcaaggtctctcatcgctgctcagtacagcggggctcaggtccgcgtgctctccggaccaccccacttccatttggccaaatcaacgcacccctgaatttctccgcaaatttcctgccggcgaggtcccagcatttgaggggtgatgatggattctgtgtgtttgagagcaacgccattgtcctactatgtgagcaatgaggagctgcggggaagtacttcctagaggcaggagcccaggtggtgcatatgggtgagctttgctgattccgatatagtgcccccagccaagttacctgtggtgttccccaccttgggcaatcatgctaacacaaacaaacaggccatctgacgaatgccacaggaggaccgtgatggctgaattctggggctgctggatgcttacttgaagacgaggacttttctggtgggcgaacgagtgacattggctgacatcacagttgtctgcaccctgttgtggctctatgacgcacggttctagagccttctttccgcagggctttttcccattagcaaaccggtggtttcctcacctgagattaaaccaagccccaagctccggggcctgtcattgggggacagtgcacacctggtgtgacgaagatggcccaggtttgagtgcttaaaacggtttggagaagacccaagcctataaagggccacaccacgggaaagagaagcgttcacgggacagagaaagcagaacccccagggttacgcgggaggcagcgcacaaggcggttgccctgtcctcggggggcaatggtgaatgtacaagccgcgtgtggccaaggcaggcct

SEQ ID NO: 638960 - DNA, 229 bp, Homo sapiens
ccaacattggcctctgacttcgagtgcgatcagcggcgaacagctcattcacgcgctgttgttgcttgtcagtaggtagatgatctgcgccggtgggaagggttcgctgattctggtaagcaggtggtgcctgcggtcccaggtgctgtacagctcgatttggacccggcaccgacacaagtcgagcgcgtcacctgcgaggcggatgacgtggatgcggtccacgacc

SEQ ID NO: 638961 - DNA, 435 bp, Homo sapiens
accaaatcaccagaaacattagtcttggaggaaaaaagaaagttagagataggcgtcttctgtgtggaggaaaaggttgccttttttcgttctttggtcttttaaatttttttctccttttctttttttctttttcttcttttttttctaccactctgaatgcacttggtctgatcgggtcttcgaagctaagcagagtcaagcctcgttagtatttcgatgggagacaagttgggaaaattggggtgacgtaggctttaagcttttttattttattttatttatttatttttattttggttcattggctttggggatcttagtcataaattcttggcctaggccaatgtctaggacagtttttcctaggttttcttctagaatttttatgatttcaggtcttaaagtctttaatccatcttaggttaaatttgg

SEQ ID NO: 638962 - DNA, 1377 bp, Homo sapiens
tgcgcggcggcggcgcgcgggcgcctggggcgggacttccggcgcgctggagcgttttccggccgtgcgtttgtggccgtccggcctccctgacatgcagccctctggaccccgaggttggaccctactgtgacacacctaccatgcggacactcttcaacctcctctggcttgccctggcctgcagccctgttcacactaccctgtcaaagtcagatgccaaaaaagccgcctcaaagacgctgctggagaagagtcagttttcagataagccggtgcaagaccggggtttggtggtgacggacctcaaagctgagagtgtggttcttgagcatcgcagctactgctcggcaaaggcccgggacagacactttgctggggatgtactgggctatgtcactccatggaacagccatggctacgatgtcaccaaggtctttgggagcaagttcacacagatctcacccgtctggctgcagctgaagagacgtggccgtgagatgtttgaggtcacgggcctccacgacgtggaccaagggtggatgcgagctgtcaggaagcatgccaagggcctgcacatagtgcctcggctcctgtttgaggactggacttacgatgatttccggaacgtcttagacagtgaggatgagatagaggagctgagcaagaccgtggtccaggtggcaaagaaccagcatttcgatggcttcgtggtggaggtctggaaccagctgctaagccagaagcgcgtgggcctcatccacatgctcacccacttggccgaggctctgcaccaggcccggctgctggccctcctggtcatcccgcctgccatcacccccgggaccgaccagctgggcatgttcacgcacaaggagtttgagcagctggcccccgtgctggatggtttcagcctcatgacctacgactactctacagcgcatcagcctggccctaatgcacccctgtcctgggttcgagcctgcgtccaggtcctggacccgaagtccaagtggcgaagcaaaatcctcctggggctcaacttctatggtatggactacgcgacctccaaggatgcccgtgagcctgttgtcggggccaggtacatccagacactgaaggaccacaggccccggatggtgtgggacagccaggtctcagagcacttcttcgagtacaagaagagccgcagtgggaggcacgtcgtcttctacccaaccctgaagtccctgcaggtgcggctggagctggcccgggagctgggcgttggggtctctatctgggagctgggccagggcctggactacttctacgacctgctctaggtagggcattagcggcctccgcggatactcgctcagttctaagcacacatgg

SEQ ID NO: 638963 - DNA, 499 bp, Homo sapiens
ggccgagcaagcccagctaggtatggcgatggtgaagcggttctttgaatcttaccatgaggtccccgacggcacccagtgtcatcgcaagacctacatcaccacggccttaggcggcatttgcggcataatcggctccgcttacagcgtctcactcaaccccgcagattccaccctggaagcagtggccagagtcggccggtacacattcactgcagctgctattggagcgatgtttggccttaccacctgtgtcagtgcccaggtccgagagaagccagatgaccccctgaactactttcattggtggctgcgcgggaggcctgacattgggagctcgcactcacagctatgggacagcagccatgggctgtgtctacatggcactgcggccgccctgttcaagatcggcaagctggaaggctgggagttgttccctacccccaaggtgtgagccaaacccctgtgacaaataaacgctgtatgttcctgtgaaaaa

SEQ ID NO: 638964 - DNA, 2810 bp, Homo sapiens
tgcgcggcggcggcgcgcgggcgcctggggcgggacttccggcgcgctggagcgttttccggccgtgcgtttgtggccgtccggcctccctgacatgcagccctctggaccccgaggttggaccctactgtgacacacctaccatgcggacactcttcaacctcctctggcttgccctggcctgcagccctgttcacactaccctgtcaaagtcagatgccaaaaaagccgcctcaaagacgctgctggagaagagtcagttttcagataagccggtgcaagaccggggtttggtggtgacggacctcaaagctgagagtgtggttcttgagcatcgcagctactgctcggcaaaggcccgggacagacactttgctggggatgtactgggctatgtcactccatggaacagccatggctacgatgtcaccaaggtctttgggagcaagttcacacagatctcacccgtctggctgcagctgaagagacgtggccgtgagatgtttgaggtcacgggcctccacgacgtggaccaagggtggatgcgagctgtcaggaagcatgccaagggcctgcacatagtgcctcggctcctgtttgaggactggacttacgatgatttccggaacgtcttagacagtgaggatgagatagaggagctgagcaagaccgtggtccaggtggcaaagaaccagcatttcgatggcttcgtggtggaggtctggaaccagctgctaagccagaagcgcgtgggcctcatccacatgctcacccacttggccgaggctctgcaccaggcccggctgctggccctcctggtcatcccgcctgccatcacccccgggaccgaccagctgggcatgttcacgcacaaggagtttgagcagctggcccccgtgctggatggtttcagcctcatgacctacgactactctacagcgcatcagcctggccctaatgcacccctgtcctgggttcgagcctgcgtccaggtcctggacccgaagtccaagtggcgaagcaaaatcctcctggggctcaacttctatggtacatccagacactgaaggaccacaggccccggatggtgtgggacagccaggtctcagagcacttcttcgagtacaagaagagccgcagtgggaggcacgtcgtcttctacccaaccctgaagtccctgcaggtgcggctggagctggcccgggagctgggcgttggggtctctatctgggagctgggccagggcctggactacttctacgacctgctctaggtgggcattgcggcctccgcggtggacgtgttcttttctaagccatggagtgagtgagcaggtgtgaaatacaggcctccactccgtttgctgtgacgggtctgctgcagtcctcagtcgggggtcctgggcaccatgtgactccccatcctcccatgaggggtccctgccctggatgagtcctagctgggggacaccctgagagctcgagcccctcccacccgggcatccgctggctgcctcctgtcagctgggcaggcggggcccacagtacctgccccaccaggacagcctggctcaggcctttctgggctgcttctcacatcctgggctggatgtgggtttggaagctctggaaccatcccggactcgcccactcctggattcgagggccctcgcagggacagctctgcccagcatcaccccagggcctggcagtgatagagctgagagctccacccccacatacctgccacccacctggccagccacagcacgtgtgtcacctgcagagagccacccagacgtccccaccgagtccagcacggcaagggtgcaggggctgccctagaaatggactcagaggagcctggcccaccctcttgaaactggtcctggaccttggctcagctctgccgcctcaggtagcacgacccccaggccagcctggacacatcagggagcatggtgaggggcaacggcaggacccgtgggccatatcgggacaggcatttccagcgaggggtggggcagaggacatgtggctggcaggctacacccaccctgccatgcagcggtgtccaggctctggggaggccctggggaatttggaggcatcatgagccaaggcctggtggccctcgttcccctgcccctcgtcaccatcctgtccttggctggccgtgaggactcccctcctcaccactgggtcccacagggctgaggtgggcagtagagggcataggtgggtacatgtcccgggcaaggtctctcggggggacagaagtgagtccagggagtgggtgggcctgggcgtccctcactcagaatgccgtggggtgaggacggtgaggacagggtgggcactgggttctggtttagagtcagtaatgttagggcgcagtgggcagggggtcaggacatctccagccggtggtgaggaagcatggtggggtctcctccacaggacgggagctggggagggggtcctgggtcggacccaaggcacccacacttgagaaagcctccgcctggacgtcagggaggcctgcgagctgccacagtgcaggtgcagccgttcccaccgccctgctgctgcttgacacgggcataggagatacaagtggtgtgtgcggcggttcatgcctgtaatcccagtactttggaaagccgtggcgggaggaacgctgggcaacatggtgaaaccccgtctctaccccctaaaaatagaaaaattggcaagaaaaaaaacaaaaacaaaaactcgcgtcttttctgggcggaaagtttaggcgctgcatgttctgccttttaaggc

SEQ ID NO: 638965 - DNA, 895 bp, Homo sapiens
gattgctgaggcgcggaacggaggatggcgctggtggcgttggtggctggggctcggctggggcggcggctgatgctgggccggggctggtggcgagggcactggacggcggccatggctgctcccggagccggcgcgaagcggcagaagccgaggcggaggtgcccgtggtccagtacgtgggcgagcgcgcatgcccagctgcctgatcgcggtcttcgtgtggggcttcagcttctcgaggggcgcatgggcagtgccttcctttgtggtgcccagctcctgggccctgggaccccgcgcctggctgccacagaacgggcctgcattgatccagcccgtgccctatcgcctggagctggagcaaacagatttcatctgctgcttgcggctatggagttcaacactgctgtgctcataagactgcggatgttacgaaagtctgggtggatgggacgtcaaggaaagattctcaggaatatggagtataaacaggagccaggaaagataaaaaagatgtggctacgagtatgtgtaggaagagcctcaacagggttaccactgactctggagagaacttcaggaggagaacgggtgatgagggtctccatgagggcagaagaaacgaataacattggatgttgagtggagcaggttcacaggaagtcttaacgggaatgggaaaaaaggagtgacctatcattgggggcaaagtggatgggagaagagagaggatggtcgagagaaatgagagaatatacgagttgaaaaggttaagaggaggatgcgcagaggaagtggagggaagtatagaaatgagcagaggtggggacgcaaaggtcaggcatgatagagagaaggaagtagtaggactggagcgcgtgaacgaggaaag

SEQ ID NO: 638966 - DNA, 1947 bp, Homo sapiens
  misc_feature (1163)..(1163): n is a, c, g, or t
  misc_feature (1258)..(1258): n is a, c, g, or t
tgcgcggcggcggcgcgcgggcgcctggggcgggacttccggcgcgctggagcgttttccggccgtgcgtttgtggccgtccggcctccctgacatgcagccctctggaccccgaggttggaccctactgtgacacacctaccatgcggacactcttcaacctcctctggcttgccctggcctgcagccctgttcacactaccctgtcaaagtcagatgccaaaaaagccgcctcaaagacgctgctggagaagagtcagttttcagataagccggtgcaagaccggggtttggtggtgacggacctcaaagctgagagtgtggttcttgagcatcgcagctactgctcggcaaaggcccgggacagacactttgctggggatgtactgggctatgtcactccatggaacagccatggctacgatgtcaccaaggtctttgggagcaagttcacacagatctcacccgtctggctgcagctgaagagacgtggccgtgagatgtttgaggtcacgggcctccacgacgtggaccaagggtggatgcgagctgtcaggaagcatgccaagggcctgcacatagtgcctcggctcctgtttgaggactggacttacgatgatttccggaacgtcttagacagtgaggatgagatagaggagctgagcaagaccgtggtccaggtggcaaagaaccagcatttcgatggcttcgtggtggaggtctggaaccagctgctaagccagaagcgcgtgggcctcatccacatgctcacccacttggccgaggctctgcaccaggcccggctgctggccctcctggtcatcccgcctgccatcacccccgggaccgaccagctgggcatgttcacgcacaaggagtttgagcagctggcccccgtgctggatggtttcagcctcatgacctacgactactctacagcgcatcagcctggccctaatgcacccctgtcctgggttcgagcctgcgtccaggtcctggacccgaagtccaagtggcgaagcaaaatcctcctggggctcaacttctatggtatggactacgcgacctccaaggatgcccgtgagcctgttgtcggggccagtgttcatggagcctcttgagtctgcattcgtactcttagcaaacttggaaaatttgaggcnaaattcttcaaatattttttctgtttcttctcttctgtcttctcgttggagaccacaaacactagatccattgaatttgtcccacagctcacgantacaccttttacctttggaattctttccccgtgagacggagtctcgctctgtcgcccaggctggagtgcagttgacagcaatctggctcgctgcagctctgctcccgggtcacgccatctcctgcctcagcctcccaagtagctgggactacaggcgtctgccaccgcgccctgctaatttggtatctttagtagagatagggatttcaccgcataagccaggatggtctcgatctcctgacctcatgatccgcccatccttggcctcccaaagtgctgggattacaggggtgagccaccacaccgggctgggatactattttctctgttttcttgtttttaccggaaaacggggtctccctcagaatccaggctgcgtgcacgtgggtgcgaacattgcccacggcggccccaacacaaccgggctgaagccatcctcccagcctcagcctcgacaaattagtcggggaccccgggtgcatgccacctatggccccgcaatttggcatcctccggtagaagacggggttcgcgcccatgctgctcgaggctggtctcacaatccctaggcacaaggaggattcctcccttgccactaccccccccaagtggtggcgaatcgaccaagtgtgacccccgtgctgcgcccgggcagtctaccactccgtcgccaaccgtgccgttaatcc

SEQ ID NO: 638967 - DNA, 1279 bp, Homo sapiens
tgcgcggcggcggcgcgcgggcgcctggggcgggacttccggcgcgctggagcgttttccggccgtgcgtttgtggccgtccggcctccctgacatgcagccctctggaccccgaggttggaccctactgtgacacacctaccatgcggacactcttcaacctcctctggcttgccctggcctgcagccctgttcacactaccctgtcaaagtcagatgccaaaaaagccgcctcaaagacgctgctggagaagagtcagttttcagataagccggtgcaagaccggggtttggtggtgacggacctcaaagctgagagtgtggttcttgagcatcgcagctactgctcggcaaaggcccgggacagacactttgctggggatgtactgggctatgtcactccatggaacagccatggctacgatgtcaccaaggtctttgggagcaagttcacacagatctcacccgtctggctgcagctgaagagacgtggccgtgagatgtttgaggtcacgggcctccacgacgtggaccaagggtggatgcgagctgtcaggaagcatgccaagggcctgcacatagtgcctcggctcctgtttgaggactggacttacgatgatttccggaacgtcttagacagtgaggatgagatagaggagctgagcaagaccgtggtccaggtggcaaagaaccagcatttcgatggcttcgtggtggaggtctggaaccagctgctaagccagaagcgcgtgggcctcatccacatgctcacccacttggccgaggctctgcaccaggcccggctgctggccctcctggtcatcccgcctgccatcacccccgggaccgaccagctgggcatgttcacgcacaaggagtttgagcagctggcccccgtgctggatggtttcagcctcatgacctacgactactctacagcgcatcagcctggccctaatgcacccctgtcctgggttcgagcctgcgtccaggtcctggacccgaagtccaagtggcgaagcaaaatcctcctggggctcaacttctatggtatggactacgcgacctccaaggatgcccgtgagcctgttgtcggggccaggtgagccaagggctctccctgccgtgctgaaggtgtcactgggcgcgggtgggtgtgggtgtaaggaggcagagtgatggggagggtctcggtcccctggggcttctgccccaacagagtcagagataggggctggcccaggagccggtcctgcttggtgccaccccagtggtggta

SEQ ID NO: 638968 - DNA, 1383 bp, Homo sapiens
tgcgcggcggcggcgcgcgggcgcctggggcgggacttccggcgcgctggagcgttttccggccgtgcgtttgtggccgtccggcctccctgacatgcagccctctggaccccgaggttggaccctactgtgacacacctaccatgcggacactcttcaacctcctctggcttgccctggcctgcagccctgttcacactaccctgtcaaagtcagatgccaaaaaagccgcctcaaagacgctgctggagaagagtcagttttcagataagccggtgcaagaccggggtttggtggtgacggacctcaaagctgagagtgtggttcttgagcatcgcagctactgctcggcaaaggcccgggacagacactttgctggggatgtactgggctatgtcactccatggaacagccatggctacgatgtcaccaaggtctttgggagcaagttcacacagatctcacccgtctggctgcagctgaagagacgtggccgtgagatgtttgaggtcacgggcctccacgacgtggaccaagggtggatgcgagctgtcaggaagcatgccaagggcctgcacatagtgcctcggctcctgtttgaggactggacttacgatgatttccggaacgtcttagacagtgaggatgagatagaggagctgagcaagaccgtggtccaggtggcaaagaaccagcatttcgatggcttcgtggtggaggtctggaaccagctgctaagccagaagcgcgtgggcctcatccacatgctcacccacttggccgaggctctgcaccaggcccggctgctggccctcctggtcatcccgcctgccatcacccccgggaccgaccagctgggcatgttcacgcacaaggagtttgagcagctggcccccgtgctggatggtttcagcctcatgacctacgactactctacagcgcatcagcctggccctaatgcacccgaagtccaagtggcgaagcaaaatcctcctggggctcaacttctatggtatggactacgcgacctccaaggatgcccgtgagcctgttgtcggggccaggtacatccagacactgaaggaccacaggccccggatggtgtgggacagccaggtctcagagcacttcttcgagtacaagaagagccgcagtgggaggcacgtcgtcttctacccaaccctgaagtccctgcaggtgcggctggagctggcccgggagctgggcgttggggtctctatctgggagctgggccagggcctggactacttctacgacctgctctaggtgggcattgcggcctccgcggtggacgtgttcttttctaagccatggagtgagtgagcaggtgtgaaatacaggcctccactccgtttgctgtga

SEQ ID NO: 638969 - DNA, 294 bp, Homo sapiens
agagagagggagagggaggtgggagaggatcatggtgatcaattgaagcattgtgaagcacatcatgtcagctaaaccgtgccaggaagccagggaaggtgtgcagggacgtctcatctccatgtgtgatgctgacacagcggctggagtcgtggaaaggaggggagcttacaagatcctggaaaaaccttggacctccacgtggttgcgctctggccctctcaggctgtgcttactgtgacagcagatctgtccccacccatgggctcatgaataaatggctcttgcggctca

SEQ ID NO: 638970 - DNA, 191 bp, Homo sapiens
gacctgaccgaccgctgcagcgcccactcgtaaacacctcaccgctgcagcgctacaaacccagcgctgcaacgtacgcgtcagaagcagcaacccgagagcgatgacgctctcaggtaccagcgctgcagcgctcactcgtgaccgctgcagcgctcacccagcgctgcagcgcgcggccaaaactgcag

SEQ ID NO: 638971 - DNA, 1110 bp, Homo sapiens
taatttcagtgcacggggctcggggttttgagttgatagtctaggtggcccatcgtttgcctagtgtggcatatactgggctatgtcactccatggaacagccatggctacgatgtcaccaaggtctttgggagcaagttcacacagatctcacccgtctggctgcagctgaagagacgtggccgtgagatgtttgaggtcacgggcctccacgacgtggaccaagggtggatgcgagctgtcaggaagcatgccaagggcctgcacatagtgcctcggctcctgtttgaggactggacttacgatgatttccggaacgtcttagacagtgaggatgagatagaggagctgagcaagaccgtggtccaggtggcaaagaaccagcatttcgatggcttcgtggtggaggtctggaaccagctgctaagccagaagcgcgtgggcctcatccacatgctcacccacttggccgaggctctgcaccaggcccggctgctggccctcctggtcatcccgcctgccatcacccccgggaccgaccagctgggcatgttcacgcacaaggagtttgagcagctggcccccgtgctggatggtttcagcctcatgacctacgactactctacagcgcatcagcctggccctaatgcacccctgtcctgggttcgagcctgcgtccaggtcctggacccgaagtccaagtggcgaagcaaaatcctcctggggctcaacttctatggtatggactacgcgacctccaaggatgcccgtgagcctgttgtcggggccaggtacatccagacactgaaggaccacaggccccggatggtgtgggacagccaggtctcagagcacttcttcgagtacaagaagagccgcagtgggaggcacgtcgtcttctacccaaccctgaagtccctgcaggtgcggctggagctggcccgggagctgggcgttggggtctctatctgggagctgggccagggcctggactacttctacgacctgctctaggtgggcattgcggcctccgcggtggacgtgttcttttctaagccatggagtgagtgagcaggtgtgaaatacaggcctccactccgtttgctgtga

SEQ ID NO: 638972 - DNA, 109 bp, Homo sapiens
gtgttctgctctgtttatctctgcttggcgtgtgaccccggctatttatggacactggggcttctggtcttgcgcttccagatctcagccttctctgtgtgtgtggatc

SEQ ID NO: 638973 - DNA, 715 bp, Homo sapiens
  misc_feature (326)..(326): n is a, c, g, or t
  misc_feature (521)..(521): n is a, c, g, or t
  misc_feature (601)..(601): n is a, c, g, or t
  misc_feature (623)..(623): n is a, c, g, or t
  misc_feature (641)..(641): n is a, c, g, or t
  misc_feature (644)..(644): n is a, c, g, or t
  misc_feature (679)..(679): n is a, c, g, or t
gcaacccgcttgggtccccttccacactgtggaagctttgttctttcactctttgcaataaatcttgctactgttcactctttgggtccacactgcttttatgagctataacactcaccgcaaaggtctgcagcttcactcctgaagccagcgagaccacaagcccactgggaggaacgaacaactccaggcgcgcaatgaacaactccaggcgcgccgccttaagagctgtaacactcaccgcgaaggtctgcagtttcactcctaagccagcgagaccacgaacccaccagaaggaagaaactccaaacacatctgaacattanaaggaacaaactccagatgcgccaccttaagagctgtaacactcaccgcgagggtccacggcttcattcttgaagtcagtgagagaccaagaacccaccaattccggacacattttggcgaccatgaagggactttcgcctattgccaagcggtgagacaatcgctgagcagtgagaccatcacctattgccgancggtgaagaccattgcctatcgccaagcaaatcgaggccatcaagctacagatggtcttacaaatggaacccccaatgantcgactaacaacttctaccganggaccctggactgaacanctngcacttccctgggcctaaaaaattcccctctgaangaacctacactgccaaagcccccttcttcgccctat

SEQ ID NO: 638974 - DNA, 284 bp, Homo sapiens
taattacagcacatagggacacttgaggcgggagaatggcttgagttcaggaatacaagaaccagcgtgggcaacgcaacaagacaacatctttacaaaatccttaaaaatcagctgggcgtggcggcacccacctgcagtctcagctactcgggaggttgaggcgggaggttcacttgagcccaggcagttgagacttcagtgactcgtgatcgtgtcactgtcctccagcctggcaacagagcaaaactccttctcacaaaaaaataaaactagtgtagagg

SEQ ID NO: 638975 - DNA, 354 bp, Homo sapiens
ctctctcgctccagcgggctcaggactgtccggtatgcggagggcagcatgcggatatggtttaacgatgaaccgttgcagtgcgccgaagcgacctccgtcgccgatctgctcacgcagctggaacagcagcagccgggcgtcgcgctggcgctcaatcaacgcatcctgccgcatgaacagtggcaagatcatctcttacaggaaggcgatcaaatcctgctttttcaggttatcgctggaggctgacatgttacgtattgcggataaaacctttgagtcacatcttttcaccggcaccggtaaattcgccgcccccgacgtcatggtggaggccattcgcgcctccggcag

SEQ ID NO: 638976 - DNA, 1432 bp, Homo sapiens
tgcgcggcggcggcgcgcgggcgcctggggcgggacttccggcgcgctggagcgttttccggccgtgcgtttgtggccgtccggcctccctgacatgcagatttccacccagaagacagagaaggagccagtggtcatggaatgggctggggtcaaagactgggtgcctgggagctgaggcagccaccgtttcagcctggccagccctctggaccccgaggttggaccctactgtgacacacctaccatgcggacactcttcaacctcctctggcttgccctggcctgcagccctgttcacactaccctgtcaaagtcagatgccaaaaaagccgcctcaaagacgctgctggagaagagtcagttttcagataagccggtgcaagaccggggtttggtggtgacggacctcaaagctgagagtgtggttcttgagcatcgcagctactgctcggcaaaggcccgggacagacactttgctggggatgtactgggctatgtcactccatggaacagccatggctacgatgtcaccaaggtctttgggagcaagttcacacagatctcacccgtctggctgcagctgaagagacgtggccgtgagatgtttgaggtcacgggcctccacgacgtggaccaagggtggatgcgagctgtcaggaagcatgccaagggcctgcacatagtgcctcggctcctgtttgaggactggacttacgatgatttccggaacgtcttagacagtgaggatgagatagaggagctgagcaagaccgtggtccaggtggcaaagaaccagcatttcgatggcttcgtggtggaggtctggaaccagctgctaagccagaagcgcgtgaccgaccagctgggcatgttcacgcacaaggagtttgagcagctggcccccgtgctggatggtttcagcctcatgacctacgactactctacagcgcatcagcctggccctaatgcacccctgtcctgggttcgagcctgcgtccaggtcctggacccgaagtccaagtggcgaagcaaaatcctcctggggctcaacttctatggtatggactacgcgacctccaaggatgcccgtgagcctgttgtcggggccaggtacatccagacactgaaggaccacaggccccggatggtgtgggacagccaggtctcagagcacttcttcgagtacaagaagagccgcagtgggaggcacgtcgtcttctacccaaccctgaagtccctgcaggtgcggctggagctggcccgggagctgggcgttggggtctctatctgggagctgggccagggcctggactacttctacgacctgctctaggtgggcattgcggcctccgcggtggacgtgttcttttctaagccatggagtgagtgagcaggtgtgaaatacaggcctccactccgtttgctgtga

SEQ ID NO: 638977 - DNA, 366 bp, Homo sapiens
gcggtcggcagagaagccaggctcatgctgagccaggctaagctctgaacatttatcagggagacttgatctacttcaatgtgatgtaagaaaatcaaatgtgctttcagcagaagatccagggtaggaaaccaacaatagagagaaatggtggcttctgctgccttacagagtgggagctgtgcctgagccttctgcctctcagcccagagcctggcatttcttgaaccatgagacgtaaagtttattgttgagagcctgagaaactgtggatgctggggacgggtctgtcttccccttcatttcctggtgaagagcccaggctggggcatccacggttctgggcatggtgggtcagaacataag

SEQ ID NO: 638978 - DNA, 390 bp, Homo sapiens
atcactcacagcggtccccctgcctcagaaaatcactcagagtcattcccctgcctcagaaaatcactcacagtcatgcccctgcctcacacagtcacacggttgtgacacacacactgggccgcctgccctggcgctgtgtttgcattttatttattttattatttcatttacacacactcactcagcgtcatgcccctgcctcagagactccaacactatcgctggagtgacaaccaccaggtccccctacaccctgaccttgcatcctactctggttctgctctgaactttaaatggagagcccacccccagaggaaacgtcgtatgaacctctgagacagacgccaccgccgtagacgcggccgcgaatttagtagtagtaggcgg

SEQ ID NO: 638979 - DNA, 225 bp, Homo sapiens
cacgaggtggttctcctgtgatcacaggaatgccgcatcaaatgccacggccatggggtctgcaataccaccaggcactgccactgtgactagggttgggcacctcctctgtgcatgacccagctcagcacatccatctcgctgaccacatgcctgctcctcagcctcctgatgttattgttcctcgtactacttggtgccagttactggtaccgtgtccgcctg

SEQ ID NO: 638980 - DNA, 1304 bp, Homo sapiens
tgcgcggcggcggcgcgcgggcgcctggggcgggacttccggcgcgctggagcgttttccggccgtgcgtttgtggccgtccggcctccctgacatgcagccctctggaccccgaggttggaccctactgtgacacacctaccatgcggacactcttcaacctcctctggcttgccctggcctgcagccctgttcacactaccctgtcaaagtcagatgccaaaaaagccgcctcaaagacgctgctggagaagagtcagttttcagataagccggtgcaagaccggggtttggtggtgacggacctcaaagctgagagtgtggttcttgagcatcgcagctactgctcggcaaaggcccgggacagacactttgctggggatgtactgggctatgtcactccatggaacagccatggctacgatgtcaccaaggtctttgggagcaagttcacacagatctcacccgtctggctgcagctgaagagacgtggccgtgagatgtttgaggtcacgggcctccacgacgtggaccaagggtggatgcgagctgtcaggaagcatgccaagggcctgcacatagtgcctcggctcctgtttgaggactggacttacgatgatttccggaacgtcttagacagtgaggatgagatagaggagctgagcaagaccgtggtccaggtggcaaagaaccagcatttcgatggcttcgtggtggaggtctggaaccagctgctaagccagaagcgcgtgggcctcatccacatgctcacccacttggccgaggctctgcaccaggcccggctgctggccctcctggtcatcccgcctgccatcacccccgggcccctgtcctgggttcgagcctgcgtccaggtcctggacccgaagtccaagtggcgaagcaaaatcctcctggggctcaacttctatggtatggactacgcgacctccaaggatgcccgtgagcctgttgtcggggccaggtacatccagacactgaaggaccacaggccccggatggtgtgggacagccaggtctcagagcacttcttcgagtacaagaagagccgcagtgggaggcacgtcgtcttctacccaaccctgaagtccctgcaggtgcggctggagctggcccgggagctgggcgttggggtctctatctgggagctgggccagggcctggactacttctacgacctgctctaggtgggcattgcggcctccgcggtggacgtgttcttttctaagccatggagtgagtgagcaggtgtgaaatacaggcctccactccgtttgctgtga

SEQ ID NO: 638981 - DNA, 624 bp, Homo sapiens
tgcgcggcggcggcgcgcgggcgcctggggcgggacttccggcgcgctggagcgttttccggccgtgcgtttgtggccgtccggcctccctgacatgcagatttccacccagaagacagagaaggagccagtggtcatggaatgggctggggtcaaagactgggtgcctgggagctgaggcagccaccgtttcagcctggccagccctctggaccccgaggttggaccctactgtgacacacctaccatgcggacactcttcaacctcctctggcttgccctggcctgcagccctgttcacactaccctgtcaaagtcagatgccaaaaaagccgcctcaaagacgctgctggagaagagtcagttttcagataagccggtgcaagaccggggtttggtggtgacggacctcaaagctgagagtgtggttcttgagcatcgcagctactgctcggcaaaggcccgggacagacactttgctggggatgtactgggctatgtcactccatggaacagccatggctacgagtgggcattgcggcctccgcggtggacgtgttcttttctaagccatggagtgagtgagcaggtgtgaaatacaggcctccactccgtttgctgtga

SEQ ID NO: 638982 - DNA, 252 bp, Homo sapiens
tgccctcaggtgatccgcccacctcggcctctcaaagtgctgggattacaggcgtgagccaccatgcctgaccttatgtacttatatttttatgagaatatttctcttggttttctgataaatgagttactggcacccttatgaatttgaatgcaaatgaaacagctaaatgttatataattgtcgtgtttaaaaagcagattataaaactgtctgtattatatgattacagttttataaaaacaaaaaaaa

SEQ ID NO: 638983 - DNA, 173 bp, Homo sapiens
tacgcagcagctgaagtgggattgcttgatcgctggaggtggtatgaggtgtagtgagctatgattgcagcactgtactccaggctgtggcactgagcaagatggaaagaacaaggaaaaaagatggctgggcgcggtgcgatcatgcctattatcccaccacctcgtggggc

SEQ ID NO: 638984 - DNA, 343 bp, Homo sapiens
ttttggagaggatacagaatcgggatatgtgtgtttgcttctagtgatccacattctcctgtgtggatgggtggcccccagggctatgtttataggatggcaggggcagggaacctggggaaggtttgtgaagcacccaggaggtcgcgcctcagaagaggagcctgcaggctgcctccaaacggatggattccgtgatgccccagagggcagaagactagactttagaaagagagaaaggacagtggcctatggagcccagagcctgggatttgaggcctgacctacctctccctgactgtgtgactgtgagccatcacgtacccaccccgtcgggtggagc

SEQ ID NO: 638985 - DNA, 525 bp, Homo sapiens
agaggaaattcctttgcttcttaaagctgccagtcccggctttttgggggctcatgtgttataaattctggaagctattttagctgcagtttgagcatcaggctaatcttcttcctcttcctcggttcgcttgtgttttagaaacaagtcagactttaagaagcggctgtagctgtcgtagttcatgagattaaagatatggtcgtggagtttctggaacatcagagggtgaggttgttccaggatcttctcgttgagcagagactgcccctccacgttgacctgtgatcaggcagtgctggacaggaaggtcatgtagatttcatttaccttttcgtgtatgtgggtcttatcttgcattttgttaagatcttcagatgctagccgacacacagcattttgtgcgctggacccctctatccacagaagcatcagtagtaggccaagcagtgcagtagtaggaggcgggcccagctgctcgacagcagtcccggcagctccttgagctgttgttgcagccacatc

SEQ ID NO: 638986 - DNA, 418 bp, Homo sapiens
ggtgttcgacatgttggctaggctggtctcgaactcctgacctcatgatctgcccaccttgtgctcccaaagtgctgggattacagatgtgagccatcgtgcctggacatgtgcccactttttgatgaggttttttcttttcttcttgctgatttgagttttttgtagattcaggatattagtcctttgtcagatatgtagtttgcaaatattttctcccattctgtgggttgtctgtttactctgatgattacttcttttgctatgcagaagctttttagtttaattaagtcctatttatttatttttgttttgttgcatttgcttttggggtcttagtcataaattccttgcctaggtcaatgtccaggcgagtatttccaaggtttacttctagaattcttatggtttcaggtct

SEQ ID NO: 638987 - DNA, 425 bp, Homo sapiens
atgcatacgtccacaggcctctagagcacaacgtcgtagactgttgccaaagatgttccccctggcatgtgcgctggtggccttcgctctcaacactcctaagacatgtaacaggtaagcccacgacggaaacaccttactccaagctggaaccaaagacaatcttccctagggattttttgttacactacgaaatgagacaagtggtagactgtttctaaaattcaaatgctgttaacaagccatatttactgctttactgagaaactgcaccataaaacaacaacaacaaacaaaagccactggaacagaggtaaagcaagaccaagacgtaaagacaataatgaagggtattcaatatccagtcccaattgtttctgaagcctaactcattccttggcctctctgccattgggttatttgct

SEQ ID NO: 638988 - DNA, 1015 bp, Homo sapiens
  misc_feature (137)..(137): n is a, c, g, or t
ctggctggtaactctcagctgccctggccaataactgacatgtagaaggagggtacaaaagacgggctcccttgctttaaggaggcctaactgtggtgccatttgtgctcagagttccccatgagagcaagcggaantaggtctccacgtgagaccacactctggctcagccttagcctttttctcgccctgtcttgcttccctcacccccttctcctgagagcatttccccaataattcacttgaacaagaatgctcagcttaggctctgcttctagggaacctggacccatgacacgctctgttagcttcctgagagactatcttgttagttcccctaggaacaaattcctgtcttgggactctgcttatgatcactcccttcattcccctgccaagaatgacagctcagtgagggaatatgttcttcacttccctagaactgttcctagaacacagtaggtgctcaatgatgcactgaatgcatgcatggggagagcccagagtctatctgacagctcagcggtcagcaccccttcttgtcctggggtggcctggcctggaggcattgtgagtcatagcaggtggacaagagctgagtgggtcagagatgggactagccctgtggacagcagctcagcaactccaccccatcttccaggtgaggaacaacatacagtgaggactaacggggaaacatcctccgagaagatacaatctcaagggtgggcctggatgtgggcttccagagaccatctccctgaaccagatcttggggatgcagcgccccctggctcgccttcatcattctggacatccgggctcccgagacaagagcgcagcacgagtcgccagcgctcccgaggctccccttcgagcacctgcgtgccctacaaggtccacgccctggcaaccttcgagtgctcggctacgagccatgccagccgcctgtggcagacgctgcagcagttttgggccgatcacatctcgcggcccttctcgccacggcggccgc

SEQ ID NO: 638989 - DNA, 734 bp, Homo sapiens
gacagataaacactttgtttattcatcctcctcctcatctcctcctcgtcttcatcttcctcttccacctttttccaggcaactttagcaggacgctttgagccatcaaacttccctttcgacttagaatcagcaacatccttctcgtacttctccttcagctttgccgtcttagtgatgtaaggctgcttttcactgtcatttaagttattccacatctcacccagcttttttgccacatctccaatagagatgccagggtttgtggatttgatcttggggcggatttccgaagagaacaggaagaatccagatggtggccttttgggggcactaggatccttcttcttcttgcctcccttagctggtcccttcatttcccgatcacagtgcactttatccgtctttgccatttcatcaaatttagacttctctttcccggacattgtcttccacctttcagagcacttcttggaaaattccggactcttgtctcccagcagcgccccctggctcgccttcatcattctggacatccgggctcccgagacaagagcgcagcacgagtcgccagcgctcccgaggctccccttcgagcacctgcgtgccctacaaggtccacgccctggcaaccttcgagtgctcggctacgagccatgccagccgcctgtggcagacgctgcagcagttttgggccgatcacatctcgcggcccttctcgccacggcggccgc

SEQ ID NO: 638990 - DNA, 515 bp, Homo sapiens
  misc_feature (54)..(54): n is a, c, g, or t
  misc_feature (57)..(57): n is a, c, g, or t
tccttacccctcacccttccagctgcaactcagaacaaggccctcctcccgtcnttnatctgcatatgtatcccagggcctgatcctcagtggtctttggggaagatggtttaggtgagactgctgcctgtgcagcgtggaacgacgggctcctcggtggccagcagctggtgagacacagccgcagccgtagctgcagggctaagacatgtccgccggcctcgcggtttgagaggcggcctgtaccaagcacgctgctcacccggactcttgtctcccagcagcgccccctggctcgccttcatcattctggacatccgggctcccgagacaagagcgcagcacgagtcgccagcgctcccgaggctccccttcgagcacctgcgtgccctacaaggtccacgccctggcaaccttcgagtgctcggctacgagccatgccagccgcctgtggcagacgctgcagcagttttgggccgatcacatctcgcggcccttctcgccacggcggccgc

SEQ ID NO: 638991 - DNA, 1374 bp, Homo sapiens
tcagcccccactaaccaacggcacccgcacacacgcgctcccgcgccgccaaacggcacgcccccacacgcagccccacgcggacctactcctacccccctgcacgcgccctgctcgcgcctccacacgctctactaccacgcgcctctctccctgcgcccccagcacacgcacaccccaacaccatcccacccacctctccacacctccacgcgcctctgcctgctctgcaacgcacgcgctctgctcctacctgcacgcctccgcccaccccacacccccggccccgcccctcctgcctccccctcttccccccggcactgcactccccgcgcacacgcacctgcacagcctctccccctgcgccccggcgcaaacacacccaacacgcaccgcgcctcgcctgcgcctctgctgcgcgcgcacccaactacaccctgcactgcactgctgcccgcgcgtctcacgcgcacggcgcctaccccccacacacccctgcacacgcgcgtactgctgcaacactgtccgcccgcctgcaccccaggccccggggccccccggcccaggaccccagcccacttcccctccagcggccccccgcggccggcgcccaaacggcaactcccctccaccctctttttccgcagcccccaagccccatgcgccccccgatgtgcaacccttcccccccctcacacgcggctctgtcttgccgccccaccctgcttcccaatggcccctctctcccagacgccctccctccgcccacaggtgtcggcccgcacgcaagcggctgctatccccgcgccccacttctctcccgcgcccaacgggaccccccccaagcgcaaacccacccgaccaaccaagccaccacccacgcccaaaaacccccgttaacgcctccccggcccctccccaaccgcgcggcccgcggcaaagccttccagaaggccgctgccccacgcaacgggcccccgtacccgtgggcccccaggccctgcacggggcctaccacacaccccacccttacacgccccttgggcacatcccttagcgtccttctacaattctaacacacccacgcactccccactgcccttgcaccccaccccacccaccaaccccgcaccaccccgacgcataaccacacccccgcgcaacgccccacaccacaatcggcactccaccgacctgccggacaccaacccacgacgccgctcccccgcacacgtcggtccccccccggtggcgcccaccaacccagggctcccgcatggtgccccccgcaccactccctccacccccccccgcgcggccaacacctcctgacccgccccaccccacatacgcgaaccccgactactcacacgc

SEQ ID NO: 638992 - DNA, 670 bp, Homo sapiens
acagcctggccggcatggggaggccgcatctctactgaaaatgcaaggattggtgggtgtggaggcgggcgaatgtggtccctcagcctcccgagtagctgcgactacaggcgagtgcctccatgcccagctaattttttgtgtttttggtggagacggggtttcaccatgttggccaggatggtcttgatctcctgaccttgtgatctgtccaccgcggcttcccggggtgctgggattgcaggtgtgagccacagcgcccggccaaaaaaaggaatttttaagaggaaaaagaatgctaccaacctaaccacatttctatgactgtttatatttttccctgttccacatacatacatttttacatagtacgttcattgcagcatgagttacttttcacttaataaattttaaacattttccagctgggtgtggtggctcatgcctgtaatcccaacacttggagaggccaagtcaggcttattgggtgagtccaggtgtttgagactagcctaggcaacatggcgaaactgcgtctctacaaagaatacagaaattagccgggtgtgctggtgcacgcctgtggtcccagctgctcgggaggctgaggtgggaggattgcttgggccgagtgtaggtgtctgggtgctgccaggaaaaacaacctaag

SEQ ID NO: 638993 - DNA, 170 bp, Homo sapiens
gaaaaacatgggggaaacagatgcctcagcctactttcacactaaggaaaaaaacttgttcttcccttctgattagatggtgctattttgctttgttttgttttggttttgttttttttgtaggacaggaatctcggctcttgtcgcccaggcttggggtccagtggcat

SEQ ID NO: 638994 - DNA, 1818 bp, Homo sapiens
  misc_feature (211)..(211): n is a, c, g, or t
ggtagtctgttgagtgggagatccttggcggcgtctcttcgcctcctatcaccgccgcagtacgcccttcaaggtcctaagtcattggcgtgacgttgcaatctcctagtctcaaccgtgggcgcatcggctgggtagtactagattcgcgcaagtagccatagcgtaggcgagcttctaacctgccttaggaagcagcgggctatcgcangccgctgagtaggccacgagtgctcgataggatgcagcgaatggatccaatttgcggtgcgagagacgtagtgtagtgtccattccagagcagcaattctctctgcagctggaaagcgaggctcggcttgggcaacacgatagtgcgcccgggcgcacgtgataatcgtcatcaacgttggacaaacgcgcagcgagtatcagtctgccatggaatgtcttgccgtgacatggactgacatgtagcgcggacgaaccgtacgtatgccaaagcacttgcatgcattgcttcgagtcgacacgtggcgaagggtaacgaatgtctggccaaagtaaacttaatgggacccaggaaaggggtgggaccctcaagacgctcaatttagtgacatagagggccagaaatcctcaatatagggactcgctcaggctggcatcagtggaatagacggtcacaatttccagacctgcaagacagtgagactttcgagacccgagaaataggcatagccaggaattcaattttcccaaaggcgcccactctcctatagaagctgatttggtcacacagaacgaaagaatgttatctcgggaattggggaagcggcgaaaaaaacatttttgggaatatgcaattggggagtggataaaccaaacgtccgtcacagagccggtatggttcacgtacacaaattgaggggaagaaaccgggaatataatttacaatacagaagaggttatcggaacctattcaaatttagggcgccatcaggagaaaaaagggtttctccaaaagaggaacatttggggaaaaaggattatcacattatagaattgttgtgaaaagccccacgaagacgaggaccaccaacacaagggggaattcagacccacacgcaagagagatgagagacaagagtgtgggcaagtcacacccgttaaccacaaaagagtgagcaccagaagtgaccaatagccaaacgcacgaggacgcgacaagcagcaacgcaaagaaccccagtggaggcaacgaccaacctctccttggccagttcaggcatgtgacccactctagcgcaacatggggattgcaagagacagcagcacaacaatgggcacaggggagcacccacatttactacaagtttgcacacacattacctgtggatagcggtcagaagagcaaaaaagacgactcatgtgagcaacattatttctgcgaaaggcaggaggcaccgccaagacaccttaaactcgaacagtatcaagaccttgtataaacacccgactgcagttgataattagcagaccaagaaaatttggagtggatttacccttaccacagttagccaggtgagttctacccccacttgcaacaaatgcattgcaacatctgacgaagaacacccgtcgcaagacatgtttatgacaccagttagcagaagctaacaattggctccagaaaccacaaaacaccttggtgttgagcccctagtgacgaccgagaatgtttcagcaagttcacgatttggtggacacacgatttgtgacgaccagcgatcgaacacactcggtcgtgaagaaaacgacaaatacagagagaacagg

SEQ ID NO: 638995 - DNA, 115 bp, Homo sapiens
ggatttgctggtgcagtacaactaggcttaatagggacatgggtggtgtctgagaggcgtgaagggcctggagccactctgctagaagagaccaataaagggcaggtgtggaaaa

SEQ ID NO: 638996 - DNA, 548 bp, Homo sapiens
  misc_feature (109)..(109): n is a, c, g, or t
  misc_feature (182)..(182): n is a, c, g, or t
  misc_feature (224)..(224): n is a, c, g, or t
  misc_feature (263)..(263): n is a, c, g, or t
  misc_feature (281)..(282): n is a, c, g, or t
  misc_feature (421)..(421): n is a, c, g, or t
ggcacgagagcaaatgagcccttgaacagtcctaagagaccctgaggattctgtggagtagtttgaaaaccattgttctgaggaagggggtccaatcatggctcctctngcacataaagctgcgaactcatggacaaagagggcaacgtgtggcggtagacaacgccatgcatgtctccatngacccactagaggtggacaggacaggttcctgctggtgcccntgtggacttacggctaactatttgcatgtcagacagggncgacttaagccatccagnngcggttttatagtaactagttgcccacccaacataggttccttttaacaacacacactaacggaacatgtgacgggtagtacgcgcagcatgcaggagcagagcactgacacagagggcagcagccgttcatctttagncaaggatgtacagggctatacattcacgttacactcaagacaacaagcacacaacgcagaacccgttcaccaagggcttcacgactacagtcctcgctcctccatcctgggtccccaggcttcccgg

SEQ ID NO: 638997 - DNA, 334 bp, Homo sapiens
gcattcttctagcccacactctcaagtagctgggaatacagacgagtgccaccatgcttggctaataacagtatcactctcagagatgggcgtttcaccatgttgctcaggctggtgataatatatttttaatcggtatagatatttaatggcccgtgctcagaacttatatattgaataaatattccgtgtttcaaagagggtcatacactcaaataattctgaaatgtccacttttatcactgtgattattttacattgcttacattgctatccacaaattacgaaaatcttataataccatctgattagttctccacaaggtggttcgatc

SEQ ID NO: 638998 - DNA, 1166 bp, Homo sapiens
atttagaagaaagatgtttggcgtagccagcagttaacatctccaaataggctcattaacacacaagtctcacaaccatagcagcatctgttctgtggctttggcacatattcaacacaaacttcatgtcaatccttattttcaacaatttcatcagctgtacttcttgcaatatcaaacacaatccatgcccagtcattcttctcaaacggcatttagagttcaactacagcaaaggcaggcttgcccatgtacatttaacatttctttggcaccttgccagttccaaacatattagtgccccaccaagtgctgcagacagtgaatcttgggcctgctgtacgccctatttctttccagatctgcgaacatgtgttagctgcaaaaacataatcatgaaccaatctggatgcctcattatgtcaaccaggtccagatgtgctcataatctgtcttcaccgtatgtaggcccagtcgtcatcagatgcttgcggcaaaaggaaagctgtgtctatactggccagaaagtacaggtgctcggagttttacctgggcttcattctcaatactgcttactaactctagttcacacgcacccgggcacgcgaacaacaaaaaccgaagtggccacactaccctgacctcgggcggctggacgtacccagattaccgcctttcacgtcacgaaaacccctccatgtggtttactacccgggagcagcaccaatggtcatctgggctgacaaccactttacccgttcagcagcttgactacaacggttattggcaccttaaaccgtattcactgcctcattaacagtggcttgccttggcattgctcacaagcgctttgactctactaacgccacttggctctctgcatgccacaaacaatacgcaggatgctcccaagcgcatcgtgtcgacgggcgaagtttctctaacaccgctgtcaccggtttcccactaaagcctcagcccttccactcggcaacgtcggtcaatcagcacgtcgcttacagtcatctcgcctatctataccacctaccgtcagatctccacctacttgttcatagcgcacgtctataggctagcctgtctcagtcagttgtagcgcatagcacaagtcgtgcgagcataagacggctacctctcgaccagcctta

SEQ ID NO: 638999 - DNA, 350 bp, Homo sapiens
  misc_feature (2)..(2): n is a, c, g, or t
  misc_feature (5)..(5): n is a, c, g, or t
  misc_feature (9)..(9): n is a, c, g, or t
  misc_feature (13)..(13): n is a, c, g, or t
  misc_feature (34)..(34): n is a, c, g, or t
  misc_feature (102)..(102): n is a, c, g, or t
  misc_feature (106)..(106): n is a, c, g, or t
  misc_feature (120)..(120): n is a, c, g, or t
  misc_feature (152)..(152): n is a, c, g, or t
  misc_feature (334)..(334): n is a, c, g, or t
cnggngccncgtnatcacgccactgcactccagnctgggcaacactgagcactgagtggacgaggctccgtctgcaatcccgggacctcaggaggccgaggntggnagatcactcgcggntaggagctggagaccagcccggccaacacagngaaaccccgtctccaccaaaatacgaaaaccagtcaggcatggcggaacgcgcctgcaatcccaggcactcagcaggctgaggcaggagaatcaggtagggaggttgcagtgagccgagatggcggaagtacagtccagcttcggctttcacaactttggtggaatcagagggagacgtagngggagagggagaggga

SEQ ID NO: 639000 - DNA, 290 bp, Homo sapiens
gtgggcctggggagcctgtggaagcggaccccgcctgcggacaggcaggcggaagccgagagagagtcgtgacttcatgcacaggttctcagcattaacgagaagcaccttactgagacgtgggccaaaccaaatccaccaggtcggctgctgggctgaggtgcctacagcatgtgccctccaggtgcccctggttgactcaagagaaggatgccatttgactgagccccgcctcagagtaggagctggtggaggggtgaagaggctgtaaaaatcacagacatatgctg

SEQ ID NO: 639001 - DNA, 249 bp, Homo sapiens
  misc_feature (3)..(3): n is a, c, g, or t
  misc_feature (84)..(84): n is a, c, g, or t
  misc_feature (194)..(194): n is a, c, g, or t
  misc_feature (234)..(234): n is a, c, g, or t
aanaaaaaaaaaaaaaaatccctgaacgcaattgattctcctgtctcagcgtcccaaagtgcctgggataataggtgtaagccnccatgccctgacactttatttttatttatttatttatttagttattgagacagagtttcgctcttgttgcccagactggagtgcaatggcgcgatcttggctcactgcancctgggaggcggagcttgcagtgagccgagattgcgccantgcactgcagcccgg

SEQ ID NO: 639002 - DNA, 572 bp, Homo sapiens
  misc_feature (381)..(381): n is a, c, g, or t
  misc_feature (507)..(507): n is a, c, g, or t
cgcattctttccttccaatttccaatccagaatcttttgtccgcagtccttttttattttccggaaccaattgaagattaagggaatttcttgccgataaccgaagacaccccgctcttccttgccagcactggaccggcaaagatccatcacgcaaaagacaaaatattgtccaacaccgccatcgttgtccgtcgacaacgcttcatatcaaataattttcaactgacaggaaattaaataaggcatttcgccaaccccgatttaccgcgcaaacgattgcgaaaagcatacaaacgttttactgcgacactttgccaccctcattaattccaattcattgattaatccgatcttcaattcccgatcgtgaatttctcncatgcgcggtcgccgacacgaaatgtgcggccagaatggccgggagaaaaccgcgaagatgcgcgcacacgtttgcccggagggcgacgcgaacggtcgccggacagggaatgcggcgcagcgcanccggcgccctgccgcgagatgaaaagacatctggatggttcgctggaccgcgagaggaagcgccg

SEQ ID NO: 639003 - DNA, 838 bp, Homo sapiens
  misc_feature (3)..(3): n is a, c, g, or t
  misc_feature (66)..(66): n is a, c, g, or t
  misc_feature (109)..(109): n is a, c, g, or t
  misc_feature (118)..(118): n is a, c, g, or t
  misc_feature (140)..(140): n is a, c, g, or t
  misc_feature (165)..(165): n is a, c, g, or t
  misc_feature (186)..(186): n is a, c, g, or t
  misc_feature (196)..(196): n is a, c, g, or t
  misc_feature (215)..(216): n is a, c, g, or t
  misc_feature (238)..(238): n is a, c, g, or t
  misc_feature (296)..(296): n is a, c, g, or t
  misc_feature (311)..(311): n is a, c, g, or t
  misc_feature (315)..(315): n is a, c, g, or t
  misc_feature (337)..(337): n is a, c, g, or t
  misc_feature (351)..(351): n is a, c, g, or t
  misc_feature (388)..(388): n is a, c, g, or t
  misc_feature (393)..(393): n is a, c, g, or t
  misc_feature (428)..(428): n is a, c, g, or t
  misc_feature (433)..(433): n is a, c, g, or t
  misc_feature (435)..(435): n is a, c, g, or t
  misc_feature (437)..(437): n is a, c, g, or t
  misc_feature (454)..(454): n is a, c, g, or t
  misc_feature (457)..(457): n is a, c, g, or t
  misc_feature (459)..(459): n is a, c, g, or t
  misc_feature (462)..(462): n is a, c, g, or t
  misc_feature (464)..(464): n is a, c, g, or t
  misc_feature (468)..(469): n is a, c, g, or t
  misc_feature (480)..(480): n is a, c, g, or t
  misc_feature (484)..(484): n is a, c, g, or t
  misc_feature (490)..(490): n is a, c, g, or t
  misc_feature (493)..(493): n is a, c, g, or t
  misc_feature (501)..(501): n is a, c, g, or t
  misc_feature (511)..(511): n is a, c, g, or t
  misc_feature (515)..(515): n is a, c, g, or t
  misc_feature (538)..(538): n is a, c, g, or t
  misc_feature (626)..(626): n is a, c, g, or t
  misc_feature (630)..(630): n is a, c, g, or t
  misc_feature (833)..(833): n is a, c, g, or t
tcngtacaacgtttgccaccatcaatatacttgaatcttgatacaaatttacaccagtgtctatantttaccaaataatagttgactaactaaagttcatcaaaatagntgttgtggngtgggaaagacttttacccaantaagtacaaggaaagttacaaaccngacctccactttctaaaaatnagaagtttantcagtcttagaaaactacnngctagcaaatgtacagagagcnggctggtgctaacaccacagttgggacagatgtctttttaagggtctatttttaaagnctgttgccattggcngatnctcggtcacttgcttcttttcnaggccaaaaacacnatacaaggtctggccatttccccaggtcatgcttacnagttnggctttatgtacatttatcgcatatttaagtgctnggtanangncttgtaaaatttccagnacnancangnttannacgtttaactntccnagtaanagntgccgaanaggttaacantaanaactttcaagtgtaatagtgcanattccctctgcgtgatttactgcagagaaagattctttgaaattacattttttcttttataggtttgttgttaatatttaggtatttnttgnagttactgttaccaccctaggacttccctccctagcaaataaagtgatcatttacttggactcacaggctattaaaattaatcattgaaaggtactgtccaaactatggcactgtcacttaaaatttttttttttttttaccattctatcttgtgccagatcttcacagctgtgacatggtttaaattccataatccatcccnagagg

SEQ ID NO: 639004 - DNA, 1698 bp, Homo sapiens
  misc_feature (1474)..(1474): n is a, c, g, or t
cctgtgtatactcgccgaccccccttcctcttggtgtgtggagggtcgcgcgctacgtgcgatcggaccgcttgggctcattatctccgctccgtaagttgttcaccggcgtgtttttctcagtagatagtgtccgtcacctccctcgctggtgctgaagtactagtcagtgttgtcggcgagtaaactacgcccggcctctgtttgttgttgtgctggaagaaagtaatacgctcgcccctccgtgagtttatatatgccgcccgctgggtgggccgtttgttgtgtgtggtgcggcacgaacacgatgcccgctcgtcgtgtttatttgttctccccgccgacggcttctcttcattcaactcacgagggaggggagctattataatttgtgccgcaaccccgctggtagaatgtatttccctcgccctgtgttgtgtgacaccccccccggcgggaggtgggtgtgttgtagagaaagttgtaccccccccctcgtgtggacagcccgcttgttgaagaaatttggtcgtcgtcgtccctcccttctgtgaaatgcattcttctctcgcgcctcccctctttggggggtgggcacaacaaaaaaagaggaggaaaaggagttctctcctgccccccgctctgtcttattatactataagattattcctgtatgatcaagattacaacctccccttctcccgcttgtgggggaaccacttctgtgtttcccccaacaaggagggatgtggtgtcatataggtgatagaagtgaatattgttgaagaggcgcaattctttaggaagagagggaattatttgtcctctgtgtgaacacattgttggggagacccttccccccaagaagagtggttcctccctcaatactcttgttctctcacaaaatagtgggggttgtgcccaacacgggtgagaccggggggggcgccgccctctctcccctctgtttctttttgcacacaacggacacacgagttggggcgcccttttggtgttatatagtcggagataatagaggttgttctccccctttctcccctcccacgaggcccacacatcgccacagcagagagagagcgctttggtgttacagctctttttgtatatctccctcacagtgggtgcccccaccctatactgagagttcacaataacatgtgtttctcccacacactagtgttgcgctcacatctctctctctctggggcgcacacacatctcacgacctcacagcccccacatactcacagagaatagcccacagagggtttgctctctgtcccttgagcacaacacccattttttctacaccttctctcacacattctccacacactgtttgagacacacacacctgagatgtagatgtttgatgaatactttgtgcccaacacatatttctccttacacacaacagccgagagatgtctttgtaggaaaccctacacacatnttgggaccaatagagaagagctgcttcctctcggcctcacgggcaccacactcccttctttcctctggcttcctcgctttttttttccagaacatatatatataccacacacttaccaacattttatattcgggaagaagaggaccggggtggacctgaatttctgtttccctgtttttttggctgaagtctaccctgaataaaacccttttttccctggccca

SEQ ID NO: 639005 - DNA, 179 bp, Homo sapiens
attttcccttttgaaaattccaagaagcttaatataaaggttggccttctcctcaggaaaaagcctctttttggatatgttttaaatggatttttgtccccatatccagaaagtttttaattgtttttcccgtctgtaaggcttgatgttttaaaataataccctttttatatttttta

SEQ ID NO: 639006 - DNA, 176 bp, Homo sapiens
gtcggacgcatcttccctgatagtcactgtctatatcaattacgaactagcaagctacacctcatatctctttcaaactctgggtcacgaaatatacttgatgggtcacagtcagcactgtgtcgatgaaatagaatggattttttttttttttctggcgtgaaagagggaaggag

SEQ ID NO: 639007 - DNA, 105 bp, Homo sapiens
ccatgactcttttcttcagtcctctcaagtagctggatacaggcgcccatcatcagacccagctaattttgtatattagtaaagatgagtttgtgcgcgcgtggg

SEQ ID NO: 639008 - DNA, 128 bp, Homo sapiens
gcttattgtctcctactcctactctccctcctccccctcctccctcctcttcctgtttctccttctctatctccccctgaccccttactctcacctcctatacacctatcaatggacactgcatcaca

SEQ ID NO: 639009 - DNA, 166 bp, Homo sapiens
gactctacaggatccccacgtagagccctgggcatagcatggtcttagtcgaattagtgatgtagctcttagcctctttgattttgatcaataattcgctggccatcattactttattgaattattgttgcaaccccaatgagaatacacaggaacaataaaaaaa

SEQ ID NO: 639010 - DNA, 918 bp, Homo sapiens
tgaatggttctatcaaatataatagcattgaaacattttctaatagttatgatacttatacatgtgctttcaggaagttccttggtgaaacaatgttgaggggggatctaggtaattggcagattctaaataatataatttccagatagtaattttaagagtactcatcgctcttgccaaataagttcagggtattcaaatcttggactagtctctggaaggggatataagagatataaatatcagatgagatatatgttgaaacacagagtattattattatatcaggtggggaattgtggtgttgtgtgatgatggaagggtagggacaataatcgaccatctcaaagccttgacataagagaatactggacttgtttcggtatgatgatcactcagaaatggacggatatcataggaaaacagaaatcctttggaattttacctaagaatcactgcatatgggcaacttcacgagatccaggaccatatttggatccaggcgttcctacacactactgtagttattcatgcaaagacgctcatgtatctgatcctaattactaaaattatttaagataatctatttaaccgtgataaattattgtattctaggtgcaacaaaggacacaattttatggtggcaagtccaaaagcaagtcctaagggggataaatgggtcggcccagaggtccctgctacatgaacatactgacacaggaaccaccgtgacgccatgagggacgagtggggcaccacacgctgatgtagcgcgccacggacgaaaaccaggccacacccaagcgagcagaccggcccaggggagtgcttcacgacgagcacagagaggagacaagacacaacggcccacgggaagacgccacacgaaaacgggctagacaccaacagcgagagacg

SEQ ID NO: 639011 - DNA, 363 bp, Homo sapiens
agacagatacaagtcgagctcggtaccggtgtttccctttgtctggtttcaccctatgggacactacccagtgcatagatgttcagaaatgaaactaaaggcctccctagttttctccctggattactcagtggtggcaaggaaatgctcatttgtgatccttaattatttttttgagacagggtcttgttctatcacccaggctggagtacagtggcacaatcatggctcactgcagcctcaatctcccagactcaagcaatctttcagcctcaacatcctgagtacctgggaccaaaggcacactccaccacacccagctaatttttaatttttttttgtagagacaaagggaaacaccgg

SEQ ID NO: 639012 - DNA, 81 bp, Homo sapiens
tcagccctgtacttctgtgccagcagccaaagcaggggggggtggggcgcctctggaaacaccatatattttggagaggga

SEQ ID NO: 639013 - DNA, 824 bp, Homo sapiens
agcggggttccctctccggggatgcggcggcggacgcgcggctcccagccgtgccctctcacgggctctcccctccccagtgtggccggagcctacctctgcaaggcgatggcccgcgccccgagcgcacgctacgcgatgcctgggatgcccggccatggttttgtatcggctctcggagcccgcgagggatcaggcattatctggggaccaacagcctggaccgaggctcagggcatagcagaccggctgcctccagctaacaggtgaatgtaggacgacaacagacgcgatgcatgcccaagtcccggcagaagcacataactatcccaggagatcagcatgcggctaggaccaggatcctccctgcactggtatttacccacgcgtggtagaaggacccaacgttgaccaagcctactcgcccatggacccaagggccccgacgtgcgcaccagcctacactcgcgagtgggaaacgggcgaggcagcacagcaccgacagggacctcaaaccctgccaggacccttgggacatcgacacactacataaccatgccctgaataacacgaacaccgtcccacgaccgaaaggggccagaaaacaaaagaagagccgtcagaccaaacggcaaagccaacaggaagatggcgcatagaacgcaacgagctagcacacaaaaaccgaagacgagacagccccacaaggcgataccgcacagccaaaatggaatcaaactaacgaagaagaggaaaatggacgccaggacaggggacacgatcccacacatgcaacacgcaaacaacaccactaatcgaaccag

SEQ ID NO: 639014 - DNA, 510 bp, Homo sapiens
ggtcgacggttctcagtcaatgtgttaacaaaaagcagagtggatcactaggtcaggagttcgagaccagcctgatcaacatggtaaaaccccgtctctactaaaaatacaaagattagctgggcatggtggcgctcgcctgtaatcccatctactcgggagactgaggcaggagagtcgcttgaacccgggagacggaggcagcagtgagctgagatcacgtcactgcactccagcctgggcgacaaaatgatactccgtctcaaaaaaaaaaaaaaaaaaaaaaggcagaatgtactcatcccttgggtatttgtaggggattggttccaggacccattgggaagctcaagttttttaggtaaaattgactaatatttgcatataacctatgcacatcatcgcgaggttgtctataatacctaatacatgtaaatgcgaggtttttgttatttactatattgctgagagatggtagaaaaatgtggaaaaggttcattcagcccggct

SEQ ID NO: 639015 - DNA, 1309 bp, Homo sapiens
agcggatattagcatataatgagcaactatgtgggtaggagttttattctgggctctcagagctgcaaagaaagagcagcagacaacagcagttctcaaaccatgggtgccgcacagcaacaagcactccagaccgattcattaccagccaatgcacacagcaacagcaatgcaagcatccagggcagcaaacaaccgggccaagcacagtcatttgcaagtcaatcccaggcaacatgtttccagcatgttctacaaagcacagcattttcgtagccagtatatcaccaacaatggcggcccaaactagaagtgtcactgcgcattgggcaccatctcacagtaggtcattgcgaaaagaatcacacccaattgacccagtggattctctatgcgaccaaggggtctcacaagaggctaccaacagacatccaaaaacccaggggagtcgatcagagtggcgaaatccccagtcagtgtttcaaccagattgtggcaacaagctcccggccacacaaggcaaacacaacaaacaggcaccaggccaaacgcacaacaaacaggcccatgtactaatagggccacacatctctggcacatcccgcagatcaataggggcggcatcgcagccacagtttaagtccatctcatatggcaacgcttggtcccaattgacactttaggcaaacgcaagggaaatccaggaaaattgacgacaacaacggtccacaagcaaggtccaacttcgcgggcaattggccaccacggcattctggcaatgggcactccattctgacaatagtgcccgcaggcaggttccagaacatggcccagagcacacaataaaatcgccagaacacaacacgcacgcgcgcaggttacaccaggcaattggcaaatcgaatcaccgtatgcgggggccacccgcacaacgacacacaactcgcggtcgcacagcaccacggtactgcgcagagggacaaccgcccttatgtagggcaacgcgatgggggggacaaggcaccacacaatagcggagggaacgtagggtatccttcaggcgattaacacccaacaccgatctaaaaccggcacacaggaccacaaagcaccggggggaaagccgaccggacactacgaccacatggttaggccagacaggaccatgacagcgataccatttcacctatagaggacgcaggaagcccgcactagcaaccgagaaaatgtatacgcgacacaacaacacaatagccgcagcaactgggggcaagccggaacagaaatatagacaacacagaacagagca

SEQ ID NO: 639016 - DNA, 244 bp, Homo sapiens
cacgagggggattgggcgtgaattgcacgaccctccggaagccctgcactggtgaagaccgctaacatggctggtgctgcgcgaaggcatggtgttcaccattgagccgttgatcaaccaggggggcaacgcggttctgaccgtggacgctggctgcacggtggtcacgcgcgatggacagctgtccgcgcaattctagcacaccgtgtgcggtgacgccaaagggcgtgcgagtcttgacctt

SEQ ID NO: 639017 - DNA, 182 bp, Homo sapiens
tgaaactagctaagaatgaaggttacaaacatgcaatatcactgtatcatgtgatataggctaacatagatcgtatgtacgagaacaacaataaacttagaattcaggcaataacaacatgtgcaaaccaagcacattaccctgatacggtccttgaccagaaagctcttactggttcagct

SEQ ID NO: 639018 - DNA, 152 bp, Homo sapiens
gggccccccggggggccccctttttttggtttaaccccgttttgtttcctcttcccaagggggcctttttaaaggcccttgggggtggggccccttcccctttttggcccccgcccattccccatttttggcttttaagggggcttggttta

SEQ ID NO: 639019 - DNA, 344 bp, Homo sapiens
tatgcggtctccacatactgcacgtagaagtgccggtactacagtgatctcggtcaccaacacgggcttgtacgctagcagatcgctccttctcctccagcactggatcacctcctccacgggctgcttctcatagtgggcccagaccttctctatcttctgcttagcggcctcctcggaaaacagcagggactatgtagtaggagctgcgttcggcggtgaagtggacccttggaagagacgcgtgctcaaccagcaggccggaacaggttggcacagtcgatagtgcagccagccgataaagttgccggcctatgtaccaatgactctccacctccaactcc

SEQ ID NO: 639020 - DNA, 388 bp, Homo sapiens
  misc_feature (382)..(382): n is a, c, g, or t
gaaatatatatgcacctaacacaggagcacccagattcataaagcaagttcttagaaacctatgaagatacttaggtcactacaaaataatagtgggagactgcagcatgcccattgacagtattacagatcattgaggcagaaaactaacaaaaatattcagggcctgaatttgacatttgacaaaattgacctaatagacatctaaagaacactccacccaaaaacaacagaatatacattcctcttatctgcacataacacatattgtaaaattaatcacataatcagacatcaaggcaatcctcaggaaatttttttttaaaaagatggaaatcataccaaccatgctttccggaccacaatggcatgggaattgganttggat

SEQ ID NO: 639021 - DNA, 172 bp, Homo sapiens
  misc_feature (5)..(5): n is a, c, g, or t
gtcgnggtggagtggctaggctaagcgtcaagagctgttttgttgcgtgcttgatgcttgtcccttttgagcgtggtgatttagagggtgaactcaccggaacggggatgcttgcatgtgtaatcttactaagagctaatagaaaggctaggaccaaacctataccacgaca

SEQ ID NO: 639022 - DNA, 392 bp, Homo sapiens
tgctgcacagctcgtctggctgcctccctccgggttagtgttcttggggttgaccgacactctccgtgcatcctcgacctgttcccctgcacagtttttttcttcctggtgtacagatgtgacccggtatctcccatcataaaaagcagacacccggcaggagtcgtctgctgctgctgctgccagctaccactctctagcagcttaaaacaatacacatgcatcctcctaaagttctggaggcagaggttctaaaatcacggtgcaggcggggctggctccttccgggggctcaaggggagataggtgtcctttccctttccagcttctagaggccgaccacgccttatgcacatttatttacctagatgcttgttaagcacatgccatgc

SEQ ID NO: 639023 - DNA, 976 bp, Homo sapiens
ttctacagagttcctccggcgcttcctccaccccgggatacacagaacctcatctcctacggtgctgaagcctgcagcaggcaagagatgggtaggagagcatgagccgcggaagtctgcggcgcgggtgaagagcgtcgcgtaattcccgtcacaagattgttccgtgcccgaagcccctggactagcaggatccgaaccccggcggctgcgtgcttataggcgcagcacgtcagagagcccgcggcttaaaagcgcgtcgcctggctagtcgccagcccctaggccttcttcaaggcctccagggctgggcccaagcgcccgtcgacgggaccctggtcccagaggactcgcgggcctcatctccaatgattcagaagtcaggtccgtcgctgttgcaagcccaagatgtcggagacacggtgggaaaacgcttatgtaaccatccggtgatcagggctttcctgtgtggctccatcagtgggagcctgctctaccctcgtttttccaacctctggatctccttaaaacacgccatggaatcctcaagccctcagatcatgggtctagaggtgtcgcgatgtgggtgtactcttgaaggtggttcgcgcggatgagtctttgggcctttggaaagggatgtccccttcgatgttgagatgtgtccctggcgtttgtaagtctacttggcattctctactctttgaagaagaatttgtagcgagtgcatccccagggcctggagtcagcaatgctgggggtgggctcttcgttgttgaggggtctgttgtacattactgtataaaagcggcatggagtggaattggtttgggattaaacgctggagtgtacagatagggcgggcttttagggggagggaactttgaggctctgatacgggttaacgagggattgctgtgggtccctttaataggattgtggatcgaaggggaatatagagtgttagacttaataa

SEQ ID NO: 639024 - DNA, 237 bp, Homo sapiens
  misc_feature (217)..(217): n is a, c, g, or t
caaagtgacaactggtgttatggacacttttcttaatttttattttattttattttggagacggggtctcaccctatcactcaggctggagtgctgaggcgtgatctcagctcactgcaacctctgcctcctgggttcaagtaattcttgtgcctcggctcccaagtagctgggattacaggcaccagccaccaaacctggctaatttttatacttntggtagggatgggatttcac

SEQ ID NO: 639025 - DNA, 320 bp, Homo sapiens
atctgggtccttaaacagttattcataaattccctaaaaatttaaatttccatgggaccctgtggttaaaaggccctaaattaatttctgaaaatatttcccttaaataaccctttacattaggccaattccctaaccttaggtttagttaaaaggaattaaagagtttaaaagaaccctttaaagaatgcttaaaactaaccaaccattttcaccctttgtggcaaccatttgttaaaccagtttcccttaacttcttttacagtttaatggaaaccttgggttaattttaattgaggtccccatggtcaaccagcctt

SEQ ID NO: 639026 - DNA, 135 bp, Homo sapiens
ccaacaaacacctctgacaggtgtctgcacaggagactgtaagacattccctgctgtgagatgcatcacacaccctccctttggtctcggaaactggtgactctgtgttcctgtttcaggtacacttcttcagtc

SEQ ID NO: 639027 - DNA, 927 bp, Homo sapiens
ggggggtgataaagagtaataagataggagtgtttggtgttttttgtttttttggtatagtctgcggttggggtatttgtcttcgggagaggggggatgtatgttatattctttcctctttctttttgtgggtgtggttgctctcgtaagagtagagagaattacgggagggggggagtggggtgtgattcgtcacgtcgctgtcgtctgagtggtaggatgtgtagtaatattatattgtggaggcgcggcgggggagagggtggggagagaataaaaaatagttttttttgctccggaagagatgtaatctctatatatgtatgacagctcagaggggcgggctcatattttgttgggtggcacgctcagatagagagaggaacatgattgattgtttggtcgcgaaataataaagaagagggggtagtgttggtgggcgtgtgtcggagatgattaattctctcttgcggattgttgttgttgtgtggcccgcggcggttgtgtgggtggggcgccgcctcatccggcgcggtgtcgcgccgcccactccgatgtcgcccgcgcctccctgctccacgatgatacgcctccgctctcttgtttctctctcttccccggccgcgcccggggggcgccctccgcgcctccccgccgctgtcttgttttgcgcgccgccgcgccctccctggtgtgccctctgtggggtttcgccccgctccctctcccctcccgcccgcctgtgtcgcttgtgtgtgtggtttttctttgttgtggtaggggcgctcctcttgtgttgggcgcgtgttgttttttttgttttgttgtgggggggggggggggggggggggggggggccacccccccccctctttttttttttgtctcccccagcggggggaaaaatgttgttggctttccatctca

SEQ ID NO: 639028 - DNA, 763 bp, Homo sapiens
tcacgcacacagtcgggtttatgggctcatcatacacacacacatcaaatatgtacacaaacataaatattccaatgtacaaagttacatgggactcacagatcacccctcgtctctttcatccagcaccccaaactgggtgccgtcctcttcctgtttcaggatgaaaggcgtgatgaggggctggcactaggaaggcagggaatctggaggaagggagaaggtcctgctcccctctcctcacaggcacctccgaaagggtcctgtcccttttcaagggcaccttagggcagagggctaaatccctcatccctctctgctgaagctcaaatccccaattctccttgatccctttgactctcctccctaatttcctgggcttcgatcctctcagcatgtctgcacactcctggctggagagtagccacccaaggccccctcccaaacgctgttggcaagggcatggccaagtggcagtcatgacagccagcagctcaggcggccagtcatcgaggtcaagggagcatatgccaggtggagtcaggcacggcgactaccctggacacttacaccgtatgtccgaagcaggtcaatctccttgccgtgagatgatctgcatgataccatgcaggctggggtgataggtgagcagcccagttgtcacagaagcgtacacataatttcttcatcacaacatcctgtgtgcaagagccatggccggatcccgctctagacaaggatccccgtgctagacgggcgatgc

SEQ ID NO: 639029 - DNA, 306 bp, Homo sapiens
  misc_feature (75)..(75): n is a, c, g, or t
  misc_feature (120)..(120): n is a, c, g, or t
cagacagcgtcaccatgttgtctgggctggtcttggactcctgactcatgatcacccaccttggcttcccaaggntgctggattacaggcgtgagcatcatgctacgctgtgtatgtgtnttgaaataacagctttattggtacataattcacatacaataacattcattttttcaaaatgtacaattcattggttcttagtatattcacaaattgtgcaaccatcactactatctagttttatattttcatcccaaaaagaaatcttgtacccatttttcagtcactcccgctctctccttcctc

SEQ ID NO: 639030 - DNA, 130 bp, Homo sapiens
gcccgacgggggcctcctccgcgggcatgaccagtccgcctacgacggcaaggattacatcggcctgaacgaggacactttagctcctggaccgcggcggacaacgcggctcagatcacccagcgcaagt

SEQ ID NO: 639031 - DNA, 628 bp, Homo sapiens
agttatttttatgtaagcttctctcattcctccactgtgcgtgctcgggggctggtggtgaggaaaaagaaaacagctgtgcgggaagcatcaagaaaaggcaagtcatgaagtcttagagatgagtgacatgtaagaaaaagagtgaggagaaaaatattcctactaaagttttccatttgtttaccttccttgtcacatagacttccaagagttagaagtctaggatttgatctccaaatcttcctggcagattactcatcttcatttcattcatatagtccaggggtttgtacaaaggaagatgccagttcttccccaatcataactaagatatcaagagatattcttttgaaatgtaacaaaggagatctgaagttcatctgaaaaaaataaatgggtaagtatactgacaaatattttggcaaaataaaagtaatgaggagatactagcattagcctcatcaggcattaaaatatattataaagttataatatgtaaaacaggatgggactggcactgaaactgacagttcaactgaagagaatagacaagttagaagtaagtcttgatgtatgtaagaatttaataaatttgaaagatggtaaggaaagataggattgctta

SEQ ID NO: 639032 - DNA, 150 bp, Homo sapiens
ccacggcaggcgagcggcgtcgcggcggtggcggccttgtaacgacatcacggaagaacaatggaaccgcgtgcggcaatggcccggcacgacggtcgaaccggagcagacagaggtgagggatggcggagctttctaacgcgcgttgcg

SEQ ID NO: 639033 - DNA, 288 bp, Homo sapiens
ggatggtaacatcatcatgaagctatacattatagaaacaaagagataacactacattaggaagtataaccagcaataatgaagtggtatgaggaaactgtgtagattaggttgtgactagggacagagactacagatagggggcaggatagagagaggatcagaatagggccaagagagaggaaagagctagtaaccatgataaaagcacagcacagaatgtcacaagatcagagaacactcacagactgagcagtgagactagtaaccagcctctgtgatggataa

SEQ ID NO: 639034 - DNA, 82 bp, Homo sapiens
catggatttgctggtgcagtacaactaggcttaatagggacatgtagcctcaaagggatggaggaagatctaccaagcaaaa

SEQ ID NO: 639035 - DNA, 343 bp, Homo sapiens
tgactctcctctctatggtctgggacacacacagatcgtccttagtgggtcacagtaatcatgaaccctgggtacaaaagatacaggctgagaagtaagaatacactgctcacttagagcaactcataccctgacctgaaccgggtgtgtaccacccttgcccatggttagatctctttccttgataggaacaagcaaaagaggggctgatccatctcccgtgaacatctgtagactataggcggtctgagccagccttgctgtgtttgcctcagatgcgagtcaggaagctccagttgtagcattggcacagctgaggccatgccattgctacccggaagct

SEQ ID NO: 639036 - DNA, 213 bp, Homo sapiens
gggacaggctccttggaagagcttaattgctgggccctgtcagttgacttactccctagttccagagacaactgatatctctgtgccatttgatacttgagatgaattggggtgaagaggaactttgttccccccaaggagacttgtccagagcccacatccccggcccagttaatagagatactcgggaggtgggattgccagatcacacaa

SEQ ID NO: 639037 - DNA, 226 bp, Homo sapiens
agagagaaaacttctccccccgggggggagggggttttttccggggggggcccccccccccccccccgaaagggtccccttgggggggttttccccccccaaaaaagggggggaaatagcgcgccccggaaaaaaaaggggccccccaaaatatttagggggcgggggcccccccccaaaaaaccctttaaaaacacctaaaggggtgggttaaaaaacggggggg

SEQ ID NO: 639038 - DNA, 448 bp, Homo sapiens
gcaataggcacgtgcgtttattcgtctagaacaactacccggagagacctcacctgtaaccaccgtgaaaacttctgtatcacaaaaccagctgctaaacacgagctcctaggagagtgggactcttgggacttgagaacagactcaaggtgacctccaaggaaaggactcagcacataccctcccctgcaaagaagcgggaagcatcccagtaaccaaacctgaattgccaaagaaaccaaaccctggccttatacgcagtgttaatcctgagataccgggaagagggcccatggctgagagctcagataagagggaagaaagtgccaactcctgccccgaggcctttgctgctgaagaactctgtatcctcagaaaaccccacctacccttcagctccactgacacctgtcactgtacctccccgactcgcaggggcatcacaagc

SEQ ID NO: 639039 - DNA, 255 bp, Homo sapiens
ctagctagaggatcccgccatgaggtgatcctgaactaactgtaaggctgtctggttttaggacaggtaaaatgggggaattgtaaggagattttataggccttaaaaggccatgctgtagcaggtgagtgataacaggatttaatctttttaaagcgtgctgcgggatgggatattggcgttgagtggggtaagggtgattaggttttaatgagatggtaaggggtgcatgatcggtcgcctgttacagcatgg

SEQ ID NO: 639040 - DNA, 230 bp, Homo sapiens
tcactgtcatccctcctcctatcggcgatgactgagtctctgtgtacataatctattgatacttatgcactatgcgtatcttcttgtacccgcagctgccgtctagcagactcatcctttcgggagctaatctcctgtttcaggtactgtatttccgattcctttacccgctataagacctctagttcataggcctccttgcccctgtgcaaggggtgacccagcgacat

SEQ ID NO: 639041 - DNA, 193 bp, Homo sapiens
cggcatggggactgtagctctgacgccccttagtccctctccaggtccttgtccctgtatccaggacctcaggtgcggggtctgctttttctgggaagcacccctagctgaggcagaggcagctgactgagcttccctttgcccatccgtccagcctgtgcgagcctcattgcgcaccagactgtcccaagag

SEQ ID NO: 639042 - DNA, 248 bp, Homo sapiens
ctctgatgctactagcgccacccgtgaccctaggaagccaggcccagcctcgctcctccatactcaagactctcatgctccatctggccggctcactccgtgtggcctgcctctgctgaccgttatggagttccccgccggagctacaggggcattttcttccctaaaaccaacagtgtcccactgacctccccaagtgtttgctgcgtgacagatttcctgttcttgttcgcagtttgccgactgaa

SEQ ID NO: 639043 - DNA, 914 bp, Homo sapiens
tgagcggagggacgcggtccggcgtcccaagatggctggcggcggcggctcccggaaggcccgcggcggcgtcccggctgctaaggcgggccccacgcggctggcagcggacaggtccggatcctactgcgccgtggatgtgacgtggcggcagcgcgcctctgcggcggtaccgtgggctgggtccgtgcggccgggtagcggccgccagtgggattgctcttgactggagccctggcctcgtcccttctcaaactttaagtggctgtgcgtgctgggcctcgatgcctcgctttgccttcacacggagtctccatgtgacgccttgaggagatcgctcgaggaaggtagttgatacttgactcccggcgtgaataaccaggcgtggataagggttacaacttgccacaagattatcaggatagatagagacgaggataaaaggtttggcgcaaagaaccaagggttatatgtgaagttcacgagagaatgaagtacaaaggccaaagcaaaattaagagtgtgccaacttcgtagtcctaaatggaaccccaagagaaactttggtttcccagcagataaccaccaagtaccacatgtgaagcctgaaccaagttgtagagttattcccgttaaaacttcctgggtgcgaattactcacgctttgggaaaccacaaagaaaaaccggaaattataccagcaggcccgttgtacggcacaaccgaaaagttgttactctataattcgagcacgggggggttcagggacttggcaccacacattaattaacacgtcacggaccgaagtgaaatatattccagactcaaaaataaggaaaagggaacggaacacattttatagtacaaaacacattttccaacagtagcaacatttggtgcgtagtggaactaag

SEQ ID NO: 639044 - DNA, 249 bp, Homo sapiens
gggcccatttattgtttattttgaactgggaatacaggcaaatggttcaaaattcaaaatggacaaaagggcgtaaggggtaaaaccctttcctgtcctggactaaacctactggttcccctcccaaaagaaatccggggtacccctttattttgaataggcttacataagcaattatgggcttatattctactcctttttgaaacacaaatgggaagtgcgctttacacatttctggggcttgccctt

SEQ ID NO: 639045 - DNA, 165 bp, Homo sapiens
aaggctcgaggaggggtatcatcagtgttaatcagagcataaagatatggtctggtgctcatcccctcctgggcattgattaaccgaactgagaccagtcacagccttccaatcaacccaagagacttgggaaataccaggaaacgtatgagaactccaaagcat

SEQ ID NO: 639046 - DNA, 1317 bp, Homo sapiens
tgtgagccgtgtgagtgtgtctgtgtcgtgggcgtgctttgtcgtaggattggggcttgttctctgtgttcgtgtgattttctctgttgtctagttgtcggtctgttgtttcttgtttgatacctgagcgatttttatgacccgtggtgtttctcgttgtgtttctcttctcgttcgctcgcccttttttagcatatctctcccccccatcctcctacggggccctggtgtgtctgcccttgtttgcgcctaggggccttttcaggggggccctcgtgggtcctaatcacgccaggttgcgtccatgccacgtggttaactgtgtggcgttcaccaccgcctgggtttcccccgcctaaggtccctccacatgtagccgcctgctgtattgttgggacaatatgctttgaaagcgggttttttttccctctggtgatggtgtctcagtcgtgggagttttttcgttttgaacttgcggaacgcgcccgggatgtccttttcccgggtaagtgttatcccccttcttattgtaggacaggagtttccctgcagaggatgttacattgtcaaagggtaaatttgcagtatgagccgctggtgagtgcgcagtttttggtccccgcgtttggtgctacaaaacatcgtggcgactttcgctgtgccgtaaaagtccgtggttgcaaacgcaataggccctgttaatgtgtgcctcgacacagtttctggaaggctgtaattttaatgaactgtgataatatctgtgagtttattctgaataatacgcgagttttctgttttggttaaatgggcgacccatttgcccacatttttgttcccacgaaaatatatgtagaatgccccgtggcctgaactatggagcctggttaaacacatatgctggtgtgagactgtgagattaatgccctttgagccacaaccaccatggaagcccaaatttggggggaaaactggtggcctggaagtgggccctgtgcaccctcacacctggcggaggctgggggggctctgtcacgcacggagccctatagaggagatctttcacattcgagttttaaagaagcaccacaccgggtcacttttcctcttgtatgttcctagcgcacgaactgttttcttaaacacaacttgaagtatagttttgttattctaagccactttttgttttaagtaagtaagtgtaactagaatgcgaagccccttatggttcaggttttttaaaactggtccagtattgtatttgtttcatctgttgccctcgtatttccatcatctgtaattaaaatgatcatatgttta

SEQ ID NO: 639047 - DNA, 383 bp, Homo sapiens
ggtggattttaaagaaccccggtggatacctaagatattttatattccagtgcctagagagatcccattgcagacagcgtaaagtgcttggaatgagggccaatgatgaacaaagagcacaataacagcttcatcgtaggagctcagatggggttatagcatgcctaaactgttatcgagatgcacacgctgtgaggggaatgcaacaattttgaaaagaattagagcaatatttctacagtattacattattactagtagataataacaagggtacaaattaatgtctcaatatcaaagtggatcagtattacatgacacatggctctttggaaaatatttgacctgatgtatacaaccacgagatgaaaacacagacaaat

SEQ ID NO: 639048 - DNA, 312 bp, Homo sapiens
tgctggcgtatgtactgacctggctccagacatgccaggtgcaggtgtgtgtataagggcatttgtattctgatggcctttgtgggttttttaaaccccaattgtatcattgattttttttttggcattgacgttaagattttcattcaatggtgatggattttaaaattgccctgccatgtggggtgttactaaagctcatgtggatgaaggctgttgaacgcctgtgtctgtgctcacactggctgctttgctttcctttcctgcctgacacgtcctctccatcttccccttctccgttgccatcttcct

SEQ ID NO: 639049 - DNA, 128 bp, Homo sapiens
  misc_feature (121)..(121): n is a, c, g, or t
atccattgaaagctcagagctgagaggtactactaccaataacctgcttggctcaaagggccagcaccttctctctaaagcccaagaggagtttgaggaaaactaggtgtctgtgttcacntccaggc

SEQ ID NO: 639050 - DNA, 671 bp, Homo sapiens
gtaggctcacttccgtccgtggggggagctgcggcggtgtgctgcgtagcagtgcaggccgggcagagggttgcgtgagtggacctgactgtgactgcacgggtgtctgtgtgcgtgcctgggaggccatggtgagcgcggccctgggggccccggtgggcggcggggccggtgggtgggcttccccacggcaacgacatggagacctgtggtttgcgagtgctccctgggggcctcggctttggacccgcgaatgtgggcttggggcccttggcgctcctaaccgggggtctgcttgtcctggggggcgtgtacgctggggggggccggcttcttccgccgcgcttggcccctgtctgattcgggagagaacccccgaaagacgcttacccctgccctgggcccatgtgccctgtgcggagcagtagcgatatgccgctgtgggggggcccacaggttgttgggaatggcccctggcgactttgggacgaatgaggaaagcaccgggggcactaatggatattggggggcattgtcggccttcgaggttagacgccttacttaggcttggccatactttccttaggttaggcaccagccctatggcctcctgggagcgggaattctgattggcaaaagcgcatatcgaccttttccattgaccagccagg

SEQ ID NO: 639051 - DNA, 409 bp, Homo sapiens
  misc_feature (13)..(13): n is a, c, g, or t
  misc_feature (69)..(70): n is a, c, g, or t
  misc_feature (80)..(80): n is a, c, g, or t
  misc_feature (85)..(86): n is a, c, g, or t
  misc_feature (94)..(94): n is a, c, g, or t
  misc_feature (118)..(118): n is a, c, g, or t
  misc_feature (125)..(125): n is a, c, g, or t
  misc_feature (165)..(165): n is a, c, g, or t
  misc_feature (214)..(214): n is a, c, g, or t
  misc_feature (219)..(219): n is a, c, g, or t
  misc_feature (233)..(233): n is a, c, g, or t
  misc_feature (286)..(286): n is a, c, g, or t
  misc_feature (408)..(408): n is a, c, g, or t
aaaagaaaaaaanaaaaaaaaaaaaaaaaaaaagaaggagaaaaaaaaaagaagtaatgctctgagggnngttcttccgnatttnnaaaaagtnatcttcaactgccttggttatttnataaganatgctatattccaagaatctcaaaagagttagataaatgnggaatttgttcagcacggaaggaagaaccgctgaaaaaaggctgtacangaacncctccatgtttggnggaattagctggggcggtaagtaaatctggcagtctgccgggaggagtaaccncccctccgaagtaatgaaaacgttaatattgcaggggaattccatctgatggtagctgaagtcataatccaccttctgccacgttatgaggttgctcagggctgtcacattatgaacacctng

SEQ ID NO: 639052 - DNA, 239 bp, Homo sapiens
  misc_feature (13)..(13): n is a, c, g, or t
  misc_feature (107)..(107): n is a, c, g, or t
  misc_feature (115)..(115): n is a, c, g, or t
  misc_feature (155)..(155): n is a, c, g, or t
  misc_feature (173)..(173): n is a, c, g, or t
ccacacccccttntcaacgtccccccagagtcctcaggggggccttcgatctgcaaaagcctcacaggagtgcgagggggcccagctcccagggggggcgatggagnctcacacngtcaccttctccatcacgctttcagacacgtggacttcgnctttctggacggggacanatgttgactggccgcatattttttggtgatcctcccagtccttgcgttggcagaaggtggagcagt

SEQ ID NO: 639053 - DNA, 205 bp, Homo sapiens
agcacaactgtaatatcgtagctatcaatcactttttggtatataaagaatatcatgatactacttatagcctgcctatcaattattgatccttaatatactttctatttgtcaggtagcacaagataacctatacctgttctagcctatactgtcttgtacaccaaccatatacttactatggtaggccatgtaactataggaa

SEQ ID NO: 639054 - DNA, 453 bp, Homo sapiens
acttcaactacagtaagtcacagtaacaaaccatcatggtctgatacaaaacagacacacagaccaatggaacagaatagagaactcagaaataaagcttcacactgatatagtttgtatatttgtccccacccaaatctcatgttgaattgtaatacccgatgctggaggtgggggtctggtgggaggcatttgggtcatggggatgcagctttcacaccttggtgctgcttggcaataatgagttctcacaagatgtggtcatttaaaagtgtgtgacagtccccctactctccctcgctcctgcttttgccatgtgaagcacctgctctttcttcgtcttctgccatgagtaaaagcttcctgaggcctccccagaagcagatgctggcactgtgcttcctgcacagtctgcagaaccatgagccaataaaacctcttttcatataaaaa

SEQ ID NO: 639055 - DNA, 159 bp, Homo sapiens
gatgcacacaaggatctacaataccagatttaaagaaatgcaaggataccattagtagtgtataactagattcattgtacatactctgtaaagcacctatatgtccatttagcaatcataaagaacagatgccttcgaagtaccgtgaaacggtcagct

SEQ ID NO: 639056 - DNA, 346 bp, Homo sapiens
gcacatgagcaccgtcacacatcggacaccacagcggccttcgctcctcgcaaaaaaccacacttctcaaccttcactcaacacttccttccccaaagccagaagatgctctacgaggaacatcatgtggctgtgctgggggcaccccccagcaccatccttccaaggatccaccgctgatcaagcattcacaccgagacctccgtgcccgaccatgtcctctggtccctgttcatcaccctcttcttgaactggtgctgtctgtgcttcatagcattcgcctactccttgaagtctagggacaggcagattgttggcgacttgaccggggccccgccttgggggc

SEQ ID NO: 639057 - DNA, 244 bp, Homo sapiens
acaaacttgcgatttactagaaagcgaagcaatcagagattaattctagaatctacacttcgtaatattcaaaataaagtagtaataggttaccggtggtggtggaacatatcggtagtgaactactgtagaccacacttgacgacgaaactaactccaaacgactgccttatcactacttcgaatatactactaacacaactacgatagcttactgacgacttgacgccagagacaattaaag

SEQ ID NO: 639058 - DNA, 508 bp, Homo sapiens
  misc_feature (4)..(4): n is a, c, g, or t
  misc_feature (11)..(11): n is a, c, g, or t
  misc_feature (45)..(45): n is a, c, g, or t
  misc_feature (55)..(55): n is a, c, g, or t
  misc_feature (89)..(89): n is a, c, g, or t
tagnaaggatncaaaggctgtgtggtttacccaaatgcccttaancttagcagtnaatgacaactgtcaaaaacatgttgagggaaaanttttacctgattccacaaaaaggaaagacaagtttgccccactccttagtggcacaaatcaaagctgcatgcacctacattatcccaaattagtccgtaacccaaatagttaaaaaattctgctgggcacggtggctcatacctgtaatcccagcactttgggaggccgaggcagttggatcacctgaggttaggagtttgagaccagcctggccaaacagggtgaaaccctgtctcgtctaaaaatacaaaaattagccgggcgtggtggtgcatgcctgtagtcccaggtactcaggaggctgaggcaggagaatcacttgaacccgaggtggggcaggcggaggttgcagtaagccaagaatcgcgccattgcactctagcctaggtgacagagtgagactccatctcaaaaaaaa

SEQ ID NO: 639059 - DNA, 102 bp, Homo sapiens
tgctctgtgtcggatagctgtgcatcttgatacgtatcactatcgccatcatcatgagacgagccgctctccgctgcttcctctgtgattaataaattatca

SEQ ID NO: 639060 - DNA, 114 bp, Homo sapiens
gacctattgctggagaggcagtatggttctttggaggaaagaagacactgcagctttttgagttgccagagttcttgcgctgtttctttctcagctgtgtggcctttgaagttg

SEQ ID NO: 639061 - DNA, 254 bp, Homo sapiens
gtgtgcataccccttcgtgtgtgcataccccttcgtgtgtgcataccccttcgtgtgtgcatcccccttcgtgtgtgcatccccctttgtagtcccaactactcaagagagctgaggtgggaggattgtttgagcctgtaaggtggaggttgctgtgggccaagaacatgccactgcacttcagcctgggcgacagaacgagactccttctaagatagatatatggatggatagatggacgaaggggacggaca

SEQ ID NO: 639062 - DNA, 1466 bp, Homo sapiens
  misc_feature (1358)..(1358): n is a, c, g, or t
ggacccacagcagtggtcctgccagccttctccgctctcccctgtggggaagtgaccctcctccattctcccagagcccacgtgagtccgcaggaggcccccctgtggccagtgtgccagtgtgcctgagtgtgcttgctccaactctgggggctggctatgcaagtgatgtttccagttctccgggtccttccttccaactgtgcagtgtccggggctgccgggccattgctggtccctgttggccctagggcccgcccagacgcagaggcctgagcagcggaagagggggcgcaaactgtggcgttgagcggacagtgacgtcaccccactttggggaccactttcccactgcctcacaggtctccttgccactcttcaaagcacatgactatcatgcagaacgtgcacagatgttcaaccactctttagacagggggtgacagccctgtggtcaagcagacctaagagcacagcagggccacatggagagttgacggagtgatgaccgggcccatttctaacaagttggggtgcacacaaagatcggggagcccctggaacaacaggaggggacccacacacgggaggcaaggggagaaacacagaggactaaccgaagagggggggcaccgcactacccatggagcagctaccaggcggacacaatgacccacggtgcacaaattcctaaccaccgcgctaggcactagcacacacagagaacaaataacaggagatggcgaccaccggtggcagggcacctaatgcaaaggtctgggtacacgattgcgacttcaacggatgcaacccaggagacaaggacaacggacgagtcaacgtgactgaccaagacgaaaacacagagcgcacggatgttgaagcaacagaccgagcaacagggggggacacaacacacccagtaagtggacaggggcacccacacaaaccgctggatactccaaacaacggtacaagacacaacaggctggaactcccaggacgcgcggcggacaagagcactcaccacaaacagttcgcccatggggacactataaccagcagcagatagtaccaacccacgttgcagcacccactaagccaccgaggacatcaaacaacacattgctggtattgacactacatgtgggggcatttacgcagccaaacgtggaacaccacaaacgccaatgcaacaaatcgtgtgcgctttagacgaacgggtaaatatgcgtaagtaaaacaccacaggctataaggagacggccaacacgcgtcactgataacaggcgcaacactagtgcaggagtgtgatactcacatgaaaatgtctgacgccagctaccagtagcgacagntcaatccacgccaaacgggacagcagacaatccaaccgccctcttcacagaagtgtatgtggtcgccgaaaggtgcatgcgatctacccttaaacacaacacgaaacg

SEQ ID NO: 639063 - DNA, 109 bp, Homo sapiens
catacgttgctcagtgattgtaacatggtacagtcattttggaaaatagtttgatgagttctcaaaatgctaaaaaagaaaaaatgagctatcattcgaccgggaattc

SEQ ID NO: 639064 - DNA, 301 bp, Homo sapiens
aaaggggagtcgttcttggtcaccgcttgcgatgaccgttcgccgtcgagattcagtgatttggttcgcacgacgcctgctggagaattgctgtgaagccgcatacacgccatctgactgtggccgcggtcatcgggatcatcctgctgattgttgcggtggttgcgcgtgggctgtgacgggcctgcgaatgcaatcctgtaactaaagcaacatctaatagtcatatctaccgggaacccggtagtgaaccggtcggtttggggtatcgctcgtcctgggggtgacgcgcatactttgg

SEQ ID NO: 639065 - DNA, 348 bp, Homo sapiens
cgcttaggttccatcttcactgcacttcacttttgcttcttgcaagatctgcgaaacatggaggttctctgaccttgttatttttgcaaaatttgccttggatgaatcaaacatgtcagtcatgccaagcactttcagcggctccttcaaatctgtaggtgctccagctgtgaacttgggcaggatcacctgcagcctcttgggcaccaggatgctcatccagctgtctatggacttggtgcagatgtgtggagatgatggcagacagcgtgagtggcgctctcagtcggaagtgcaaacagcatgctgatgctatccccgtgataggggagtacaactgaagttgta

SEQ ID NO: 639066 - DNA, 397 bp, Homo sapiens
tccagctctatgtcggtcatctgtgtccccgatctaaagtggacatcccctggcacatacctggaatccacaactgttgcgtgatacaggagatcattgaggaaagactcgattacagaaacttttagcttatagtaaataaatacgagtatggataatgaagcacttaaatagaagaaaaaactgcattccgtttacctactaaaagtattccaaagtaaatcctcattaatacaacctacttggacttaagaactgattattattttagccggactgaaatttactgtgacaactcatgtggacagagtgtgcaggaaacatgaagagcagagccaccatggtgagggagagaagtaaggaggctccccatttgcctgtaactcaagagtgaact

SEQ ID NO: 639067 - DNA, 209 bp, Homo sapiens
  misc_feature (145)..(145): n is a, c, g, or t
acacattgtatcccattttcttctacttccatctggaactagggcaggcacgcacacaagaactggaatctaccacaaagttatgtggacatttcttgacacagaatgctccatatgtgtactttgcattgaaattgtgctccangttgaacaggtggttggcatagtagacaaaggtttggggacactgagtaacacatgctccactg

SEQ ID NO: 639068 - DNA, 287 bp, Homo sapiens
  misc_feature (7)..(8): n is a, c, g, or t
  misc_feature (10)..(10): n is a, c, g, or t
  misc_feature (16)..(16): n is a, c, g, or t
  misc_feature (19)..(19): n is a, c, g, or t
  misc_feature (49)..(49): n is a, c, g, or t
  misc_feature (56)..(56): n is a, c, g, or t
  misc_feature (72)..(72): n is a, c, g, or t
  misc_feature (84)..(84): n is a, c, g, or t
  misc_feature (98)..(98): n is a, c, g, or t
  misc_feature (124)..(124): n is a, c, g, or t
  misc_feature (142)..(142): n is a, c, g, or t
  misc_feature (174)..(174): n is a, c, g, or t
  misc_feature (179)..(179): n is a, c, g, or t
  misc_feature (188)..(188): n is a, c, g, or t
  misc_feature (192)..(192): n is a, c, g, or t
  misc_feature (202)..(202): n is a, c, g, or t
  misc_feature (225)..(225): n is a, c, g, or t
  misc_feature (228)..(228): n is a, c, g, or t
  misc_feature (230)..(230): n is a, c, g, or t
  misc_feature (245)..(245): n is a, c, g, or t
tgggccnncncgcacnccngtgaggcttttgcaggtcgaaggccccccngaggacnctggggggacgttganaagaggggtgtnggaaggtaaagaancgtgctggacaagtcattaacacacnttaagcgaatggtgcccngggaaacgcactccccctgcccgggccccctncccgntcgcggacngatnttttatcccngggatcatgaacgtccggtcttnccnanagggcctgtgctcgncgcacattcatacgtgttgtgtctgtcaataaagttaaataa

SEQ ID NO: 639069 - DNA, 378 bp, Homo sapiens
actgtctcctaagaaatgaatgtggccaggtgtgttggctcacacctgtcatcccagcactttgggaggccaaggcgagcacattgcctgaggtcaggagttcaagaccagcctgaccaacatggtgaaacccagtcactactaaaaatacaaaaattcgccaggcgtggtagtgtgtgcctgtagtcccagccactcaggaggttgaggcaggagaatcgcttgaacccgggaggaggaggttgcggtgagctgagattgcgccactgcactccagcgtgggcaaaagagcaagactccatctaaaaaacaaaaaaaaggccggggaaatcccagggttggcggccccgggggtctttaaaccaaactttccaaaaa

SEQ ID NO: 639070 - DNA, 122 bp, Homo sapiens
  misc_feature (42)..(42): n is a, c, g, or t
  misc_feature (49)..(49): n is a, c, g, or t
ggcagggctgactcccgtcgacacgaacttagaaagttactntcaatgnctttctctgtctagaacagacgggtgacaagtatgggcaaggaggcatggggcagggtggccaccccagtcga

SEQ ID NO: 639071 - DNA, 412 bp, Homo sapiens
gatggccatgagtcgcggcacgagagactgactgtgtgcgtacagtgagttacagacgagaacggggtcatagatgttgccgagtcaggaatgggcagcttcaggtggcagcatccagcacaaaatacattcccacaatttctgcaatggtgtcttcgtttggccaaccagaattcacagtcacagttatagcagtgtgatgccatatggtctggaacccagcgagtcacctcagtctctttcttatcaacaggttcccagcttgcttctgaaaggcagtcttcactgtgatcagagccaaaatcctcagtatcactgccatctgactccttcaaacatgtaaaatcatcctcatagtccatggggggctctgctggaggggcacagcagtgacggatgtccagcctcatct

SEQ ID NO: 639072 - DNA, 316 bp, Homo sapiens
  misc_feature (160)..(160): n is a, c, g, or t
  misc_feature (241)..(241): n is a, c, g, or t
  misc_feature (262)..(262): n is a, c, g, or t
  misc_feature (297)..(297): n is a, c, g, or t
gtttgtctcccctctccaaagtaaggaacccagctggccgtggtggctcactcctgtaatcccagcattttgggaggccgaggtgggtggaccgcttgagtccacgagtttaagaccagcctgggcaacatggtgaagccccatctctacaaaaaatacnaaaaaattagccgggtatgatggtgtgtgcctctagtcccagctacttgggaggctgaggtcagaggatggcttgagcccnagaggcagaggttgcagggtnaagatcgcaccacttgcactgcagcctgagagagngagagccagaccttgtctc

SEQ ID NO: 639073 - DNA, 449 bp, Homo sapiens
  misc_feature (283)..(283): n is a, c, g, or t
acgctctctctgtgggggagcttcccggagtaacctgagacaccttaagaacaccagtggagaccattgactggcaaggtctttgatcagctggatgcaccacttggctcctgatttgaaagtgcagcaggcactccgttggagcaagacgcccactgatcgctccaccgtactgtactgaccaagctgccaggacagaggtcagccacatcccctgctgtccacccgggcttcattcaggcccaagatgcgacgagtaacggccacttatctgccactccangtgctatggtgagcatcggcttactgcgtggtgtgtcttccccacacgcgcacggaggtccccaacaccagtaagccgcgggcaccataactgcagtgagtcactggaactgcaggacccgtcttctgggctgcgtgtgaccatgcaggatctgggccccgtcccc

SEQ ID NO: 639074 - DNA, 118 bp, Homo sapiens
ctctgaggatcccatagaggccaagatagtatcaaaggtcaataagtcacaggagggctccccacagcaaaaaattatgtgccccaaaaggtcaatagtgctaaggttgacaagcccg

SEQ ID NO: 639075 - DNA, 222 bp, Homo sapiens
caatgcaataattccttacagctcatttagcatttaacaatcctgaaaaatttttcacatataccaattgacccctcacaacagccctgtgaggtaggcagggtaggtgctacttccctactgctagtgaggagaacaaggctaagaggtgaattaaggccacacagtttggaaaattgatgcagcctaggacaagaacccataggcgccatataggggacc

SEQ ID NO: 639076 - DNA, 127 bp, Homo sapiens
atgtcgaggaagggactggtgggaggtgactgatttatggggcggtttctccatgctgttctcgtgatagtgaatctcttgaaatctgaaggtttaaaagtgacacttccccttctctctttctcct

SEQ ID NO: 639077 - DNA, 112 bp, Homo sapiens
aacgggtgatgcggttgatgccaaggtgacagcccctcaggagccctggaggagtgctatgtcacagaaattgaccaagataagtatgctgtgcgcttcatccctcgggaga

SEQ ID NO: 639078 - DNA, 407 bp, Homo sapiens
  misc_feature (46)..(46): n is a, c, g, or t
attttcagaggggaaaatggggcctaaaagttacagagcatttagntggtgcgctggcccccctggcctcacacaaactcccgagtagctgggactacaggcacccagtcactgaagcaggccctgtttgcaattcaggttgccccctccaacttaaacatttttcaaatgtgatgcccttagtcactaaggttaaactttcccccccagaaaaggcaacttagataaaatcttagaggactttcaaacttttttaagtcctcttccaccccccctttgagtcccccttggggttgaaaggaattttttcttgctttctcaataaagtctctattcatttcatgtttaatttgtacgcaaaaaattgctgagaaataaaatgttttgttcaccttaaaaaaaaaaaa

SEQ ID NO: 639079 - DNA, 116 bp, Homo sapiens
tttcttaagctgaggtctgtggtctggttattagcatcagcttttcactttcctgggttcagtctggaaagcctggtcacccacatgtgtactcacaccacagagtcaggcagtag

SEQ ID NO: 639080 - DNA, 246 bp, Homo sapiens
catctcgtagatggttgcaaacgcccaatctggccgcttccctgtgcaggctcagaaagtagttagcaggactgtgcggtgtgtgtttgtatcttccccagcattgcctactgcaactacttagtagcaagctacaggtggacggtgtccggggaagccgttagattagttaagtgtgagtgcaccgaaggataaattagtatcgtatcctatcaaaggtccctctgccctggctcaactaaagga

SEQ ID NO: 639081 - DNA, 250 bp, Homo sapiens
gagtggcagaggaatcggggagtggtagagagaatgtaaatggttgaaagtacggataaatcaagtagaaagacctgaggtgctctgcaaatcacagctgactagaactagctagtctaccattcaccatactaggtagacatccaaattgagtccaggtaccctgtgatttggaatagtctttcaactctattgcctaatccatcagactacagactgtatctcttatctaatgccattgtaataattt

SEQ ID NO: 639082 - DNA, 135 bp, Homo sapiens
tttcatcaaaaataaaaaattacatatttcaaacatagaatatgccttctatgaaaatgtaagaaggctgtatctatgggatgatgtattactataccatatagtatctaaggtagaacaacgctatatatccct

SEQ ID NO: 639083 - DNA, 221 bp, Homo sapiens
gctccccgccccccatcctgacatcctgtttttttgcacttaccctgtgctgggaatgtaacagtgggccttggccccgccccctttgatttgcattttcatttggggttgtttacacatccatgccctgcctggagcagtcgattgtcccagcttcgacttttggatgggaaagggggggccctgactgtgagtcgaataaacaattgaggcggtttcca

SEQ ID NO: 639084 - DNA, 251 bp, Homo sapiens
atccaaagaatttcggcacgaggcagaacacaggtgtcgtgaaaactacccctaaaagccaaaatggggaaagggaaaagaattatatcaacattgtcgtcatttggacacggagattcgggcaagtccaccacttacttggccttttgtcttttaattcgggtgctccgcaaaaggacccatttaaaaatttggggagggagtctttttaattgggaaagggtctcctctaaggtatccctgggttttgg

SEQ ID NO: 639085 - DNA, 590 bp, Homo sapiens
  misc_feature (497)..(497): n is a, c, g, or t
tcgacggctgttacccttctacccatttggcagcatgctcaccgggtcatcggagaacacggtggaatcttccatgcggccttggcgcaggcggacacaagcgccgtccttgagatcgatagcggggataatcagcatctggcaaaccttattcgatattcagcaatgcttgggaaatcagggtttctcaagcgaccacaagtcgctttcgatgctttcgaacctttctttaaggagcgtctgcgtgtcgaaaatcgccctgttgtaataatgcggcgccacttcggtggtgaacagctcaagaatttcggcgacctcgaacgagcccagcttgagctcgaagcggtcttccatgaaccgcttgatcttgtcggtagcctcacgctcctgctcgggcgcgaggttcaagatcggcggcttcggcttcctggccatttaccagcgaccatcccacgcggcgaaattctgcagcaattgcaggccatgggtatggcttntctccgggtgaaactgcacggcaaagcgcgaaccatcggccagtgcggcggcaaaatcgagccgtaatgcccgccacgtgtacagaccgtcga

SEQ ID NO: 639086 - DNA, 160 bp, Homo sapiens
  misc_feature (37)..(37): n is a, c, g, or t
  misc_feature (66)..(66): n is a, c, g, or t
  misc_feature (92)..(92): n is a, c, g, or t
  misc_feature (119)..(119): n is a, c, g, or t
  misc_feature (127)..(127): n is a, c, g, or t
  misc_feature (145)..(145): n is a, c, g, or t
tagtcgtcggggtttcctgtttcaaaagtgttggganggaacccggggttcgttccccaccccggncggccgcccatagtcagccctccgtnacctcttcaccgaaccctcgggattgncccaaggnccccgccgccgttccagngccgagaagacaccg

SEQ ID NO: 639087 - DNA, 1599 bp, Homo sapiens
ggacgcgtgggtcgaccacgcgtccgaaattacgatgtaatgtgagagagaccacagtaagaatgtgggtatttttagcggagtggcgtggggttctctcaatctatctctttcctccccatccccccatggggctgtatatggagatcaactatcctaccacgaacaacccagagcaacacacccaagcacgacctcacaacacccacacagcacagagcatcagacaagacagcaggcggaaacaaagcaacgaatcaggagaacagaacactagatatctcagtacgagaagcacacggagccgagcgcagcgaacacagaccacaacggaagacaatccagagacagagcacaaagagagagacaaagaaaaagcaccgacccaccgaggaccaacagaggacagcggactacagaaacaacagaaaccagcacaaccaagagaaatgaagcgagaactaaggagacaaaaagggagaacacagagcccgaagaagcgaagagaacagagacaggagacagaaggaaaaaacacacacacagagtgcaaggccagagccaaaccgagggcggcatgctggaggtcacgggccacggcgagaacaggacgggaggaggagggggcaggaagaacggcacccgtggggagggacggctcgaggcaggggagccgcgcggaaggaaggagggaaactgaagccaggcgacagcggggggagaagcaagcgagatgacgggaatagcagagccccaacgaccacgccgggcacgggccgcgcgagagatccacaaggcgacggaggcagaaagaaagagacacgaccaagcaaaaccgacgaccagacgacacaaagaagcagaggacgatcaagaggaagcggaaagacaaagcggcaagcacgcacgacagggagcaagcggacggcggagacgaaggcgagccactaacgccacgagcgtcacgagcaccgcatcggggagtggcggtgtgacacacgcagaagcggaacagcacgacgccagcagaccccatgtcgacgagacccacggtgcgcgatctgcgatgacaggagagtccaccagcgttgcaggcgccagcaagaggccgcacaagggaacgaggacgcagtgagcgcacggcaacgcagtgacacatgaggagcggaccgaacacacagcgagcgaccccccatccaggccaaggacatagggaagatacgagacaggagagagaggaaggcaggcagacacacgagaggaggcgcaagcacaggctgatcgttaggacgacgagaggatcagacgacgaaaaagacaacggacgaagagacgcaagacaactgagaacgacacgaaaaagaactagcaggctaagacgacaacaagcacgcgaaggaccaagccatgacagataaagaaaaacgaaagatcccacccaccggcaacaacaaaagacagcgacagacgagcgagacgaaggagggacagagagaagacgaaacgatagtagagattagggtagaatatggaagcgacggcatcttatcagaccagatagacgaagacagaaaaagaaatagcagacaaaaacgaaca

SEQ ID NO: 639088 - DNA, 191 bp, Homo sapiens
tggctaccatgttttacatttgagaggcgaacagaaaggatgtgctggataaaagcttgacaagttatgtactcagatgatgacttagaatctagttcagctccccaagagtttgaatacggtaactagttatttttctcatcttttttttttttgggttatttttgggggccgcccccgcagacaatagg

SEQ ID NO: 639089 - DNA, 315 bp, Homo sapiens
cagctagttgcaggcgtcatagagggaatcatggacacgtcgtggggatgttaaaagactctgttgatgtggaatcagaatccctgtggccagtcctgccttcctcttgctagctgtgtgagcttgatctagggtactctttgatcctccctgatacatgggcgaggtgacccacagtggcagatgcttaaccatccaacatggagtcatcatcattacttagacacccttcatttggaatcacgattctcagtgtgaagggcacttcccaccataggagcccctctctgtgagccctcagagggctgtctaatc

SEQ ID NO: 639090 - DNA, 158 bp, Homo sapiens
  misc_feature (30)..(30): n is a, c, g, or t
  misc_feature (65)..(65): n is a, c, g, or t
  misc_feature (90)..(90): n is a, c, g, or t
gcatggtccgttcattaggaattgtgtggntgatactgacaagagcggaggagaactgtgcatancggcgtgtgatatagtggggccgantatccaacccccctaggcgactgggggtcagtgcttcggacgctctgaacagtcgacggtatcgataa

SEQ ID NO: 639091 - DNA, 564 bp, Homo sapiens
aagatgtctaaaagtcaattggggtcaaggaacaagcctctactcacatgcatgtgggcaaatgaagtcacagaacaaataacctaccctgcatccaggcacggagtccagggacaccccctgctgctgcctaagagaaagtggcccaagaagcactggcccggtgcctgctgatgccaggagccctctgctactgcctgacacaagcatcctgcgcttccccctcccaggccctccccgaaagcgtgggccacaggtaccactccctatgccactgagccccacatttcccatcccccaagccactcccaccagccccagagctttcctacatttatgatttgtccaaaaatgtgatgcccttcagcccccagaaggtcatcctccaggctgtgatcgtcacacagggggtcccacatggggtcctcacaggccttcaacccagcacaaatcgtggcctggtttgacctttgaaatatctcaacatctaaaattcagagcttttttggaatatttattttccatagatataattctttcaaataaattccttagaaaacaaaa

SEQ ID NO: 639092 - DNA, 505 bp, Homo sapiens
tcagctggcccaatgtgggcatgtgctgaatcctgggattctcagggaggtagagatgctgactatgggtgaagccagtggtactgggggtcaggagagttgtagaacagatacctggaggcaaggacttccaggaaccatcaatatcaggtggtagaaaattccttctgggagatgggagtcctgagatcaaagctgaagactcactgcaggaggcagatggtatatgccggggggagtctgtagttacaggaagtgcctacaaaactggccctggaggcccaggagaccccagaggctgcgagggtgtcctacaggagctcaggggaagggatggccaggaaacagcttgggcctcgggtgaggtagagtatgaccccagaagcttccagtcttcccagggcttgatagcagttcagagagcagcagggggtattggcagaatagaatctaagggaaaaagtccttgggatgaacaccatctagcgtcagaaaaattgtggcc

SEQ ID NO: 639093 - DNA, 319 bp, Homo sapiens
cggcacgaggagagatccagttgttcaatatttcccagcatgcctctggactttagagaaacagttctggttcaccataaacccatatattcatacaataaatacatatattgagctccacctacaatataatataatttgcattcactaacatgtttgttcagcaaactttgactcatgggctactatgtgccaggttctatgctaaatattgggaattcagcagtggcaagatagacatggtccttgtccccatggagctttcaatctaatgagggagtcagatttaaaccccaccccaaaaaaaagttggcggccg

SEQ ID NO: 639094 - DNA, 83 bp, Homo sapiens
taaaatattaaattaaaaataagtagtaaagtataatcccatccctgttataagtgaggaaataaagtatttttgaaaaataa

SEQ ID NO: 639095 - DNA, 501 bp, Homo sapiens
  misc_feature (210)..(210): n is a, c, g, or t
  misc_feature (319)..(319): n is a, c, g, or t
  misc_feature (358)..(359): n is a, c, g, or t
gaaaaagagaaaggcatttttatatatacttggtggtgaaactcacaccaaactgaagtcaaccttatttaacgttcttgtgaatttagaatgtgtgaatagctctctaagatgtaaaagtgacacatactctattttatgcattgtcacaaaattccataatgtaagaaatttacttattttctgaataattatatatgaatgcccaanaataaaccactgtagcactatttgctctgtaaaaatatgaaataatagcataattgtgggagcaaggaaagtaacaaagaatacaatattaaatgtagacttattcagncctccatattactaaaatcaaactccttctatatgatannatgtaaatcactgaatagacaagcagtggtttctcctaagaccagcaatttgtgtatccagtggtattattgaatggtaaagtcttttatataagcacagttaataaatgtgggaacactcaataagatttccaatttggag

SEQ ID NO: 639096 - DNA, 604 bp, Homo sapiens
  misc_feature (20)..(20): n is a, c, g, or t
  misc_feature (35)..(35): n is a, c, g, or t
  misc_feature (195)..(195): n is a, c, g, or t
atgtacaaaagaactgaagncagccccttgtcaangtgcccaattgttacttgtcctcaagaggctccctcaaacccaatcaaccaattctccctgccccagaggaataagccctgtggacgcccagacccttggcataggtgcgagcagtgaggagacaactggctccagccagaggggcagccagtcctccanagcaccaaggccacctctcctcactcccccacaacgattacagaaatcagccagtgaaggcagtccatgggaagagagtatactcccggggcgccagccagcaaggtggtaaaggcacagttacaaagccaagtcagattccagacactagagccactgtcccatgtccagaggagtggcaataaaaggactggaggctgtgtgatctctgtggcagaagggtcgtagcctgccacatcctcacacatcacacagacgcaggaaagagcatcccgaaagcagaggcgcaggaataacttagaccttctgggagagttagtagctcgctatgcctggatggagtcccgaccatctaaaatgtctctgggagtgctgacagccgaaacatgcttccatggtggcccaccaa

SEQ ID NO: 639097 - DNA, 234 bp, Homo sapiens
  misc_feature (78)..(78): n is a, c, g, or t
  misc_feature (174)..(174): n is a, c, g, or t
  misc_feature (203)..(203): n is a, c, g, or t
cccagacactgccagcagctcccagcctcgtcctccttccctctgtctcctgttcctccttgtcaccatcagatccgntcacatcactctctgactccttgctgcccacaggtcaggtcaaaatcctcagtgtggcattcaaggccgggcacagctgggtgcagtcaaccacgnaggcgcatttccaaaccctccctccgctnaccgtcctctgcctgggcagctctggtctgt

SEQ ID NO: 639098 - DNA, 111 bp, Homo sapiens
ccagacagagtgaggaagaggaggaggaagaaaaacatcctcctaagcctgcaagccggagaagaatcggatcaataaggccgtatctgaggaacagcagcctgcactcaa

SEQ ID NO: 639099 - DNA, 344 bp, Homo sapiens
  misc_feature (2)..(2): n is a, c, g, or t
  misc_feature (14)..(14): n is a, c, g, or t
  misc_feature (27)..(28): n is a, c, g, or t
  misc_feature (50)..(50): n is a, c, g, or t
  misc_feature (102)..(102): n is a, c, g, or t
  misc_feature (105)..(105): n is a, c, g, or t
  misc_feature (114)..(114): n is a, c, g, or t
  misc_feature (121)..(121): n is a, c, g, or t
  misc_feature (159)..(159): n is a, c, g, or t
  misc_feature (162)..(162): n is a, c, g, or t
  misc_feature (169)..(169): n is a, c, g, or t
  misc_feature (176)..(177): n is a, c, g, or t
  misc_feature (202)..(202): n is a, c, g, or t
  misc_feature (242)..(242): n is a, c, g, or t
  misc_feature (259)..(259): n is a, c, g, or t
  misc_feature (269)..(269): n is a, c, g, or t
  misc_feature (273)..(274): n is a, c, g, or t
  misc_feature (303)..(303): n is a, c, g, or t
  misc_feature (307)..(308): n is a, c, g, or t
  misc_feature (327)..(327): n is a, c, g, or t
  misc_feature (330)..(332): n is a, c, g, or t
  misc_feature (335)..(335): n is a, c, g, or t
cnccccatcctttnccttatctacaannagttttccaggaaggtggaaanggaagtgttgctctcattgtgtgactcagtgctgctgtccatcccatggaancangggcacaancaagtanttgtccagcctattgcaggcttttcctgactttaaaanaangtgtgancaataanngtacctttgattatacagttattantgtgtctctgatgtactgtggattgtacatttacctttgnaatgcctttgtaataancagtcttaanaaanngttgacaagctctggttccttatttttanaaanngagaacatttaataataanaannnaangggattaat

SEQ ID NO: 639100 - DNA, 828 bp, Homo sapiens
actgatgtattggtgcgttgcgcgaagaagttgggggtatcgctggtgctgtgtatactgtaatcactgaacggtcctgggtgcgccctgtacgtatgtgctccgtattcatccacaaagtcccgaacgcgcgttttcatctctctcctctggcaggattgcgaggagtgcagttcctgggttggaatggagtgcctctctgacaaagtatgtgcgaactaataggctaatgcatcaatagttgcgccctcgtgccggtgacgaagaacacatgagaggctcactgaaaggtctgagaagcaaagtaactgctataaaatctctttccattgaaaatacggccatgaagttaaaacccagaatacattattagctgaaatggattcacaatttgatttccacaactgatttctaggtaaaacctatgtggcaacactgaagatttatccagagtgacgcaaacaaagctgctgtgcccatactgatgctgtctctccattgtctttccatcatctcattgccttattaccctgcaggttgcatgcactgtcactttgtcaactttggaattttgcccaaccttagtgcctttgcagacacccacttttgattaaacaatcagcatccaacacattcctagtgtccaaatactgtggcatttccattggaaattgttgcattttggtaattttataacccacttatctcatcccagggtcttgatctgtcctagtggctccattagccctattcacgggtagtacagtgtcaccataattcagatgtctattgtgccatgcactacaccatacatcgcacaccagccga

SEQ ID NO: 639101 - DNA, 621 bp, Homo sapiens
gatcggcggagagagctggctcaggacgtccgctaaggctcggacgagctgctgagtcctcccaaagcgcttccataaggctttggctttccaacttcagctacagtgttgagctaagttcgtgaaagaatggaaaaaagaagatccctgggccccttgtcttatgtgcttagccaaagtcgtcgttgtagtctttttgcccaaggctgttgtgtttatagaggtgctatctccagttccttgcactcctgtttaacaagcaccttcagcgagagcagcagcgagcgatagcagctcgcagaagagccgagcggggtctgctcagtgtcgatgaccatgggcgggagatcacaaccgggcagagaggatgctgtggatccttggacgactacctgacctctgcaaaattccttctctaccttggtacattctctcgtctacttggccgagatcgcgatgtggcacatttgcggatgtctgatgtttctggtagagctctatggaacacagcctccttttgacagcagtctacgggctggtggtggccagggtctgtatctggtcctgggagccatcatcggtgactgggtggacaagaatgctagacttaaaagtggcccg

SEQ ID NO: 639102 - DNA, 923 bp, Homo sapiens
  misc_feature (358)..(358): n is a, c, g, or t
taccaggcttcggaataatctcccatatagtaacgtgactactccggaaaaaaagaacctatttgggatacactacgagtatgcgtctgagactatgatatactaagttggacttccatagggttgtaacgtgatgacggcgacaccagtactatattagcatgtagtgaataagacagtacgatcaacatcggagcgataattctcagcacgtgccgtcttgaaaccaataagtcgtatcgcttaatcacgcactaccaaggggtcagaagctatgttaagcctgacatcgcgactactcgcacaggaaacgcaaatatgcaaattgattcttgcttgcacgtagctgcgtgtagcngcgtaaaggatttcagtcttcttctttggctaccaggtaggctgtgcctggactggcgaatttgtgaattagacaaatctcagtcgacgtaggacgaatcggtacctaccacggatcaacgctacctacgatatgctagactacgacttccatgctatgatcacgtagtcactaggtgagactgatcattagctcatcaatacggaaggcgttccatgtcagctggaatttgccacgcatatatcgtacatggcgtaacgactccttaggtaccaggatccttactgtcaagaatcccatgtccacgtaatcagtaattcagtcgggcgataaaattcctaaacttgtctttacccagcaacaacattttctcgagcctatccggaattgcccccgacgttactcggactaacccggatgcatacagccaggatgaagacattcctatcatcttgtaggctcattccatttctctaacaagcgaggtaaatattaagtaaatttgcatgatttgagaaagccttccgcgttcgaaggcgaaaagttcgtaagtagtagaaggaac

SEQ ID NO: 639103 - DNA, 120 bp, Homo sapiens
ggctggtgatcagagtatcccgagtgtcgcgctgtatcatatagtagaggtacatgccgtacttactcttgaattcagacctaattttacaatcatgtccacttcactgcgggagacact

SEQ ID NO: 639104 - DNA, 163 bp, Homo sapiens
ggatactttaaccgaaggacgggtaggtcattcaactccacatacatgcgctttactgcattagatttctgtgctttcttcctttccctctttgaagcaattaaaatcttcctggataacggcggttgtctttctactcttgtttcgggcaatttagtgagtt

SEQ ID NO: 639105 - DNA, 102 bp, Homo sapiens
  misc_feature (23)..(23): n is a, c, g, or t
  misc_feature (64)..(64): n is a, c, g, or t
  misc_feature (90)..(90): n is a, c, g, or t
  misc_feature (98)..(98): n is a, c, g, or t
tttcctctgcgttcgctccggcntgctggaggctgtcgtccaatgctccccaaacggcggcgangcgggtcgggtccctagcggcgatcntcctccangccg

SEQ ID NO: 639106 - DNA, 148 bp, Homo sapiens
ttacgtgatgtcgagaatcgtgccgttggtatattgagcaccacgtacttgtcagtttacccgggccactggctgtcttcttccggctgcttcaggacgtgtttcttccagtcggcaatggccgactccttacgcatcagaatgtctg

SEQ ID NO: 639107 - DNA, 246 bp, Homo sapiens
tattcccttcattatgcacatgatagtttgtgatagtaggtccagttatactaacaatcagatttctatattaagaggtctaacgtgatacgattattactatgcctccatgtgcagctgtgcactcttgtaaaggacatgactagtctcatcttaatctaagagcaagataatatatactgatcctctacagatagcctgctcctcataatctctcctatttttgtattacccagctttcttttt

SEQ ID NO: 639108 - DNA, 502 bp, Homo sapiens
tggctaaacataggtcatgcgtacacatatgcacacgtatgtgcacgtgccacacattttctgtataactgtcgggttcgcattatcaacagtgttgtcaaatgttctattgtatctgcatttagcagtggttggcttttatgaattgaaattatttgcgcattgatgcattgaaataaggaaaattatttatctctgagcactaaacttatttttgcatatttctgtaatattgcagtccccagatccagaacatgggaagttagggaaaatgtgtgattttgtgttttgaattactgtcagaattacatacacaattacaacaaactttttttaaaagacatttcattgtactgcaaaaatctgaatatttatatttcttgttttattctttatatgttttgcattttaatatgttgagccactggaaatttgtaacagattaatttgttataggagtttaaatttgtagtcattgtctccattgtctttgtccagagcc

SEQ ID NO: 639109 - DNA, 224 bp, Homo sapiens
tccgcgcctctctgtggggttgttctgagctttctctgactcctgtctgctgcactggagttaacgaactggaatgatgactcagtcctcttctcttatttctttgctggcctctccgtgtgtctgggagcgggagagaggctgggctagagaatggtgatgaactgtggccattactcttccacagctgtgatatgcctcaagtggagctgtaggaactggta

SEQ ID NO: 639110 - DNA, 221 bp, Homo sapiens
aaggctatagtgggctatgattacaccactgcatttcggcgcgggtgacagagcaaggccccatctcgaaaaaacaagaggacatatccgtgccaaaaaatcaacggacattacaagtgatgctcttcgcccaacatccaaagaactggtttaccggcacacaactgaatatacatcagatgaatgctaagagaaagaagatatagcaatattattgccaa

SEQ ID NO: 639111 - DNA, 164 bp, Homo sapiens
  misc_feature (34)..(37): n is a, c, g, or t
  misc_feature (39)..(39): n is a, c, g, or t
  misc_feature (46)..(46): n is a, c, g, or t
  misc_feature (59)..(59): n is a, c, g, or t
  misc_feature (62)..(62): n is a, c, g, or t
  misc_feature (73)..(73): n is a, c, g, or t
  misc_feature (100)..(100): n is a, c, g, or t
  misc_feature (107)..(107): n is a, c, g, or t
  misc_feature (111)..(113): n is a, c, g, or t
gtgggtgtcaaactccaagaagacatacactttnnnntnacttctnttgaagatattgnaanttccaattttncatgtgtactatgtcagaaaatgcttncgatttnattnnnaaatctaacatcggatggcttttccggagtgttgtaaaaacttcaatcata

SEQ ID NO: 639112 - DNA, 568 bp, Homo sapiens
tgtgaggaagcactcgtgatgagtgaggggactggcatctcattgtctgatgctgtgattggctgagtttcaggtctctgatgctttttgagaggactgagagtcctttcctgaggaaggaactcagataaaacaaatataattttcttttatagaatggcttgacctcaggagtttgaaaccagtctgggcaatatggtgaaaccctgtctctaccaaaatacaaaaaaaaagagggttgcttccaagatggctgaataggaacagctccggtctacagcttccagtgagatagacgcagaacacaggtgatttctgcatttccaactgaggtacctggttcatctcactgggactcgttgaacagtgggtgcagcccatagaggatgagccaaagcagggtggggtgtcacctcacctgggaagcgcaaggggttgggggatttctttttcctagccaagggaagctgtgagtgactgcacctggaggagcagtacactcctgctcaaatactgtgcttttttccactgtctttgcaactgacagaccaggagattccctcttgtg

SEQ ID NO: 639113 - DNA, 121 bp, Homo sapiens
ttataggtctctcgcttgctcaggtccttccttgctcaggtctcgtgggcgtgacagacctgtagcaagccagtgacctgtagcaagccaggacaacaacacacagacctgagcaagccag

SEQ ID NO: 639114 - DNA, 416 bp, Homo sapiens
  misc_feature (15)..(15): n is a, c, g, or t
  misc_feature (229)..(229): n is a, c, g, or t
ctttttcctcccctncccccaaacctcctccccataattaataattgccatataattatccttagtcctccccataaaattatcatgccatattatgaaatcctttaagagggaaaataggctgggcgcctggtggtcacgccctgtgatccccagtactttgggaggctgaggtgggtggatcacctgaggtcagaagtttgagaccagccctggcccaacatggtgnaacccagtctctactataaatacaaaaattagatgggtgtggtggtgcatgcctgtaatcctagctacttgggggctgaggcaggagaatcacttgaactctagaggtggaggttgcagtgagccaagatcttgccactgcactccagcctgggcaacggacgacactctgtcgccccaccccccaa

SEQ ID NO: 639115 - DNA, 656 bp, Homo sapiens
  misc_feature (137)..(137): n is a, c, g, or t
ggggtgggacttgggccacacgtctccagctcggtccttcttcttaagggcataggagttcgaggagccctgggcagcatggagtgagctcatctgccaggcactcagcaagggtcttaatgtctccggaggggggnctcacgagcgcttggtgcacagcagccagagtggccggggttcacaggggcgcaggggggacacatccacagcccgtggtcgtctcacagtctcccgggcggcgcccaagggcggtggtggagtccctccgcggggaaccacgggtctgatgagggcgatacaccaggaccgtgcagagggtcctcgccgtggtgagccagggtggtatgatctcgaaaggcatgctgtgacgagtgcgcacgagtcatgagctctctggccgatgaaggcggccgggcatcaacaggggagtaagggagggcgctccacaaggggacacgtgagacttggcggaagcgtagggggcgcataccgccctagcctggagaggcaggtactgggactacttctccttcaaggcaaggtaatctgcagggaaatgtcatggtctggacatcatcggggccattcccaagagtgatgcggggcccgcccgggggcgggtccaccgggcccgaaacagcgaggtctgcccgcga

SEQ ID NO: 639116 - DNA, 377 bp, Homo sapiens
ctgtggacattaagggatgtcagctgaaataatttctctagatgacataaggacacttagacaggtcgacggcccctcccgcctttggacctgtgtgtgacctgcttcggtctgataccctcagaggattatggcaatgagaagaccttggaagcagtatacccacaacactgtccgagggtgctcttatttctacagttaccctgcagtttgtgaatttatagcagaccaataatttactatcaatatatcagagcccatgaagcccaagatgctgggtatcgaatgtacaggaagagccacgccacaggcttaccaccacttattacaatatactctgccaccaattacctagatgtctataacaatacagctta

SEQ ID NO: 639117 - DNA, 136 bp, Homo sapiens
tcaggattcgtagatcggaataaaaaaaaaaaatccccacccctaccaatggttttacttcctcttccggctcagggagcagatgggcctcactgggttggagatggaatagaatacctggggctatgaggtcacc

SEQ ID NO: 639118 - DNA, 352 bp, Homo sapiens
gcggcgttcgtgtacgagttctctgcaggtcactagtttcccggtagttcacctgcattaatagaatcggcaagtaacccaccaaaacaaaacaaaaaataaacataaacaatctaaatcacaatacaaaactatacacaacaaaacataaaacaaacacacatcccaacacaaacactcaacaaaaacaacaacaaacaacacaaacatcacagcaaacaaacaaacataaataattaataaaatcacacaaaaaacactaagaacaacaaacaacaacacaacaaaaaacaaaaatactcacaacataacaataacacagacaaaacatacacacaccacaacactaaat

SEQ ID NO: 639119 - DNA, 469 bp, Homo sapiens
tgccacactaacaactttatttctctactcttgtgtctacaactaaactttttataaatgtacgaagtttgtcattaccattatttcttcctaaactacctctatgcttaaatttattgttccataaatctaaaggttgtagtcttgtcctgattcatgaattgtctctatgaatgattgccatcattactagcagaatttatcaacaaattgtcctgtgattcacaacatgatatattataatatattaggcagacgtattgtcatcaaataccaaatttatcttgaaaaatgatagcagtacaacataatggtaattatctggctccatagataaaaaataaagaatgcttagtaaagtacttgtaaaacctgcctctacataaaatagaagaacatgtgcaaatcatacctgaaagaatttggagttcaaattcttaaaacaactacatttaagtgatgcttttgt

SEQ ID NO: 639120 - DNA, 331 bp, Homo sapiens
  misc_feature (66)..(66): n is a, c, g, or t
  misc_feature (126)..(126): n is a, c, g, or t
  misc_feature (145)..(145): n is a, c, g, or t
  misc_feature (165)..(165): n is a, c, g, or t
  misc_feature (183)..(184): n is a, c, g, or t
  misc_feature (199)..(199): n is a, c, g, or t
  misc_feature (202)..(202): n is a, c, g, or t
  misc_feature (222)..(222): n is a, c, g, or t
gatttctagaccccctttctgtttggatggcctatgtgtatatgcatggccaaaggcacctggggnctgccgggaggctataggatatccgcattagggaccctgagcctttaagtggtttctatnccttcttagttattatgtnccaccttcttagttattacntgccacctcccctatganngacgtgtttgatcantancagaatagcaagcagagtancattcatgctggggccagaatgatggccggttgccagatataactggctttgggagcaaatctcttctgttttagagagatagaagttatgacatatgttaattacaca

SEQ ID NO: 639121 - DNA, 515 bp, Homo sapiens
  misc_feature (35)..(35): n is a, c, g, or t
  misc_feature (45)..(45): n is a, c, g, or t
agtagcgattttattatcaatgttattcattcttntgaaatatanagtacttcagctgaattaaggttgcagataatttttaaaatacaacacacatcatgactagtatattaaaattatttatattcagatatttatatctaatatcaaatgaaaatttactaccaaattttcacagtagacattaatcagtctgacatgcttattgatcccataggtgtaattatagatcaacatgattttagtgtctattcttttattttactaaattaggaacgcagcatttacagaacaaataaacacaagtgacgtggccaccccaggatctaacagctcttcagtgagctatgttgcaagctcagaagtaatccactaacgaaccaagtcagactccagttcttcatcaaaaggtgctggtggaggttgtcagacgccttccaatatagatccccaatccgatggccagcaaatgagagagcagcagagatggaaggaaaactttcagaaattctgca

SEQ ID NO: 639122 - DNA, 967 bp, Homo sapiens
gcttcgtcaagcccccaggctccgcgtcttgcgtgagggacaggagccatggctcagaaaatggactgtggtgcgggcctcctacgcggttccaggctgaggcctccgtacaagacgaagcgccttgtcatatgcagacgcttgatggaggccatccagatctcagagggtccacctactaaccaggcccaccgcaggtgctagtccccagagttcacagtgcccaactgccaatgagatggctgacattcaggtttcatgcagctgccgctaggtgctaagtcagcctttaaagtccagaatgccatcagcaaaatggcccatgtggtgtctatgattactctcaggctcataatgccaaggatgtgcccaacacgcagcgcaaggtagctttaagtgccaaaatgctagcccaaagggtccaaatgctgctatgatttcttcccaggacagcaatcacttggtgagttagctgctaagaagtctgagatgtgcttcaatggcccagaatgccactacgtaaagtgtgcgcacattgccacctacaatttctctcagtctctcaaatgccaatgacctggtcaaccaggagggctaaggaccccttatcacggttggaatgataccactaaaggcccgagcagttgataacccagagccagaatgtcaattcaggggcaaatgggattccagggtgacttagagaacgaccatgtttttctgagctggtggtgaactgagcgacctcggagatggtccaggtcagaattggggtccggacatgatcgtgcagagaccgcagattatacttgatgtgggacagtgaggggactaaggggcactgttcaggacgagatggcatgtcaccgcctaaccgcgtggccaagtgtgacaccaaggtggaccgtcgtgaaaagcgggcacagtacctgttcccggaacttggcgtgtgacaaagataccttgg

SEQ ID NO: 639123 - DNA, 385 bp, Homo sapiens
ctgtaggaattcggcacgagagagccgttgcctcttgtgctgtagacacagccacagcctgtgtaaccgccgcctctggaccggctgtatgattaggccacaatctttaatgagtaaacatattcctcaatatctgtgaggatcttggtcacacatttatggaggttctgaagggcagcggagattactgcgaagcacaacacgaactctatgcaaacaagtgagacacgggaaaccgagtactggttcaacaagaaacccccatatagaatgggtattctggacacgtgttgaattggaatccacagagcattttacaagagttctgaactgtatggggtatctcagagcacttgttttctgttggtctcagttactggattgc

SEQ ID NO: 639124 - DNA, 810 bp, Homo sapiens
  misc_feature (483)..(483): n is a, c, g, or t
  misc_feature (612)..(612): n is a, c, g, or t
tcatttcaaaataaagaacattctaaaatgaaaaaaaaaaaaaaaaaaaaaaaaaaaaaaaaaaaaaaaaaaaaaaaaaaaaaaaaaaaaaaaaaaagggggggcgccccaaaaccccccggggggcccattcccccccatgtttgttgcagaaacaagggggccccaaataagaagcgtgcatattaataaacaacgaacaagcgaccagcgggcgcggtctaataaaaacagcggtggagtagggagaaaaccactgagatcaggtaggctaactgttggaggagaagcacaccacctatctagtcgtcggggggggaacaaacaatatagggcagacccacccaccacccacacgagaagatatttataagccgcctcacaagaggagcaaacatatataaacaacttagaacgaggctgatactactggatggtagagcagacaccaacccagcacaaagatatatatttcgcggcggngcgtgatcggaagacaaagcttatcgcgtccccatcaacgacaggtgaagatagacgtatctttatagcgaaaaacaaatttatcatcctcccgcgcgggagctcgattgcatgaagaaataactacgnacgtagcaaaaccaaacgatcaacaatcgaacgtaacgaccagcagatacacaacagcaagaagtcaaagccatcagagaacacagaacaagcaaacagtcaaaagcagaccaacacaaacgagaagcagaagtagccgataacggaccggagcagcacaacgacaaaccaagcaaccaaaaagtagagcatagaagt

SEQ ID NO: 639125 - DNA, 92 bp, Homo sapiens
tccaggaccatctgcccagggaatggtgttgccctcagtgggctaggaccttctacatcacaataatcaacagtcaagccagtccatcacag

SEQ ID NO: 639126 - DNA, 118 bp, Homo sapiens
taatctgtacttgcggaagccaacgactaccggcgccagttgcagtccttgacctgcgacctggagtctctgcgcggcacgaacgagtccctggagaggcagatgcgcgagcaggagg

SEQ ID NO: 639127 - DNA, 234 bp, Homo sapiens
ggtacctcgtagttgtaggaggcacctgcagcgcctgagcatcccgtcatggtggtcaccctggaccccacgcgggaccagtgcttcggggaccgtttcagccgcctgctgctggatgagttcctgggctacgatgacttcctcttgtccagcgtgaagggcctggccgagaccgaggagaccaagggcttcctgccggaatgtggtgtacgggccgagccactaccgccttgg

SEQ ID NO: 639128 - DNA, 155 bp, Homo sapiens
ctggcaagacattcaagtgaagatgcgcttctggggtccccgcggtctgtcatctgacttccgccctgtgcacccccttctctgtgacccatttctcatcactgacatagaaacccatagacccatacacaggtcatgtcactgtaccctcctgt

SEQ ID NO: 639129 - DNA, 284 bp, Homo sapiens
tgtcatcatattgtctgtgccagagtgggatttgatgagagggttctcctgctatttcaggtggtagattcacattctccccatgtgccggagcttctcaactaatttggttctcacaaaggcgattgatctgtgtattgctgttgaatcagtgtgtctgtggatgaaaggaaagtccaggacttcctattctatcatttcactgacatcgttcttatattccttctttttgaccctcttacgattttccatactgtcttttatccatatcttgctttttatat

SEQ ID NO: 639130 - DNA, 451 bp, Homo sapiens
aggtcccctgaagtccaaaaaagacatattgagcttagttggtatattaagatcatatagaaaacactgtcaaatataaaatggtgtttaaatttctttgggtcataatcatataaatgttattaatttgtattccaaaattgtatttttggaacaaaatacaattttttttcctaattctcattctgatttgtctataattctgatttgtctcagtatttgtatccagtaataattatggttatgtgaaattactgtgtgccacagagatggctagatttccttgttaattgtggctttaactgtgactgtcctaagacttttgtcatccatggataattgttgtcttgatccttttcaaaaggtggcttataatcagctataaaactctcatgggtgcccttgaatgaaggtttctgataactttagtggttgtgccattgaaatagaa

SEQ ID NO: 639131 - DNA, 922 bp, Homo sapiens
tattcccagcaacaaaacacaaagaagagaagacatatgacgaccggccgccatggggaccatgttccccccgcgtgtgaacagagtcccatattgagccctcctctaaaggcgccaattcactgcccgggtaaggccaaccactgtgggcaccccgcctttaacggcacacccactggcaaccggggactagtgcccacgggcggaacgcacgtcagcgtcgcccggtgcgcgccgcgagtgaacccccacgtctggcgcagaaaagtgaaacactagtgtgtcttggcaagtgccccagctgttctttgttccggaaagtgttacccctgccttctgtttacaatcagttgaagttcgtggcgcccaagtggtcagtgtaaagagacaaatgcctgttgtcccccccccgccgctcactgttgttgttgatggaactcactttcatggtgaaatgggaggtagggatgggcaatatgtgacgactgcctcctttgcgacgccaccgttggttcataaacgtccccacagagttcttccctaaaaggggcagagtcaaccatttcttatctggtccacactgcggctctatacaggaccccttccaatcttcatgtagttacccctctcctgatcccatctcaaacaaccgcgggcgacacacattttcacaacacacggcgtaatcaataaatgtacggtattctaaatcttgtttggcacattaatattattgggctcacaggactcgcgattaaactattctcgcctgcacccctccgtaggtgctccaattaaaagaaaaaacaacaaaagaaacctcgctgtgttaaacacacacaacgtttgtctttttcccccctccttttaagcccactcttcccccctcaaaaaaaaaatgaacaaatcgccccacatgaca

SEQ ID NO: 639132 - DNA, 101 bp, Homo sapiens
agactctggtcccgccaaagtggcctccaagaatgtcatcctgccctggaactggtggagcccattaagaatgcacgaggtgcagcaaagtctgatgttta

SEQ ID NO: 639133 - DNA, 649 bp, Homo sapiens
  misc_feature (274)..(274): n is a, c, g, or t
  misc_feature (325)..(325): n is a, c, g, or t
  misc_feature (341)..(341): n is a, c, g, or t
  misc_feature (365)..(365): n is a, c, g, or t
  misc_feature (380)..(380): n is a, c, g, or t
  misc_feature (393)..(393): n is a, c, g, or t
  misc_feature (397)..(397): n is a, c, g, or t
  misc_feature (404)..(404): n is a, c, g, or t
  misc_feature (413)..(414): n is a, c, g, or t
  misc_feature (421)..(421): n is a, c, g, or t
  misc_feature (450)..(450): n is a, c, g, or t
  misc_feature (467)..(467): n is a, c, g, or t
  misc_feature (481)..(482): n is a, c, g, or t
  misc_feature (485)..(487): n is a, c, g, or t
  misc_feature (489)..(489): n is a, c, g, or t
  misc_feature (492)..(492): n is a, c, g, or t
  misc_feature (495)..(495): n is a, c, g, or t
  misc_feature (632)..(632): n is a, c, g, or t
  misc_feature (635)..(635): n is a, c, g, or t
  misc_feature (642)..(642): n is a, c, g, or t
agagtttaggaagaaaggaggatttgaagggggaggattccttggaagaaagaaagttccctatctggcatcatcaccaagtacttccgatggaggaactgactcacctggtactgcgtccccatctcctacaaagactactccatctcctcggcataaaaaaagtgattcttcaggtcaggagtacagcttgtgaaaactcaccaaaatgaatagttgtttcgttacatttagatgaaagttaaactttactgaatttcagtacattagtttntacactaaaactttacaagataaaactggacttcatttagtatcttttctnacagaattacttggantaatgagatacgaattacaaaccnttttttttccaaaantttaatctatctntttngacattnggaaatttnnttaattntacaagtacatttaacagatcatttatanagcaggagtccattttnacacttaccgactnnttnnngnttnggnaacatattaccacgtcttaataggatggtgcccatataggtgagcatccctttagatcatgggaaccagcagacttcattcctaatcttcattatgcctgagacttgtcttacaatgttacctttaagtgaatcacntantcgtctnggaaact

SEQ ID NO: 639134 - DNA, 619 bp, Homo sapiens
  misc_feature (274)..(274): n is a, c, g, or t
  misc_feature (325)..(325): n is a, c, g, or t
  misc_feature (341)..(341): n is a, c, g, or t
  misc_feature (363)..(363): n is a, c, g, or t
  misc_feature (367)..(367): n is a, c, g, or t
  misc_feature (374)..(374): n is a, c, g, or t
  misc_feature (383)..(384): n is a, c, g, or t
  misc_feature (391)..(391): n is a, c, g, or t
  misc_feature (420)..(420): n is a, c, g, or t
  misc_feature (437)..(437): n is a, c, g, or t
  misc_feature (451)..(452): n is a, c, g, or t
  misc_feature (455)..(457): n is a, c, g, or t
  misc_feature (459)..(459): n is a, c, g, or t
  misc_feature (462)..(462): n is a, c, g, or t
  misc_feature (465)..(465): n is a, c, g, or t
  misc_feature (602)..(602): n is a, c, g, or t
  misc_feature (605)..(605): n is a, c, g, or t
  misc_feature (612)..(612): n is a, c, g, or t
agagtttaggaagaaaggaggatttgaagggggaggattccttggaagaaagaaagttccctatctggcatcatcaccaagtacttccgatggaggaactgactcacctggtactgcgtccccatctcctacaaagactactccatctcctcggcataaaaaaagtgattcttcaggtcaggagtacagcttgtgaaaactcaccaaaatgaatagttgtttcgttacatttagatgaaagttaaactttactgaatttcagtacattagtttntacactaaaactttacaagataaaactggacttcatttagtatcttttctnacagaattacttggantaatgagatactaatctatctntttngacattnggaaatttnnttaattntacaagtacatttaacagatcatttatanagcaggagtccattttnacacttaccgactnnttnnngnttnggnaacatattaccacgtcttaataggatggtgcccatataggtgagcatccctttagatcatgggaaccagcagacttcattcctaatcttcattatgcctgagacttgtcttacaatgttacctttaagtgaatcacntantcgtctnggaaact

SEQ ID NO: 639135 - DNA, 476 bp, Homo sapiens
  misc_feature (225)..(225): n is a, c, g, or t
  misc_feature (234)..(234): n is a, c, g, or t
cggtggcggcggcggctcccacattcccgtttccctgaaaggcagctttatttccacctttaagatcaccatcatcatcaagacctaaaaaaaaaaaacacacacacacacatttttgctgttgagctcagcttatcaaataagaacaaaacccattaaaaaatgtaaaggttacaatggttaataaatcagcattatggcactggtcacagtttatttcctaanatgcctccngatatatgcagataccatcttctgactgaaggtgaaagcttatccttgaagaaaatacagacagacggcagcacacacggcacctggcctaaggaggaaagcagaacatgagggaaggagaggaaagcccatctatcttctcacagcccgctcagcaaggcacaagcctcagcagcagcagatgcctctctgttgcctggtaaccactctcactagctgagcaaaacagaacaaacaccaat

SEQ ID NO: 639136 - DNA, 295 bp, Homo sapiens
cagggagccctcgcttcggtcatctcatcctaagggagaatcggcggcagaatgtcagaagtatctacaattcaatgatattcttcatagtcaaggaaagtaactctgcaagtaagagaaactgcaatacaagtaggaaaaggatgtgatatccatattacaagtcattcaaagacagatgagtcatcaccgagtgttatcgccaaggaagccttctcacccagtcatggattatgggcagtgcaacatctttagacttgactcttcctcaccagcaacgaacttctagtcatac

SEQ ID NO: 639137 - DNA, 276 bp, Homo sapiens
cggctgcgtacagtggtgtgatctcatgctcacgacctccagctcccaggtcaagtgatctcctgtctcagcctcccgagtagctgggattacaggtgcatgcaccacacacagctgatttttgtatttttagtagagtttcatcatattggtcagactggtctcgaactcctgacctcaggtgattcacctgcctcagtctcccaaagtgctgggattacaggaatgagccaccatgcctggcctttgttgttttattgagacagagtctccctt

SEQ ID NO: 639138 - DNA, 361 bp, Homo sapiens
gagaccgccggatcttcacacgtaagtgatgagtgtgtggctacatacaaaggagtcccttggaggtgaaagggaagggagtatgtagggctcaaaccattagcaacagtggaatcaaataaaaggcttccactaccaaaagacattagagaaaaccttaaaagtactaaagagaaatatattggtcacttaaaaaaaaagcattacctggtggggaaacaatagttagaatggcctcgggatctctgagaagaaaccagggaggccagaaggcatagaacaatttttttttttttgggagatgggagcctggcccggtggcagagagccaagaccgggcggcctcaggggtacggagctc

SEQ ID NO: 639139 - DNA, 250 bp, Homo sapiens
gtggctataagagggcaatatgagggatctttcgtagtaataaaaatgttctgggttaggcacggtggctcacaactataatcccagtgctttgggaggccaaggtgggaggattgcttgaggccagaagtttgagatcagcttgggcaggacatcaagaccccacacctacacaaattttttttttttttttttttaagacggagtctcgctctgtcgttcaggctggagtacagtggcgcgatctcgg

SEQ ID NO: 639140 - DNA, 132 bp, Homo sapiens
cccgtgaagatcggcgactttgctttcgtgaagatcggcgatttcggtttggatactcggcgtgtgcatgcacacgctgagaatccaaactgcacacgccgaggaaccagaccatagtcgccgatcttcacg

SEQ ID NO: 639141 - DNA, 290 bp, Homo sapiens
agtgtgttactagagaagtttctctgaacgtgtagagcacctcagaccccaagtagctgggaccacaggtgcatgccaccacaccaggctaatttttgtatttttcagagagacaggatttcattatgttgtccaggctggtcttaaactcctgagctgaagcgctccacctacctcagcctttcgaagtgcccgctatttacaggcatgaaccactgttgatccagcacttccccgttttgttttttggcttatgaattttgttgtttattatgaaatgtaagagtgag

SEQ ID NO: 639142 - DNA, 666 bp, Homo sapiens
  misc_feature (7)..(7): n is a, c, g, or t
  misc_feature (53)..(53): n is a, c, g, or t
  misc_feature (468)..(468): n is a, c, g, or t
caaaggnctccaagagtaaagaacatagggtcgccttcgggcggcctttttgngttaaggaggttgactaatgtattacgttttgattcgcaccaagaagggcaaatgggcaagaccatgtatggagcacgtcgctctgacagtcctccctatggcttcggtgacgtgaccagcgagaacttcaaagggattcccttcaagtttgaagctgatcaggctctgcaagcggcccgccaagatcaccctaaagaaacctatcgactggtttattccgaggaggaactctaatggtcaacgaacaggatatgaagcgagtacgccgactgctggcactgcttcgcgctgagggtatcgactgcatcatcgctggcggcttcgctcgtgatgtgttcttcgaggctgacccaaaggacatcgacatcatttgcggtggcgtcgatcactacaccatctccacgttgttcgagnagactggcacgctgacccgtagctacccgaagtacaacggacctgagtctgatcgcttggccggtgtctggaagatcctcgatacgaatatcgacgtgatcctctacgaggtccctacagcactggaagcagtcgagcaagttcgactacaacctcaaccaattcgtctccaacgaggagaccgagaccagccacgac

SEQ ID NO: 639143 - DNA, 113 bp, Homo sapiens
ctcgcttccctcccgcggcgaccagggcccgagccgagaagtagcagttgtagctacccgcccagaaactagacacaatgtgcgacgaagacgagaccaccgccctcgtgtgc

SEQ ID NO: 639144 - DNA, 389 bp, Homo sapiens
  misc_feature (3)..(3): n is a, c, g, or t
  misc_feature (61)..(61): n is a, c, g, or t
  misc_feature (140)..(140): n is a, c, g, or t
  misc_feature (143)..(143): n is a, c, g, or t
  misc_feature (151)..(151): n is a, c, g, or t
  misc_feature (154)..(154): n is a, c, g, or t
  misc_feature (163)..(163): n is a, c, g, or t
  misc_feature (169)..(169): n is a, c, g, or t
  misc_feature (181)..(181): n is a, c, g, or t
  misc_feature (189)..(189): n is a, c, g, or t
  misc_feature (218)..(218): n is a, c, g, or t
ttnttggccgttgtgtaagggatggaattttaccgatgttggcccaggctggtctcaaacnccctgacctcaggtgatccgcccgcctcagcctccccaaagtgcagggagtataggcaagagcagaccgtgcccggccntcnatctatanacnttaccctantggttntgttgctctgantactctgnagaatcttagtacaatggcatttacattngactgatgaaattaatgaggaaagaatttgagatgttttaagataaatattttttagacttctatttagaaggatagtgtttctgaaatgtaaatctggtaactttccctggttgttataacaggtgtattatacagtttagaaacatgaagttatccaatctgccaagtt

SEQ ID NO: 639145 - DNA, 159 bp, Homo sapiens
  misc_feature (1)..(1): n is a, c, g, or t
ngtcacacaaagacaccacagcagccagggtagaaacaactagtgtatggattgggggaggagagaaggggtgcagatgggaaagggggaggcaagggctctttagcgttggccaaaaccacggccacacccctccaccccctctggctttccacctcg

SEQ ID NO: 639146 - DNA, 304 bp, Homo sapiens
  misc_feature (186)..(186): n is a, c, g, or t
ccccttggggtaaaaagggagggggagggggggggggggggtttttttccccaatttattatgaggttttttaacccctttgggggcaaaaagggggggggtttttttgttactgaaggggcccttcccccggggtatttgaaaaggaaagggctttgggggtttttgtatattttgaaaaaaaanggttgggggatttacccccctttttgggggggggcccccttttggggaatgggaaaaaggttttttttataaaccggggcggggtttcaaaaaacattttggcggcctttttttttta

SEQ ID NO: 639147 - DNA, 111 bp, Homo sapiens
tgcacagctcattctctaccccctgtacaaacacatagctaccccttcttgtactatccctatgaggctaattataccagctccatctgctacgaaaacatgaactaaaat

SEQ ID NO: 639148 - DNA, 116 bp, Homo sapiens
ttttggttttgcccatattgctgccggcttggctttgagtgccaattcatacgcaaaagaaatcaaaattagttcaaataacacatcttactctgatgcagacgtccaaaaactgg

SEQ ID NO: 639149 - DNA, 968 bp, Homo sapiens
aatcataaatgagagcgggaacggatatgaaatcgagtgggattgatccccagggtgtcagtagctgggggatgaccgaaggacgcgtatgcagtgctccgtaggccgaaccttgcaggtgccagccatgtgctgctctcgggtgcgcggcgcctctcccagggcggtggtttccaccatccgcactgtgtggcatttgatttagtatatcattgtatttatcccgaaaacggggggaggtccgcgttgtcggtccaccaggtgtgtcttgccagctggactttgatcttcagggcatcaactgggtccctcagcgttggtccgcagaggtaagatcgctgattcatcctggtcttccttcccttttcatgcttagttgggttactcgctggggccacagtttcctaatcgaattgccccacggtataaatgcggccaagtacagttcgctgccagtcagtaagacagggggatttgtaccttttgagcggggccctagggtagggccatctcggggagccatcctttgatcatcgctcgaaatcgtgaacctgaaattggtgtcccgtcccattgttatagtcgcatagggcatcctcgaggctcttggcagcctaaatgcgggttcatgccccacaaaagtctttcttgtctttggtgaagcacgccttagggcatagggtaagttcagtatttgcctgaaggaatgttccattcgtgtgttccatagaaactttttgcgggaacacagagggcggtcgcgggaaactaacgcaggtgctttgtccttcaagaaccctgagttggactagggtgcatctgggcattggcaagatcgactagttgttgattgtggtcccccatggtagcaggacccaacgggagatgatggacttgaagtagccataatttagaatgtctgaaaattaattcgcgtcctgaaggccttaagcggttcgcacattggg

SEQ ID NO: 639150 - DNA, 112 bp, Homo sapiens
  misc_feature (7)..(7): n is a, c, g, or t
cccaatnaaccctactaaagtagaaaatatcaactaccatccttttctctacttcccttgcccctcattaaagactaatacaagttagtctttagtgagggttaattcgcgg

SEQ ID NO: 639151 - DNA, 444 bp, Homo sapiens
  misc_feature (19)..(19): n is a, c, g, or t
  misc_feature (38)..(38): n is a, c, g, or t
  misc_feature (53)..(53): n is a, c, g, or t
  misc_feature (382)..(382): n is a, c, g, or t
gggagataggttatgaaanaagctatgtccagggtgantgtaactcaaaatantcacacatttaacaagatacttcaactgaatcttattttagaattattgtagttagaatttccttttaaagttgtaagtaggtaacattttatttgaagataaatttatatgatttttatattgtataatgagtaaagaactaggatacaatgaagtctacctctatttaaaggaatgatgttgacaaatatataccgtgcatgtattttgaagatttcattaaccaaaatagaagaataagaattttctatcagcactgtttttgtttggaattaaacatttccatactaatataaatgccaaaaaataaatcaacttttacatttcnttcagttttaatagtgtaaggtcctaggtggaaagggtaagggatatgtatattaataaatt

SEQ ID NO: 639152 - DNA, 961 bp, Homo sapiens
gacacagattggaagacacactccatgaacacgcacgggctgtacgcaggtcacaaatacttcggccagttctgcatttcttggtaacatgtcaacagaaagttctagaggatctccaagtaagaaccgtaacaaaagccataaagaatatcctgcaaaacatgtacctacttaccagcccttgaaccatatctatatgatgctcctcccaatattctgaaacatgtggtgggacagttcagtaacggtgctgccgcattgattagcaaagctcgagagacttcatggtaacacacgtgtgtgcgccttagcaaacagttcaacgacgcatacaaaggcagaaccttggttctactcctttcaacgaatacattcaaccagtataaccagctgtgtaaccccgaggcaaatacgtgcaggtataacttcccctggactatgcaggatacacctatctgcagagggttgggccagcctatacaagccacttagataacttgagcaaaagttatattggtgatactcaaaatacacagcagagttagtatggagtaagcagtaattacatccttctaaatatttggacctaagtatatgctagatgtactttaatgggtgacaataccttttagtattataatgttctaaaatttatggtaaatactttaaacattcggaggctggaatatgtgaggaactatccaggggccattcggattgcataggaataggtctaacaggtaaatttagcaaaacccagtttaaacggcggccttaaagccaaatgcgcaaacccgcggaaaacaccccaacaacactcggtacaatgtggaacccctccacaggggcatatagctagcagcgtggcgttaaaaaccccataatattcacccaggttatcaagacaatgcaaacaacacatgcgtgtcacaattagtgtacccacacacacttgtgcggc

SEQ ID NO: 639153 - DNA, 93 bp, Homo sapiens
  misc_feature (37)..(37): n is a, c, g, or t
  misc_feature (64)..(64): n is a, c, g, or t
aaacccccactctcatactcttccactctctcccctncttctgcatgcgattatctgaatgccntaggagatgcaaacctcaatctcccatgc

SEQ ID NO: 639154 - DNA, 144 bp, Homo sapiens
cgttgtagccgttcatgcaagaataggaggtggagtgctgcgtagggctgctataactgaagggcaagatgaagtgaaaggtagagaatcgtgtgtgggtgggactgtctactgagtaacatcctcagattcattgaactaggt

SEQ ID NO: 639155 - DNA, 809 bp, Homo sapiens
tacaatcaatcatgtcagttgtcataagactccgtaaagtccttcagtggggatcgtagcatccaagagaatccttggggtaattcaaataacagattaaaacagtttctaatctggtgtagtaaatgctctgtgtttgattgctaagaaagcattgataggtaaccgcatatgtccgagagatagtctagtagcgtagcgagattagttcattattatataagatgacggagtggttaatataagcaagcgagtgtagttacaaataatgaaagtctgtcatggttataataggtggtttaaaaataacattgggaatacaaggacttgtgccaatgggtaattttcatagttgtttggtgttgatttgaaactggaaatacagtaaaattgtgactgtttaaaaatgttgggcaaaaaaaatcaggattgtaattttttattagtacttgaagaaagtaatcataaatgttaattctcagcatcttgtgaagctgtggaaagaagagtcgttgggtatttggaaacgttagcaagattttcctgccagtgtcagaaaattcgtattaatgaatcctgtcggattcctgggtatttgaaaaaataccaatagtaccatacatgagttattctaagtaggaaaaaaaaaaaaaaaaaaaaatttttggggggcctgagaaaagtttttaaaacatttgttggggggggcagtggtagtgaatggaacgggtcacaggactgggaaaagggtggttccaaaaaaagggggggggggtgaaaaacaaggggtgggaggataagggcggcga

SEQ ID NO: 639156 - DNA, 136 bp, Homo sapiens
cctttgcctctcgcgcctccttgggctcagcgccctttccagtctgatgaagaatctgggcggttttcttcaagccttctctgacaattaccatcactgtgcctcaccctcttctttttcttctaggaatgtagga

SEQ ID NO: 639157 - DNA, 109 bp, Homo sapiens
tttttttttaaataaaatttttcattctaatttcatcatagttacacgtattatattgtacgcgtcgctttgacaaaaatcaaaacacactaacgacgaaataagttag

SEQ ID NO: 639158 - DNA, 190 bp, Homo sapiens
taccgactcttagaaacgatatgggggtaagctggagattttcggatataatctacctcactttccctgtggctatttctgggtttccaatcacgcgccgagttgtttgaggacgatttcatacagcgcatgatggagctgtggccaccttagaagcttctagagattgaggaattctaagagacggcta

SEQ ID NO: 639159 - DNA, 408 bp, Homo sapiens
cttccctcacgattgcctcatgtgtatcatccgcgtatcagcagttgtcagatagtgtcccgtcatctcgttatgtgctgcgcactgtaatccatttctgagcgttaagccctggggttagccccaggatctcgctgttctcaacagtcttggcatagtgtctgatgtgctcctgtactttgtcaactgttcgaataagcgctgcatcgacatgcaaggctttatgcattcgcactctccactttgtcgacttgatggcatagaatcttcatgagaataatattaatagatggggtgagaagtagtagggacaggatttatgaaataccttcagcgagatctcagcatctgcctctggagttgtctcctcaggatgcggtcgtagagtatagggaagacagggaaaag

SEQ ID NO: 639160 - DNA, 281 bp, Homo sapiens
attactcgtgcctctaggaaagcggaaatccacagatgagaaagctgtggaactggtcacattcaatctgactctatcatcaatctgctcagttgtcagtattcctaacggtggcggagcaggacaggaaggcccctcacagtagtgacactgccctgccaaaagaccaacctttcctcagcacgactgacccatcgcgtgaacagtgggttaggaccgtggcctttctgactaacgaacagtggagacaagtcaggtttacttagaaacagacaatacca

SEQ ID NO: 639161 - DNA, 299 bp, Homo sapiens
tgtcagagatgtctgatatctaaacaacacgagaattcacattatcatattcttatgtgtgcataagagagaagcatttctaataaaaagagagaataaatataactctaaataaaataaataccagcagactcaagaagatatcaatcaatatactgttaaatctcttacacatgctataaatacatgtagctgctagtggttgttgaacccaatagtgtgatcaccacagtaaaattatttctgaatagggcacaattaaattatggtcagcacagctgtagtggtaggatggttaa

SEQ ID NO: 639162 - DNA, 450 bp, Homo sapiens
gagcaggtgagccggctcatgtccacatgctgggccgctgtgctggagctcactaccagttaggcgcagtccacaagcacaggagctatgatgcaggccccccaggacacccaaggctgcactgcaagcaggcacagccaggttggggccccaggagaggccagatggactggccccatctgatcgtcaagactgctctgtaggcttgaggtctgacagttcccttagggataaagtctcctatgggagcaagtcagcaagttaagcctagagggatggctgcccctggccgtattccactacagatgctcacacaccaaaccctttgggctctgcattggctagaatacggcccctaacacttctctaagcagccctctgtgccaactcaagtgtccatagtggtcgaggaatctcctgccaggattccagaggcccgtggcagtagct

SEQ ID NO: 639163 - DNA, 308 bp, Homo sapiens
gtgatggaacctcactactgcccccccgccgacgcactgggcacacacacacacacacacacacacacacacacacacagagagagagaaggagggacattctaagtaaattaaagtgtttagtctcacagttttcactcctagtgaaagtgccaactaacccagtacaaaaatcaatctagcaggtgtttgaatgttctctacctcaaaaagcaatcgtgctccagtgaggagcggtccttgcattggttgtgtttagtgaggtctatctatataagtagatttttttctaactaaaacaatgaatt

SEQ ID NO: 639164 - DNA, 856 bp, Homo sapiens
cacaggctctggaatgggcactctccttatcagcgaagatccgagaagaataccctgatcgcatcatgaataccttgcagtgtggtgctcttcagccccaaagtgtctgacaccggggtcgagccctacaatgccaccctctccgtccatcagttggtagagaatactgatgagtacctattgcatggacaacagagggcccatcgtatgtatatctgcgttcctgcgactcctgaagcatgacctactactcgaaagccgtacggggatctgaaccaccttgtctcagccaccatgagtggtgtcaccactgctccgtttcccatggtcagctcaatgctgacctccgtcgaagttggcagtcacaacatggtcccctttcccgaacgtctccatttcatttatgcctggttttgaccctctcaccagtcgtggaagccagcagtatcgagctctcacagtgccggaagctcagccagcaggtcttcgatgccaagaacatgatggctgctgtgagccccgccaggcgatacctcaccgtggctggtgtcttccgtggtcggatgtccatgaatggaggtcgatgagcagatgctataagtggtagaacaagaacagtagctacttgtgtgtgagtggctcccctaggaatgtcacgacaggcgtctgtgatgattcccacctcgtggctcaggatgggagtcaacttcattgggcagtaggacagcatcccggggctcttcaggcgccatctcggagcagttcactggcatgttcgcggaagggcttcctcccctgtacaccggcccggctggcgcgcggggtcacgggggggagcacttggactcggttgcgt

SEQ ID NO: 639165 - DNA, 302 bp, Homo sapiens
gaggggagacctataccctttgatagcgagaaagtttaagagagcagtggacgtgtgagtttgagagtcttttagagaggggctgcaaagaagaaggtcgtccacatattgaagatgactgggagacaggtttaaggaagtgaggtttcgggctagagcttgtccaaagaaatgagggctatccctgaagccctgagggaggacagtccatgtgagttgttgtgactggagggtgtcagggtcagtccaggtgaaagcaaataggttttgggaatcagggtgtagggaaatggtaaagaagg

SEQ ID NO: 639166 - DNA, 220 bp, Homo sapiens
tatgttctcgagtcgttacaaggccataggcgtccatattaatatgcacgaatgcgtataattagtcgatttagtggaagaaataagaagtaaatctgctccaagacagtctcccttgaattttgtcaagagttagaatggatggtgttaacgattgctgagtcctgcctatgctcgacttgcgtttcccaagcaatgggcttggtacgcttatgccagg

SEQ ID NO: 639167 - DNA, 181 bp, Homo sapiens
  misc_feature (17)..(17): n is a, c, g, or t
  misc_feature (26)..(26): n is a, c, g, or t
  misc_feature (58)..(58): n is a, c, g, or t
  misc_feature (91)..(91): n is a, c, g, or t
  misc_feature (116)..(116): n is a, c, g, or t
  misc_feature (150)..(150): n is a, c, g, or t
acctcgtgaccaccccnagggctgancctggtcccacgagggtgccgtgtaccctganagggccagtgcagtttggtgtgtcctccgcttnccaggagaagaacctgaagaactanttttcgttattggttttccaatcatttgactaanagtctccatttaaataaagtttttaaaagga

SEQ ID NO: 639168 - DNA, 771 bp, Homo sapiens
  misc_feature (112)..(112): n is a, c, g, or t
  misc_feature (117)..(117): n is a, c, g, or t
  misc_feature (122)..(122): n is a, c, g, or t
  misc_feature (130)..(130): n is a, c, g, or t
  misc_feature (133)..(133): n is a, c, g, or t
  misc_feature (140)..(140): n is a, c, g, or t
  misc_feature (155)..(155): n is a, c, g, or t
  misc_feature (158)..(158): n is a, c, g, or t
  misc_feature (161)..(161): n is a, c, g, or t
  misc_feature (170)..(171): n is a, c, g, or t
  misc_feature (182)..(182): n is a, c, g, or t
  misc_feature (188)..(188): n is a, c, g, or t
  misc_feature (190)..(190): n is a, c, g, or t
acatgtacatcttgcctagatgtcgatgactgcaagtaataatacagtttataatgaactatctacaattcttgttagcacatctgttatccgtaaacacctgtaactagcnttttnaattnattatttngantttaggntagcgatcactaatnttnagntgctgaggnnggcattttagngatatnangcacttctgtcagtctttgacaaaaagaacgtattttatggtgcttgcgaagatctctgaagaacttcctttcataatagaactgggcactgtactatgtaacacgtattcatgtcaaatgacatctgtgctgtagaaaaacattaacccttgctccaccaccacgaaactggactaaacttggcctttctaagtggtaccggaatgacctgtcactataatatacctggtatgttctcaatcttcatttacaactttacatcctctaaattgtataacggggtggataacccctatcacccagaacaaaaaccaggtgacttggcgcaaggaaagcgtacgacaaacctacctgtcaaccagcggaccaccacatagcggccagaaccaaacatagaaaccatgaagcggacactaacgcccaagcagaatccactactaattaggtcgaactggtccacacacggggaacccactgcacccagataggaccacgtaaccccggagcacatcaacacaaaacgcaatctaccacactgaacaccccacaacagcaagcacagacactacaccataaacca

SEQ ID NO: 639169 - DNA, 330 bp, Homo sapiens
gcacgagctgggatttgctttaaaatgttccaggctgggcacagtggctcatgcctgtaatcctaacacgttgggaggcccaggtgggaggatcgcttgagcccaggagtttgaaaccagcctggcaacatagcaagaccctatttttccaaaaaaaaaaaaaaaaaaaaaaaccctaaaaagttacccaggcagttagcttcgtacctgaggtcccagcttcttgggaagctgagctgggaggatcagttgggcatgggagttcgaggctgcagtgagccatgatcatgcctgcactccagcctgggtgacagagtgagaccctatcta

SEQ ID NO: 639170 - DNA, 326 bp, Homo sapiens
ccccaccccacagcgcttggagcatccctttggacgggctgctgtagacatccaacctgtctggacgttgcatggagggtggcgcagagcctctccaatccctggcgtacagggtttcctgcccgagggaagctgctccaggagcctgcgcggtcgcctgtgaaactgtgccaggacgactgtctcgtgggtgcccagcccatatcgtggtccaatcgttatatttctataactcaagtcctcgtgttacgttatcgggaatacaaataaatagaagagaatagataaaataaaggggggaggagctgcatctggaatatccccgg

SEQ ID NO: 639171 - DNA, 998 bp, Homo sapiens
gatgccaaattactgttgagcttaagggctcagtatggaaaacaggagaaagaaagcgtgtgtgtgtgtgtgtgtgtgtgtgtgtgtgtgcgcgcgctatgttcttctagaaggatgagagacaggagagagagtgtgtgtgtgttctactagtctccctagaaggatgagagccaggcctttccacacccaggtgggaacattagaaaagtgttatctagggaatctgcctcctagaagagagactaagataccaagtgtagaggaatcatctaagatatccgtgggctctcttctctagtgtgaaggccttggtcaacaaggccctatgtgtgtgcgtgaaaagcaagccttcgtgtcccccccttacttggttacaatagatacctaatagttgtaatatacttatgggggtacgtgtgatattgtgatacagcgcatacaagtgtagtgactcacgatcaggttatagagaatatctcatcatctcaaatcatttatcatctctgtgtgtcagaaatatttccaaatcttctaggctattgggaaacgttgcgataaatccgttgtaactctagttctatcagacagtggaactttacttcttatatctaagtgtatgtgggtaccttattaacccaagtctctgcatacacttaccccggtaccttttcagctgtggtaaccaccaatagtagaaataactccaaattatgagtataaccgtgagatatagggacatggagaccgggtaatacaccgtaaaataaggcgcccaaagccaacccactgtgtggttccaaacaggaaggggcttcaaattttttacgagagggggaataacccccgggtcgtcatttttcccagaatagtgttaagaaatactttgttaaagaggcactatgaggtacctccaaatatgatgaaggggagaaactgcggcaaaatacgacgaaggagatatgttacaactggatagcccagtggggggtgtacaa

SEQ ID NO: 639172 - DNA, 225 bp, Homo sapiens
ctttgctttgggacggcggggggtgtgggtggtgggcggtaaagggtctcagtctgacaccaaggctgcagtgcagttggcacaatctcgactcactgtaacctccagctcccgggttaaagtgattctcccacctcagccttccaagtagctgggactacagatgtgtgctgccatgcctggctaatttttgtactttttggtagagacgccgtcccaagcaca

SEQ ID NO: 639173 - DNA, 116 bp, Homo sapiens
tggagtatggttggtgctaagcatggtgttagatttaaaaaattaggggattgactccacttggtggtgtggtttcccattggttgaacatataatatatacactttggttattcg

SEQ ID NO: 639174 - DNA, 907 bp, Homo sapiens
  misc_feature (27)..(27): n is a, c, g, or t
  misc_feature (78)..(78): n is a, c, g, or t
  misc_feature (113)..(113): n is a, c, g, or t
  misc_feature (122)..(122): n is a, c, g, or t
  misc_feature (125)..(125): n is a, c, g, or t
  misc_feature (133)..(133): n is a, c, g, or t
  misc_feature (144)..(146): n is a, c, g, or t
  misc_feature (156)..(157): n is a, c, g, or t
  misc_feature (190)..(190): n is a, c, g, or t
  misc_feature (232)..(232): n is a, c, g, or t
  misc_feature (238)..(239): n is a, c, g, or t
  misc_feature (242)..(242): n is a, c, g, or t
  misc_feature (255)..(255): n is a, c, g, or t
  misc_feature (257)..(257): n is a, c, g, or t
  misc_feature (259)..(262): n is a, c, g, or t
  misc_feature (264)..(264): n is a, c, g, or t
  misc_feature (268)..(268): n is a, c, g, or t
  misc_feature (272)..(272): n is a, c, g, or t
  misc_feature (277)..(278): n is a, c, g, or t
  misc_feature (286)..(286): n is a, c, g, or t
  misc_feature (302)..(302): n is a, c, g, or t
  misc_feature (320)..(320): n is a, c, g, or t
  misc_feature (324)..(324): n is a, c, g, or t
  misc_feature (326)..(326): n is a, c, g, or t
  misc_feature (330)..(330): n is a, c, g, or t
  misc_feature (334)..(334): n is a, c, g, or t
  misc_feature (345)..(345): n is a, c, g, or t
  misc_feature (375)..(375): n is a, c, g, or t
  misc_feature (378)..(380): n is a, c, g, or t
  misc_feature (386)..(387): n is a, c, g, or t
  misc_feature (389)..(389): n is a, c, g, or t
  misc_feature (394)..(394): n is a, c, g, or t
  misc_feature (401)..(402): n is a, c, g, or t
  misc_feature (409)..(410): n is a, c, g, or t
  misc_feature (413)..(418): n is a, c, g, or t
  misc_feature (422)..(422): n is a, c, g, or t
  misc_feature (436)..(436): n is a, c, g, or t
  misc_feature (443)..(443): n is a, c, g, or t
  misc_feature (466)..(466): n is a, c, g, or t
  misc_feature (484)..(485): n is a, c, g, or t
  misc_feature (491)..(492): n is a, c, g, or t
  misc_feature (495)..(495): n is a, c, g, or t
  misc_feature (502)..(502): n is a, c, g, or t
  misc_feature (512)..(512): n is a, c, g, or t
  misc_feature (539)..(539): n is a, c, g, or t
  misc_feature (549)..(549): n is a, c, g, or t
  misc_feature (576)..(576): n is a, c, g, or t
  misc_feature (616)..(616): n is a, c, g, or t
  misc_feature (618)..(618): n is a, c, g, or t
  misc_feature (643)..(643): n is a, c, g, or t
  misc_feature (689)..(689): n is a, c, g, or t
  misc_feature (847)..(847): n is a, c, g, or t
  misc_feature (859)..(859): n is a, c, g, or t
ctagctgtgaataaatttatacaacanttcggtctgtataatatgatgaaataaatctacatcttttcttattttggngctttgaattatacatacaaacaacaattacaggnccttgttcncanagcatgtnggcctagaaannngctctctgannccctcaatggcaactggtgaacggtaacactgnttgcccagaactggtatttcctttgcaggggccaacagcttngaacanntgnttcgcctacaacncncnnnngngggntgcntttcnntttgttcnggtgttttttctttcntttaatgcatcattcacntggngngggngggnggggggggggngggggggtgggcggtgggggatcggagcgngtnnnggcttnntngcganacgagtnntgcgagnngcnnnnnngttnttgggatccttgangccttanagctatccagatgcaataaagtnattgtacagtatttcttnntatatnngtnatatgcnttgttctgcntttttttttttcactgttctagagacnctgttaaatnggggttttgtgttagtttggttttttnacagatggggtccagattcagtggttggtacacagacacnanagtgagctcctttgctaagtggcanacataattttgctttctgccttcaaaaacatatatccatcgcgttnaggcttcatgatactgctcctgcaaaaatgcaagtcgaaagggactgcagggactctcgctgggggccctgtgagcatcgagcagggctctaacccatggcggtgaccatgctggaggggtggtgtggtcaaaggacaggctggatggcgggtgcatnggcgtgggcgtngtcagcatgtggctggagtggctgaagggcgagatgtggctcagggag

SEQ ID NO: 639175 - DNA, 150 bp, Homo sapiens
ctcagggtcttccattaaagtagtagcagtaggaacgataggcattggtccttctgggcaggctgattcggggattaggcagctctgtctgggactcctggccttggctcagagacaggaacatcagggaggagatcagccatgaagaac

SEQ ID NO: 639176 - DNA, 177 bp, Homo sapiens
agggaaaccaaagtcagcccaggagtgtgggtggacggcgggtgctcccagccaggggagctggggctacatcttcacaaacctctggtctccgcagtcagaatggctctcttgcggagcaactgacatagtgcgggtgggtggcctggggcgtgatggtctatgaagttgttctct

SEQ ID NO: 639177 - DNA, 96 bp, Homo sapiens
cccgaggacacggctgtttattactgtgtgcgatataacagcacctggttcccggggggggggagatacgactggttcgacccctggggccaggga

SEQ ID NO: 639178 - DNA, 294 bp, Homo sapiens
cggtgtacatgtatccatccgtataatatatacaaggactttgaaatataggtttagtttgtatgtcagagggaggaaggaataaattatatgagaattaactttcttccttttacaatgtattacttccatggccagaaaaaaaagaaatacttctttgttttgtttttgttttgagacagtgtctcgctctgttgcccaggctgtaactcggtggtacaatcacagctcaatgcagcctccatctcctgggctcaagccatcctcccgcctcagcctcccaagcagctggga

SEQ ID NO: 639179 - DNA, 122 bp, Homo sapiens
tcatatgtggcagtattcggaggtttaaagctgatgccctggtgcttgtgagcaagaatacacatttagccaggcgggggagctcaggcctataatcccagcacttagggaggtcaaagcag

SEQ ID NO: 639180 - DNA, 125 bp, Homo sapiens
ccagaaaacgagccgggtttgacaccaacagtggtgcgaccatattggggattggctccccgaacgagcgcgcacatgagaaactaagtctcagacagcgccctcatatatagagagtgtgcgcg

SEQ ID NO: 639181 - DNA, 163 bp, Homo sapiens
gcacattctgaccaattaatctcatgagtaactaatctcaagatggtgattctttttcttttttctttttaatagccacatacggaagttcctgggctaggggttgaatcagagctgcagctgcaggcctgtgctacagcctcagaaatagaccgctctaccg

SEQ ID NO: 639182 - DNA, 1647 bp, Homo sapiens
tggcggtggccaacggtttattcagggccctgaacggggggggcgtggacatgcaacaccactgcggggcccacagcaggcgtgtgacgcggccgctcccaagcccgcggggcgcaacaaccacagccaggagacagccctgtggccaccacgtgggccacgcgtccagggccccaacgaggacacagcgcgaagggtgcccgcgggaccgaggcccagactggggtctcagggtgtatacaccactatagccgtggggcatatagaggtagaggacggcggcgacacgccacagatactccgtggtgtatacccacaagtgtgtgccacaggaaggcccacaagaggggggcacatgtgaggccatcacaaatcgtggcacgcgtcgggacacagcacacgcagtgtgcacactaaggccatatctacacaagactatgtgtgcagtagtacaagccacggtgcttcgtgcgtggagtgtgtagcaccacgagtgtatgaggcgagcggacacagtgagatgtggactcccaccctattaccacaaaagaggggcgcgaatcacacgtgcggagacctaaaatcagagcccagattctctacaacgaaacacagtacgatacaacacagaaccacagcgcagggaaacagaaacgaggccacccaccgagagaagtcacctgggagaacagacacagcgactcccccctcacaagacggaggggggaacacccgacgcggagaggcgacattcaccaaagagggggacaaaaccgcacaagagacaatcaacaccgcacatccaacacacaggccccatacaagtggagggactaggagaagaacagagcccgcaagggtaaccgaacaggagaaaccaggggcagtcgccaagaaacgcgccacccaaccaaggcagagccacaaacacaggatagcggcccactaagcgagaaggacgaccacgccgacagcaaacgtcggcagtcgcccacaagtctggaggagagacacgcctacggccaacacagcagcaattatcaggaaactgatcgaacgtgggcagcagcacgactcgacccgacttggcacgaccccgagcgcaaaacaccgaagcacaagacgaatctcagcgagcaaacaacagtgaggcgcacacccagcaacaaagaacaaccaagcaggaaaacgtctacgatgaaacacacacaaactacccacggcgggaggtgaacacacgacacacaccagtcggcgccaagaagacagcacacctgcacagaacaacagtcgaggccgggaacccaccaaaacaatcgagtagaagacaggcgacgagcaggacaccaaaccagcgaccaccgaggagaggacacacaccatacaaacgaccgacggtcgagaagcaccaaaatgagcaatggaagaagaacgcgcgaccaaccaaacacacaacccacgccagcgaaccacgccaacgagcgcgacataatcacaacacgaggacgatcccaagcattcccacaacaacaaaacaaccggacgagaccacgaggacccatgagacccagaagagaccacacaaaaaatggtgaccaggcaacgaaacagaacgagccacgacactaccgactacacataacagca

SEQ ID NO: 639183 - DNA, 368 bp, Homo sapiens
  misc_feature (196)..(196): n is a, c, g, or t
tgctgagtcagtgaacatctggatgtagatctgatatcacttcatcttatctctctctactctagattctagtatgtatgtcttcactttgaaaggcatttcaggctgggcatggtggcttattcctgtaatcccaccactttgggaggccgaggtgggctgatcacttgaggtcaggagttcgagacagtctggncaacatggtgaaacccgtctctagtacaaatacaaaaattagccgactgtggtggtgcatgcctgtggtcccagctactcgagaagctgaggcaggagaattgcttgaacctggtggaagttacagtgagccgagatagtgtcactgtcctccagtctgggcaacagagcaa

SEQ ID NO: 639184 - DNA, 180 bp, Homo sapiens
ataactaacccgactcaaccgcaacatctcgaaaacaaagggctgggaagaccaaaaccccctgcccatgccccaaccgattccccacaacattaacaggttctccttggcatctgttattctgggggtctggatgtttgctctctaaagaccttttaataaaattttgtcacaagcaca

SEQ ID NO: 639185 - DNA, 339 bp, Homo sapiens
  misc_feature (29)..(29): n is a, c, g, or t
  misc_feature (48)..(49): n is a, c, g, or t
  misc_feature (71)..(71): n is a, c, g, or t
  misc_feature (106)..(106): n is a, c, g, or t
  misc_feature (127)..(127): n is a, c, g, or t
  misc_feature (139)..(139): n is a, c, g, or t
  misc_feature (207)..(207): n is a, c, g, or t
  misc_feature (334)..(334): n is a, c, g, or t
ccggggccttcttcttgggagcggagagnggctacagctggtacaagnnggcagcccaagacgtgctttanagtgtggttcccggacccacatgagcggcaccgtngacgcaggacaggtgtttcangtgcctgggaanaggggcacctgagccctttacctgccggaaggtcatcgtgtgcaacctctgtggcaaaagaggacacncctttgcccagtgtcccaaagcagttcacaattccgtgacagctcagctcaccagcgtggcggggcactgaaggcgcgactgcctgccagggtgaatacactgccagctttacccctcccttaagtngtaaa

SEQ ID NO: 639186 - DNA, 205 bp, Homo sapiens
tgtccggttatgcaagctggcagtggtgacacacacctgtaagtgtgggactccgacagcggcgttgcgtctacaccatccctgctcatcagaacttagatgagctggtgtcaagtatgagcctatcacatgggaacttacttgacttactaggtgcctcatgataacacatgccaagatctgagacgcacccagagctggtccc

SEQ ID NO: 639187 - DNA, 316 bp, Homo sapiens
  misc_feature (158)..(158): n is a, c, g, or t
  misc_feature (225)..(225): n is a, c, g, or t
tctaaaccttttatgtgagaaaaaaacaccggaggggggtgtgcctggatctccttttcaagaaaagaccgcttttcatacagaatggaggctatggagcgcccaccttccactctgggcgtgaggacggttctttttctcaaactatatagctcccncagagtactatcataggcttcggaccttgggtcaacgctcttggcaccaatgtctctggcatgagtntgttggatgctcagcaatcaaggtaaagggacaaaattttgtgagattgacctctttgtccttgcacaagcaccagacacttccctgggcc

SEQ ID NO: 639188 - DNA, 135 bp, Homo sapiens
gctcagcgatgtttgtaacatgcaaaaactgggaaactaaccctggtacagcatgggaaatcattacaacaaagccacagatccatgacaacagtcagcgttatcactgtcgccagatcactttgttctctatta

SEQ ID NO: 639189 - DNA, 116 bp, Homo sapiens
taatcgatggagccgtagtcactcgcaaagctattcaggcctagacgcaaggcaagtactgcgatgtttgaatcgtattaggaggagaccttgagattcagcgcgcgtatgccttt

SEQ ID NO: 639190 - DNA, 112 bp, Homo sapiens
gtgcgcgtacctacgcctaatctactccactcaatcacactactccccatatctaacaacgtagaaataaaatgacagtttgaacattacaaaactcaccccatttctgcta

SEQ ID NO: 639191 - DNA, 125 bp, Homo sapiens
  misc_feature (14)..(14): n is a, c, g, or t
  misc_feature (55)..(55): n is a, c, g, or t
gcatcctttaccgnagaatgcagacaacatgtactacttctcacagcttgctctnactctcaatgcttggcacagtggcactgccccacagacagccggttcacgacctggaccagagactgatg

SEQ ID NO: 639192 - DNA, 128 bp, Homo sapiens
cacgagggcggcccaggatgatttctaccgcatcgggggggtcctgaacatgaacgaactcaacctgctgcacaccatctggaagggggagttcggagacgtgatgctaggcgataaccgagggaaca

SEQ ID NO: 639193 - DNA, 180 bp, Homo sapiens
gtgaccacaggagttcgtcagagctctggcagccttcctcaaagtccggagctgaaagtccccaaatggtgggataccgtaaagctggccaagcacaaggggcttctcctacgtgagactggttctacacgggactgttccacagcgggaccttacctccgggtgggcctggggttgggc

SEQ ID NO: 639194 - DNA, 304 bp, Homo sapiens
tgtcacccaggctggagtgtggtggcataatcatagctcactgcagcctcaagtgatcctccggcctcagcctcccaagtagtttggactacaggcacctgccaccacgcctggctaatttatttcttcatttttttaaaaaggatggggtcttgctatgttgcccgggctggtctcaaactcctggactcaaatgatccttcctctttggcctcctaaagtgctgggattacagatgtgagccactgtgcacggctcttcttcatggagggctggggcgagggtgcacacttcgacctctaca

SEQ ID NO: 639195 - DNA, 627 bp, Homo sapiens
aagatccctagctgtcgcagttacactcttgagactccagagaaaacagcgcaacacgtggcaaaacaaaatcctggtgctgcccaagttcttctcccaaagtattgttttactcccatagggcaaatttctgtcgcggactcagctgcctttaggagagtaaggatttgaaggggtacagagaatgcttgtcagtgtctaaggaggaaaccctgccttcacttatttcaaatcttgactctggtttcctaagcaaatttatcttaggatacaaagcacacataagagcttccttcttgccttaatgcaattaaatttgcagccattctgcagaagaactgaagctctcaggtgaaaagaagccttaaatcatgccatgatatatgtcgggggagggaacatttgggtataggtatttccctgaaggaagagaaagggttgaatgtattggcagctgagctgtcccttcaaggggatattgtgaaacaagctcaataaaaacctctccctctgaagcatgaaatgttcccagaggggacaggaggatacctttggtgctatgatgcaacctcaggtcatgtgctcgcacatgctggagcattttcctgagtaacctgaggaaaatgt

SEQ ID NO: 639196 - DNA, 613 bp, Homo sapiens
ggatttcggggaggctgagttgcgaggatcccttgaggccaggaattttagaccagcctgggcacaatgtagtgagaccctgtctctacaaaaagtttaaaaaacaaaattagctgggcatggtgcctgtagtcctagctactgggatggctgaggcagaaggagtttgaggttacactgagttatgcccttccccactgtactccagtctgggtgccagagtgagaccctgatcctcgcacaaacacaacaaaaaacaaaaaaaacacaaaaccagcggggcggccgcaccacgggcaccccgaaaaaagacgccaaaaacccaccgcgcgagggggcggccgggggacccacaatggggacaacggaccacaaacggagaaaacaaacgaggagaaacacaaagcatgaaaacaaagggggaacggaaaacagagcacaagaacacaaacaacaaaaaaaacacaggaagccggagcgcaacgcaagaagggacgcgcaaaagacaaaggcaaggaggagacaagcgaaagaggacagacacacgagcaaagacaaaaaaagggaaccaaacagagagcgaccgagagcaacaaataaagcacacacgtga

SEQ ID NO: 639197 - DNA, 200 bp, Homo sapiens
cataggcgatagcatgagatgatagataggaggaagaggaggatgataaagaagaggagaagaagaggacaggcaggctgaagtcctgaagggtcatctaggcacgtctgcatgggcatagatagacaatcctgttggctcaggggtctggtaagtgtgcccgtgggagctgcccacccccgtctgagattaggtccgag

SEQ ID NO: 639198 - DNA, 293 bp, Homo sapiens
acagatcactggttttccatcagaggttttgtcccccagggacatttggtcaggcttggagacatttttgtttgtcacaactgggggataggagggctactggaatttagtggtagaggccagggatgttggtaaacatcctacagggcacagggcccccacaccccaaagaattatccagcctaaaatgtcaacagggctatcattgaaaaaccctgaaataggatttatttatttatttatttatttatttatttatttatttatttgagacagagtgagcccttgtttca

SEQ ID NO: 639199 - DNA, 956 bp, Homo sapiens
tcgatgtgatctgctttggcacaaaaagtgcaaaaagggtctcgcgcatctcgtttgtccaaccccgtatattttaaccctccttcgtcttagaggctctttcaccttctttatgaccccgtcctgacactgggtggttatctccgccaccataggcctctgatatatgggcccgtgagcccagcccacgacaactaatacacagtggggccggtttattcccggagcgctacaacttcttggggcccactactaaacccgcctgggttccacagaggcccttctcattacgggggggtatactcttctctttttttcccaccaagaggtgttttttttcacagagggtgttttgaataggcgccgttattactccaccccggccgcttggccctcttccgccgccccttttttttgggggggtggtctgcgtcccacaatctggggtgatccccccctcagattttttccctcatggggctccccctctctctagaaaaacactgctgcgttgttgtctcgcgctaccggcgggtggtacataatccccctgtgggccactaaccacttgttatgatttaggaacacaccggcggccccttatttctagccgcctcttttttcaccaatttcttggggttttgattttccccccctgctgacacgccgctagggggtttgttggtggtccccttctccccttttctcgccggtgattttctggcgtcccaaaacttttggtttatccacccaccgactgttccccggggcttttacctgccattttttgggcgatcatgttcctctcccctatttttggttctactcccccgccgcgatttttttctctctaacaccaaaaaccctttgtggtttaaacacccccccctaaattggcctttttttaaattggtttttattttttttattttccctttttttaagaggggttttta

SEQ ID NO: 639200 - DNA, 258 bp, Homo sapiens
taaaaatattgcatgtgcatcattttctcagtcagtagtggtcagatattataacgagatccttggcatctgtggacagtaacaagtttcgcaagttctctagggacccctctggtccatgacaggtaatggtttgttgtatatgctgagacaaaagttaactgctctcatggaatgatattatgacaatttgaaaacacacacatacacttctttgtgaaaagtggccaccgcgcccggccagcttttggctggacc

SEQ ID NO: 639201 - DNA, 647 bp, Homo sapiens
gcttaacatttctccgtgttggggcagggaaaacaaagcccaactcttgagcaggggttccccctggggatctgtcaaagctccatggaggcctctcaagtccaagtgcctctggaagcctctccaattacatccccccaccctgtcccccagaaaggccccccatcagcccagtcccaggcgcccgtcaagcaggcctctgagagtgctacccttctcttgtaaccttgcagccaacacccctgcccggcccctgaggtgcctcctccagcccatgtttttacaggccctgcacagagtagcactcattaatttttggttaaggaatgaatcaacgaatgaatggctatgcatggacctctgggcagggaaacctgggttttctctggctaaaaggggaaggctaaggcatggttgaaattcaagcccccattccaggcctttttgcccaaaaaagaaacttttgtcacccttgccctttcctgtattttgagtccctggccaatagcacagccttccatgccccgaccccccccccaagcctttccattaggcctttgccaggatttaagcccatgagcacagggactggctatcccaagacctggcaaatgtgggtgctcaataaacccttgttgacccctcca

SEQ ID NO: 639202 - DNA, 118 bp, Homo sapiens
aaggttttttttttttaaaattttggggccgggggccttttaaacccctttaaaaatttaagggttttcccaaaggcccttaagggttttttaaaaagggtttttttttaatttccca

SEQ ID NO: 639203 - DNA, 236 bp, Homo sapiens
ttttttccccaaaagcccccgggcttttagagagggggcctccgggtccccctgaaaagcccccagggggttgcaattttggaaaatattttgactagctggttggggggatggccaaagaaataggcattattttattgcgggaatattggatgaaactttaactggccaaaaatgttgtcccttccgggaaatggactatggttttattaaccataaaccctccttacccatga

SEQ ID NO: 639204 - DNA, 379 bp, Homo sapiens
ctccctcttatggcacgctccttctggccacgcagtagatacacctgctggagcgcgtgctacggatgggtgttgccatcgtgaccagtgaactgagataaggcggagctttacctagcatggacttgtagcatgcaggtgcatcctttttccattgatcatccttaagatgtttctacaaattgattggagtccacctgtggtaaattcaattgactggatatgatttggaaaggcacacaagtgtctatatataaggtcccacagttgacagtgcatgtcagagcataaatcaagccatgaggtcgaaggaattgtctgtagagctctgagacatgattgtgtcaaggaaaagatctggggaagggtaccaaaacat

SEQ ID NO: 639205 - DNA, 271 bp, Homo sapiens
atctagaaattttatttttttaaacccggggcaaggaccccagctaacccccttcatcctcctggggcccccccctcccgccccccgttttaggttagggccttgggcaggggtttgccccctgttacccccccccccccggggtagcagggtttccccccctccccgggggagctgggtggggacttggggccccgggaagtaggggtccccttttttttttttttttttgggggttttttttccctgaataaaagtgggtttccgggga

SEQ ID NO: 639206 - DNA, 242 bp, Homo sapiens
tgtgtcgtggtgctagtgtcgtggtgcactgtgtcgtggtgcctgtgtcgtggtggtgtgtgaatgtgtccctgagatgcttgcatgctaaattaggtttgatttgtttctaggggagccaatgtgtcttgtctctaggagctcccataacactgtgatgaattcttgtagccctacacagcatacaaatccaggtccatgctctgacacgcaactgttgacagattttaccactgcagcag

SEQ ID NO: 639207 - DNA, 479 bp, Homo sapiens
cctagcgtgaccggggagtagcaggacgggaagtagaggcttggacctccatcagtggtggcatgatgtctgtgagcggtaacttgctgagaacccagtccccagagggttcaagtttataaagccgaaccctgccccctggtttgggaggggaaaatctgacacagaccactaaaagaggttgccaaaagattgaaaacatgcactatcccaggcctcatcgtgcatgcgggagtccctttacaccgtgttaaccacgatgatacaatgagtattagatggatcaggagtcctccttgtgccagatgccatagtaaggcacttctctaagacctcgtctcactctgtcctcaggggtactcctgtggggtatgggactgctatcaataatacccccaactttaaagtgatggaaaaaaattcactcagggacgttcgaggaccaaggttcccaaaacttgagctgggaccagaccagg

SEQ ID NO: 639208 - DNA, 444 bp, Homo sapiens
tcgacgatctggatggcgccaggttgcagctgcccctcctgaaaacgatggttgggtggccggcggatgtgcgctgggagattcgtcaggagcgcttcgacggacgcctgttgttcaagatgggcgatgacgacttgccccggcgccgggttctggtcacgactgcacacggctatccagatcgcccgttttcttgagaaaaccaccgtccagcgcgtgattgactcgaatctcacgcctgctttcgccggcctcttcaatcaattccaagggcagacgccgcacaaggctcaagcgccctttcagtacgtcgtccgtctgtcccaggatttcacgcaagaccccgtccggtaaatcggcaaagccttgcctgaggctcatcggcaagccgacattggtcacgcagcacaaacggtagaggcgctggaacaccgtggggcgctg

SEQ ID NO: 639209 - DNA, 261 bp, Homo sapiens
tgcgattgggctactcattacaaactactagactattattcttacatgtgggttcatagctccccaacggagtcgtttagcgttgcctcttgcacaagtaaataattccctctctagcacaacttttccgttacgaaattttgcagtgttcggaaaagattctctaaccaaaatcacaacacgaacaacacttaaatctatcccaagggttgccctagtgtttgcattacatcctacccccatcatagcacacgcattcat

SEQ ID NO: 639210 - DNA, 683 bp, Homo sapiens
gccaaaactacagttcccgaaaactcatccccatcttctccatcctcctaatcccccccttgcttgagtacctccacctccccccgctcccccaatcacaccgtctcattctttaacggaacttattttcgtcacccccccccgttcgtctctcaagataccgtgggttaatcctgtgccaactaagtcagcatatataaaggaccgtttcaaccctcctacccgagtcatgggaaccattcgagacctcgccctaccttgtccagttggctttctctgctgcaccacagagcaccgacgtccccctggcatgcaccgccacgattagagacattcccccctagctttctggcggccagctaattgcacagggtgctacgtcttgcaaccccgcgggagtttttcactgcaccccgacccttctggccgctcacaacgggtcgcaaatacttctttggtcttcttgttgcaaatcacgcaaatgtgcccaccgcctggcttgatgcagacgcggtgtcggtctcccgactcttgagcgcgggtgctgcagtggagaggccacctcgccagctgacgcttggtggttcctctcgagccgcccatgatcgttctatggtatgtggcgcacgacggccctcgcccccatggcgagtcgggggccggagccccgccccacatgacac

SEQ ID NO: 639211 - DNA, 915 bp, Homo sapiens
gcttgagaggctctggctcttgcttcttaggcggtccgagggacgccatggccgagtgcccgagactcggggaggcagtcacgccgagcacgccggatcgccgtgtgggcctgggagaagttcagtgtatttggacgagaagcagtacgcctggttgcccttaaccatcgagataacaggataggttacagttacgggtgctcttgcgtcgggaagacgtctgtcctggggaggccgtatgactcccatccagataggtccaagcctgctgcctatcgatgtggcatgctctacgcctgatggacgatacgcgatgccgtcagactcgcagttgtctgtgctgcttagtgtaccatatcagagattgacggcgtggaggacatgcttctcgagctgctgccagatgactgatgtcttggcagactagccgtgtcatcctttcaacccaggggccgtgagtcgctggccaagactatcaatggggatgtcgtgtttctgtatcaccttcagttgtactagtgcctgtgtcttctcgcatcagcgctgggagtctggggaggaagtggacacgacagaggatgagctcgtacccagggccttggaggatcctgctgtatgcccatatcgtgctcgcctataggactaacaatccgtgccaagggaaggaatccaatttggcagagcttcttccaggtgcccagatatacctgtgccctcggcttgactcaggtggatgatggtcttcagactcgtttctagtaccttcgtgtcacctcacagcacttagtatctccattgtggcgtaacccgagtcgagtaccgtgaactttgtgaagaacaacgaggcgattcactctgagcaaggacctctgagaccctggaccagtgggctcaaatggtgctaagccggcaggt

SEQ ID NO: 639212 - DNA, 413 bp, Homo sapiens
ccgcagtctggggcttggccctattgtgcttatgacagagggaatgtggcgccctgagtgtgacaggctgtggagtacgtgtggggtataggctcagagtggctggtttgcatatcaaaggcctgctgtgtaagtgaggagtcctttaccatctccaggaattctggtgaagagagtgcctctgacgtcaacaaggtcccagactgtagaatcgagaccatcaaaatactaccaaacctagttccttatttccgatggggcatgctgagacttttcagctccttctctgggttttagggctgtaaggctggaatcactgtgatgtcctgattttgtttcctctgggctcctttgggctgagagcctatgactatcgctctttctctgccatgttggagagtccctcgcctagc

SEQ ID NO: 639213 - DNA, 212 bp, Homo sapiens
tttatacctggagtggctggataattgcatctggttcccaagataagactgtttgattttgggatcttctagtaccaagttgagttcatgttgttggcacaacatttcatggaactggcagtgcaacggcatctgtcgctgctgatcccattggtcgtctgttagccacaagtacctaacatcatacatgcatgttgaacctgatgcaaaca

SEQ ID NO: 639214 - DNA, 267 bp, Homo sapiens
catagatctcttgcacttgtatttattgtattcacagtttgcatggtttctaactaaaggattcaaacataagtttgtaggatgaaatggcctgggacattccaagggcttctctgagagcgcgggattggctgcagtgtagatttgcctctgtctgaggctgccccagacgtggccctcctcatgccccctccatgcacctctgtcccctctctggctcctgtgcatccctgcgagaacgtaggggtcttgtacctaagtttagat

SEQ ID NO: 639215 - DNA, 403 bp, Homo sapiens
aggtgactctgaggatctcccccggtatcccaccctggggccaatgcttttcacaagtaccaagtcataaatagatgccctcataattgaagatgcaaaaaacaaaacagaaagagtgagagcatgtgcatgattgattcctatatattgtttattagtttaataccttagtacattaaccaaacacaagacttcaggacaggtcgtctgtggagtaatatcttcatagaagctattctcccatagatatatcctttcatttgaaagcgtgcaactggccagtgggctcttcgtgcctgctggccagatacagccgatatatcaatttagaggaattgcagtggagaaagagttcaattcaagcagagccagctgaatgggaggctggagtattattactcaa

SEQ ID NO: 639216 - DNA, 927 bp, Homo sapiens
cgtctctatcctataactagctgtaaatttatgttacgtgaatagattctcctccgattaagcttgtgttacatgataatgctgaactgacatttgtgagtccatttatctacacttcaaatcaataagatggtcattattaccctcgatctgtgtagacctacaacacagtgccatgatctattaacgggtataaaagtgtttatgtaacctgttcagggtattgcagtgtccctctctacctcctcgagcagtattagcatgcatatcactttcacctctattcattggcccagtatattggaatggctcactgcacatcgcactcatgtggcaactatctactagtctctaggacggcctgagagttgaccccttaacccagtggccaattagggtatcgtttcatattccatctctgttaccttcacatcttacgagcgactctggggttggtgaactcggactcgcgacagatgaggtctctaatgtctgtcgtcgtccacgtgtttctccaacctcgtaaattaagggacgtaagtcaagctccgaatgagagctgagtgcgattgacgtctaagctaaggactgaagaatgagcctttaattgtgaagctttttggaattgttttttaaactgctaaacgtgttgacctgaaccaataatcccaaactgaggtggtcttaaaaaacttaaccaatatctctagacattcaaccagttttcccggttgggggcgacgcgtcggggaggccgattatatctaaccttcgagaaaggagggtaccattgtcctacaggattttcgtccgaggctcaatatgcaggacatttattatactgtcaatttgattcctaataagcattttgaccctcgggagacatagcttcccttagatggaattaacacaggggccaatcctgtg

SEQ ID NO: 639217 - DNA, 1090 bp, Homo sapiens
  misc_feature (1090)..(1090): n is a, c, g, or t
gagagttgggttccagctttctgtagctgtaagcattggtggcacaccactccttacaaaggcaactagaacctgcggcatacattggcagagatttcttttaattttctggacatgaagtaaatttagagtgctttctaatttcaggtcagccgcacatgtccaccttctgattatccttcggagaacatttccgacttttctctcatctctctctccccacgccctaagatcgtcgcacaaacaagcgtaccttgccctacctggacacactaacttccacttgggatctcggactcagaacctggactccactcccgggcttccgctggtgctgacaggctcccgacggttcatcaacacctttcccttcctggcagcaatggccttatttcgacacaccaccattgatctctagcttggcctgcatgctcaaactgcgcttaggtaatcaggtggcattctcgccacatatctcaacaactgttacagacgcagtcgcggcacctgggtgaacacgatcccgccatccgactgtacgataacgtacccaagctgggtcgccagggcctccacgctcaattggaaaccaatggggaccccagtggaacaccgatccattctccaagtccaacattgtgggaacacggattcttggacacaggcaggattcagcgggcttgcgttcttaagctaacttgggcagcggacagccgtaacatttcacgacaaattttacactttctaaccttcgtgcaggcgaacgttggcaacgcgcactggtggcgcagcacttgccatgggcccttggagggtgctctccaaaaaagaaggctttattaacccaagggtacattggtggacctcccttacggacgtcgctaggcaagtaccacccacatcggggatccaccgattaaggtcgttatcggcgaggcgccaacacagtcttagccataacttgcgaaccagtttgggcaaaaaaccacttaaatacaaggggttgcattccggcaaagtcgacatgtcaaactgggggcccacacgcaaaacctccacagctctgcacggtccctacagacagcacacn

SEQ ID NO: 639218 - DNA, 464 bp, Homo sapiens
  misc_feature (442)..(442): n is a, c, g, or t
cttgtactgcgcttctgtttacaaacgattcactgaacagacttaacttgatgatggaaatgatgaaaaacaggcctaatgtaggtgtaaaagtgtattcaaactctagacacggctaatcagattttaattcaatcatacacacataatcctttgtaatcatttttcttttaagtgaggatatctactgtctgcttcatagggtgctttgaataaaatgaaaacgtatttatactgtttttactaaggtaacaaaagcatgataatccttttttttgcaagtgtaaacgacagtctggactcttaacttcttagtgcctcagttttcctttggggtatacttcacaaggtatcagaagtactttcagtctacaggtctctatgtccacataactaaggaatgcctaactaatggaaacttaagttccttctagccattaanacagagagaagatcaatttaga

SEQ ID NO: 639219 - DNA, 160 bp, Homo sapiens
cccaggcccccagccagctgcctccagcctgcccagtccactccagcccagctggtcgggtccttcctgcaccttcatcaatgccccagaccgccctggctgtgagatgtgtagcacccagaggccacaaaatgaaaccattaaagacccttaagagcca

SEQ ID NO: 639220 - DNA, 285 bp, Homo sapiens
  misc_feature (36)..(36): n is a, c, g, or t
  misc_feature (98)..(98): n is a, c, g, or t
  misc_feature (107)..(107): n is a, c, g, or t
  misc_feature (172)..(172): n is a, c, g, or t
  misc_feature (174)..(174): n is a, c, g, or t
  misc_feature (218)..(218): n is a, c, g, or t
  misc_feature (255)..(255): n is a, c, g, or t
ccaacatggccttttccccattcagcatcgccagcntccttacccaggtcctgctcggggctggggagaacaccaaaacaaacctggagagcatcctnttttacccnaaggacttcacctgtttccaccaggccctgaagggcttcaggaccaaaggtgtcacctcattttntnagatcttccacagcccagacctggccataagggacacctttttnaatgcttctgggaccctgtacagcagcagccccagantcctaagcaacaacagtgacggcaacttgg

SEQ ID NO: 639221 - DNA, 124 bp, Homo sapiens
  misc_feature (18)..(18): n is a, c, g, or t
ggtgtatgaaatagacantcacagatgcgagtgttgttcgctgcctgtggcatccaaagctgaaccagatcaatggttggaactggaaatgggattggcttaaagttctattacgaccccaaca

SEQ ID NO: 639222 - DNA, 1302 bp, Homo sapiens
cggacgcgttggcgtcgaaccaggcgtccgcccacgcgtccgattgtaccatctcacttctaggaatactagtatatcgctcacacctcatatcctccctactatgcctagaaggaataatactatcgctggtgtcattatagcgtactctcgataacccgtcgaaggagccactccctcttaggccagagtattgtgccgtagttgccatacgtagtcttatgcgcgcctgcgaagcagcggtgggcctagtcccgtactagatctcaagtcgtccaagcgacataatgggcctagagcgtacgttacgaataaccgtagaagccgtaactccaagtggcctaagaagcgtaattcggtcccgaaacgaatggagtacttgagcgtaacgcacacgtggagcgagtgaaccatatgtcccagagagagagaccagccagttacacgttctggcaaagtcgaaggcaagcgaaagagcagcgcgcaaacaaagcccgataaagtgtgaatagtaaggcgcagttccaattcccgcgcaccgttaagccgttaagttcgtgtgatagggacgaacagaaggtggccccagaagtacgaaagcgtgtccaaaagaggcggcacgaacggccgaaacagaaggccgccaggttacaagtttcgtcggctacaaagggcccacgttgaggggagtagttagccgcacagccagcgcggatagacgaggccgcgaccccagacgttaggcgaagtcggtcgcacacgccgattgcccacctcgggcgaaacagagaccacgaccaggcccacccaggtttaaatcgacgagccgcgaaagcaacgagtaggagggccagcgccagcatgtgaccagcgagccggtgaggcccaggccccggttatgcagaacgcggggtgtacaaggccgcgttaacagggaggcccgcgcttgaaggcacacgcccgggtttggggggacacaccccagcagagtggcggcacgcagatgatgaaaagtgagcacagcctagccgcaccacgtggtatcgacgccacacagggcgagacaagcagcaacacgaggaggtagcacacaaaacagatgtgacggtcagggagaccacaccacaaaacgacgcgggacgacgcagacccacggaagagagacgaacgcgggtggaccaccgccggcgacagagcgccaacgtctggagtacacacaggattgggccacagccaaaagaggaagctaggggtggacaagcaagaacacgcgcccgcaacaaaagcgcgcgcagtgttcaa

SEQ ID NO: 639223 - DNA, 103 bp, Homo sapiens
gtcccctatagcctacaaaagtggtcatccaagggaagggagggtggcgggcagctgcagaaagcataaaatgacaattaaaagaagttacattagtctttta

SEQ ID NO: 639224 - DNA, 624 bp, Homo sapiens
ataggccggttctaatttacaagaacaccgcggcctgaggccggagagtcccttcaacccgggaggcggcggctgcagggagccgagacggcgccattgccctccagcctgggcaaaaagagcgaaactccgtctcaaaaaaaaaaaaaacatgtggccgaaaccaggaagctgtgcgcgagtggcgccagggccccttctttctccgggccgtggtgtccggaaggtttccctccgaggcgcccgggctcccgcaaggcgggagggaaaggggcggggacggtgccgggggccggagagcttcagaagggccctgggggccggcctctgtgctcatcccggccattcggcaaggggacgggcagctatgacctgtgagtggccttccccggcaaaagagggctcccccagaagtggcgtgtggtgtgcgtggcgggcgtggcgcctggtgaagaaaaccgggcgaggacagagaagcggcgtgtgcgctgcgcgcaaagggagaccgcggttcacaaccccccggtatgagggggaagaggactttcacatcagagaggggacagggtgattctcacacagtgccccaaaagggcccacaggtttccataaggggggtggaag

SEQ ID NO: 639225 - DNA, 139 bp, Homo sapiens
tcagattcaccttagaggtctaagaaaaaagtatcatctggtcagtttcctcaaataagactctcgtctcccatcaaaagaagaacgcccaactcacaatacacactcaatagctagggtggaagacagggtttcaccc

SEQ ID NO: 639226 - DNA, 245 bp, Homo sapiens
  misc_feature (17)..(17): n is a, c, g, or t
  misc_feature (44)..(44): n is a, c, g, or t
  misc_feature (130)..(130): n is a, c, g, or t
  misc_feature (159)..(159): n is a, c, g, or t
  misc_feature (242)..(242): n is a, c, g, or t
ggtgtccgcactaattncggcatcaatatggtgacctcccgggnagcgggggaccaccaggttgccttaaggaggggtgaaccggcccaggttcggaaacggagccaggtccaaaacttcccgtggctgnttcagttagtggggattcgcgccctgtgnaattagcccactggcaacttcccagccttgagccaaaccattagccggaagaaccccccgttcttcttaacttaaagattccnttt

SEQ ID NO: 639227 - DNA, 195 bp, Homo sapiens
tgagcatacatctttattaaacacctgaagttactggggaggaggccatgatgctgggacacacggtcaaagtcaatcttctccagcaaggttctgtgggtttaatggctctccttctgtggctacagatggaagatctgccccagactcgtctggcactccgagccgttatggctcaggcgcggggttaccgag

SEQ ID NO: 639228 - DNA, 724 bp, Homo sapiens
  misc_feature (35)..(35): n is a, c, g, or t
  misc_feature (65)..(65): n is a, c, g, or t
  misc_feature (73)..(73): n is a, c, g, or t
  misc_feature (77)..(77): n is a, c, g, or t
  misc_feature (82)..(82): n is a, c, g, or t
  misc_feature (108)..(108): n is a, c, g, or t
  misc_feature (123)..(123): n is a, c, g, or t
  misc_feature (127)..(127): n is a, c, g, or t
  misc_feature (135)..(135): n is a, c, g, or t
  misc_feature (141)..(141): n is a, c, g, or t
  misc_feature (152)..(152): n is a, c, g, or t
  misc_feature (163)..(163): n is a, c, g, or t
  misc_feature (180)..(180): n is a, c, g, or t
  misc_feature (188)..(188): n is a, c, g, or t
  misc_feature (201)..(201): n is a, c, g, or t
  misc_feature (208)..(208): n is a, c, g, or t
  misc_feature (497)..(497): n is a, c, g, or t
  misc_feature (724)..(724): n is a, c, g, or t
ctcacgtaacctgtaacataagcatttcccaagtngctattatctgttaataacagtggtttgantaattggnttgnctgtntggatgtggggggggggggggttggngtgagggggggctgnggcncagagggngcagtnggtcatttggnaccatattgtntgtggctttttggtttnggtgcttnaggtcttaggttnttgtttntggaagataccttctcttttggaactgcagcatctccctgtcctccccaaggggaatttaggccaggaaataccagatcttccctctctgattttcttctcaaatcccaatgcaagacaatggagactaaatacggttctggtcatcaggctcttccagagcatccgggtgcatgagaagtgaataggtgattgtgttctcagccccaactttgtcagcctcatcaggattagtgggattggctgaaatccgctttttcctgcagtagatcaaggccactacagcagcnacaatggccgctacagcaatcccagtgaccacagccacaatgatccccatcggtgaagagctgggagcttggacagtgatggtcacaggcttggatgagtacagcgtgtagcctatgtttcctgtgcagtggtaatcaccactgtgactgtggtttgcttgtgggatggagaagttgggatccgaacgggaaaatttcttggattttccattctggaagaatgtgan

SEQ ID NO: 639229 - DNA, 488 bp, Homo sapiens
gcggccgcctactactactactaaattcgcggccgcgtcgacgtgtgtctgtgctgtgctgtgctatctgtgctgtgctaagctgtgctgtgctgtgctgtctgttctgtgcagtgctgtgctgtctttgctgtgctgtgctgttctgtgctgtgctgtgctgtgctgtctctgctgtctgtgctgttctgtgctgtctgtgctgtgctgtgctgtgctgtgctgtgttgtctgtgctgtgctgtctgtgctgtgctgtgctgtgctgtctgtgctgtgctgtctgtgctgtgctgtctttgctgtgctgtgctgtctgtgctgtgctgtgctttctgtgctgtctgtgctgtgctgtgctgtgctgtctgtgctgtgctgtgctgtctgtgctgtgctgtgctgtgctgtctgtgctgtgctgtgctgtctgtgctgtgctgtctgtgctgtctatgctttgctgtctgtgctgtgctgtctctgct

SEQ ID NO: 639230 - DNA, 356 bp, Homo sapiens
  misc_feature (352)..(352): n is a, c, g, or t
  misc_feature (356)..(356): n is a, c, g, or t
gctctcgctgtagtaaatactcagatacagagtccacaggtcagatatcagcaacaactgtgacacctcagagcactgggatatttgaaccgtgaagcaaacttgcaagctctaatagcaacaggaggtgatatcaatgcagctattgaaagggtactgggcttccagccattatatgcagcatttctgtatcttggatgtgatttatttttgataaccggtcttaaactttcccaatatgaggcattttaaggtggagtacagtaagaagtgtgggtttttctggatttttcttttctggaacacagggaattaaggctactggatgcataacttctgcatttatatggtntttn

SEQ ID NO: 639231 - DNA, 129 bp, Homo sapiens
tcgcctatccacggcaccggggttggtgtaaaataggcgctatgtagaagtagaggttaaggatggtgatggtggctatgatggtggggatgatgcaggcttattgtttcttgtgatattcttcgatat

SEQ ID NO: 639232 - DNA, 824 bp, Homo sapiens
agcgtaggggaagggtgcgggagactgatccggcagtggcttgcttgagagggtgctaggtgtacccgcctggtctcggtctggctccagctgccctgcaggtgcccctgggctcaggtagttagttgttcagtcagctaatgccgttttatcccccatatgggcgctgagctgtggctgttccatggtacactgatgctgtccccgtcctgagcaactatgcaccccggcccacagctagagttacaagggcacaaagcagctctgaccgaattctaggacagggcgctggagggacacgctgacctgggaccctgggtccagccgcatccccatgacccagtgctttcgcgatcaacctggcaggtcacattcttgcccaccacaactgaccaggccctgtctctcctccccgttgacgcccgtaagctgtcgagctcagactttgcactatagcaggtgcttcccaaacggggttctagacttgggctgcttagatattgacagagttacgcattttactttcactattgtatctggcgacaacaagaatgcgttggaaccacgatgactttgcatcagactatttcgcttacggtcgagactacttcctcagcaacggagtgactttcactgcatgtcaggttgaccaacgcggttggtgagcatgtcggatggctgtgatctggacgagggctgccagcgggccaccgagtttagcagatgctgtacgtcccagtcaataaccttgcctttgctaagaaccccctccgacgggccttcggtgggccttgcacttcgagggaccttggacctgtccccaa

SEQ ID NO: 639233 - DNA, 379 bp, Homo sapiens
tatagagtcctgatctttagccattagtgctagattagggcactgctctactgccgtgtcagttttcatgcactttgcagacctatgtgatgatcagatactcatgcttatacctactcaggattttctataactgctatatctggttcgagctgctaaagcgtatctatatttgcatgacctctatttttaaagagagctggcagaatgctgatcagtgaatgagcctaccccctaacgattattatgtcataccgtgaacttaataaagatcgatgtacagaggtaattatgaatgcacacaggactctgcctccagagacagagatccatattcaggagcattatactttcttcagctgagcgactgcgctttttc

SEQ ID NO: 639234 - DNA, 612 bp, Homo sapiens
  misc_feature (306)..(306): n is a, c, g, or t
  misc_feature (495)..(495): n is a, c, g, or t
aagaagctatgcttgtagtgtgttgggaagacttaatctgagcaaaacccatgattcttcaagacatatactctataacacacatggaaaaagtttgacacaaaactcagctccaagcataacttatttaataaagaatcctaataagtttcatggttatcaagaaccatattttcttaaacatcaaatagctcataccatagaaaaaaactgtgtgtataatgaatgtggcaaagcttttcattataagtcacaactcattatacatctcataattcatacaggatatagaccttatcaatgcantaaatgtcaaataaccttcactaccaactcaaaccttaatgctcatcagatacttcatacaggataaaaaccctactcatgtactgagtgcgagaaggtcttctctttcaagtcacagctcattggccatcaagaaattcacacaggatggaaaccctatagctactataaatgtcgtaaaacctacanttagaaatcacagcttcttttacaccatagaagtcacactagaatgccttgtcaatacagccaatgttcccctttaattttaagtctccattccttatacaccagatctcatactag

SEQ ID NO: 639235 - DNA, 447 bp, Homo sapiens
  misc_feature (8)..(8): n is a, c, g, or t
  misc_feature (16)..(16): n is a, c, g, or t
  misc_feature (49)..(49): n is a, c, g, or t
  misc_feature (72)..(72): n is a, c, g, or t
  misc_feature (109)..(109): n is a, c, g, or t
ccaaaaanttgggggncttgaacggaataccattggccattttatcccnaccccaatggaaatgctataccngccttaaaaaaatcatgccagaactgtggtttcaaanttatttctagtaaaaggacacctccactttttcataatcagtctttctagaatccccagtgtacagaactgtttagaagtagagctctcccactttgggaggctgaggcaggcggatcacttgaggttgggagttccggaccagcctggccaacatggtgaaacccggtctctactaaaaatgcaaaaacaagctgggtgtggtggcaggcacctgtggtcccgctgctctggaggctgaggcataagagtagcttgaacccaagaggcggaggttgcagagagcagggattgcagcactgcactacagcctggtgacagagcaagactgtgtctcaa

SEQ ID NO: 639236 - DNA, 98 bp, Homo sapiens
tcaagcttctaacgatgtacggggacatgaaagtgcatcctttccctccaaaaaaaaagttgttcagcaccagcaaatccatcatgataatgtagacc

SEQ ID NO: 639237 - DNA, 221 bp, Homo sapiens
gagcccaggagttcaagaccagcatagtgaaaatgacaaaacccctgtctctacaaaaaatttaaaaaattcgccaggcatggtggtgcatgcctgtagtcccagctacttgggactgatatgggaggatcacctcagcctggacctccaggcacagtgatcctcctccctaaccctcccgggtaactgggactaaaggaatgcaccataatgcctgacta

SEQ ID NO: 639238 - DNA, 163 bp, Homo sapiens
  misc_feature (34)..(34): n is a, c, g, or t
  misc_feature (90)..(90): n is a, c, g, or t
  misc_feature (159)..(159): n is a, c, g, or t
cgggtagccactgctatgctcaatcgatcacgancctgtcacgcggacccccttagagttataaacccttaaaggggacaggcattgctnactcagggagctcggtttttggagacgtgagtccactgatgctcccagctgtgccctttccttccacgntcgg

SEQ ID NO: 639239 - DNA, 533 bp, Homo sapiens
ctccagatatgggacagcgggggaagtgggatccagcctttcatttatcctttcagcatttttgtcctctttactctgtgtacaaaaaagagaggattatactatcatagactgtgtttctaaacagaaactcaggctgggcacagtggaatacgcctgtaatcccagcactttgggaggcagaggcgggcggatgacttgaggtcaggagttctcaaccagcctggccattaatggtgaaaccccatctctactaaaaacacaaaaattaaccaggcgtggtggtgggcacctgtaatcctagctgcttgggaggctgaggcaggagaatgaatcgcttgaacccaggaggtggaggttgcagtgagccgagaccacaccattgcactctagcctgggcaacaagagcaaaactccgtctcaaaataaatacatacatacatacatgcatacatacatacagggattaaaatagtctagtactgacacctgaacagacagattgaaccggatagcttgccgggtaccgagct

SEQ ID NO: 639240 - DNA, 822 bp, Homo sapiens
  misc_feature (371)..(371): n is a, c, g, or t
agcgggccgctccgggggtggagtcacgggtcgcgactggcctaaggtcgccgcgagaacgtgccacgtggggatgagattcgctgggcgtggatagctggcggctgctgcggcgtaggtcccgacccacgtgaagcacagcctaactagtagctctcagacgtgcacaacctatggatctcgggaacaacgaccgagtgcggactctaggatacctgactgagggaccgtgcttgacccagagttgtgaacagtgcgtagcttcattccctcctgtactcctgagcgtactctgggctactttggaaggatgccagatgcaagtcagagagagctcggacacatgtgtgcataccaagctcgcttgaaanttcgctgaaagaaccaagggaccgctggaaatccacagccataggaaagctagacgcaagtccgcacgcctagcgcagtcacgccagatgaagcacttccacgacatcatcgggctaggccatctggaaaccagctagtatggtcgttagggggcggacgagagaggtgcccagcccgatgcgaggacacgaagctgcctgtgtcctgagcgcaaacactctgacctggtcacagccagagacacttggacaatcgctccatactccccggcgatggtcatgtcgatggctggcaggcagggacctagagctacttcatctcacggaatggcttgggcaggggggacatgatttctacttgatgacctccactgcatttgatataagtgacattgaaatggcagaagctaaatcccactgggggctgctccaggaaggctgttgctgccca

SEQ ID NO: 639241 - DNA, 140 bp, Homo sapiens
ggtttgtatagtctatcatatgtttctatatataccattcgtgttacctcatagaattcaagtatttatatatcaagatctggtatatctacacagtggttggacatctcgtttcacacatgagacatttcttcagaggt

SEQ ID NO: 639242 - DNA, 1028 bp, Homo sapiens
attggaaaagatctgggactatctgaaactagtgagaattaacaccaaacccaaaggccaggttaccagattacacatccccagctggtgcttccttactccaggaccacagctggaggatttctgcatgaagattcacaagaaatcttatcaacagaatttaaatatgctctggtgcctggggtctactctgctgaaacacaatacctcagaaagtagggtacagagaccactagcgttggaggatgaggatgtcaattcaaatctgtgcacagaagtgaatacctttcccttttcccatctgccggacgaaccacaacagcgttcccctatgatcaagcaccctaccccaggttctattctggtctcttggcacgtcactggagtcaggatccaggggacgggagatggagggcacccaaactgggaactatcatttgtcttaccttggtgtcagccttgtatgtcgagactgcatacaagagatctggctagggctgagtcgagactatcgatgcgaagacaagacaagacaagagaagacacacacataaaccaccatgataggacaagtccacagaccaagaaccagaagcaaacaaccatagagcccatagacaaagaagaaaaaacacagacatgataaagattcaaggatcaacgaggcaatacaaacccagaagatatttgaacggcggcggataccatacacagggcaaggcgattaaggcaagagccacaactcgaccccacaccgacacgaccctctcgtacacgattctcaggatgaaaaaaacccagagcaaagactagcacaacacaaagaggaaaaggataaaggaaaaaaaggatagaagggaacacccatacacagaggacccaaaaagaagaaatagcaacgcagaaccgaagacagcacatcacaaaaccacacaagagaagagacaagagatagacacgtgagcggagaaccccagaaaacgaatggagagagagacaacaaagaacacgcagacacatccacatag

SEQ ID NO: 639243 - DNA, 325 bp, Homo sapiens
tgaattactagtatcccctccccatgaaaaatggcttcctggccgggcgtggtggctcctgcctgtaatcccagcactttgggaggccgaggtgggcggatcacctgaggtcgggagtttgagaccagcctgaccaacatggagaaacccagtctctactgaaaatacagaaaagttagccaggcgtggtggcacatgcctgtaatcccagctgctcaggaggctgaggcaggagaattgcttgaacccaaaaggcggaggttgtggtgagccgagattgcacctttgtactccagcctgggcaacgagcaaaaaactctgtctc

SEQ ID NO: 639244 - DNA, 1153 bp, Homo sapiens
  misc_feature (390)..(390): n is a, c, g, or t
  misc_feature (492)..(492): n is a, c, g, or t
  misc_feature (528)..(528): n is a, c, g, or t
  misc_feature (592)..(592): n is a, c, g, or t
cctttgagaacctcataagcaacatgactttcatgctgcctttccagttcttcaaccctctgcctcctgcactgatagggtcattgcccgaacaatatatgttggagcagggtcatgaccaaagtcaggaccccaaacaggaagtccatgggcccttccctgacagcagcttcttaacttccagttccacaccatttcaggttgaaaaagatcagtgtttaaactgtccggatgctattactaaaaaagaagacagcacccatttaagtgactccagctcatacaacattgtcactaagtttgaaaggacacagttatcccctgaggccaaagtgaagcctgagaggaatagccttggtacaaagaagggccgggtgttctgcactgcangtgagaagaccttctatgacaaaggcaccctcaaaatccactacaatgccgtccacttgaagatcaagcataagtgcaccatcgaagggtgtaacatggtgntcagctccctaaggagccggaatcgccatagcgccnaccccaaccctcggctgcacatgccatgaacagaaataaccgggacaaagacctcaggaacagnctgaacctggccagctctgagaactacaagtgcccaggttcacagtgacgtccccagactgtaggcctcctcccagctaccctggttcaggagaggattccaaaggccaaccagccttcccaaacattgggcaaaatggtgtgctttttcccaacctaaagacagtccagccagtccttcctttctaccgcagtccagccacgccctgcccgaggtagcaaacacgcctgggatactcccttccctcccgctgttgtcctcttcaatcccagaacagctcatttcaaacgaaatgccatttgatgcccttcccaagaagaaatccaggaagtccagtatgcctatcaaaatagagaaagaagctgtggaaatagctaatgagaaaagacacaacctcagctcagatgaagacatgcccctacaggtggtcagtgaagatgagcaggaggcctgcagtcctcagtcacacagagtatctgaggagcagcatgtacagtcaggaggcttagggaagcctttccctgaaggggagaggccctgccatcgtgaatcagtaattga

SEQ ID NO: 639245 - DNA, 933 bp, Homo sapiens
  misc_feature (335)..(335): n is a, c, g, or t
  misc_feature (343)..(343): n is a, c, g, or t
  misc_feature (353)..(353): n is a, c, g, or t
  misc_feature (358)..(358): n is a, c, g, or t
  misc_feature (383)..(383): n is a, c, g, or t
  misc_feature (386)..(386): n is a, c, g, or t
  misc_feature (415)..(415): n is a, c, g, or t
  misc_feature (431)..(431): n is a, c, g, or t
  misc_feature (451)..(451): n is a, c, g, or t
caggtgataagtggtgttcaggtggaaaaggagggagctactctaaggctgagtggagcgacagtgcccaggggtctgagtctcacagcttgtaaagcctgagacagctgcctcgtgtgcgactgagatgcacagctgccttgtgtgcgctcctggaccgcggtggacacggcggctcagatctccgagcaaaagtcaatgatgcctctgaggcggagcaccagagagcctacctggaagacacacttgcgtggagtggctcccacaaatacctggagaaggggaaggagacgctgcttcacctggagcccccaaagacacacgtgactcaccancccatctntgaccatgangccancctgaggtgctgggccctgggcttntancctgcggagatcacactgacctggcagcnggatggagggccatanccaggcacgagctcgtgganaccaggcctgcaggggatgtgcaccttccagaagtgggctagactgtggtggtgccttctggagaggagcatagatacacgtgccaagtgcagccatgaggggctacccgatgcccggtcgaacctgaagatggaaagccggtccgttacccaggcgcatggcatcacccatcgtgggcatcattgtgtggacctggttctccttggaatctgtggtctctggaagctgtggttcgctgctgtgatatggacggaagaaagaactcatcgcggaccccggaggcatgccactctaacggctcgactggagcgacagtgcccacgggggtctagacatctcaccagcgttggtaaaagccttgagacaggctgccttgtgtgccgacttggagatgcccaggctgcccttgtgttgccaatttgaatgcgggatttccctcacgcttccctatgtgtttaggggacccggcgccctcttcgcc

SEQ ID NO: 639246 - DNA, 597 bp, Homo sapiens
ctttttactgggcagcatagagatgctaccctgtattcttcttgcaatgaaatagcagtaaataaaagattttatttctctttttgaactcaaaacatcagtaaattaaagatgaaaatcatgtttattgattcatagtggtggcaaaagagttggtgagcattgttcagcttttgaattaaatattatttttttaattcacagacaatagttgaacttgcagagacaggaagtctggacctcagtatattctgcagtacctgtttggtagtattttcttctttgttcttaccctcccttctcttcctcctgacagtggcatagcatagcgggtatggggtgtggggaaaaggaataattattttcaatgaacacattccctgcttcttgggctataaagaaggaaagcatgggttaacaggactgttctgcttcccaaggcgcttattcctcgatggtaggccttgactgtacttttgattcggaggtgccgtttatttgtattcattctctttctcttttctcgcttaaaatgttaataaattaaaaactaagtaataaagtatttcagatcaaaagatttataaatgattcccc

SEQ ID NO: 639247 - DNA, 190 bp, Homo sapiens
cgtccgaagtgcggtacgttgaggttgataactgttacgttgactccttcggcttaatgatctcatgaaggccaggcgtggtgactcatgcctgtaatcccagcattttgggaggccgaggcgggcggatcacctgaggtcaggagttcttctcccctaatttgcttaccccaacggtgaccggcgactt

SEQ ID NO: 639248 - DNA, 1416 bp, Homo sapiens
gtgtgagtatgcgtgtgtgtgatcgtatgcaatgtgctgtgatcatatgcgctgtggtgtgatcactatgtgcatatgcatgtgagcaggcaagtgtgtgacgctggacgttgctgagcagcgtgctgtcagcactgtgtgagcacagcatcatagctatatgcagctgtgtgctgcagcgatgctgctgcaggcagcaggcgataatgcgacgagtgcagacgggctgctgctgccagtgctgctgcagccaaggcctgctggtacaatggcattgcaagcaagcggtgctgcagccagagctgatgctgcgcatgctggagccactagcgagtcgcagcagctgctagctgtgcagacgctgctactggcacttatgccatatcctgcacggctgcggcagccagctgctagatggcaggcgctggctggtctgccagccggctagcttgcttgatcgcgagcctaggcagtcttgcctatcactcgccagcctgcggcacagcgttgctgccgctttgccgccaacaccacacgcatgcctgccaagccgcaacgctgctgcgcccgctcgtcacgcaccacggtagaccattcactgccccgttcactgcacgcttcgctaccgtaggcaagaccacctgtgaacacacaggccacggggcggacagccaccaccagcacgacccaggacagggtacgaaccggccacggggggccatgcgcacgacacgaaaccacacaccagaacacatggcacagaacagcgaccacacacgccacacgcccgtccgcccaaagaccaacgaccgagcccgaaccacacacccctcagacaagacgcacacacgcgcagcggccggacggccccgcccaagcgacgaccacgcccgagctcacccacagaaaacaaccgccagcgcgggacgcgggccacgcggccgcgcccgccgcacccttgcatcatcccgccagcacgaccgaccagccggcggcccccacgcacagagagaacgaccacaaggagcggccggcagatcagataaccccgagcagccaccgtcgagcacacacccaacgctcgaacgcagaagccacacccagccaccctgtccacaaatctacagaaccagaaccgaccacagcccgacgcaccgctacacgccgggctgacaggccgacggtttctagcctgcagccaccctgcggcggcaaccgcgcggccgtcctaccgcgcggcgctccaccaccagtgagcgccgggcacacgcacacgagcagacaagcggacgtggtgcactgacggcacggacacaggccagtacaaaagggatgcgccgcgagacaacagtgacgagcgcgggcgagtgggcaggccggagaggagccatgcgaggggggcgacgaggagcaggc

SEQ ID NO: 639249 - DNA, 199 bp, Homo sapiens
ccctccccagttacgacgtaccagtagactaagcaaaatttagactggagaagcacattttaaaaaattgaataacttaaaagtctccagttattaatttttatttattgctaactcaattggaagtaagactatgaaatatttcagtgatgttaccaaattccacaggatctactaggatacattcgatctactagga

SEQ ID NO: 639250 - DNA, 358 bp, Homo sapiens
atttgtcctaatgctctccttccccttggccccctgtcaggtcctggtgtgtgtgttgtttggccccccccgtgtccatgtgttcctattgttcatctcccatttatgagtgagaatatgtggtgtttggctttctcttcctgtgttagtttgctgaggatgatggtttccagcttcatccatgtccctgcagaggacatgatctcatccttttcatggctgcatagtattccgtgttgtgtatataccacattttctttatccagtctttcattggtggacatttgggttggtttcatgtctttgctattgtaaatagtgctgcaataaacattatgtgtgcatgtgaaaaaaaaaa

SEQ ID NO: 639251 - DNA, 793 bp, Homo sapiens
  misc_feature (33)..(33): n is a, c, g, or t
  misc_feature (68)..(68): n is a, c, g, or t
  misc_feature (77)..(77): n is a, c, g, or t
  misc_feature (96)..(96): n is a, c, g, or t
  misc_feature (110)..(110): n is a, c, g, or t
  misc_feature (122)..(122): n is a, c, g, or t
  misc_feature (138)..(138): n is a, c, g, or t
  misc_feature (140)..(140): n is a, c, g, or t
  misc_feature (186)..(186): n is a, c, g, or t
  misc_feature (205)..(205): n is a, c, g, or t
  misc_feature (242)..(242): n is a, c, g, or t
  misc_feature (257)..(257): n is a, c, g, or t
  misc_feature (280)..(280): n is a, c, g, or t
  misc_feature (287)..(287): n is a, c, g, or t
  misc_feature (290)..(290): n is a, c, g, or t
  misc_feature (305)..(305): n is a, c, g, or t
  misc_feature (308)..(308): n is a, c, g, or t
  misc_feature (310)..(310): n is a, c, g, or t
  misc_feature (312)..(312): n is a, c, g, or t
  misc_feature (334)..(334): n is a, c, g, or t
  misc_feature (356)..(356): n is a, c, g, or t
  misc_feature (363)..(363): n is a, c, g, or t
  misc_feature (381)..(381): n is a, c, g, or t
  misc_feature (408)..(408): n is a, c, g, or t
  misc_feature (419)..(419): n is a, c, g, or t
  misc_feature (422)..(422): n is a, c, g, or t
  misc_feature (429)..(429): n is a, c, g, or t
  misc_feature (569)..(569): n is a, c, g, or t
  misc_feature (629)..(629): n is a, c, g, or t
  misc_feature (683)..(683): n is a, c, g, or t
  misc_feature (688)..(688): n is a, c, g, or t
  misc_feature (717)..(717): n is a, c, g, or t
  misc_feature (727)..(727): n is a, c, g, or t
  misc_feature (784)..(784): n is a, c, g, or t
tcagaaacacacagctttatattattacaaaanagaaaaacacctcaccttgtctttgtttcgcagcncagacaganatcattttaagacagaggntcacataggcagtngtacacccagcngacaaacactttgggncngggtttcctcccccaaccacattacatcagctttgacacatctgtnaaacatcttctctgcgganagtcagaccctaaaggtcaaacccaggggggcacccnctccccaggccagcnactctaactcataaccctctgangacactnggnaaaggcaacacagcnggngngngcggtgctgcctcagcagtggngggctctggccccgccaaggcnggggggnctagggccgggcttctgngaagccatccagataggcaaggggganggggggggggngcngtggggntaaaagaacctgatgaaatgggagaaagcattaccttgggggttaccattttgaattattatataatcagactctagcctggcatcacggagactccaagagccacgggcaatgggaaagaagtgtacttcttgaatgcnattcaaagttatctgaacttttttcactgtttctagattccactttgcttgggaaactanaagaacttctttaatcagccatggccttccaaaaagtagagtgatgtggcaggnaaganagggacaagcaggcccacctggtaaaggntggctctganattagaacctgttggctgccctctccactgccagggaaggaagctggccatgcaggngaagaaagg

SEQ ID NO: 639252 - DNA, 1390 bp, Homo sapiens
  misc_feature (566)..(566): n is a, c, g, or t
ggtcgggcggcggctccagacgtgtgccgctatgggagttccggcgtttttccgatggctcagacggcaagtaccacgtcctatcatagtcaacatgcgttggaacgagaagctgacatagaattgcaaatggtgtaagacgagttccgacgattgcaatgcgcaggtaaaacacttaactgcgaagactgcaatggtggcacggttctgagtacaattctgatattatgcgaatactgtacaatggacactcgagtacacaatcctcgcgtcgataccttcattgctcatcgcaatgtggacacacccgacgtctaccccagaaatacaagttggagaaggaatcggataagtagcagtcgaggtattggcaactatatgttcgtacggtaaactagtatgagctaggactctgtttcaagataatttgttaatgaacactgagacagcacaatgcacctgtcagtctatcacaaatggcggcgacacgtcacggcaaattggcgaaagcgtagagcttgactcacacgcggatcgcggtcacacaccaagtggcacacacgcangccacagcccggttcctcacaccgcgccacgcggtctccatcggggaccagtcgcaccacaagagcacacggggaaagtggcacagcacgagaccaagcgttcgaacggagaagcccatggcagacagttttcccgggtgccatacgcgacgacactcaatttcggacgagagaccaggggttggaggccattcttggctttgcaacgtcgccgagggaagacgctatggacttaaacaaagcggagacagaggcactcctcttgcactccaaagcaaactccctgggtaacattgaaccaatccacaaccgggcacacatccttcggcatcagtgtccaatggggggagcctagacatcggtatggacatccaatactcgtggcgttttgcgtcgtgaatcttcaccacttagcgccttcgaattcccggtctacaagagattgcgcatggacccccttggggggcttgcggcacaacgccattctttgagccagggtaattaattcggaatgcctttgaattggccttacggtcggcattccgctaggctcgccaacgggaacgagctgacttcgaacatctcactgggcactttaccagtctcaggcagcgcgcaacactggcaggccgcatcgcccttgaggccagtgaaccccaaagaggtagcgtcaaatccatttgccttccatcgtcgcggagccacagaatgtgcctggagatcctgtcaatgcagtgtccttggacactggtccctcaccacgcgtaacacccgagaaattttacgcccatcgaagtcacgacacgaaggtacatacatagagc
